United States Patent Application Publication US 2019/0016770 A1 - sequence listing, part 4

SEQ ID NO: 36376 - protein, 36 aa, Artificial Sequence; identical to SEQ ID NO: 10321
  GFR-binding peptide
  MOD_RES (1)..(35): Xaa is C or S
  MOD_RES (13)..(14)..(15)..(16)..(17): Xaa is A or G
  MOD_RES (18)..(19)..(20)..(21): Xaa is A or G or is absent

SEQ ID NO: 36377 - protein, 37 aa, Artificial Sequence; identical to SEQ ID NO: 12211
  GFR-binding peptide
  MOD_RES (2)..(4)..(36)..(37): Xaa is C or S

SEQ ID NO: 36378 - protein, 38 aa, Artificial Sequence; identical to SEQ ID NO: 10322
  GFR-binding peptide
  MOD_RES (2)..(4)..(38): Xaa is C or S
  MOD_RES (16)..(17)..(18)..(19)..(20): Xaa is A or G
  MOD_RES (21)..(22)..(23)..(24): Xaa is A or G or is absent

SEQ ID NO: 36379 - protein, 38 aa, Artificial Sequence; identical to SEQ ID NO: 2855
  GFR-binding peptide
  MOD_RES (2)..(4)..(36)..(37): Xaa is C or S

SEQ ID NO: 36380 - protein, 37 aa, Artificial Sequence; identical to SEQ ID NO: 12213
  GFR-binding peptide
  MOD_RES (2)..(34)..(35): Xaa is C or S

SEQ ID NO: 36381 - protein, 40 aa, Artificial Sequence; identical to SEQ ID NO: 4777
  GFR-binding peptide
  MOD_RES (2)..(4)..(35)..(36): Xaa is C or S

SEQ ID NO: 36382 - protein, 36 aa, Artificial Sequence; identical to SEQ ID NO: 12215
  GFR-binding peptide
  MOD_RES (1)..(32)..(33): Xaa is C or S

SEQ ID NO: 36383 - protein, 38 aa, Artificial Sequence; identical to SEQ ID NO: 10324
  GFR-binding peptide
  MOD_RES (1)..(33)..(34): Xaa is C or S

SEQ ID NO: 36384 - protein, 36 aa, Artificial Sequence
  GFR-binding peptide
  MOD_RES (1)..(3)..(36): Xaa is C or S
  MOD_RES (14)..(15)..(16)..(17)..(18): Xaa is A or G
  MOD_RES (19)..(20)..(21)..(22): Xaa is A or G or is absent
XKXSKVIMNSLQEXXXXXXXXXYYLITLPELDQSVX

SEQ ID NO: 36385 - protein, 35 aa, Artificial Sequence; identical to SEQ ID NO: 10328
  GFR-binding peptide
  MOD_RES (31)..(32): Xaa is C or S

SEQ ID NO: 36386 - protein, 44 aa, Artificial Sequence; identical to SEQ ID NO: 2864
  GFR-binding peptide
  MOD_RES (2)..(4)..(38): Xaa is C or S
  MOD_RES (16)..(17)..(18)..(19)..(20): Xaa is A or G
  MOD_RES (21)..(22)..(23)..(24): Xaa is A or G or is absent

SEQ ID NO: 36387 - protein, 36 aa, Artificial Sequence; identical to SEQ ID NO: 12218
  GFR-binding peptide
  MOD_RES (2)..(35)..(36): Xaa is C or S
  MOD_RES (13)..(14)..(15)..(16)..(17): Xaa is A or G
  MOD_RES (18)..(19)..(20)..(21): Xaa is A or G or is absent

SEQ ID NO: 36388 - protein, 34 aa, Artificial Sequence; identical to SEQ ID NO: 12219
  GFR-binding peptide
  MOD_RES (2)..(2): Xaa is C or S
  MOD_RES (13)..(14)..(15)..(16)..(17): Xaa is A or G
  MOD_RES (18)..(19)..(20)..(21): Xaa is A or G or is absent

SEQ ID NO: 36389 - protein, 36 aa, Artificial Sequence; identical to SEQ ID NO: 12220
  GFR-binding peptide
  MOD_RES (32)..(33): Xaa is C or S

SEQ ID NO: 36390 - protein, 34 aa, Artificial Sequence; identical to SEQ ID NO: 12221
  GFR-binding peptide
  MOD_RES (31)..(32): Xaa is C or S

SEQ ID NO: 36391 - protein, 35 aa, Artificial Sequence; identical to SEQ ID NO: 12222
  GFR-binding peptide
  MOD_RES (2)..(35): Xaa is C or S
  MOD_RES (13)..(14)..(15)..(16)..(17): Xaa is A or G
  MOD_RES (18)..(19)..(20)..(21): Xaa is A or G or is absent

SEQ ID NO: 36392 - protein, 35 aa, Artificial Sequence; identical to SEQ ID NO: 4789
  GFR-binding peptide
  MOD_RES (1)..(35): Xaa is C or S
  MOD_RES (13)..(14)..(15)..(16)..(17): Xaa is A or G
  MOD_RES (18)..(19)..(20)..(21): Xaa is A or G or is absent

SEQ ID NO: 36393 - protein, 34 aa, Artificial Sequence; identical to SEQ ID NO: 12224
  GFR-binding peptide
  MOD_RES (31)..(32): Xaa is C or S

SEQ ID NO: 36394 - protein, 39 aa, Artificial Sequence; identical to SEQ ID NO: 12225
  GFR-binding peptide
  MOD_RES (2)..(4)..(38)..(39): Xaa is C or S
  MOD_RES (16)..(17)..(18)..(19)..(20): Xaa is A or G
  MOD_RES (21)..(22)..(23)..(24): Xaa is A or G or is absent

SEQ ID NO: 36395 - protein, 39 aa, Artificial Sequence; identical to SEQ ID NO: 2870
  GFR-binding peptide
  MOD_RES (1)..(34)..(35): Xaa is C or S
  MOD_RES (12)..(13)..(14)..(15)..(16): Xaa is A or G
  MOD_RES (17)..(18)..(19)..(20): Xaa is A or G or is absent

SEQ ID NO: 36396 - protein, 35 aa, Artificial Sequence; identical to SEQ ID NO: 2871
  GFR-binding peptide
  MOD_RES (1)..(34)..(35): Xaa is C or S
  MOD_RES (12)..(13)..(14)..(15)..(16): Xaa is A or G
  MOD_RES (17)..(18)..(19)..(20): Xaa is A or G or is absent

SEQ ID NO: 36397 - protein, 40 aa, Artificial Sequence; identical to SEQ ID NO: 10334
  GFR-binding peptide
  MOD_RES (1)..(3)..(37)..(38): Xaa is C or S
  MOD_RES (15)..(16)..(17)..(18)..(19): Xaa is A or G
  MOD_RES (20)..(21)..(22)..(23): Xaa is A or G or is absent

SEQ ID NO: 36398 - protein, 36 aa, Artificial Sequence; identical to SEQ ID NO: 10335
  GFR-binding peptide
  MOD_RES (2)..(4): Xaa is C or S
  MOD_RES (15)..(16)..(17)..(18)..(19): Xaa is A or G
  MOD_RES (20)..(21)..(22)..(23): Xaa is A or G or is absent

SEQ ID NO: 36399 - protein, 34 aa, Artificial Sequence; identical to SEQ ID NO: 10336
  GFR-binding peptide
  MOD_RES (1)..(3)..(34): Xaa is C or S

SEQ ID NO: 36400 - protein, 33 aa, Artificial Sequence; identical to SEQ ID NO: 12228
  GFR-binding peptide
  MOD_RES (1)..(33): Xaa is C or S

SEQ ID NO: 36401 - protein, 43 aa, Artificial Sequence; identical to SEQ ID NO: 12229
  GFR-binding peptide
  MOD_RES (2)..(4)..(37)..(38): Xaa is C or S
  MOD_RES (15)..(16)..(17)..(18)..(19): Xaa is A or G
  MOD_RES (20)..(21)..(22)..(23): Xaa is A or G or is absent

SEQ ID NO: 36402 - protein, 36 aa, Artificial Sequence; identical to SEQ ID NO: 12230
  GFR-binding peptide
  MOD_RES (1)..(33)..(34): Xaa is C or S

SEQ ID NO: 36403 - protein, 34 aa, Artificial Sequence; identical to SEQ ID NO: 12231
  GFR-binding peptide
  MOD_RES (31)..(32): Xaa is C or S

SEQ ID NO: 36404 - protein, 38 aa, Artificial Sequence; identical to SEQ ID NO: 10337
  GFR-binding peptide
  MOD_RES (2)..(4)..(36)..(37): Xaa is C or S

SEQ ID NO: 36405 - protein, 40 aa, Artificial Sequence; identical to SEQ ID NO: 10338
  GFR-binding peptide
  MOD_RES (2)..(4)..(38)..(39): Xaa is C or S
  MOD_RES (16)..(17)..(18)..(19)..(20): Xaa is A or G
  MOD_RES (21)..(22)..(23)..(24): Xaa is A or G or is absent

SEQ ID NO: 36406 - protein, 38 aa, Artificial Sequence; identical to SEQ ID NO: 10339
  GFR-binding peptide
  MOD_RES (1)..(35): Xaa is C or S
  MOD_RES (13)..(14)..(15)..(16)..(17): Xaa is A or G
  MOD_RES (18)..(19)..(20)..(21): Xaa is A or G or is absent

SEQ ID NO: 36407 - protein, 36 aa, Artificial Sequence; identical to SEQ ID NO: 12233
  GFR-binding peptide
  MOD_RES (31)..(32): Xaa is C or S

SEQ ID NO: 36408 - protein, 39 aa, Artificial Sequence; identical to SEQ ID NO: 12234
  GFR-binding peptide
  MOD_RES (2)..(4)..(38)..(39): Xaa is C or S
  MOD_RES (16)..(17)..(18)..(19)..(20): Xaa is A or G
  MOD_RES (21)..(22)..(23)..(24): Xaa is A or G or is absent

SEQ ID NO: 36409 - protein, 36 aa, Artificial Sequence; identical to SEQ ID NO: 12236
  GFR-binding peptide
  MOD_RES (2)..(34)..(35): Xaa is C or S

SEQ ID NO: 36410 - protein, 40 aa, Artificial Sequence; identical to SEQ ID NO: 12237
  GFR-binding peptide
  MOD_RES (1)..(35)..(36): Xaa is C or S
  MOD_RES (13)..(14)..(15)..(16)..(17): Xaa is A or G
  MOD_RES (18)..(19)..(20)..(21): Xaa is A or G or is absent

SEQ ID NO: 36411 - protein, 40 aa, Artificial Sequence; identical to SEQ ID NO: 12238
  GFR-binding peptide
  MOD_RES (2)..(36)..(37): Xaa is C or S
  MOD_RES (14)..(15)..(16)..(17)..(18): Xaa is A or G
  MOD_RES (19)..(20)..(21)..(22): Xaa is A or G or is absent

SEQ ID NO: 36412 - protein, 38 aa, Artificial Sequence; identical to SEQ ID NO: 12239
  GFR-binding peptide
  MOD_RES (1)..(3)..(36)..(37): Xaa is C or S
  MOD_RES (14)..(15)..(16)..(17)..(18): Xaa is A or G
  MOD_RES (19)..(20)..(21)..(22): Xaa is A or G or is absent

SEQ ID NO: 36413 - protein, 39 aa, Artificial Sequence; identical to SEQ ID NO: 12240
  GFR-binding peptide
  MOD_RES (1)..(33)..(34): Xaa is C or S

SEQ ID NO: 36414 - protein, 35 aa, Artificial Sequence; identical to SEQ ID NO: 12241
  GFR-binding peptide
  MOD_RES (34)..(35): Xaa is C or S
  MOD_RES (12)..(13)..(14)..(15)..(16): Xaa is A or G
  MOD_RES (17)..(18)..(19)..(20): Xaa is A or G or is absent

SEQ ID NO: 36415 - protein, 33 aa, Artificial Sequence; identical to SEQ ID NO: 10343
  GFR-binding peptide
  MOD_RES (12)..(13)..(14)..(15)..(16): Xaa is A or G
  MOD_RES (17)..(18)..(19)..(20): Xaa is A or G or is absent

SEQ ID NO: 36416 - protein, 41 aa, Artificial Sequence; identical to SEQ ID NO: 10344
  GFR-binding peptide
  MOD_RES (2)..(4)..(36)..(37): Xaa is C or S

SEQ ID NO: 36417 - protein, 39 aa, Artificial Sequence; identical to SEQ ID NO: 12242
  GFR-binding peptide
  MOD_RES (2)..(4)..(35)..(36): Xaa is C or S

SEQ ID NO: 36418 - protein, 39 aa, Artificial Sequence; identical to SEQ ID NO: 12243
  GFR-binding peptide
  MOD_RES (1)..(33)..(34): Xaa is C or S

SEQ ID NO: 36419 - protein, 44 aa, Artificial Sequence; identical to SEQ ID NO: 12244
  GFR-binding peptide
  MOD_RES (2)..(4)..(38)..(39): Xaa is C or S
  MOD_RES (16)..(17)..(18)..(19)..(20): Xaa is A or G
  MOD_RES (21)..(22)..(23)..(24): Xaa is A or G or is absent

SEQ ID NO: 36420 - protein, 38 aa, Artificial Sequence; identical to SEQ ID NO: 12245
  GFR-binding peptide
  MOD_RES (1)..(3)..(34)..(35): Xaa is C or S

SEQ ID NO: 36421 - protein, 37 aa, Artificial Sequence; identical to SEQ ID NO: 12246
  GFR-binding peptide
  MOD_RES (1)..(3)..(36)..(37): Xaa is C or S
  MOD_RES (14)..(15)..(16)..(17)..(18): Xaa is A or G
  MOD_RES (19)..(20)..(21)..(22): Xaa is A or G or is absent

SEQ ID NO: 36422 - protein, 37 aa, Artificial Sequence; identical to SEQ ID NO: 10347
  GFR-binding peptide
  MOD_RES (2)..(4)..(35)..(36): Xaa is C or S

SEQ ID NO: 36423 - protein, 37 aa, Artificial Sequence; identical to SEQ ID NO: 10349
  GFR-binding peptide
  MOD_RES (32)..(33): Xaa is C or S

SEQ ID NO: 36424 - protein, 37 aa, Artificial Sequence; identical to SEQ ID NO: 12247
  GFR-binding peptide
  MOD_RES (2)..(34)..(35): Xaa is C or S

SEQ ID NO: 36425 - protein, 37 aa, Artificial Sequence; identical to SEQ ID NO: 12248
  GFR-binding peptide
  MOD_RES (31)..(32): Xaa is C or S

SEQ ID NO: 36426 - protein, 38 aa, Artificial Sequence; identical to SEQ ID NO: 12250
  GFR-binding peptide
  MOD_RES (34)..(35): Xaa is C or S
  MOD_RES (12)..(13)..(14)..(15)..(16): Xaa is A or G
  MOD_RES (17)..(18)..(19)..(20): Xaa is A or G or is absent

SEQ ID NO: 36427 - protein, 32 aa, Artificial Sequence; identical to SEQ ID NO: 12251
  GFR-binding peptide
  MOD_RES (32)..(32): Xaa is C or S

SEQ ID NO: 36428 - protein, 39 aa, Artificial Sequence; identical to SEQ ID NO: 12252
  GFR-binding peptide
  MOD_RES (1)..(3)..(35)..(36): Xaa is C or S

SEQ ID NO: 36429 - protein, 41 aa, Artificial Sequence; identical to SEQ ID NO: 10351
  GFR-binding peptide
  MOD_RES (2)..(4)..(38)..(39): Xaa is C or S
  MOD_RES (16)..(17)..(18)..(19)..(20): Xaa is A or G
  MOD_RES (21)..(22)..(23)..(24): Xaa is A or G or is absent

SEQ ID NO: 36430 - protein, 39 aa, Artificial Sequence; identical to SEQ ID NO: 10352
  GFR-binding peptide
  MOD_RES (1)..(3)..(35)..(36): Xaa is C or S

SEQ ID NO: 36431 - protein, 32 aa, Artificial Sequence; identical to SEQ ID NO: 10354
  GFR-binding peptide
  MOD_RES (31)..(32): Xaa is C or S

SEQ ID NO: 36432 - protein, 37 aa, Artificial Sequence
  GFR-binding peptide
  MOD_RES (1)..(3)..(34)..(35): Xaa is C or S
XKXSKVIMNSLQEIKPTKGIYYLITLPELDQSVXXPS

SEQ ID NO: 36433 - protein, 41 aa, Artificial Sequence; identical to SEQ ID NO: 12255
  GFR-binding peptide
  MOD_RES (2)..(36)..(37): Xaa is C or S
  MOD_RES (14)..(15)..(16)..(17)..(18): Xaa is A or G
  MOD_RES (19)..(20)..(21)..(22): Xaa is A or G or is absent

SEQ ID NO: 36434 - protein, 37 aa, Artificial Sequence; identical to SEQ ID NO: 4825
  GFR-binding peptide
  MOD_RES (32)..(33): Xaa is C or S

SEQ ID NO: 36435 - protein, 35 aa, Artificial Sequence; identical to SEQ ID NO: 10355
  GFR-binding peptide
  MOD_RES (1)..(3): Xaa is C or S
  MOD_RES (14)..(15)..(16)..(17)..(18): Xaa is A or G
  MOD_RES (19)..(20)..(21)..(22): Xaa is A or G or is absent

SEQ ID NO: 36436 - protein, 33 aa, Artificial Sequence; identical to SEQ ID NO: 4827
  GFR-binding peptide
  MOD_RES (1)..(32)..(33): Xaa is C or S

SEQ ID NO: 36437 - protein, 36 aa, Artificial Sequence; identical to SEQ ID NO: 4829
  GFR-binding peptide
  MOD_RES (2)..(34)..(35): Xaa is C or S

SEQ ID NO: 36438 - protein, 37 aa, Artificial Sequence; identical to SEQ ID NO: 2894
  GFR-binding peptide
  MOD_RES (2)..(35)..(36): Xaa is C or S
  MOD_RES (13)..(14)..(15)..(16)..(17): Xaa is A or G
  MOD_RES (18)..(19)..(20)..(21): Xaa is A or G or is absent

SEQ ID NO: 36439 - protein, 39 aa, Artificial Sequence; identical to SEQ ID NO: 10357
  GFR-binding peptide
  MOD_RES (1)..(35)..(36): Xaa is C or S
  MOD_RES (13)..(14)..(15)..(16)..(17): Xaa is A or G
  MOD_RES (18)..(19)..(20)..(21): Xaa is A or G or is absent

SEQ ID NO: 36440 - protein, 32 aa, Artificial Sequence; identical to SEQ ID NO: 12263
  GFR-binding peptide
  MOD_RES (1)..(1): Xaa is C or S

SEQ ID NO: 36441 - protein, 39 aa, Artificial Sequence; identical to SEQ ID NO: 12265
  GFR-binding peptide
  MOD_RES (2)..(4)..(38)..(39): Xaa is C or S
  MOD_RES (16)..(17)..(18)..(19)..(20): Xaa is A or G
  MOD_RES (21)..(22)..(23)..(24): Xaa is A or G or is absent

SEQ ID NO: 36442 - protein, 41 aa, Artificial Sequence; identical to SEQ ID NO: 12266
  GFR-binding peptide
  MOD_RES (1)..(3)..(37)..(38): Xaa is C or S
  MOD_RES (15)..(16)..(17)..(18)..(19): Xaa is A or G
  MOD_RES (20)..(21)..(22)..(23): Xaa is A or G or is absent

SEQ ID NO: 36443 - protein, 37 aa, Artificial Sequence; identical to SEQ ID NO: 10358
  GFR-binding peptide
  MOD_RES (1)..(35)..(36): Xaa is C or S
  MOD_RES (13)..(14)..(15)..(16)..(17): Xaa is A or G
  MOD_RES (18)..(19)..(20)..(21): Xaa is A or G or is absent

SEQ ID NO: 36444 - protein, 34 aa, Artificial Sequence; identical to SEQ ID NO: 10359
  GFR-binding peptide
  MOD_RES (33)..(33): Xaa is C or S
  MOD_RES (11)..(12)..(13)..(14)..(15): Xaa is A or G
  MOD_RES (16)..(17)..(18)..(19): Xaa is A or G or is absent

SEQ ID NO: 36445 - protein, 37 aa, Artificial Sequence; identical to SEQ ID NO: 2896
  GFR-binding peptide
  MOD_RES (2)..(4)..(35)..(36): Xaa is C or S

SEQ ID NO: 36446 - protein, 38 aa, Artificial Sequence; identical to SEQ ID NO: 4837
  GFR-binding peptide
  MOD_RES (2)..(4)..(37)..(38): Xaa is C or S
  MOD_RES (15)..(16)..(17)..(18)..(19): Xaa is A or G
  MOD_RES (20)..(21)..(22)..(23): Xaa is A or G or is absent

SEQ ID NO: 36447 - protein, 38 aa, Artificial Sequence; identical to SEQ ID NO: 10361
  GFR-binding peptide
  MOD_RES (32)..(33): Xaa is C or S

SEQ ID NO: 36448 - protein, 43 aa, Artificial Sequence; identical to SEQ ID NO: 12270
  GFR-binding peptide
  MOD_RES (1)..(3)..(37)..(38): Xaa is C or S
  MOD_RES (15)..(16)..(17)..(18)..(19): Xaa is A or G
  MOD_RES (20)..(21)..(22)..(23): Xaa is A or G or is absent

SEQ ID NO: 36449 - protein, 34 aa, Artificial Sequence; identical to SEQ ID NO: 12271
  GFR-binding peptide
  MOD_RES (33)..(34): Xaa is C or S
  MOD_RES (11)..(12)..(13)..(14)..(15): Xaa is A or G
  MOD_RES (16)..(17)..(18)..(19): Xaa is A or G or is absent

SEQ ID NO: 36450 - protein, 36 aa, Artificial Sequence; identical to SEQ ID NO: 10362
  GFR-binding peptide
  MOD_RES (2)..(34)..(35): Xaa is C or S

SEQ ID NO: 36451 - protein, 34 aa, Artificial Sequence; identical to SEQ ID NO: 10364
  GFR-binding peptide
  MOD_RES (2)..(34): Xaa is C or S

SEQ ID NO: 36452 - protein, 36 aa, Artificial Sequence; identical to SEQ ID NO: 10365
  GFR-binding peptide
  MOD_RES (1)..(35)..(36): Xaa is C or S
  MOD_RES (13)..(14)..(15)..(16)..(17): Xaa is A or G
  MOD_RES (18)..(19)..(20)..(21): Xaa is A or G or is absent

SEQ ID NO: 36453 - protein, 35 aa, Artificial Sequence; identical to SEQ ID NO: 12273
  GFR-binding peptide
  MOD_RES (2)..(34)..(35): Xaa is C or S

SEQ ID NO: 36454 - protein, 44 aa, Artificial Sequence; identical to SEQ ID NO: 10366
  GFR-binding peptide
  MOD_RES (2)..(4)..(38)..(39): Xaa is C or S
  MOD_RES (16)..(17)..(18)..(19)..(20): Xaa is A or G
  MOD_RES (21)..(22)..(23)..(24): Xaa is A or G or is absent

SEQ ID NO: 36455 - protein, 41 aa, Artificial Sequence; identical to SEQ ID NO: 10368
  GFR-binding peptide
  MOD_RES (2)..(36)..(37): Xaa is C or S
  MOD_RES (14)..(15)..(16)..(17)..(18): Xaa is A or G
  MOD_RES (19)..(20)..(21)..(22): Xaa is A or G or is absent

SEQ ID NO: 36456 - protein, 32 aa, Artificial Sequence
  GFR-binding peptide
  MOD_RES (1)..(32): Xaa is C or S
XSKVIMNSLQEIKPTKGIYYLITLPELDQSVX

SEQ ID NO: 36457 - protein, 33 aa, Artificial Sequence; identical to SEQ ID NO: 12276
  GFR-binding peptide
  MOD_RES (32)..(32): Xaa is C or S

SEQ ID NO: 36458 - protein, 37 aa, Artificial Sequence; identical to SEQ ID NO: 12277
  GFR-binding peptide
  MOD_RES (1)..(3)..(36)..(37): Xaa is C or S
  MOD_RES (14)..(15)..(16)..(17)..(18): Xaa is A or G
  MOD_RES (19)..(20)..(21)..(22): Xaa is A or G or is absent

SEQ ID NO: 36459 - protein, 33 aa, Artificial Sequence; identical to SEQ ID NO: 10369
  GFR-binding peptide
  MOD_RES (1)..(32)..(33): Xaa is C or S

SEQ ID NO: 36460 - protein, 39 aa, Artificial Sequence; identical to SEQ ID NO: 12279
  GFR-binding peptide
  MOD_RES (2)..(33)..(34): Xaa is C or S

SEQ ID NO: 36461 - protein, 34 aa, Artificial Sequence; identical to SEQ ID NO: 12280
  GFR-binding peptide
  MOD_RES (2)..(4): Xaa is C or S

SEQ ID NO: 36462 - protein, 38 aa, Artificial Sequence; identical to SEQ ID NO: 10372
  GFR-binding peptide
  MOD_RES (1)..(3)..(34)..(35): Xaa is C or S

SEQ ID NO: 36463 - protein, 41 aa, Artificial Sequence
  GFR-binding peptide
  MOD_RES (1)..(3)..(36)..(37): Xaa is C or S
  MOD_RES (14)..(15)..(16)..(17)..(18): Xaa is A or G
  MOD_RES (19)..(20)..(21)..(22): Xaa is A or G or is absent
XKXSKVIMNSLQEXXXXXXXXXYYLITLPELDQSVXXPSAS

SEQ ID NO: 36464 - protein, 37 aa, Artificial Sequence; identical to SEQ ID NO: 10373
  GFR-binding peptide
  MOD_RES (1)..(33)..(34): Xaa is C or S

SEQ ID NO: 36465 - protein, 32 aa, Artificial Sequence; identical to SEQ ID NO: 4852
  GFR-binding peptide
  MOD_RES (32)..(32): Xaa is C or S

SEQ ID NO: 36466 - protein, 35 aa, Artificial Sequence; identical to SEQ ID NO: 12285
  GFR-binding peptide
  MOD_RES (31)..(32): Xaa is C or S

SEQ ID NO: 36467 - protein, 36 aa, Artificial Sequence; identical to SEQ ID NO: 10376
  GFR-binding peptide
  MOD_RES (31)..(32): Xaa is C or S

SEQ ID NO: 36468 - protein, 38 aa, Artificial Sequence; identical to SEQ ID NO: 10377
  GFR-binding peptide
  MOD_RES (1)..(3)..(35): Xaa is C or S

SEQ ID NO: 36469 - protein, 39 aa, Artificial Sequence; identical to SEQ ID NO: 10378
  GFR-binding peptide
  MOD_RES (2)..(4)..(36)..(37): Xaa is C or S

SEQ ID NO: 36470 - protein, 39 aa, Artificial Sequence; identical to SEQ ID NO: 12286
  GFR-binding peptide
  MOD_RES (1)..(3)..(37)..(38): Xaa is C or S
  MOD_RES (15)..(16)..(17)..(18)..(19): Xaa is A or G
  MOD_RES (20)..(21)..(22)..(23): Xaa is A or G or is absent

SEQ ID NO: 36471 - protein, 42 aa, Artificial Sequence; identical to SEQ ID NO: 2913
  GFR-binding peptide
  MOD_RES (2)..(4)..(37)..(38): Xaa is C or S
  MOD_RES (15)..(16)..(17)..(18)..(19): Xaa is A or G
  MOD_RES (20)..(21)..(22)..(23): Xaa is A or G or is absent

SEQ ID NO: 36472 - protein, 42 aa, Artificial Sequence; identical to SEQ ID NO: 10380
  GFR-binding peptide
  MOD_RES (2)..(4)..(36)..(37): Xaa is C or S

SEQ ID NO: 36473 - protein, 38 aa, Artificial Sequence; identical to SEQ ID NO: 10381
  GFR-binding peptide
  MOD_RES (1)..(3)..(35)..(36): Xaa is C or S

SEQ ID NO: 36474 - protein, 41 aa, Artificial Sequence; identical to SEQ ID NO: 4860
  GFR-binding peptide
  MOD_RES (1)..(35)..(36): Xaa is C or S
  MOD_RES (13)..(14)..(15)..(16)..(17): Xaa is A or G
  MOD_RES (18)..(19)..(20)..(21): Xaa is A or G or is absent

SEQ ID NO: 36475 - protein, 36 aa, Artificial Sequence; identical to SEQ ID NO: 12289
  GFR-binding peptide
  MOD_RES (1)..(3)..(34)..(35): Xaa is C or S

SEQ ID NO: 36476 - protein, 35 aa, Artificial Sequence; identical to SEQ ID NO: 10383
  GFR-binding peptide
  MOD_RES (2)..(2): Xaa is C or S
  MOD_RES (14)..(15)..(16)..(17)..(18): Xaa is A or G
  MOD_RES (19)..(20)..(21)..(22): Xaa is A or G or is absent

SEQ ID NO: 36477 - protein, 32 aa, Artificial Sequence; identical to SEQ ID NO: 4862
  GFR-binding peptide
  MOD_RES (32)..(32): Xaa is C or S

SEQ ID NO: 36478 - protein, 35 aa, Artificial Sequence; identical to SEQ ID NO: 2918
  GFR-binding peptide
  MOD_RES (33)..(34): Xaa is C or S
  MOD_RES (11)..(12)..(13)..(14)..(15): Xaa is A or G
  MOD_RES (16)..(17)..(18)..(19): Xaa is A or G or is absent

SEQ ID NO: 36479 - protein, 37 aa, Artificial Sequence; identical to SEQ ID NO: 2920
  GFR-binding peptide
  MOD_RES (32)..(33): Xaa is C or S

SEQ ID NO: 36480 - protein, 42 aa, Artificial Sequence; identical to SEQ ID NO: 10387
  GFR-binding peptide
  MOD_RES (2)..(4)..(36): Xaa is C or S

SEQ ID NO: 36481 - protein, 37 aa, Artificial Sequence; identical to SEQ ID NO: 4867
  GFR-binding peptide
  MOD_RES (2)..(4): Xaa is C or S
  MOD_RES (16)..(17)..(18)..(19)..(20): Xaa is A or G
  MOD_RES (21)..(22)..(23)..(24): Xaa is A or G or is absent

SEQ ID NO: 36482 - protein, 40 aa, Artificial Sequence; identical to SEQ ID NO: 10388
  GFR-binding peptide
  MOD_RES (2)..(34)..(35): Xaa is C or S

SEQ ID NO: 36483 - protein, 40 aa, Artificial Sequence; identical to SEQ ID NO: 4870
  GFR-binding peptide
  MOD_RES (2)..(34)..(35): Xaa is C or S

SEQ ID NO: 36484 - protein, 34 aa, Artificial Sequence; identical to SEQ ID NO: 12298
  GFR-binding peptide
  MOD_RES (2)..(2): Xaa is C or S
  MOD_RES (13)..(14)..(15)..(16)..(17): Xaa is A or G
  MOD_RES (18)..(19)..(20)..(21): Xaa is A or G or is absent

SEQ ID NO: 36485 - protein, 38 aa, Artificial Sequence; identical to SEQ ID NO: 12299
  GFR-binding peptide
  MOD_RES (1)..(33)..(34): Xaa is C or S

SEQ ID NO: 36486 - protein, 38 aa, Artificial Sequence; identical to SEQ ID NO: 12300
  GFR-binding peptide
  MOD_RES (2)..(4)..(37)..(38): Xaa is C or S
  MOD_RES (15)..(16)..(17)..(18)..(19): Xaa is A or G
  MOD_RES (20)..(21)..(22)..(23): Xaa is A or G or is absent

SEQ ID NO: 36487 - protein, 40 aa, Artificial Sequence; identical to SEQ ID NO: 2924
  GFR-binding peptide
  MOD_RES (2)..(4)..(37)..(38): Xaa is C or S
  MOD_RES (15)..(16)..(17)..(18)..(19): Xaa is A or G
  MOD_RES (20)..(21)..(22)..(23): Xaa is A or G or is absent

SEQ ID NO: 36488 - protein, 38 aa, Artificial Sequence; identical to SEQ ID NO: 10390
  GFR-binding peptide
  MOD_RES (1)..(32)..(33): Xaa is C or S

SEQ ID NO: 36489 - protein, 37 aa, Artificial Sequence; identical to SEQ ID NO: 12301
  GFR-binding peptide
  MOD_RES (1)..(33)..(34): Xaa is C or S

SEQ ID NO: 36490 - protein, 35 aa, Artificial Sequence; identical to SEQ ID NO: 12302
  GFR-binding peptide
  MOD_RES (1)..(32)..(33): Xaa is C or S

SEQ ID NO: 36491 - protein, 35 aa, Artificial Sequence; identical to SEQ ID NO: 12303
  GFR-binding peptide
  MOD_RES (31)..(32): Xaa is C or S

SEQ ID NO: 36492 - protein, 33 aa, Artificial Sequence; identical to SEQ ID NO: 10393
  GFR-binding peptide
  MOD_RES (2)..(2): Xaa is C or S

SEQ ID NO: 36493 - protein, 32 aa, Artificial Sequence; identical to SEQ ID NO: 12304
  GFR-binding peptide
  MOD_RES (1)..(32): Xaa is C or S

SEQ ID NO: 36494 - protein, 37 aa, Artificial Sequence; identical to SEQ ID NO: 2931
  GFR-binding peptide
  MOD_RES (2)..(4): Xaa is C or S
  MOD_RES (16)..(17)..(18)..(19)..(20): Xaa is A or G
  MOD_RES (21)..(22)..(23)..(24): Xaa is A or G or is absent

SEQ ID NO: 36495 - protein, 39 aa, Artificial Sequence
  GFR-binding peptide
  MOD_RES (1)..(3)..(34)..(35): Xaa is C or S
XKXSKVIMNSLQEIKPTKGIYYLITLPELDQSVXXPSAS

SEQ ID NO: 36496 - protein, 39 aa, Artificial Sequence; identical to SEQ ID NO: 10395
  GFR-binding peptide
  MOD_RES (2)..(4)..(38): Xaa is C or S
  MOD_RES (16)..(17)..(18)..(19)..(20): Xaa is A or G
  MOD_RES (21)..(22)..(23)..(24): Xaa is A or G or is absent

SEQ ID NO: 36497 - protein, 38 aa, Artificial Sequence; identical to SEQ ID NO: 10396
  GFR-binding peptide
  MOD_RES (1)..(3)..(37)..(38): Xaa is C or S
  MOD_RES (15)..(16)..(17)..(18)..(19): Xaa is A or G
  MOD_RES (20)..(21)..(22)..(23): Xaa is A or G or is absent

SEQ ID NO: 36498 - protein, 36 aa, Artificial Sequence; identical to SEQ ID NO: 10397
  GFR-binding peptide
  MOD_RES (1)..(3)..(34)..(35): Xaa is C or S

SEQ ID NO: 36499 - protein, 39 aa, Artificial Sequence; identical to SEQ ID NO: 10398
  GFR-binding peptide
  MOD_RES (1)..(3)..(34)..(35): Xaa is C or S

SEQ ID NO: 36500 - protein, 35 aa, Artificial Sequence
  GFR-binding peptide
  MOD_RES (1)..(3): Xaa is C or S
  MOD_RES (14)..(15)..(16)..(17)..(18): Xaa is A or G
  MOD_RES (19)..(20)..(21)..(22): Xaa is A or G or is absent
XKXSKVIMNSLQEXXXXXXXXXYYLITLPELDQSV

SEQ ID NO: 36501 - protein, 36 aa, Artificial Sequence; identical to SEQ ID NO: 12305
  GFR-binding peptide
  MOD_RES (1)..(3)..(34)..(35): Xaa is C or S

SEQ ID NO: 36502 - protein, 38 aa, Artificial Sequence; identical to SEQ ID NO: 10399
  GFR-binding peptide
  MOD_RES (1)..(3)..(35)..(36): Xaa is C or S

SEQ ID NO: 36503 - protein, 35 aa, Artificial Sequence; identical to SEQ ID NO: 10401
  GFR-binding peptide
  MOD_RES (31)..(32): Xaa is C or S

SEQ ID NO: 36504 - protein, 35 aa, Artificial Sequence; identical to SEQ ID NO: 4875
  GFR-binding peptide
  MOD_RES (1)..(3): Xaa is C or S
  MOD_RES (14)..(15)..(16)..(17)..(18): Xaa is A or G
  MOD_RES (19)..(20)..(21)..(22): Xaa is A or G or is absent

SEQ ID NO: 36505 - protein, 31 aa, Artificial Sequence; identical to SEQ ID NO: 12307
  GFR-binding peptide
  MOD_RES (1)..(1): Xaa is C or S

SEQ ID NO: 36506 - protein, 37 aa, Artificial Sequence; identical to SEQ ID NO: 12308
  GFR-binding peptide
  MOD_RES (1)..(3)..(35)..(36): Xaa is C or S

SEQ ID NO: 36507 - protein, 40 aa, Artificial Sequence; identical to SEQ ID NO: 12309
  GFR-binding peptide
  MOD_RES (2)..(4)..(36)..(37): Xaa is C or S

SEQ ID NO: 36508 - protein, 34 aa, Artificial Sequence; identical to SEQ ID NO: 10402
  GFR-binding peptide
  MOD_RES (2)..(34): Xaa is C or S

SEQ ID NO: 36509 - protein, 38 aa, Artificial Sequence; identical to SEQ ID NO: 10404
  GFR-binding peptide
  MOD_RES (1)..(3)..(37): Xaa is C or S
  MOD_RES (15)..(16)..(17)..(18)..(19): Xaa is A or G
  MOD_RES (20)..(21)..(22)..(23): Xaa is A or G or is absent

SEQ ID NO: 36510 - protein, 38 aa, Artificial Sequence; identical to SEQ ID NO: 10405
  GFR-binding peptide
  MOD_RES (1)..(33)..(34): Xaa is C or S

SEQ ID NO: 36511 - protein, 41 aa, Artificial Sequence; identical to SEQ ID NO: 12310
  GFR-binding peptide
  MOD_RES (2)..(4)..(36)..(37): Xaa is C or S

SEQ ID NO: 36512 - protein, 38 aa, Artificial Sequence; identical to SEQ ID NO: 10406
  GFR-binding peptide
  MOD_RES (1)..(35)..(36): Xaa is C or S
  MOD_RES (13)..(14)..(15)..(16)..(17): Xaa is A or G
  MOD_RES (18)..(19)..(20)..(21): Xaa is A or G or is absent

SEQ ID NO: 36513 - protein, 41 aa, Artificial Sequence; identical to SEQ ID NO: 4876
  GFR-binding peptide
  MOD_RES (1)..(3)..(35)..(36): Xaa is C or S

SEQ ID NO: 36514 - protein, 40 aa, Artificial Sequence
  GFR-binding peptide
  MOD_RES (2)..(35)..(36): Xaa is C or S
  MOD_RES (13)..(14)..(15)..(16)..(17): Xaa is A or G
  MOD_RES (18)..(19)..(20)..(21): Xaa is A or G or is absent
KXSKVIMNSLQEXXXXXXXXXYYLITLPELDQSVXXPSAS

SEQ ID NO: 36515 - protein, 34 aa, Artificial Sequence; identical to SEQ ID NO: 2947
  GFR-binding peptide
  MOD_RES (1)..(1): Xaa is C or S
  MOD_RES (13)..(14)..(15)..(16)..(17): Xaa is A or G
  MOD_RES (18)..(19)..(20)..(21): Xaa is A or G or is absent

SEQ ID NO: 36516 - protein, 41 aa, Artificial Sequence; identical to SEQ ID NO: 12315
  GFR-binding peptide
  MOD_RES (2)..(4)..(38)..(39): Xaa is C or S
  MOD_RES (16)..(17)..(18)..(19)..(20): Xaa is A or G
  MOD_RES (21)..(22)..(23)..(24): Xaa is A or G or is absent

SEQ ID NO: 36517 - protein, 41 aa, Artificial Sequence; identical to SEQ ID NO: 12316
  GFR-binding peptide
  MOD_RES (1)..(3)..(36)..(37): Xaa is C or S
  MOD_RES (14)..(15)..(16)..(17)..(18): Xaa is A or G
  MOD_RES (19)..(20)..(21)..(22): Xaa is A or G or is absent

SEQ ID NO: 36518 - protein, 35 aa, Artificial Sequence; identical to SEQ ID NO: 12317
  GFR-binding peptide
  MOD_RES (32)..(33): Xaa is C or S

SEQ ID NO: 36519 - protein, 37 aa, Artificial Sequence; identical to SEQ ID NO: 12318
  GFR-binding peptide
  MOD_RES (2)..(36)..(37): Xaa is C or S
  MOD_RES (14)..(15)..(16)..(17)..(18): Xaa is A or G
  MOD_RES (19)..(20)..(21)..(22): Xaa is A or G or is absent

SEQ ID NO: 36520 - protein, 38 aa, Artificial Sequence; identical to SEQ ID NO: 10410
  GFR-binding peptide
  MOD_RES (1)..(3)..(35)..(36): Xaa is C or S

SEQ ID NO: 36521 - protein, 39 aa, Artificial Sequence; identical to SEQ ID NO: 4885
  GFR-binding peptide
  MOD_RES (2)..(4)..(36)..(37): Xaa is C or S

SEQ ID NO: 36522 - protein, 35 aa, Artificial Sequence; identical to SEQ ID NO: 12320
  GFR-binding peptide
  MOD_RES (1)..(32)..(33): Xaa is C or S

SEQ ID NO: 36523 - protein, 40 aa, Artificial Sequence; identical to SEQ ID NO: 12321
  GFR-binding peptide
  MOD_RES (2)..(4)..(36)..(37): Xaa is C or S

SEQ ID NO: 36524 - protein, 38 aa, Artificial Sequence; identical to SEQ ID NO: 2952
  GFR-binding peptide
  MOD_RES (1)..(34)..(35): Xaa is C or S
  MOD_RES (12)..(13)..(14)..(15)..(16): Xaa is A or G
  MOD_RES (17)..(18)..(19)..(20): Xaa is A or G or is absent

SEQ ID NO: 36525 - protein, 33 aa, Artificial Sequence; identical to SEQ ID NO: 10414
  GFR-binding peptide
  MOD_RES (33)..(33): Xaa is C or S
  MOD_RES (11)..(12)..(13)..(14)..(15): Xaa is A or G
  MOD_RES (16)..(17)..(18)..(19): Xaa is A or G or is absent

SEQ ID NO: 36526 - protein, 36 aa, Artificial Sequence; identical to SEQ ID NO: 10415
  GFR-binding peptide
  MOD_RES (1)..(35)..(36): Xaa is C or S
  MOD_RES (13)..(14)..(15)..(16)..(17): Xaa is A or G
  MOD_RES (18)..(19)..(20)..(21): Xaa is A or G or is absent

SEQ ID NO: 36527 - protein, 38 aa, Artificial Sequence; identical to SEQ ID NO: 12324
  GFR-binding peptide
  MOD_RES (2)..(4)..(36)..(37): Xaa is C or S

SEQ ID NO: 36528 - protein, 40 aa, Artificial Sequence; identical to SEQ ID NO: 12325
  GFR-binding peptide
  MOD_RES (1)..(34)..(35): Xaa is C or S
  MOD_RES (12)..(13)..(14)..(15)..(16): Xaa is A or G
  MOD_RES (17)..(18)..(19)..(20): Xaa is A or G or is absent

SEQ ID NO: 36529 - protein, 39 aa, Artificial Sequence; identical to SEQ ID NO: 12326
  GFR-binding peptide
  MOD_RES (33)..(34): Xaa is C or S
  MOD_RES (11)..(12)..(13)..(14)..(15): Xaa is A or G
  MOD_RES (16)..(17)..(18)..(19): Xaa is A or G or is absent

SEQ ID NO: 36530 - protein, 37 aa, Artificial Sequence; identical to SEQ ID NO: 12329
  GFR-binding peptide
  MOD_RES (1)..(35)..(36): Xaa is C or S
  MOD_RES (13)..(14)..(15)..(16)..(17): Xaa is A or G
  MOD_RES (18)..(19)..(20)..(21): Xaa is A or G or is absent

SEQ ID NO: 36531 - protein, 32 aa, Artificial Sequence; identical to SEQ ID NO: 10417
  GFR-binding peptide
  MOD_RES (11)..(12)..(13)..(14)..(15): Xaa is A or G
  MOD_RES (16)..(17)..(18)..(19): Xaa is A or G or is absent

SEQ ID NO: 36532 - protein, 36 aa, Artificial Sequence; identical to SEQ ID NO: 12331
  GFR-binding peptide
  MOD_RES (1)..(33)..(34): Xaa is C or S

SEQ ID NO: 36533 - protein, 37 aa, Artificial Sequence; identical to SEQ ID NO: 12332
  GFR-binding peptide
  MOD_RES (34)..(34): Xaa is C or S
  MOD_RES (12)..(13)..(14)..(15)..(16): Xaa is A or G
  MOD_RES (17)..(18)..(19)..(20): Xaa is A or G or is absent

SEQ ID NO: 36534 - protein, 37 aa, Artificial Sequence; identical to SEQ ID NO: 4895
  GFR-binding peptide
  MOD_RES (1)..(3)..(34)..(35): Xaa is C or S

SEQ ID NO: 36535 - protein, 33 aa, Artificial Sequence; identical to SEQ ID NO: 10419
  GFR-binding peptide
  MOD_RES (1)..(33): Xaa is C or S

SEQ ID NO: 36536 - protein, 40 aa, Artificial Sequence; identical to SEQ ID NO: 12334
  GFR-binding peptide
  MOD_RES (2)..(4)..(36)..(37): Xaa is C or S

SEQ ID NO: 36537 - protein, 40 aa, Artificial Sequence; identical to SEQ ID NO: 10421
  GFR-binding peptide
  MOD_RES (2)..(4)..(37)..(38): Xaa is C or S
  MOD_RES (15)..(16)..(17)..(18)..(19): Xaa is A or G
  MOD_RES (20)..(21)..(22)..(23): Xaa is A or G or is absent

SEQ ID NO: 36538 - protein, 38 aa, Artificial Sequence; identical to SEQ ID NO: 10422
  GFR-binding peptide
  MOD_RES (33)..(33): Xaa is C or S
  MOD_RES (11)..(12)..(13)..(14)..(15): Xaa is A or G
  MOD_RES (16)..(17)..(18)..(19): Xaa is A or G or is absent

SEQ ID NO: 36539 - protein, 39 aa, Artificial Sequence; identical to SEQ ID NO: 10423
  GFR-binding peptide
  MOD_RES (1)..(33)..(34): Xaa is C or S

SEQ ID NO: 36540 - protein, 36 aa, Artificial Sequence; identical to SEQ ID NO: 12335
  GFR-binding peptide
  MOD_RES (31)..(32): Xaa is C or S

SEQ ID NO: 36541 - protein, 36 aa, Artificial Sequence; identical to SEQ ID NO: 10424
  GFR-binding peptide
  MOD_RES (32)..(33): Xaa is C or S

SEQ ID NO: 36542 - protein, 35 aa, Artificial Sequence; identical to SEQ ID NO: 12336
  GFR-binding peptide
  MOD_RES (2)..(34)..(35): Xaa is C or S

SEQ ID NO: 36543 - protein, 42 aa, Artificial Sequence; identical to SEQ ID NO: 10425
  GFR-binding peptide
  MOD_RES (2)..(4)..(38)..(39): Xaa is C or S
  MOD_RES (16)..(17)..(18)..(19)..(20): Xaa is A or G
  MOD_RES (21)..(22)..(23)..(24): Xaa is A or G or is absent

SEQ ID NO: 36544 - protein, 39 aa, Artificial Sequence; identical to SEQ ID NO: 4897
  GFR-binding peptide
  MOD_RES (2)..(4)..(37)..(38): Xaa is C or S
  MOD_RES (15)..(16)..(17)..(18)..(19): Xaa is A or G
  MOD_RES (20)..(21)..(22)..(23): Xaa is A or G or is absent

SEQ ID NO: 36545 - protein, 34 aa, Artificial Sequence; identical to SEQ ID NO: 10426
  GFR-binding peptide
  MOD_RES (2)..(33)..(34): Xaa is C or S

SEQ ID NO: 36546 - protein, 35 aa, Artificial Sequence; identical to SEQ ID NO: 4899
  GFR-binding peptide
  MOD_RES (2)..(35): Xaa is C or S
  MOD_RES (13)..(14)..(15)..(16)..(17): Xaa is A or G
  MOD_RES (18)..(19)..(20)..(21): Xaa is A or G or is absent

SEQ ID NO: 36547 - protein, 39 aa, Artificial Sequence; identical to SEQ ID NO: 12339
  GFR-binding peptide
  MOD_RES (1)..(3)..(35)..(36): Xaa is C or S

SEQ ID NO: 36548 - protein, 32 aa, Artificial Sequence; identical to SEQ ID NO: 10427
  GFR-binding peptide
  MOD_RES (11)..(12)..(13)..(14)..(15): Xaa is A or G
  MOD_RES (16)..(17)..(18)..(19): Xaa is A or G or is absent

SEQ ID NO: 36549 - protein, 37 aa, Artificial Sequence; identical to SEQ ID NO: 12341
  GFR-binding peptide
  MOD_RES (32)..(33): Xaa is C or S

SEQ ID NO: 36550 - protein, 35 aa, Artificial Sequence; identical to SEQ ID NO: 12342
  GFR-binding peptide
  MOD_RES (34)..(35): Xaa is C or S
  MOD_RES (12)..(13)..(14)..(15)..(16): Xaa is A or G
  MOD_RES (17)..(18)..(19)..(20): Xaa is A or G or is absent

SEQ ID NO: 36551 - protein, 40 aa, Artificial Sequence; identical to SEQ ID NO: 10428
  GFR-binding peptide
  MOD_RES (2)..(4)..(36)..(37): Xaa is C or S

SEQ ID NO: 36552 - protein, 39 aa, Artificial Sequence; identical to SEQ ID NO: 10429
  GFR-binding peptide
  MOD_RES (2)..(4)..(37)..(38): Xaa is C or S
  MOD_RES (15)..(16)..(17)..(18)..(19): Xaa is A or G
  MOD_RES (20)..(21)..(22)..(23): Xaa is A or G or is absent

SEQ ID NO: 36553 - protein, 41 aa, Artificial Sequence; identical to SEQ ID NO: 12343
  GFR-binding peptide
  MOD_RES (2)..(36)..(37): Xaa is C or S
  MOD_RES (14)..(15)..(16)..(17)..(18): Xaa is A or G
  MOD_RES (19)..(20)..(21)..(22): Xaa is A or G or is absent

SEQ ID NO: 36554 - protein, 35 aa, Artificial Sequence; identical to SEQ ID NO: 10430
  GFR-binding peptide
  MOD_RES (2)..(4)..(35): Xaa is C or S

SEQ ID NO: 36555 - protein, 37 aa, Artificial Sequence; identical to SEQ ID NO: 12344
  GFR-binding peptide
  MOD_RES (2)..(36)..(37): Xaa is C or S
  MOD_RES (14)..(15)..(16)..(17)..(18): Xaa is A or G
  MOD_RES (19)..(20)..(21)..(22): Xaa is A or G or is absent

SEQ ID NO: 36556 - protein, 38 aa, Artificial Sequence; identical to SEQ ID NO: 10431
  GFR-binding peptide
  MOD_RES (33)..(34): Xaa is C or S
  MOD_RES (11)..(12)..(13)..(14)..(15): Xaa is A or G
  MOD_RES (16)..(17)..(18)..(19): Xaa is A or G or is absent

SEQ ID NO: 36557 - protein, 34 aa, Artificial Sequence; identical to SEQ ID NO: 12346
  GFR-binding peptide
  MOD_RES (34)..(34): Xaa is C or S
  MOD_RES (12)..(13)..(14)..(15)..(16): Xaa is A or G
  MOD_RES (17)..(18)..(19)..(20): Xaa is A or G or is absent

SEQ ID NO: 36558 - protein, 36 aa, Artificial Sequence; identical to SEQ ID NO: 10433
  GFR-binding peptide
  MOD_RES (32)..(33): Xaa is C or S

SEQ ID NO: 36559 - protein, 32 aa, Artificial Sequence; identical to SEQ ID NO: 12347
  GFR-binding peptide
  MOD_RES (31)..(32): Xaa is C or S

SEQ ID NO: 36560 - protein, 32 aa, Artificial Sequence; identical to SEQ ID NO: 12348
  GFR-binding peptide
  MOD_RES (2)..(2): Xaa is C or S

SEQ ID NO: 36561 - protein, 34 aa, Artificial Sequence; identical to SEQ ID NO: 10434
  GFR-binding peptide
  MOD_RES (2)..(4): Xaa is C or S

SEQ ID NO: 36562 - protein, 40 aa, Artificial Sequence; identical to SEQ ID NO: 2983
  GFR-binding peptide
  MOD_RES (1)..(3)..(34)..(35): Xaa is C or S

SEQ ID NO: 36563 - protein, 36 aa, Artificial Sequence; identical to SEQ ID NO: 12349
  GFR-binding peptide
  MOD_RES (1)..(3)..(34)..(35): Xaa is C or S

SEQ ID NO: 36564 - protein, 37 aa, Artificial Sequence; identical to SEQ ID NO: 10436
  GFR-binding peptide
  MOD_RES (2)..(4)..(37): Xaa is C or S
  MOD_RES (15)..(16)..(17)..(18)..(19): Xaa is A or G
  MOD_RES (20)..(21)..(22)..(23): Xaa is A or G or is absent

SEQ ID NO: 36565 - protein, 30 aa, Artificial Sequence; identical to SEQ ID NO: 2986
  GFR-binding peptide

SEQ ID NO: 36566 - protein, 39 aa, Artificial Sequence; identical to SEQ ID NO: 12351
  GFR-binding peptide
  MOD_RES (1)..(33)..(34): Xaa is C or S

SEQ ID NO: 36567 - protein, 36 aa, Artificial Sequence; identical to SEQ ID NO: 12352
  GFR-binding peptide
  MOD_RES (2)..(36): Xaa is C or S
  MOD_RES (14)..(15)..(16)..(17)..(18): Xaa is A or G
  MOD_RES (19)..(20)..(21)..(22): Xaa is A or G or is absent

SEQ ID NO: 36568 - protein, 40 aa, Artificial Sequence; identical to SEQ ID NO: 12353
  GFR-binding peptide
  MOD_RES (2)..(4)..(35)..(36): Xaa is C or S

SEQ ID NO: 36569 - protein, 37 aa, Artificial Sequence; identical to SEQ ID NO: 10438
  GFR-binding peptide
  MOD_RES (2)..(4): Xaa is C or S
  MOD_RES (16)..(17)..(18)..(19)..(20): Xaa is A or G
  MOD_RES (21)..(22)..(23)..(24): Xaa is A or G or is absent

SEQ ID NO: 36570 - protein, 39 aa, Artificial Sequence; identical to SEQ ID NO: 12355
  GFR-binding peptide
  MOD_RES (2)..(4)..(35)..(36): Xaa is C or S

SEQ ID NO: 36571 - protein, 39 aa, Artificial Sequence; identical to SEQ ID NO: 4915
  GFR-binding peptide
  MOD_RES (2)..(33)..(34): Xaa is C or S

SEQ ID NO: 36572 - protein, 40 aa, Artificial Sequence; identical to SEQ ID NO: 2989
  GFR-binding peptide
  MOD_RES (1)..(35)..(36): Xaa is C or S
  MOD_RES (13)..(14)..(15)..(16)..(17): Xaa is A or G
  MOD_RES (18)..(19)..(20)..(21): Xaa is A or G or is absent

SEQ ID NO: 36573 - protein, 33 aa, Artificial Sequence; identical to SEQ ID NO: 10441
  GFR-binding peptide
  MOD_RES (2)..(2): Xaa is C or S

SEQ ID NO: 36574 - protein, 38 aa, Artificial Sequence; identical to SEQ ID NO: 4918
  GFR-binding peptide
  MOD_RES (2)..(35)..(36): Xaa is C or S
  MOD_RES (13)..(14)..(15)..(16)..(17): Xaa is A or G
  MOD_RES (18)..(19)..(20)..(21): Xaa is A or G or is absent

SEQ ID NO: 36575 - protein, 35 aa, Artificial Sequence; identical to SEQ ID NO: 10442
  GFR-binding peptide
  MOD_RES (1)..(33)..(34): Xaa is C or S

SEQ ID NO: 36576 - protein, 36 aa, Artificial Sequence; identical to SEQ ID NO: 12358
  GFR-binding peptide
  MOD_RES (33)..(34): Xaa is C or S
  MOD_RES (11)..(12)..(13)..(14)..(15): Xaa is A or G
  MOD_RES (16)..(17)..(18)..(19): Xaa is A or G or is absent

SEQ ID NO: 36577 - protein, 40 aa, Artificial Sequence; identical to SEQ ID NO: 10443
  GFR-binding peptide
  MOD_RES (2)..(4)..(36)..(37): Xaa is C or S

SEQ ID NO: 36578 - protein, 38 aa, Artificial Sequence; identical to SEQ ID NO: 12359
  GFR-binding peptide
  MOD_RES (2)..(4)..(38): Xaa is C or S
  MOD_RES (16)..(17)..(18)..(19)..(20): Xaa is A or G
  MOD_RES (21)..(22)..(23)..(24): Xaa is A or G or is absent

SEQ ID NO: 36579 - protein, 35 aa, Artificial Sequence; identical to SEQ ID NO: 12360
  GFR-binding peptide
  MOD_RES (1)..(3): Xaa is C or S
  MOD_RES (14)..(15)..(16)..(17)..(18): Xaa is A or G
  MOD_RES (19)..(20)..(21)..(22): Xaa is A or G or is absent

SEQ ID NO: 36580 - protein, 32 aa, Artificial Sequence; identical to SEQ ID NO: 10444
  GFR-binding peptide
  MOD_RES (2)..(2): Xaa is C or S

SEQ ID NO: 36581 - protein, 36 aa, Artificial Sequence; identical to SEQ ID NO: 10445
  GFR-binding peptide
  MOD_RES (2)..(35)..(36): Xaa is C or S
  MOD_RES (13)..(14)..(15)..(16)..(17): Xaa is A or G
  MOD_RES (18)..(19)..(20)..(21): Xaa is A or G or is absent

SEQ ID NO: 36582 - protein, 38 aa, Artificial Sequence; identical to SEQ ID NO: 12361
  GFR-binding peptide
  MOD_RES (1)..(35)..(36): Xaa is C or S
  MOD_RES (13)..(14)..(15)..(16)..(17): Xaa is A or G
  MOD_RES (18)..(19)..(20)..(21): Xaa is A or G or is absent

SEQ ID NO: 36583 - protein, 39 aa, Artificial Sequence; identical to SEQ ID NO: 4920
  GFR-binding peptide
  MOD_RES (2)..(4)..(38)..(39): Xaa is C or S
  MOD_RES (16)..(17)..(18)..(19)..(20): Xaa is A or G
  MOD_RES (21)..(22)..(23)..(24): Xaa is A or G or is absent

SEQ ID NO: 36584 - protein, 36 aa, Artificial Sequence; identical to SEQ ID NO: 10446
  GFR-binding peptide
  MOD_RES (1)..(35)..(36): Xaa is C or S
  MOD_RES (13)..(14)..(15)..(16)..(17): Xaa is A or G
  MOD_RES (18)..(19)..(20)..(21): Xaa is A or G or is absent

SEQ ID NO: 36585 - protein, 34 aa, Artificial Sequence
  GFR-binding peptide
  MOD_RES (31)..(32): Xaa is C or S
SKVIMNSLQEIKPTKGIYYLITLPELDQSVXXPS

SEQ ID NO: 36586 - protein, 37 aa, Artificial Sequence; identical to SEQ ID NO: 10447
  GFR-binding peptide
  MOD_RES (2)..(34)..(35): Xaa is C or S

SEQ ID NO: 36587 - protein, 34 aa, Artificial Sequence; identical to SEQ ID NO: 10448
  GFR-binding peptide
  MOD_RES (33)..(34): Xaa is C or S
  MOD_RES (11)..(12)..(13)..(14)..(15): Xaa is A or G
  MOD_RES (16)..(17)..(18)..(19): Xaa is A or G or is absent

SEQ ID NO: 36588 - protein, 36 aa, Artificial Sequence; identical to SEQ ID NO: 12363
  GFR-binding peptide
  MOD_RES (2)..(35)..(36): Xaa is C or S
  MOD_RES (13)..(14)..(15)..(16)..(17): Xaa is A or G
  MOD_RES (18)..(19)..(20)..(21): Xaa is A or G or is absent

SEQ ID NO: 36589 - protein, 44 aa, Artificial Sequence; identical to SEQ ID NO: 12364
  GFR-binding peptide
  MOD_RES (2)..(4)..(38)..(39): Xaa is C or S
  MOD_RES (16)..(17)..(18)..(19)..(20): Xaa is A or G
  MOD_RES (21)..(22)..(23)..(24): Xaa is A or G or is absent

SEQ ID NO: 36590 - protein, 33 aa, Artificial Sequence; identical to SEQ ID NO: 2995
  GFR-binding peptide
  MOD_RES (1)..(32)..(33): Xaa is C or S

SEQ ID NO: 36591 - protein, 39 aa, Artificial Sequence; identical to SEQ ID NO: 10450
  GFR-binding peptide
  MOD_RES (1)..(34)..(35): Xaa is C or S
  MOD_RES (12)..(13)..(14)..(15)..(16): Xaa is A or G
  MOD_RES (17)..(18)..(19)..(20): Xaa is A or G or is absent

SEQ ID NO: 36592 - protein, 36 aa, Artificial Sequence; identical to SEQ ID NO: 12365
  GFR-binding peptide
  MOD_RES (1)..(35)..(36): Xaa is C or S
  MOD_RES (13)..(14)..(15)..(16)..(17): Xaa is A or G
  MOD_RES (18)..(19)..(20)..(21): Xaa is A or G or is absent

SEQ ID NO: 36593 - protein, 35 aa, Artificial Sequence
  GFR-binding peptide
  MOD_RES (33)..(34): Xaa is C or S
  MOD_RES (11)..(12)..(13)..(14)..(15): Xaa is A or G
  MOD_RES (16)..(17)..(18)..(19): Xaa is A or G or is absent
SKVIMNSLQEXXXXXXXXXYYLITLPELDQSVXXP

SEQ ID NO: 36594 - protein, 40 aa, Artificial Sequence
  GFR-binding peptide
  MOD_RES (2)..(4)..(35)..(36): Xaa is C or S
SXKXSKVIMNSLQEIKPTKGIYYLITLPELDQSVXXPSAS

SEQ ID NO: 36595 - protein, 37 aa, Artificial Sequence; identical to SEQ ID NO: 12367
  GFR-binding peptide
  MOD_RES (31)..(32): Xaa is C or S

SEQ ID NO: 36596 - protein, 35 aa, Artificial Sequence; identical to SEQ ID NO: 3004
  GFR-binding peptide
  MOD_RES (1)..(34)..(35): Xaa is C or S
  MOD_RES (12)..(13)..(14)..(15)..(16): Xaa is A or G
  MOD_RES (17)..(18)..(19)..(20): Xaa is A or G or is absent

SEQ ID NO: 36597 - protein, 36 aa, Artificial Sequence; identical to SEQ ID NO: 10454
  GFR-binding peptide
  MOD_RES (34)..(35): Xaa is C or S
  MOD_RES (12)..(13)..(14)..(15)..(16): Xaa is A or G
  MOD_RES (17)..(18)..(19)..(20): Xaa is A or G or is absent

SEQ ID NO: 36598 - protein, 36 aa, Artificial Sequence; identical to SEQ ID NO: 4935
  GFR-binding peptide
  MOD_RES (1)..(3): Xaa is C or S
  MOD_RES (15)..(16)..(17)..(18)..(19): Xaa is A or G
  MOD_RES (20)..(21)..(22)..(23): Xaa is A or G or is absent

SEQ ID NO: 36599 - protein, 37 aa, Artificial Sequence; identical to SEQ ID NO: 4938
  GFR-binding peptide
  MOD_RES (2)..(4)..(37): Xaa is C or S
  MOD_RES (15)..(16)..(17)..(18)..(19): Xaa is A or G
  MOD_RES (20)..(21)..(22)..(23): Xaa is A or G or is absent

SEQ ID NO: 36600 - protein, 33 aa, Artificial Sequence; identical to SEQ ID NO: 10457
  GFR-binding peptide
  MOD_RES (2)..(33): Xaa is C or S

SEQ ID NO: 36601 - protein, 35 aa, Artificial Sequence
  GFR-binding peptide
  MOD_RES (2)..(35): Xaa is C or S
  MOD_RES (13)..(14)..(15)..(16)..(17): Xaa is A or G
  MOD_RES (18)..(19)..(20)..(21): Xaa is A or G or is absent
KXSKVIMNSLQEXXXXXXXXXYYLITLPELDQSVX

SEQ ID NO: 36602 - protein, 37 aa, Artificial Sequence; identical to SEQ ID NO: 12373
  GFR-binding peptide
  MOD_RES (2)..(36)..(37): Xaa is C or S
  MOD_RES (14)..(15)..(16)..(17)..(18): Xaa is A or G
  MOD_RES (19)..(20)..(21)..(22): Xaa is A or G or is absent

SEQ ID NO: 36603 - protein, 36 aa, Artificial Sequence; identical to SEQ ID NO: 10459
  GFR-binding peptide
  MOD_RES (32)..(33): Xaa is C or S

SEQ ID NO: 36604 - protein, 35 aa, Artificial Sequence; identical to SEQ ID NO: 12374
  GFR-binding peptide
  MOD_RES (33)..(34): Xaa is C or S
  MOD_RES (11)..(12)..(13)..(14)..(15): Xaa is A or G
  MOD_RES (16)..(17)..(18)..(19): Xaa is A or G or is absent

SEQ ID NO: 36605 - protein, 38 aa, Artificial Sequence; identical to SEQ ID NO: 12375
  GFR-binding peptide
  MOD_RES (2)..(4)..(36)..(37): Xaa is C or S

SEQ ID NO: 36606 - protein, 36 aa, Artificial Sequence; identical to SEQ ID NO: 10460
  GFR-binding peptide
  MOD_RES (2)..(34)..(35): Xaa is C or S

SEQ ID NO: 36607 - protein, 35 aa, Artificial Sequence; identical to SEQ ID NO: 10461
  GFR-binding peptide
  MOD_RES (33)..(34): Xaa is C or S
  MOD_RES (11)..(12)..(13)..(14)..(15): Xaa is A or G
  MOD_RES (16)..(17)..(18)..(19): Xaa is A or G or is absent

SEQ ID NO: 36608 - protein, 38 aa, Artificial Sequence; identical to SEQ ID NO: 12376
  GFR-binding peptide
  MOD_RES (1)..(3)..(37)..(38): Xaa is C or S
  MOD_RES (15)..(16)..(17)..(18)..(19): Xaa is A or G
  MOD_RES (20)..(21)..(22)..(23): Xaa is A or G or is absent

SEQ ID NO: 36609 - protein, 35 aa, Artificial Sequence; identical to SEQ ID NO: 12377
  GFR-binding peptide
  MOD_RES (1)..(33)..(34): Xaa is C or S

SEQ ID NO: 36610 - protein, 33 aa, Artificial Sequence; identical to SEQ ID NO: 3013
  GFR-binding peptide
  MOD_RES (2)..(2): Xaa is C or S

SEQ ID NO: 36611 - protein, 42 aa, Artificial Sequence; identical to SEQ ID NO: 10463
  GFR-binding peptide
  MOD_RES (2)..(4)..(36)..(37): Xaa is C or S

SEQ ID NO: 36612 - protein, 34 aa, Artificial Sequence; identical to SEQ ID NO: 10465
  GFR-binding peptide
  MOD_RES (32)..(32): Xaa is C or S

SEQ ID NO: 36613 - protein, 41 aa, Artificial Sequence; identical to SEQ ID NO: 12379
  GFR-binding peptide
  MOD_RES (1)..(35)..(36): Xaa is C or S
  MOD_RES (13)..(14)..(15)..(16)..(17): Xaa is A or G
  MOD_RES (18)..(19)..(20)..(21): Xaa is A or G or is absent

SEQ ID NO: 36614 - protein, 34 aa, Artificial Sequence; identical to SEQ ID NO: 12380
  GFR-binding peptide
  MOD_RES (32)..(33): Xaa is C or S

SEQ ID NO: 36615 - protein, 40 aa, Artificial Sequence; identical to SEQ ID NO: 12381
  GFR-binding peptide
  MOD_RES (1)..(3)..(36)..(37): Xaa is C or S
  MOD_RES (14)..(15)..(16)..(17)..(18): Xaa is A or G
  MOD_RES (19)..(20)..(21)..(22): Xaa is A or G or is absent

SEQ ID NO: 36616 - protein, 39 aa, Artificial Sequence; identical to SEQ ID NO: 10466
  GFR-binding peptide
  MOD_RES (2)..(34): Xaa is C or S

SEQ ID NO: 36617 - protein, 37 aa, Artificial Sequence; identical to SEQ ID NO: 12382
  GFR-binding peptide
  MOD_RES (2)..(4)..(36)..(37): Xaa is C or S

SEQ ID NO: 36618 - protein, 34 aa, Artificial Sequence; identical to SEQ ID NO: 10467
  GFR-binding peptide
  MOD_RES (33)..(34): Xaa is C or S
  MOD_RES (11)..(12)..(13)..(14)..(15): Xaa is A or G
  MOD_RES (16)..(17)..(18)..(19): Xaa is A or G or is absent

SEQ ID NO: 36619 - protein, 39 aa, Artificial Sequence
  GFR-binding peptide
  MOD_RES (2)..(4)..(35)..(36): Xaa is C or S
SXKXSKVIMNSLQEIKPTKGIYYLITLPELDQSVXXPSA

SEQ ID NO: 36620 - protein, 35 aa, Artificial Sequence; identical to SEQ ID NO: 10469
  GFR-binding peptide
  MOD_RES (2)..(4): Xaa is C or S

SEQ ID NO: 36621 - protein, 36 aa, Artificial Sequence; identical to SEQ ID NO: 12383
  GFR-binding peptide
  MOD_RES (1)..(35)..(36): Xaa is C or S
  MOD_RES (13)..(14)..(15)..(16)..(17): Xaa is A or G
  MOD_RES (18)..(19)..(20)..(21): Xaa is A or G or is absent

SEQ ID NO: 36622 - protein, 36 aa, Artificial Sequence; identical to SEQ ID NO: 10470
  GFR-binding peptide
  MOD_RES (33)..(34): Xaa is C or S
  MOD_RES (11)..(12)..(13)..(14)..(15): Xaa is A or G
  MOD_RES (16)..(17)..(18)..(19): Xaa is A or G or is absent

SEQ ID NO: 36623 - protein, 36 aa, Artificial Sequence; identical to SEQ ID NO: 10471
  GFR-binding peptide
  MOD_RES (2)..(4)..(36): Xaa is C or S

SEQ ID NO: 36624 - protein, 36 aa, Artificial Sequence; identical to SEQ ID NO: 10473
  GFR-binding peptide
  MOD_RES (34)..(35): Xaa is C or S
  MOD_RES (12)..(13)..(14)..(15)..(16): Xaa is A or G
  MOD_RES (17)..(18)..(19)..(20): Xaa is A or G or is absent

SEQ ID NO: 36625 - protein, 37 aa, Artificial Sequence; identical to SEQ ID NO: 10474
  GFR-binding peptide
  MOD_RES (31)..(32): Xaa is C or S

SEQ ID NO: 36626 - protein, 37 aa, Artificial Sequence; identical to SEQ ID NO: 12385
  GFR-binding peptide
  MOD_RES (1)..(35)..(36): Xaa is C or S
  MOD_RES (13)..(14)..(15)..(16)..(17): Xaa is A or G
  MOD_RES (18)..(19)..(20)..(21): Xaa is A or G or is absent

SEQ ID NO: 36627 - protein, 40 aa, Artificial Sequence; identical to SEQ ID NO: 12387
  GFR-binding peptide
  MOD_RES (2)..(36)..(37): Xaa is C or S
  MOD_RES (14)..(15)..(16)..(17)..(18): Xaa is A or G
  MOD_RES (19)..(20)..(21)..(22): Xaa is A or G or is absent

SEQ ID NO: 36628 - protein, 30 aa, Artificial Sequence; identical to SEQ ID NO: 12388
  GFR-binding peptide

SEQ ID NO: 36629 - protein, 31 aa, Artificial Sequence; identical to SEQ ID NO: 12389
  GFR-binding peptide
  MOD_RES (1)..(1): Xaa is C or S

SEQ ID NO: 36630 - protein, 36 aa, Artificial Sequence; identical to SEQ ID NO: 10475
  GFR-binding peptide
  MOD_RES (32)..(33): Xaa is C or S

SEQ ID NO: 36631 - protein, 40 aa, Artificial Sequence; identical to SEQ ID NO: 3025
  GFR-binding peptide
  MOD_RES (2)..(4)..(37)..(38): Xaa is C or S
  MOD_RES (15)..(16)..(17)..(18)..(19): Xaa is A or G
  MOD_RES (20)..(21)..(22)..(23): Xaa is A or G or is absent

SEQ ID NO: 36632 - protein, 35 aa, Artificial Sequence; identical to SEQ ID NO: 12392
  GFR-binding peptide
  MOD_RES (1)..(3)..(35): Xaa is C or S

SEQ ID NO: 36633 - protein, 36 aa, Artificial Sequence; identical to SEQ ID NO: 10478
  GFR-binding peptide
  MOD_RES (31)..(32): Xaa is C or S

SEQ ID NO: 36634 - protein, 35 aa, Artificial Sequence; identical to SEQ ID NO: 12394
  GFR-binding peptide
  MOD_RES (2)..(34)..(35): Xaa is C or S

SEQ ID NO: 36635 - protein, 35 aa, Artificial Sequence; identical to SEQ ID NO: 12395
  GFR-binding peptide
  MOD_RES (2)..(34)..(35): Xaa is C or S

SEQ ID NO: 36636 - protein, 39 aa, Artificial Sequence; identical to SEQ ID NO: 12396
  GFR-binding peptide
  MOD_RES (1)..(33): Xaa is C or S

SEQ ID NO: 36637 - protein, 38 aa, Artificial Sequence; identical to SEQ ID NO: 4964
  GFR-binding peptide
  MOD_RES (34)..(35): Xaa is C or S
  MOD_RES (12)..(13)..(14)..(15)..(16): Xaa is A or G
  MOD_RES (17)..(18)..(19)..(20): Xaa is A or G or is absent

SEQ ID NO: 36638 - protein, 33 aa, Artificial Sequence; identical to SEQ ID NO: 10480
  GFR-binding peptide
  MOD_RES (2)..(2): Xaa is C or S

SEQ ID NO: 36639 - protein, 34 aa, Artificial Sequence; identical to SEQ ID NO: 12400
  GFR-binding peptide
  MOD_RES (2)..(33)..(34): Xaa is C or S

SEQ ID NO: 36640 - protein, 33 aa, Artificial Sequence; identical to SEQ ID NO: 12401
  GFR-binding peptide
  MOD_RES (33)..(33): Xaa is C or S
  MOD_RES (11)..(12)..(13)..(14)..(15): Xaa is A or G
  MOD_RES (16)..(17)..(18)..(19): Xaa is A or G or is absent

SEQ ID NO: 36641 - protein, 32 aa, Artificial Sequence; identical to SEQ ID NO: 12402
  GFR-binding peptide
  MOD_RES (1)..(1): Xaa is C or S

SEQ ID NO: 36642 - protein, 34 aa, Artificial Sequence; identical to SEQ ID NO: 10482
  GFR-binding peptide
  MOD_RES (1)..(33)..(34): Xaa is C or S

SEQ ID NO: 36643 - protein, 39 aa, Artificial Sequence
  GFR-binding peptide
  MOD_RES (1)..(3)..(36)..(37): Xaa is C or S
  MOD_RES (14)..(15)..(16)..(17)..(18): Xaa is A or G
  MOD_RES (19)..(20)..(21)..(22): Xaa is A or G or is absent
XKXSKVIMNSLQEXXXXXXXXXYYLITLPELDQSVXXPS

SEQ ID NO: 36644 - protein, 32 aa, Artificial Sequence; identical to SEQ ID NO: 10484
  GFR-binding peptide
  MOD_RES (11)..(12)..(13)..(14)..(15): Xaa is A or G
  MOD_RES (16)..(17)..(18)..(19): Xaa is A or G or is absent

SEQ ID NO: 36645 - protein, 37 aa, Artificial Sequence; identical to SEQ ID NO: 10485
  GFR-binding peptide
  MOD_RES (2)..(34): Xaa is C or S

SEQ ID NO: 36646 - protein, 38 aa, Artificial Sequence; identical to SEQ ID NO: 12405
  GFR-binding peptide
  MOD_RES (1)..(34)..(35): Xaa is C or S
  MOD_RES (12)..(13)..(14)..(15)..(16): Xaa is A or G
  MOD_RES (17)..(18)..(19)..(20): Xaa is A or G or is absent

SEQ ID NO: 36647 - protein, 34 aa, Artificial Sequence; identical to SEQ ID NO: 12406
  GFR-binding peptide
  MOD_RES (1)..(33)..(34): Xaa is C or S

SEQ ID NO: 36648 - protein, 41 aa, Artificial Sequence; identical to SEQ ID NO: 12407
  GFR-binding peptide
  MOD_RES (2)..(36): Xaa is C or S
  MOD_RES (14)..(15)..(16)..(17)..(18): Xaa is A or G
  MOD_RES (19)..(20)..(21)..(22): Xaa is A or G or is absent

SEQ ID NO: 36649 - protein, 33 aa, Artificial Sequence; identical to SEQ ID NO: 12408
  GFR-binding peptide
  MOD_RES (1)..(1): Xaa is C or S
  MOD_RES (12)..(13)..(14)..(15)..(16): Xaa is A or G
  MOD_RES (17)..(18)..(19)..(20): Xaa is A or G or is absent

SEQ ID NO: 36650 - protein, 40 aa, Artificial Sequence; identical to SEQ ID NO: 10486
  GFR-binding peptide
  MOD_RES (1)..(3)..(35)..(36): Xaa is C or S

SEQ ID NO: 36651 - protein, 36 aa, Artificial Sequence; identical to SEQ ID NO: 12411
  GFR-binding peptide
  MOD_RES (34)..(35): Xaa is C or S
  MOD_RES (12)..(13)..(14)..(15)..(16): Xaa is A or G
  MOD_RES (17)..(18)..(19)..(20): Xaa is A or G or is absent

SEQ ID NO: 36652 - protein, 37 aa, Artificial Sequence; identical to SEQ ID NO: 10487
  GFR-binding peptide
  MOD_RES (1)..(3)..(37): Xaa is C or S
  MOD_RES (15)..(16)..(17)..(18)..(19): Xaa is A or G
  MOD_RES (20)..(21)..(22)..(23): Xaa is A or G or is absent

SEQ ID NO: 36653 - protein, 38 aa, Artificial Sequence; identical to SEQ ID NO: 4980
  GFR-binding peptide
  MOD_RES (32)..(33): Xaa is C or S

SEQ ID NO: 36654 - protein, 37 aa, Artificial Sequence; identical to SEQ ID NO: 10488
  GFR-binding peptide
  MOD_RES (32)..(33): Xaa is C or S

SEQ ID NO: 36655 - protein, 36 aa, Artificial Sequence; identical to SEQ ID NO: 10489
  GFR-binding peptide
  MOD_RES (1)..(3)..(36): Xaa is C or S
  MOD_RES (14)..(15)..(16)..(17)..(18): Xaa is A or G
  MOD_RES (19)..(20)..(21)..(22): Xaa is A or G or is absent

SEQ ID NO: 36656 - protein, 37 aa, Artificial Sequence; identical to SEQ ID NO: 12413
  GFR-binding peptide
  MOD_RES (1)..(3)..(35)..(36): Xaa is C or S

SEQ ID NO: 36657 - protein, 34 aa, Artificial Sequence; identical to SEQ ID NO: 12414
  GFR-binding peptide
  MOD_RES (1)..(34): Xaa is C or S
  MOD_RES (12)..(13)..(14)..(15)..(16): Xaa is A or G
  MOD_RES (17)..(18)..(19)..(20): Xaa is A or G or is absent

SEQ ID NO: 36658 - protein, 38 aa, Artificial Sequence; identical to SEQ ID NO: 10490
  GFR-binding peptide
  MOD_RES (33)..(33): Xaa is C or S
  MOD_RES (11)..(12)..(13)..(14)..(15): Xaa is A or G
  MOD_RES (16)..(17)..(18)..(19): Xaa is A or G or is absent

SEQ ID NO: 36659 - protein, 36 aa, Artificial Sequence; identical to SEQ ID NO: 10491
  GFR-binding peptide
  MOD_RES (1)..(35)..(36): Xaa is C or S
  MOD_RES (13)..(14)..(15)..(16)..(17): Xaa is A or G
  MOD_RES (18)..(19)..(20)..(21): Xaa is A or G or is absent

SEQ ID NO: 36660 - protein, 34 aa, Artificial Sequence; identical to SEQ ID NO: 12415
  GFR-binding peptide
  MOD_RES (33)..(34): Xaa is C or S
  MOD_RES (11)..(12)..(13)..(14)..(15): Xaa is A or G
  MOD_RES (16)..(17)..(18)..(19): Xaa is A or G or is absent

SEQ ID NO: 36661 - protein, 35 aa, Artificial Sequence; identical to SEQ ID NO: 3042
  GFR-binding peptide
  MOD_RES (32)..(33): Xaa is C or S

SEQ ID NO: 36662 - protein, 34 aa, Artificial Sequence; identical to SEQ ID NO: 12417
  GFR-binding peptide
  MOD_RES (1)..(33): Xaa is C or S

SEQ ID NO: 36663 - protein, 33 aa, Artificial Sequence; identical to SEQ ID NO: 10495
  GFR-binding peptide
  MOD_RES (2)..(33): Xaa is C or S

SEQ ID NO: 36664 - protein, 36 aa, Artificial Sequence; identical to SEQ ID NO: 12418
  GFR-binding peptide
  MOD_RES (2)..(36): Xaa is C or S
  MOD_RES (14)..(15)..(16)..(17)..(18): Xaa is A or G
  MOD_RES (19)..(20)..(21)..(22): Xaa is A or G or is absent

SEQ ID NO: 36665 - protein, 37 aa, Artificial Sequence; identical to SEQ ID NO: 12419
  GFR-binding peptide
  MOD_RES (1)..(35)..(36): Xaa is C or S
  MOD_RES (13)..(14)..(15)..(16)..(17): Xaa is A or G
  MOD_RES (18)..(19)..(20)..(21): Xaa is A or G or is absent

SEQ ID NO: 36666 - protein, 44 aa, Artificial Sequence; identical to SEQ ID NO: 10496
  GFR-binding peptide
  MOD_RES (2)..(4)..(38)..(39): Xaa is C or S
  MOD_RES (16)..(17)..(18)..(19)..(20): Xaa is A or G
  MOD_RES (21)..(22)..(23)..(24): Xaa is A or G or is absent

SEQ ID NO: 36667 - protein, 35 aa, Artificial Sequence; identical to SEQ ID NO: 10497
  GFR-binding peptide
  MOD_RES (1)..(3)..(35): Xaa is C or S

SEQ ID NO: 36668 - protein, 39 aa, Artificial Sequence; identical to SEQ ID NO: 10498
  GFR-binding peptide
  MOD_RES (1)..(3)..(36)..(37): Xaa is C or S
  MOD_RES (14)..(15)..(16)..(17)..(18): Xaa is A or G
  MOD_RES (19)..(20)..(21)..(22): Xaa is A or G or is absent

SEQ ID NO: 36669 - protein, 38 aa, Artificial Sequence; identical to SEQ ID NO: 4985
  GFR-binding peptide
  MOD_RES (2)..(4)..(35)..(36): Xaa is C or S

SEQ ID NO: 36670 - protein, 37 aa, Artificial Sequence; identical to SEQ ID NO: 12422
  GFR-binding peptide
  MOD_RES (34)..(35): Xaa is C or S
  MOD_RES (12)..(13)..(14)..(15)..(16): Xaa is A or G
  MOD_RES (17)..(18)..(19)..(20): Xaa is A or G or is absent

SEQ ID NO: 36671 - protein, 35 aa, Artificial Sequence; identical to SEQ ID NO: 10499
  GFR-binding peptide
  MOD_RES (2)..(4): Xaa is C or S

SEQ ID NO: 36672 - protein, 37 aa, Artificial Sequence; identical to SEQ ID NO: 10501
  GFR-binding peptide
  MOD_RES (33)..(34): Xaa is C or S
  MOD_RES (11)..(12)..(13)..(14)..(15): Xaa is A or G
  MOD_RES (16)..(17)..(18)..(19): Xaa is A or G or is absent

SEQ ID NO: 36673 - protein, 39 aa, Artificial Sequence; identical to SEQ ID NO: 10502
  GFR-binding peptide
  MOD_RES (1)..(3)..(36)..(37): Xaa is C or S
  MOD_RES (14)..(15)..(16)..(17)..(18): Xaa is A or G
  MOD_RES (19)..(20)..(21)..(22): Xaa is A or G or is absent

SEQ ID NO: 36674 - protein, 38 aa, Artificial Sequence; identical to SEQ ID NO: 12423
  GFR-binding peptide
  MOD_RES (1)..(3)..(37)..(38): Xaa is C or S
  MOD_RES (15)..(16)..(17)..(18)..(19): Xaa is A or G
  MOD_RES (20)..(21)..(22)..(23): Xaa is A or G or is absent

SEQ ID NO: 36675 - protein, 39 aa, Artificial Sequence; identical to SEQ ID NO: 10503
  GFR-binding peptide
  MOD_RES (1)..(3)..(37)..(38): Xaa is C or S
  MOD_RES (15)..(16)..(17)..(18)..(19): Xaa is A or G
  MOD_RES (20)..(21)..(22)..(23): Xaa is A or G or is absent

SEQ ID NO: 36676 - protein, 34 aa, Artificial Sequence; identical to SEQ ID NO: 10504
  GFR-binding peptide
  MOD_RES (31)..(32): Xaa is C or S

SEQ ID NO: 36677 - protein, 36 aa, Artificial Sequence; identical to SEQ ID NO: 12425
  GFR-binding peptide
  MOD_RES (1)..(3): Xaa is C or S
  MOD_RES (15)..(16)..(17)..(18)..(19): Xaa is A or G
  MOD_RES (20)..(21)..(22)..(23): Xaa is A or G or is absent

SEQ ID NO: 36678 - protein, 33 aa, Artificial Sequence; identical to SEQ ID NO: 10506
  GFR-binding peptide
  MOD_RES (33)..(33): Xaa is C or S
  MOD_RES (11)..(12)..(13)..(14)..(15): Xaa is A or G
  MOD_RES (16)..(17)..(18)..(19): Xaa is A or G or is absent

SEQ ID NO: 36679 - protein, 38 aa, Artificial Sequence; identical to SEQ ID NO: 10507
  GFR-binding peptide
  MOD_RES (2)..(36)..(37): Xaa is C or S
  MOD_RES (14)..(15)..(16)..(17)..(18): Xaa is A or G
  MOD_RES (19)..(20)..(21)..(22): Xaa is A or G or is absent

SEQ ID NO: 36680 - protein, 32 aa, Artificial Sequence; identical to SEQ ID NO: 12426
  GFR-binding peptide
  MOD_RES (31)..(32): Xaa is C or S

SEQ ID NO: 36681 - protein, 39 aa, Artificial Sequence; identical to SEQ ID NO: 10509
  GFR-binding peptide
  MOD_RES (2)..(36)..(37): Xaa is C or S
  MOD_RES (14)..(15)..(16)..(17)..(18): Xaa is A or G
  MOD_RES (19)..(20)..(21)..(22): Xaa is A or G or is absent

SEQ ID NO: 36682 - protein, 36 aa, Artificial Sequence; identical to SEQ ID NO: 12428
  GFR-binding peptide
  MOD_RES (1)..(34)..(35): Xaa is C or S
  MOD_RES (12)..(13)..(14)..(15)..(16): Xaa is A or G
  MOD_RES (17)..(18)..(19)..(20): Xaa is A or G or is absent

SEQ ID NO: 36683 - protein, 39 aa, Artificial Sequence; identical to SEQ ID NO: 10511
  GFR-binding peptide
  MOD_RES (1)..(3)..(34)..(35): Xaa is C or S

SEQ ID NO: 36684 - protein, 38 aa, Artificial Sequence; identical to SEQ ID NO: 3054
  GFR-binding peptide
  MOD_RES (1)..(3)..(36)..(37): Xaa is C or S
  MOD_RES (14)..(15)..(16)..(17)..(18): Xaa is A or G
  MOD_RES (19)..(20)..(21)..(22): Xaa is A or G or is absent

SEQ ID NO: 36685 - protein, 41 aa, Artificial Sequence; identical to SEQ ID NO: 12429
  GFR-binding peptide
  MOD_RES (2)..(36)..(37): Xaa is C or S
  MOD_RES (14)..(15)..(16)..(17)..(18): Xaa is A or G
  MOD_RES (19)..(20)..(21)..(22): Xaa is A or G or is absent

SEQ ID NO: 36686 - protein, 34 aa, Artificial Sequence; identical to SEQ ID NO: 10513
  GFR-binding peptide
  MOD_RES (33)..(34): Xaa is C or S
  MOD_RES (11)..(12)..(13)..(14)..(15): Xaa is A or G
  MOD_RES (16)..(17)..(18)..(19): Xaa is A or G or is absent

SEQ ID NO: 36687 - protein, 39 aa, Artificial Sequence; identical to SEQ ID NO: 12430
  GFR-binding peptide
  MOD_RES (2)..(36)..(37): Xaa is C or S
  MOD_RES (14)..(15)..(16)..(17)..(18): Xaa is A or G
  MOD_RES (19)..(20)..(21)..(22): Xaa is A or G or is absent

SEQ ID NO: 36688 - protein, 37 aa, Artificial Sequence; identical to SEQ ID NO: 3057
  GFR-binding peptide
  MOD_RES (34)..(35): Xaa is C or S
  MOD_RES (12)..(13)..(14)..(15)..(16): Xaa is A or G
  MOD_RES (17)..(18)..(19)..(20): Xaa is A or G or is absent

SEQ ID NO: 36689 - protein, 38 aa, Artificial Sequence; identical to SEQ ID NO: 12431
  GFR-binding peptide
  MOD_RES (2)..(4)..(38): Xaa is C or S
  MOD_RES (16)..(17)..(18)..(19)..(20): Xaa is A or G
  MOD_RES (21)..(22)..(23)..(24): Xaa is A or G or is absent

SEQ ID NO: 36690 - protein, 38 aa, Artificial Sequence; identical to SEQ ID NO: 12432
  GFR-binding peptide
  MOD_RES (1)..(3)..(35)..(36): Xaa is C or S

SEQ ID NO: 36691 - protein, 33 aa, Artificial Sequence; identical to SEQ ID NO: 10515
  GFR-binding peptide
  MOD_RES (31)..(32): Xaa is C or S

SEQ ID NO: 36692 - protein, 40 aa, Artificial Sequence; identical to SEQ ID NO: 10516
  GFR-binding peptide
  MOD_RES (1)..(34)..(35): Xaa is C or S
  MOD_RES (12)..(13)..(14)..(15)..(16): Xaa is A or G
  MOD_RES (17)..(18)..(19)..(20): Xaa is A or G or is absent

SEQ ID NO: 36693 - protein, 39 aa, Artificial Sequence; identical to SEQ ID NO: 12433
  GFR-binding peptide
  MOD_RES (1)..(3)..(35)..(36): Xaa is C or S

SEQ ID NO: 36694 - protein, 38 aa, Artificial Sequence; identical to SEQ ID NO: 4991
  GFR-binding peptide
  MOD_RES (2)..(33)..(34): Xaa is C or S

SEQ ID NO: 36695 - protein, 44 aa, Artificial Sequence; identical to SEQ ID NO: 10517
  GFR-binding peptide
  MOD_RES (2)..(4)..(38)..(39): Xaa is C or S
  MOD_RES (16)..(17)..(18)..(19)..(20): Xaa is A or G
  MOD_RES (21)..(22)..(23)..(24): Xaa is A or G or is absent

SEQ ID NO: 36696 - protein, 40 aa, Artificial Sequence; identical to SEQ ID NO: 10518
  GFR-binding peptide
  MOD_RES (2)..(36): Xaa is C or S
  MOD_RES (14)..(15)..(16)..(17)..(18): Xaa is A or G
  MOD_RES (19)..(20)..(21)..(22): Xaa is A or G or is absent

SEQ ID NO: 36697 - protein, 32 aa, Artificial Sequence; identical to SEQ ID NO: 3061
  GFR-binding peptide
  MOD_RES (11)..(12)..(13)..(14)..(15): Xaa is A or G
  MOD_RES (16)..(17)..(18)..(19): Xaa is A or G or is absent

SEQ ID NO: 36698 - protein, 34 aa, Artificial Sequence; identical to SEQ ID NO: 10522
  GFR-binding peptide
  MOD_RES (34)..(34): Xaa is C or S
  MOD_RES (12)..(13)..(14)..(15)..(16): Xaa is A or G
  MOD_RES (17)..(18)..(19)..(20): Xaa is A or G or is absent

SEQ ID NO: 36699 - protein, 36 aa, Artificial Sequence; identical to SEQ ID NO: 12436
  GFR-binding peptide
  MOD_RES (34)..(35): Xaa is C or S
  MOD_RES (12)..(13)..(14)..(15)..(16): Xaa is A or G
  MOD_RES (17)..(18)..(19)..(20): Xaa is A or G or is absent

SEQ ID NO: 36700 - protein, 38 aa, Artificial Sequence; identical to SEQ ID NO: 10523
  GFR-binding peptide
  MOD_RES (2)..(36)..(37): Xaa is C or S
  MOD_RES (14)..(15)..(16)..(17)..(18): Xaa is A or G
  MOD_RES (19)..(20)..(21)..(22): Xaa is A or G or is absent

SEQ ID NO: 36701 - protein, 32 aa, Artificial Sequence; identical to SEQ ID NO: 12437
  GFR-binding peptide
  MOD_RES (32)..(32): Xaa is C or S

SEQ ID NO: 36702 - protein, 40 aa, Artificial Sequence; identical to SEQ ID NO: 12438
  GFR-binding peptide
  MOD_RES (2)..(34)..(35): Xaa is C or S

SEQ ID NO: 36703 - protein, 41 aa, Artificial Sequence; identical to SEQ ID NO: 12439
  GFR-binding peptide
  MOD_RES (2)..(4)..(38)..(39): Xaa is C or S
  MOD_RES (16)..(17)..(18)..(19)..(20): Xaa is A or G
  MOD_RES (21)..(22)..(23)..(24): Xaa is A or G or is absent

SEQ ID NO: 36704 - protein, 38 aa, Artificial Sequence; identical to SEQ ID NO: 10524
  GFR-binding peptide
  MOD_RES (1)..(3)..(37)..(38): Xaa is C or S
  MOD_RES (15)..(16)..(17)..(18)..(19): Xaa is A or G
  MOD_RES (20)..(21)..(22)..(23): Xaa is A or G or is absent

SEQ ID NO: 36705 - protein, 36 aa, Artificial Sequence; identical to SEQ ID NO: 12440
  GFR-binding peptide
  MOD_RES (1)..(34)..(35): Xaa is C or S
  MOD_RES (12)..(13)..(14)..(15)..(16): Xaa is A or G
  MOD_RES (17)..(18)..(19)..(20): Xaa is A or G or is absent

SEQ ID NO: 36706 - protein, 35 aa, Artificial Sequence; identical to SEQ ID NO: 5000
  GFR-binding peptide
  MOD_RES (2)..(34)..(35): Xaa is C or S

SEQ ID NO: 36707 - protein, 40 aa, Artificial Sequence; identical to SEQ ID NO: 10525
  GFR-binding peptide
  MOD_RES (2)..(4)..(37)..(38): Xaa is C or S
  MOD_RES (15)..(16)..(17)..(18)..(19): Xaa is A or G
  MOD_RES (20)..(21)..(22)..(23): Xaa is A or G or is absent

SEQ ID NO: 36708 - protein, 34 aa, Artificial Sequence; identical to SEQ ID NO: 12442
  GFR-binding peptide
  MOD_RES (1)..(1): Xaa is C or S
  MOD_RES (13)..(14)..(15)..(16)..(17): Xaa is A or G
  MOD_RES (18)..(19)..(20)..(21): Xaa is A or G or is absent

SEQ ID NO: 36709 - protein, 32 aa, Artificial Sequence; identical to SEQ ID NO: 10527
  GFR-binding peptide
  MOD_RES (31)..(32): Xaa is C or S

SEQ ID NO: 36710 - protein, 30 aa, Artificial Sequence
  GFR-binding peptide
SKVIMNSLQEIKPTKGIYYLITLPELDQSV

SEQ ID NO: 36711 - protein, 37 aa, Artificial Sequence; identical to SEQ ID NO: 10528
  GFR-binding peptide
  MOD_RES (1)..(3)..(37): Xaa is C or S
  MOD_RES (15)..(16)..(17)..(18)..(19): Xaa is A or G
  MOD_RES (20)..(21)..(22)..(23): Xaa is A or G or is absent

SEQ ID NO: 36712 - protein, 37 aa, Artificial Sequence; identical to SEQ ID NO: 5006
  GFR-binding peptide
  MOD_RES (1)..(3)..(34)..(35): Xaa is C or S

SEQ ID NO: 36713 - protein, 35 aa, Artificial Sequence; identical to SEQ ID NO: 10529
  GFR-binding peptide
  MOD_RES (1)..(34)..(35): Xaa is C or S
  MOD_RES (12)..(13)..(14)..(15)..(16): Xaa is A or G
  MOD_RES (17)..(18)..(19)..(20): Xaa is A or G or is absent

SEQ ID NO: 36714 - protein, 31 aa, Artificial Sequence; identical to SEQ ID NO: 3074
  GFR-binding peptide
  MOD_RES (31)..(31): Xaa is C or S

SEQ ID NO: 36715 - protein, 39 aa, Artificial Sequence; identical to SEQ ID NO: 10531
  GFR-binding peptide
  MOD_RES (1)..(3)..(37)..(38): Xaa is C or S
  MOD_RES (15)..(16)..(17)..(18)..(19): Xaa is A or G
  MOD_RES (20)..(21)..(22)..(23): Xaa is A or G or is absent

SEQ ID NO: 36716 - protein, 37 aa, Artificial Sequence; identical to SEQ ID NO: 10532
  GFR-binding peptide
  MOD_RES (34)..(35): Xaa is C or S
  MOD_RES (12)..(13)..(14)..(15)..(16): Xaa is A or G
  MOD_RES (17)..(18)..(19)..(20): Xaa is A or G or is absent

SEQ ID NO: 36717 - protein, 34 aa, Artificial Sequence; identical to SEQ ID NO: 10533
  GFR-binding peptide
  MOD_RES (31)..(32): Xaa is C or S

SEQ ID NO: 36718 - protein, 34 aa, Artificial Sequence; identical to SEQ ID NO: 12444
  GFR-binding peptide
  MOD_RES (33)..(34): Xaa is C or S
  MOD_RES (11)..(12)..(13)..(14)..(15): Xaa is A or G
  MOD_RES (16)..(17)..(18)..(19): Xaa is A or G or is absent

SEQ ID NO: 36719 - protein, 33 aa, Artificial Sequence; identical to SEQ ID NO: 12445
  GFR-binding peptide
  MOD_RES (31)..(32): Xaa is C or S

SEQ ID NO: 36720 - protein, 37 aa, Artificial Sequence; identical to SEQ ID NO: 12447
  GFR-binding peptide
  MOD_RES (1)..(35)..(36): Xaa is C or S
  MOD_RES (13)..(14)..(15)..(16)..(17): Xaa is A or G
  MOD_RES (18)..(19)..(20)..(21): Xaa is A or G or is absent

SEQ ID NO: 36721 - protein, 41 aa, Artificial Sequence; identical to SEQ ID NO: 10534
  GFR-binding peptide
  MOD_RES (1)..(35)..(36): Xaa is C or S
  MOD_RES (13)..(14)..(15)..(16)..(17): Xaa is A or G
  MOD_RES (18)..(19)..(20)..(21): Xaa is A or G or is absent

SEQ ID NO: 36722 - protein, 36 aa, Artificial Sequence; identical to SEQ ID NO: 10535
  GFR-binding peptide
  MOD_RES (31)..(32): Xaa is C or S

SEQ ID NO: 36723 - protein, 38 aa, Artificial Sequence; identical to SEQ ID NO: 10536
  GFR-binding peptide
  MOD_RES (2)..(4)..(38): Xaa is C or S
  MOD_RES (16)..(17)..(18)..(19)..(20): Xaa is A or G
  MOD_RES (21)..(22)..(23)..(24): Xaa is A or G or is absent

SEQ ID NO: 36724 - protein, 34 aa, Artificial Sequence; identical to SEQ ID NO: 3078
  GFR-binding peptide
  MOD_RES (33)..(34): Xaa is C or S
  MOD_RES (11)..(12)..(13)..(14)..(15): Xaa is A or G
  MOD_RES (16)..(17)..(18)..(19): Xaa is A or G or is absent

SEQ ID NO: 36725 - protein, 37 aa, Artificial Sequence; identical to SEQ ID NO: 12450
  GFR-binding peptide
  MOD_RES (1)..(3)..(35)..(36): Xaa is C or S

SEQ ID NO: 36726 - protein, 39 aa, Artificial Sequence; identical to SEQ ID NO: 12451
  GFR-binding peptide
  MOD_RES (2)..(34)..(35): Xaa is C or S

SEQ ID NO: 36727 - protein, 32 aa, Artificial Sequence; identical to SEQ ID NO: 10538
  GFR-binding peptide
  MOD_RES (1)..(32): Xaa is C or S

SEQ ID NO: 36728 - protein, 37 aa, Artificial Sequence
  GFR-binding peptide
  MOD_RES (2)..(35)..(36): Xaa is C or S
  MOD_RES (13)..(14)..(15)..(16)..(17): Xaa is A or G
  MOD_RES (18)..(19)..(20)..(21): Xaa is A or G or is absent
KXSKVIMNSLQEXXXXXXXXXYYLITLPELDQSVXXP

SEQ ID NO: 36729 - protein, 42 aa, Artificial Sequence; identical to SEQ ID NO: 10539
  GFR-binding peptide
  MOD_RES (2)..(4)..(38)..(39): Xaa is C or S
  MOD_RES (16)..(17)..(18)..(19)..(20): Xaa is A or G
  MOD_RES (21)..(22)..(23)..(24): Xaa is A or G or is absent

SEQ ID NO: 36730 - protein, 37 aa, Artificial Sequence; identical to SEQ ID NO: 10541
  GFR-binding peptide
  MOD_RES (31)..(32): Xaa is C or S

SEQ ID NO: 36731 - protein, 33 aa, Artificial Sequence; identical to SEQ ID NO: 10542
  GFR-binding peptide
  MOD_RES (32)..(32): Xaa is C or S

SEQ ID NO: 36732 - protein, 32 aa, Artificial Sequence; identical to SEQ ID NO: 10543
  GFR-binding peptide
  MOD_RES (1)..(1): Xaa is C or S

SEQ ID NO: 36733 - protein, 37 aa, Artificial Sequence; identical to SEQ ID NO: 12452
  GFR-binding peptide
  MOD_RES (2)..(35)..(36): Xaa is C or S
  MOD_RES (13)..(14)..(15)..(16)..(17): Xaa is A or G
  MOD_RES (18)..(19)..(20)..(21): Xaa is A or G or is absent

SEQ ID NO: 36734 - protein, 34 aa, Artificial Sequence; identical to SEQ ID NO: 3087
  GFR-binding peptide
  MOD_RES (1)..(32)..(33): Xaa is C or S

SEQ ID NO: 36735 - protein, 35 aa, Artificial Sequence; identical to SEQ ID NO: 10545
  GFR-binding peptide
  MOD_RES (2)..(34): Xaa is C or S

SEQ ID NO: 36736 - protein, 38 aa, Artificial Sequence; identical to SEQ ID NO: 3088
  GFR-binding peptide
  MOD_RES (1)..(32)..(33): Xaa is C or S

SEQ ID NO: 36737 - protein, 38 aa, Artificial Sequence; identical to SEQ ID NO: 12454
  GFR-binding peptide
  MOD_RES (2)..(4)..(36)..(37): Xaa is C or S

SEQ ID NO: 36738 - protein, 40 aa, Artificial Sequence; identical to SEQ ID NO: 10547
  GFR-binding peptide
  MOD_RES (34)..(35): Xaa is C or S
  MOD_RES (12)..(13)..(14)..(15)..(16): Xaa is A or G
  MOD_RES (17)..(18)..(19)..(20): Xaa is A or G or is absent

SEQ ID NO: 36739 - protein, 35 aa, Artificial Sequence; identical to SEQ ID NO: 12455
  GFR-binding peptide
  MOD_RES (2)..(2): Xaa is C or S
  MOD_RES (14)..(15)..(16)..(17)..(18): Xaa is A or G
  MOD_RES (19)..(20)..(21)..(22): Xaa is A or G or is absent

SEQ ID NO: 36740 - protein, 35 aa, Artificial Sequence; identical to SEQ ID NO: 10548
  GFR-binding peptide
  MOD_RES (2)..(4): Xaa is C or S

SEQ ID NO: 36741 - protein, 37 aa, Artificial Sequence; identical to SEQ ID NO: 10549
  GFR-binding peptide
  MOD_RES (34)..(35): Xaa is C or S
  MOD_RES (12)..(13)..(14)..(15)..(16): Xaa is A or G
  MOD_RES (17)..(18)..(19)..(20): Xaa is A or G or is absent

SEQ ID NO: 36742 - protein, 34 aa, Artificial Sequence; identical to SEQ ID NO: 12456
  GFR-binding peptide
  MOD_RES (1)..(1): Xaa is C or S
  MOD_RES (13)..(14)..(15)..(16)..(17): Xaa is A or G
  MOD_RES (18)..(19)..(20)..(21): Xaa is A or G or is absent

SEQ ID NO: 36743 - protein, 41 aa, Artificial Sequence; identical to SEQ ID NO: 10550
  GFR-binding peptide
  MOD_RES (2)..(36)..(37): Xaa is C or S
  MOD_RES (14)..(15)..(16)..(17)..(18): Xaa is A or G
  MOD_RES (19)..(20)..(21)..(22): Xaa is A or G or is absent

SEQ ID NO: 36744 - protein, 40 aa, Artificial Sequence; identical to SEQ ID NO: 10551
  GFR-binding peptide
  MOD_RES (2)..(36)..(37): Xaa is C or S
  MOD_RES (14)..(15)..(16)..(17)..(18): Xaa is A or G
  MOD_RES (19)..(20)..(21)..(22): Xaa is A or G or is absent

SEQ ID NO: 36745 - protein, 36 aa, Artificial Sequence; identical to SEQ ID NO: 5025
  GFR-binding peptide
  MOD_RES (2)..(35)..(36): Xaa is C or S
  MOD_RES (13)..(14)..(15)..(16)..(17): Xaa is A or G
  MOD_RES (18)..(19)..(20)..(21): Xaa is A or G or is absent

SEQ ID NO: 36746 - protein, 39 aa, Artificial Sequence; identical to SEQ ID NO: 12458
  GFR-binding peptide
  MOD_RES (1)..(34)..(35): Xaa is C or S
  MOD_RES (12)..(13)..(14)..(15)..(16): Xaa is A or G
  MOD_RES (17)..(18)..(19)..(20): Xaa is A or G or is absent

SEQ ID NO: 36747 - protein, 40 aa, Artificial Sequence; identical to SEQ ID NO: 12459
  GFR-binding peptide
  MOD_RES (2)..(4)..(38)..(39): Xaa is C or S
  MOD_RES (16)..(17)..(18)..(19)..(20): Xaa is A or G
  MOD_RES (21)..(22)..(23)..(24): Xaa is A or G or is absent

SEQ ID NO: 36748 - protein, 37 aa, Artificial Sequence; identical to SEQ ID NO: 10554
  GFR-binding peptide
  MOD_RES (1)..(34)..(35): Xaa is C or S
  MOD_RES (12)..(13)..(14)..(15)..(16): Xaa is A or G
  MOD_RES (17)..(18)..(19)..(20): Xaa is A or G or is absent

SEQ ID NO: 36749 - protein, 40 aa, Artificial Sequence; identical to SEQ ID NO: 10555
  GFR-binding peptide
  MOD_RES (1)..(3)..(36)..(37): Xaa is C or S
  MOD_RES (14)..(15)..(16)..(17)..(18): Xaa is A or G
  MOD_RES (19)..(20)..(21)..(22): Xaa is A or G or is absent

SEQ ID NO: 36750 - protein, 37 aa, Artificial Sequence; identical to SEQ ID NO: 12460
  GFR-binding peptide
  MOD_RES (1)..(3)..(37): Xaa is C or S
  MOD_RES (15)..(16)..(17)..(18)..(19): Xaa is A or G
  MOD_RES (20)..(21)..(22)..(23): Xaa is A or G or is absent

SEQ ID NO: 36751 - protein, 35 aa, Artificial Sequence; identical to SEQ ID NO: 10556
  GFR-binding peptide
  MOD_RES (1)..(3): Xaa is C or S
  MOD_RES (14)..(15)..(16)..(17)..(18): Xaa is A or G
  MOD_RES (19)..(20)..(21)..(22): Xaa is A or G or is absent

SEQ ID NO: 36752 - protein, 37 aa, Artificial Sequence; identical to SEQ ID NO: 10557
  GFR-binding peptide
  MOD_RES (1)..(32)..(33): Xaa is C or S

SEQ ID NO: 36753 - protein, 35 aa, Artificial Sequence; identical to SEQ ID NO: 10558
  GFR-binding peptide
  MOD_RES (1)..(3)..(34)..(35): Xaa is C or S

SEQ ID NO: 36754 - protein, 35 aa, Artificial Sequence; identical to SEQ ID NO: 10559
  GFR-binding peptide
  MOD_RES (34)..(35): Xaa is C or S
  MOD_RES (12)..(13)..(14)..(15)..(16): Xaa is A or G
  MOD_RES (17)..(18)..(19)..(20): Xaa is A or G or is absent

SEQ ID NO: 36755 - protein, 38 aa, Artificial Sequence; identical to SEQ ID NO: 12463
  GFR-binding peptide
  MOD_RES (2)..(34): Xaa is C or S

SEQ ID NO: 36756 - protein, 30 aa, Artificial Sequence; identical to SEQ ID NO: 10560
  GFR-binding peptide

SEQ ID NO: 36757 - protein, 36 aa, Artificial Sequence; identical to SEQ ID NO: 10561
  GFR-binding peptide
  MOD_RES (2)..(4)..(36): Xaa is C or S

SEQ ID NO: 36758 - protein, 42 aa, Artificial Sequence; identical to SEQ ID NO: 10562
  GFR-binding peptide
  MOD_RES (2)..(36)..(37): Xaa is C or S
  MOD_RES (14)..(15)..(16)..(17)..(18): Xaa is A or G
  MOD_RES (19)..(20)..(21)..(22): Xaa is A or G or is absent

SEQ ID NO: 36759 - protein, 37 aa, Artificial Sequence; identical to SEQ ID NO: 3101
  GFR-binding peptide
  MOD_RES (1)..(3)..(35)..(36): Xaa is C or S

SEQ ID NO: 36760 - protein, 41 aa, Artificial Sequence; identical to SEQ ID NO: 5035
  GFR-binding peptide
  MOD_RES (2)..(4)..(38)..(39): Xaa is C or S
  MOD_RES (16)..(17)..(18)..(19)..(20): Xaa is A or G
  MOD_RES (21)..(22)..(23)..(24): Xaa is A or G or is absent

SEQ ID NO: 36761 - protein, 34 aa, Artificial Sequence; identical to SEQ ID NO: 10565
  GFR-binding peptide
  MOD_RES (33)..(34): Xaa is C or S
  MOD_RES (11)..(12)..(13)..(14)..(15): Xaa is A or G
  MOD_RES (16)..(17)..(18)..(19): Xaa is A or G or is absent

SEQ ID NO: 36762 - protein, 33 aa, Artificial Sequence; identical to SEQ ID NO: 12466
  GFR-binding peptide
  MOD_RES (33)..(33): Xaa is C or S
  MOD_RES (11)..(12)..(13)..(14)..(15): Xaa is A or G
  MOD_RES (16)..(17)..(18)..(19): Xaa is A or G or is absent

SEQ ID NO: 36763 - protein, 33 aa, Artificial Sequence; identical to SEQ ID NO: 12467
  GFR-binding peptide
  MOD_RES (2)..(2): Xaa is C or S

SEQ ID NO: 36764 - protein, 35 aa, Artificial Sequence; identical to SEQ ID NO: 10567
  GFR-binding peptide
  MOD_RES (2)..(34)..(35): Xaa is C or S

SEQ ID NO: 36765 - protein, 39 aa, Artificial Sequence; identical to SEQ ID NO: 10568
  GFR-binding peptide
  MOD_RES (1)..(35): Xaa is C or S
  MOD_RES (13)..(14)..(15)..(16)..(17): Xaa is A or G
  MOD_RES (18)..(19)..(20)..(21): Xaa is A or G or is absent

SEQ ID NO: 36766 - protein, 39 aa, Artificial Sequence; identical to SEQ ID NO: 10569
  GFR-binding peptide
  MOD_RES (1)..(3)..(34)..(35): Xaa is C or S

SEQ ID NO: 36767 - protein, 32 aa, Artificial Sequence; identical to SEQ ID NO: 12468
  GFR-binding peptide
  MOD_RES (1)..(1): Xaa is C or S

SEQ ID NO: 36768 - protein, 38 aa, Artificial Sequence; identical to SEQ ID NO: 12469
  GFR-binding peptide
  MOD_RES (33)..(34): Xaa is C or S
  MOD_RES (11)..(12)..(13)..(14)..(15): Xaa is A or G
  MOD_RES (16)..(17)..(18)..(19): Xaa is A or G or is absent

SEQ ID NO: 36769 - protein, 38 aa, Artificial Sequence; identical to SEQ ID NO: 12470
  GFR-binding peptide
  MOD_RES (2)..(34)..(35): Xaa is C or S

SEQ ID NO: 36770 - protein, 35 aa, Artificial Sequence
  GFR-binding peptide
  MOD_RES (1)..(34)..(35): Xaa is C or S
  MOD_RES (12)..(13)..(14)..(15)..(16): Xaa is A or G
  MOD_RES (17)..(18)..(19)..(20): Xaa is A or G or is absent
XSKVIMNSLQEXXXXXXXXXYYLITLPELDQSVXX

SEQ ID NO: 36771 - protein, 38 aa, Artificial Sequence; identical to SEQ ID NO: 12471
  GFR-binding peptide
  MOD_RES (2)..(36): Xaa is C or S
  MOD_RES (14)..(15)..(16)..(17)..(18): Xaa is A or G
  MOD_RES (19)..(20)..(21)..(22): Xaa is A or G or is absent

SEQ ID NO: 36772 - protein, 35 aa, Artificial Sequence; identical to SEQ ID NO: 12472
  GFR-binding peptide
  MOD_RES (1)..(33): Xaa is C or S

SEQ ID NO: 36773 - protein, 33 aa, Artificial Sequence; identical to SEQ ID NO: 12473
  GFR-binding peptide
  MOD_RES (31)..(32): Xaa is C or S

SEQ ID NO: 36774 - protein, 37 aa, Artificial Sequence; identical to SEQ ID NO: 5044
  GFR-binding peptide
  MOD_RES (32)..(33): Xaa is C or S

SEQ ID NO: 36775 - protein, 32 aa, Artificial Sequence; identical to SEQ ID NO: 12475
  GFR-binding peptide
  MOD_RES (11)..(12)..(13)..(14)..(15): Xaa is A or G
  MOD_RES (16)..(17)..(18)..(19): Xaa is A or G or is absent

SEQ ID NO: 36776 - protein, 36 aa, Artificial Sequence; identical to SEQ ID NO: 10576
  GFR-binding peptide
  MOD_RES (34)..(34): Xaa is C or S
  MOD_RES (12)..(13)..(14)..(15)..(16): Xaa is A or G
  MOD_RES (17)..(18)..(19)..(20): Xaa is A or G or is absent

SEQ ID NO: 36777 - protein, 37 aa, Artificial Sequence; identical to SEQ ID NO: 3124
  GFR-binding peptide
  MOD_RES (2)..(4)..(37): Xaa is C or S
  MOD_RES (15)..(16)..(17)..(18)..(19): Xaa is A or G
  MOD_RES (20)..(21)..(22)..(23): Xaa is A or G or is absent

SEQ ID NO: 36778 - protein, 38 aa, Artificial Sequence; identical to SEQ ID NO: 12476
  GFR-binding peptide
  MOD_RES (32)..(32): Xaa is C or S

SEQ ID NO: 36779 - protein, 40 aa, Artificial Sequence; identical to SEQ ID NO: 12477
  GFR-binding peptide
  MOD_RES (1)..(3)..(35)..(36): Xaa is C or S

SEQ ID NO: 36780 - protein, 35 aa, Artificial Sequence; identical to SEQ ID NO: 12478
  GFR-binding peptide
  MOD_RES (32)..(33): Xaa is C or S

SEQ ID NO: 36781 - protein, 39 aa, Artificial Sequence; identical to SEQ ID NO: 10579
  GFR-binding peptide
  MOD_RES (33)..(33): Xaa is C or S
  MOD_RES (11)..(12)..(13)..(14)..(15): Xaa is A or G
  MOD_RES (16)..(17)..(18)..(19): Xaa is A or G or is absent

SEQ ID NO: 36782 - protein, 35 aa, Artificial Sequence; identical to SEQ ID NO: 12479
  GFR-binding peptide
  MOD_RES (2)..(35): Xaa is C or S
  MOD_RES (13)..(14)..(15)..(16)..(17): Xaa is A or G
  MOD_RES (18)..(19)..(20)..(21): Xaa is A or G or is absent

SEQ ID NO: 36783 - protein, 32 aa, Artificial Sequence; identical to SEQ ID NO: 10580
  GFR-binding peptide
  MOD_RES (32)..(32): Xaa is C or S

SEQ ID NO: 36784 - protein, 43 aa, Artificial Sequence; identical to SEQ ID NO: 10581
  GFR-binding peptide
  MOD_RES (1)..(3)..(37)..(38): Xaa is C or S
  MOD_RES (15)..(16)..(17)..(18)..(19): Xaa is A or G
  MOD_RES (20)..(21)..(22)..(23): Xaa is A or G or is absent

SEQ ID NO: 36785 - protein, 41 aa, Artificial Sequence; identical to SEQ ID NO: 10583
  GFR-binding peptide
  MOD_RES (2)..(4)..(36)..(37): Xaa is C or S

SEQ ID NO: 36786 - protein, 39 aa, Artificial Sequence; identical to SEQ ID NO: 10584
  GFR-binding peptide
  MOD_RES (2)..(4)..(38)..(39): Xaa is C or S
  MOD_RES (16)..(17)..(18)..(19)..(20): Xaa is A or G
  MOD_RES (21)..(22)..(23)..(24): Xaa is A or G or is absent

SEQ ID NO: 36787 - protein, 35 aa, Artificial Sequence; identical to SEQ ID NO: 12480
  GFR-binding peptide
  MOD_RES (1)..(35): Xaa is C or S
  MOD_RES (13)..(14)..(15)..(16)..(17): Xaa is A or G
  MOD_RES (18)..(19)..(20)..(21): Xaa is A or G or is absent

SEQ ID NO: 36788 - protein, 35 aa, Artificial Sequence; identical to SEQ ID NO: 12481
  GFR-binding peptide
  MOD_RES (31)..(32): Xaa is C or S

SEQ ID NO: 36789 - protein, 42 aa, Artificial Sequence; identical to SEQ ID NO: 10585
  GFR-binding peptide
  MOD_RES (2)..(4)..(38)..(39): Xaa is C or S
  MOD_RES (16)..(17)..(18)..(19)..(20): Xaa is A or G
  MOD_RES (21)..(22)..(23)..(24): Xaa is A or G or is absent

SEQ ID NO: 36790 - protein, 35 aa, Artificial Sequence; identical to SEQ ID NO: 12483
  GFR-binding peptide
  MOD_RES (2)..(33)..(34): Xaa is C or S

SEQ ID NO: 36791 - protein, 44 aa, Artificial Sequence; identical to SEQ ID NO: 12486
  GFR-binding peptide
  MOD_RES (2)..(4)..(38): Xaa is C or S
  MOD_RES (16)..(17)..(18)..(19)..(20): Xaa is A or G
  MOD_RES (21)..(22)..(23)..(24): Xaa is A or G or is absent

SEQ ID NO: 36792 - protein, 33 aa, Artificial Sequence; identical to SEQ ID NO: 10587
  GFR-binding peptide
  MOD_RES (1)..(33): Xaa is C or S

SEQ ID NO: 36793 - protein, 43 aa, Artificial Sequence; identical to SEQ ID NO: 10588
  GFR-binding peptide
  MOD_RES (2)..(4)..(38)..(39): Xaa is C or S
  MOD_RES (16)..(17)..(18)..(19)..(20): Xaa is A or G
  MOD_RES (21)..(22)..(23)..(24): Xaa is A or G or is absent

SEQ ID NO: 36794 - protein, 39 aa, Artificial Sequence; identical to SEQ ID NO: 10590
  GFR-binding peptide
  MOD_RES (1)..(3)..(37)..(38): Xaa is C or S
  MOD_RES (15)..(16)..(17)..(18)..(19): Xaa is A or G
  MOD_RES (20)..(21)..(22)..(23): Xaa is A or G or is absent

SEQ ID NO: 36795 - protein, 38 aa, Artificial Sequence; identical to SEQ ID NO: 3138
  GFR-binding peptide
  MOD_RES (34)..(35): Xaa is C or S
  MOD_RES (12)..(13)..(14)..(15)..(16): Xaa is A or G
  MOD_RES (17)..(18)..(19)..(20): Xaa is A or G or is absent

SEQ ID NO: 36796 - protein, 40 aa, Artificial Sequence; identical to SEQ ID NO: 12488
  GFR-binding peptide
  MOD_RES (2)..(4)..(36)..(37): Xaa is C or S

SEQ ID NO: 36797 - protein, 39 aa, Artificial Sequence; identical to SEQ ID NO: 10593
  GFR-binding peptide
  MOD_RES (2)..(4)..(36)..(37): Xaa is C or S

SEQ ID NO: 36798 - protein, 41 aa, Artificial Sequence; identical to SEQ ID NO: 10594
  GFR-binding peptide
  MOD_RES (1)..(3)..(37)..(38): Xaa is C or S
  MOD_RES (15)..(16)..(17)..(18)..(19): Xaa is A or G
  MOD_RES (20)..(21)..(22)..(23): Xaa is A or G or is absent

SEQ ID NO: 36799 - protein, 36 aa, Artificial Sequence; identical to SEQ ID NO: 12490
  GFR-binding peptide
  MOD_RES (32)..(33): Xaa is C or S

SEQ ID NO: 36800 - protein, 37 aa, Artificial Sequence; identical to SEQ ID NO: 10595
  GFR-binding peptide
  MOD_RES (2)..(4): Xaa is C or S
  MOD_RES (16)..(17)..(18)..(19)..(20): Xaa is A or G
  MOD_RES (21)..(22)..(23)..(24): Xaa is A or G or is absent

SEQ ID NO: 36801 - protein, 36 aa, Artificial Sequence; identical to SEQ ID NO: 5060
  GFR-binding peptide
  MOD_RES (31)..(32): Xaa is C or S

SEQ ID NO: 36802 - protein, 42 aa, Artificial Sequence; identical to SEQ ID NO: 12492
  GFR-binding peptide
  MOD_RES (2)..(4)..(38)..(39): Xaa is C or S
  MOD_RES (16)..(17)..(18)..(19)..(20): Xaa is A or G
  MOD_RES (21)..(22)..(23)..(24): Xaa is A or G or is absent

SEQ ID NO: 36803 - protein, 36 aa, Artificial Sequence; identical to SEQ ID NO: 12493
  GFR-binding peptide
  MOD_RES (2)..(35)..(36): Xaa is C or S
  MOD_RES (13)..(14)..(15)..(16)..(17): Xaa is A or G
  MOD_RES (18)..(19)..(20)..(21): Xaa is A or G or is absent

SEQ ID NO: 36804 - protein, 35 aa, Artificial Sequence; identical to SEQ ID NO: 12494
  GFR-binding peptide
  MOD_RES (2)..(33)..(34): Xaa is C or S

SEQ ID NO: 36805 - protein, 36 aa, Artificial Sequence; identical to SEQ ID NO: 12495
  GFR-binding peptide
  MOD_RES (32)..(33): Xaa is C or S

SEQ ID NO: 36806 - protein, 36 aa, Artificial Sequence; identical to SEQ ID NO: 12496
  GFR-binding peptide
  MOD_RES (31)..(31): Xaa is C or S

SEQ ID NO: 36807 - protein, 38 aa, Artificial Sequence; identical to SEQ ID NO: 12497
  GFR-binding peptide
  MOD_RES (1)..(3)..(37)..(38): Xaa is C or S
  MOD_RES (15)..(16)..(17)..(18)..(19): Xaa is A or G
  MOD_RES (20)..(21)..(22)..(23): Xaa is A or G or is absent

SEQ ID NO: 36808 - protein, 31 aa, Artificial Sequence; identical to SEQ ID NO: 12498
  GFR-binding peptide
  MOD_RES (31)..(31): Xaa is C or S

SEQ ID NO: 36809 - protein, 37 aa, Artificial Sequence; identical to SEQ ID NO: 12500
  GFR-binding peptide
  MOD_RES (31)..(32): Xaa is C or S

SEQ ID NO: 36810 - protein, 42 aa, Artificial Sequence; identical to SEQ ID NO: 12501
  GFR-binding peptide
  MOD_RES (2)..(36)..(37): Xaa is C or S
  MOD_RES (14)..(15)..(16)..(17)..(18): Xaa is A or G
  MOD_RES (19)..(20)..(21)..(22): Xaa is A or G or is absent

SEQ ID NO: 36811 - protein, 35 aa, Artificial Sequence; identical to SEQ ID NO: 10597
  GFR-binding peptide
  MOD_RES (31)..(31): Xaa is C or S

SEQ ID NO: 36812 - protein, 39 aa, Artificial Sequence; identical to SEQ ID NO: 10598
  GFR-binding peptide
  MOD_RES (2)..(34)..(35): Xaa is C or S

SEQ ID NO: 36813 - protein, 32 aa, Artificial Sequence; identical to SEQ ID NO: 10600
  GFR-binding peptide
  MOD_RES (2)..(2): Xaa is C or S

SEQ ID NO: 36814 - protein, 34 aa, Artificial Sequence; identical to SEQ ID NO: 12502
  GFR-binding peptide
  MOD_RES (1)..(33)..(34): Xaa is C or S

SEQ ID NO: 36815 - protein, 42 aa, Artificial Sequence; identical to SEQ ID NO: 10601
  GFR-binding peptide
  MOD_RES (2)..(4)..(36)..(37): Xaa is C or S

SEQ ID NO: 36816 - protein, 40 aa, Artificial Sequence; identical to SEQ ID NO: 10602
  GFR-binding peptide
  MOD_RES (2)..(35)..(36): Xaa is C or S
  MOD_RES (13)..(14)..(15)..(16)..(17): Xaa is A or G
  MOD_RES (18)..(19)..(20)..(21): Xaa is A or G or is absent

SEQ ID NO: 36817 - protein, 31 aa, Artificial Sequence; identical to SEQ ID NO: 3149
  GFR-binding peptide
  MOD_RES (31)..(31): Xaa is C or S

SEQ ID NO: 36818 - protein, 36 aa, Artificial Sequence; identical to SEQ ID NO: 10604
  GFR-binding peptide
  MOD_RES (1)..(3): Xaa is C or S
  MOD_RES (15)..(16)..(17)..(18)..(19): Xaa is A or G
  MOD_RES (20)..(21)..(22)..(23): Xaa is A or G or is absent

SEQ ID NO: 36819 - protein, 35 aa, Artificial Sequence; identical to SEQ ID NO: 12503
  GFR-binding peptide
  MOD_RES (33)..(34): Xaa is C or S
  MOD_RES (11)..(12)..(13)..(14)..(15): Xaa is A or G
  MOD_RES (16)..(17)..(18)..(19): Xaa is A or G or is absent

SEQ ID NO: 36820 - protein, 33 aa, Artificial Sequence; identical to SEQ ID NO: 12504
  GFR-binding peptide
  MOD_RES (1)..(33): Xaa is C or S

SEQ ID NO: 36821 - protein, 35 aa, Artificial Sequence; identical to SEQ ID NO: 10605
  GFR-binding peptide
  MOD_RES (2)..(2): Xaa is C or S
  MOD_RES (14)..(15)..(16)..(17)..(18): Xaa is A or G
  MOD_RES (19)..(20)..(21)..(22): Xaa is A or G or is absent

SEQ ID NO: 36822 - protein, 39 aa, Artificial Sequence; identical to SEQ ID NO: 12506
  GFR-binding peptide
  MOD_RES (2)..(36)..(37): Xaa is C or S
  MOD_RES (14)..(15)..(16)..(17)..(18): Xaa is A or G
  MOD_RES (19)..(20)..(21)..(22): Xaa is A or G or is absent

SEQ ID NO: 36823 - protein, 32 aa, Artificial Sequence; identical to SEQ ID NO: 12507
  GFR-binding peptide
  MOD_RES (1)..(32): Xaa is C or S

SEQ ID NO: 36824 - protein, 41 aa, Artificial Sequence; identical to SEQ ID NO: 12508
  GFR-binding peptide
  MOD_RES (1)..(3)..(36)..(37): Xaa is C or S
  MOD_RES (14)..(15)..(16)..(17)..(18): Xaa is A or G
  MOD_RES (19)..(20)..(21)..(22): Xaa is A or G or is absent

SEQ ID NO: 36825 - protein, 35 aa, Artificial Sequence; identical to SEQ ID NO: 12509
  GFR-binding peptide
  MOD_RES (33)..(33): Xaa is C or S
  MOD_RES (11)..(12)..(13)..(14)..(15): Xaa is A or G
  MOD_RES (16)..(17)..(18)..(19): Xaa is A or G or is absent

SEQ ID NO: 36826 - protein, 40 aa, Artificial Sequence; identical to SEQ ID NO: 12510
  GFR-binding peptide
  MOD_RES (2)..(36)..(37): Xaa is C or S
  MOD_RES (14)..(15)..(16)..(17)..(18): Xaa is A or G
  MOD_RES (19)..(20)..(21)..(22): Xaa is A or G or is absent

SEQ ID NO: 36827 - protein, 40 aa, Artificial Sequence; identical to SEQ ID NO: 10606
  GFR-binding peptide
  MOD_RES (2)..(4)..(38): Xaa is C or S
  MOD_RES (16)..(17)..(18)..(19)..(20): Xaa is A or G
  MOD_RES (21)..(22)..(23)..(24): Xaa is A or G or is absent

SEQ ID NO: 36828 - protein, 41 aa, Artificial Sequence; identical to SEQ ID NO: 10607
  GFR-binding peptide
  MOD_RES (2)..(4)..(35)..(36): Xaa is C or S

SEQ ID NO: 36829 - protein, 37 aa, Artificial Sequence; identical to SEQ ID NO: 12511
  GFR-binding peptide
  MOD_RES (1)..(33)..(34): Xaa is C or S

SEQ ID NO: 36830 - protein, 39 aa, Artificial Sequence; identical to SEQ ID NO: 12512
  GFR-binding peptide
  MOD_RES (2)..(34)..(35): Xaa is C or S

SEQ ID NO: 36831 - protein, 38 aa, Artificial Sequence; identical to SEQ ID NO: 10608
  GFR-binding peptide
  MOD_RES (2)..(34)..(35): Xaa is C or S

SEQ ID NO: 36832 - protein, 33 aa, Artificial Sequence; identical to SEQ ID NO: 12513
  GFR-binding peptide
  MOD_RES (33)..(33): Xaa is C or S
  MOD_RES (11)..(12)..(13)..(14)..(15): Xaa is A or G
  MOD_RES (16)..(17)..(18)..(19): Xaa is A or G or is absent

SEQ ID NO: 36833 - protein, 36 aa, Artificial Sequence; identical to SEQ ID NO: 12515
  GFR-binding peptide
  MOD_RES (31)..(32): Xaa is C or S

SEQ ID NO: 36834 - protein, 35 aa, Artificial Sequence; identical to SEQ ID NO: 10610
  GFR-binding peptide
  MOD_RES (1)..(3)..(35): Xaa is C or S

SEQ ID NO: 36835 - protein, 37 aa, Artificial Sequence; identical to SEQ ID NO: 12516
  GFR-binding peptide
  MOD_RES (31)..(32): Xaa is C or S

SEQ ID NO: 36836 - protein, 35 aa, Artificial Sequence; identical to SEQ ID NO: 10611
  GFR-binding peptide
  MOD_RES (1)..(33)..(34): Xaa is C or S

SEQ ID NO: 36837 - protein, 39 aa, Artificial Sequence; identical to SEQ ID NO: 12517
  GFR-binding peptide
  MOD_RES (1)..(3)..(37)..(38): Xaa is C or S
  MOD_RES (15)..(16)..(17)..(18)..(19): Xaa is A or G
  MOD_RES (20)..(21)..(22)..(23): Xaa is A or G or is absent

SEQ ID NO: 36838 - protein, 38 aa, Artificial Sequence; identical to SEQ ID NO: 10612
  GFR-binding peptide
  MOD_RES (1)..(3)..(35): Xaa is C or S

SEQ ID NO: 36839 - protein, 40 aa, Artificial Sequence; identical to SEQ ID NO: 10613
  GFR-binding peptide
  MOD_RES (2)..(34)..(35): Xaa is C or S

SEQ ID NO: 36840 - protein, 40 aa, Artificial Sequence; identical to SEQ ID NO: 10615
  GFR-binding peptide
  MOD_RES (1)..(3)..(37)..(38): Xaa is C or S
  MOD_RES (15)..(16)..(17)..(18)..(19): Xaa is A or G
  MOD_RES (20)..(21)..(22)..(23): Xaa is A or G or is absent

SEQ ID NO: 36841 - protein, 34 aa, Artificial Sequence; identical to SEQ ID NO: 12520
  GFR-binding peptide
  MOD_RES (2)..(34): Xaa is C or S

SEQ ID NO: 36842 - protein, 39 aa, Artificial Sequence; identical to SEQ ID NO: 12521
  GFR-binding peptide
  MOD_RES (1)..(35): Xaa is C or S
  MOD_RES (13)..(14)..(15)..(16)..(17): Xaa is A or G
  MOD_RES (18)..(19)..(20)..(21): Xaa is A or G or is absent

SEQ ID NO: 36843 - protein, 36 aa, Artificial Sequence; identical to SEQ ID NO: 10616
  GFR-binding peptide
  MOD_RES (1)..(34)..(35): Xaa is C or S
  MOD_RES (12)..(13)..(14)..(15)..(16): Xaa is A or G
  MOD_RES (17)..(18)..(19)..(20): Xaa is A or G or is absent

SEQ ID NO: 36844 - protein, 37 aa, Artificial Sequence; identical to SEQ ID NO: 10617
  GFR-binding peptide
  MOD_RES (1)..(33)..(34): Xaa is C or S

SEQ ID NO: 36845 - protein, 38 aa, Artificial Sequence; identical to SEQ ID NO: 12522
  GFR-binding peptide
  MOD_RES (1)..(34)..(35): Xaa is C or S
  MOD_RES (12)..(13)..(14)..(15)..(16): Xaa is A or G
  MOD_RES (17)..(18)..(19)..(20): Xaa is A or G or is absent

SEQ ID NO: 36846 - protein, 36 aa, Artificial Sequence; identical to SEQ ID NO: 12524
  GFR-binding peptide
  MOD_RES (32)..(33): Xaa is C or S

SEQ ID NO: 36847 - protein, 42 aa, Artificial Sequence; identical to SEQ ID NO: 12525
  GFR-binding peptide
  MOD_RES (1)..(3)..(36)..(37): Xaa is C or S
  MOD_RES (14)..(15)..(16)..(17)..(18): Xaa is A or G
  MOD_RES (19)..(20)..(21)..(22): Xaa is A or G or is absent

SEQ ID NO: 36848 - protein, 36 aa, Artificial Sequence; identical to SEQ ID NO: 5098
  GFR-binding peptide
  MOD_RES (1)..(32)..(33): Xaa is C or S

SEQ ID NO: 36849 - protein, 35 aa, Artificial Sequence; identical to SEQ ID NO: 12528
  GFR-binding peptide
  MOD_RES (2)..(2): Xaa is C or S
  MOD_RES (14)..(15)..(16)..(17)..(18): Xaa is A or G
  MOD_RES (19)..(20)..(21)..(22): Xaa is A or G or is absent

SEQ ID NO: 36850 - protein, 37 aa, Artificial Sequence; identical to SEQ ID NO: 12529
  GFR-binding peptide
  MOD_RES (33)..(34): Xaa is C or S
  MOD_RES (11)..(12)..(13)..(14)..(15): Xaa is A or G
  MOD_RES (16)..(17)..(18)..(19): Xaa is A or G or is absent

SEQ ID NO: 36851 - protein, 40 aa, Artificial Sequence; identical to SEQ ID NO: 10618
  GFR-binding peptide
  MOD_RES (1)..(3)..(34)..(35): Xaa is C or S

SEQ ID NO: 36852 - protein, 35 aa, Artificial Sequence; identical to SEQ ID NO: 10619
  GFR-binding peptide
  MOD_RES (1)..(3)..(35): Xaa is C or S

SEQ ID NO: 36853 - protein, 32 aa, Artificial Sequence; identical to SEQ ID NO: 10620
  GFR-binding peptide
  MOD_RES (31)..(32): Xaa is C or S

SEQ ID NO: 36854 - protein, 35 aa, Artificial Sequence; identical to SEQ ID NO: 3170
  GFR-binding peptide
  MOD_RES (1)..(3): Xaa is C or S
  MOD_RES (14)..(15)..(16)..(17)..(18): Xaa is A or G
  MOD_RES (19)..(20)..(21)..(22): Xaa is A or G or is absent

SEQ ID NO: 36855 - protein, 36 aa, Artificial Sequence; identical to SEQ ID NO: 3171
  GFR-binding peptide
  MOD_RES (2)..(4)..(35)..(36): Xaa is C or S

SEQ ID NO: 36856 - protein, 36 aa, Artificial Sequence; identical to SEQ ID NO: 12530
  GFR-binding peptide
  MOD_RES (1)..(3): Xaa is C or S
  MOD_RES (15)..(16)..(17)..(18)..(19): Xaa is A or G
  MOD_RES (20)..(21)..(22)..(23): Xaa is A or G or is absent

SEQ ID NO: 36857 - protein, 38 aa, Artificial Sequence; identical to SEQ ID NO: 12531
  GFR-binding peptide
  MOD_RES (2)..(4)..(36)..(37): Xaa is C or S

SEQ ID NO: 36858 - protein, 38 aa, Artificial Sequence; identical to SEQ ID NO: 5102
  GFR-binding peptide
  MOD_RES (1)..(35)..(36): Xaa is C or S
  MOD_RES (13)..(14)..(15)..(16)..(17): Xaa is A or G
  MOD_RES (18)..(19)..(20)..(21): Xaa is A or G or is absent

SEQ ID NO: 36859 - protein, 39 aa, Artificial Sequence; identical to SEQ ID NO: 10624
  GFR-binding peptide
  MOD_RES (2)..(4)..(37)..(38): Xaa is C or S
  MOD_RES (15)..(16)..(17)..(18)..(19): Xaa is A or G
  MOD_RES (20)..(21)..(22)..(23): Xaa is A or G or is absent

SEQ ID NO: 36860 - protein, 37 aa, Artificial Sequence; identical to SEQ ID NO: 12533
  GFR-binding peptide
  MOD_RES (1)..(3)..(37): Xaa is C or S
  MOD_RES (15)..(16)..(17)..(18)..(19): Xaa is A or G
  MOD_RES (20)..(21)..(22)..(23): Xaa is A or G or is absent

SEQ ID NO: 36861 - protein, 38 aa, Artificial Sequence; identical to SEQ ID NO: 10625
  GFR-binding peptide
  MOD_RES (2)..(33)..(34): Xaa is C or S

SEQ ID NO: 36862 - protein, 40 aa, Artificial Sequence
  GFR-binding peptide
  MOD_RES (1)..(3)..(36)..(37): Xaa is C or S
  MOD_RES (14)..(15)..(16)..(17)..(18): Xaa is A or G
  MOD_RES (19)..(20)..(21)..(22): Xaa is A or G or is absent
XKXSKVIMNSLQEXXXXXXXXXYYLITLPELDQSVXXPSA

SEQ ID NO: 36863 - protein, 38 aa, Artificial Sequence; identical to SEQ ID NO: 5103
  GFR-binding peptide
  MOD_RES (33)..(34): Xaa is C or S
  MOD_RES (11)..(12)..(13)..(14)..(15): Xaa is A or G
  MOD_RES (16)..(17)..(18)..(19): Xaa is A or G or is absent

SEQ ID NO: 36864 - protein, 30 aa, Artificial Sequence; identical to SEQ ID NO: 5105
  GFR-binding peptide

SEQ ID NO: 36865 - protein, 31 aa, Artificial Sequence; identical to SEQ ID NO: 12537
  GFR-binding peptide
  MOD_RES (31)..(31): Xaa is C or S

SEQ ID NO: 36866 - protein, 34 aa, Artificial Sequence; identical to SEQ ID NO: 10627
  GFR-binding peptide
  MOD_RES (1)..(3)..(34): Xaa is C or S

SEQ ID NO: 36867 - protein, 34 aa, Artificial Sequence; identical to SEQ ID NO: 12538
  GFR-binding peptide
  MOD_RES (31)..(32): Xaa is C or S

SEQ ID NO: 36868 - protein, 37 aa, Artificial Sequence; identical to SEQ ID NO: 10628
  GFR-binding peptide
  MOD_RES (2)..(4): Xaa is C or S
  MOD_RES (16)..(17)..(18)..(19)..(20): Xaa is A or G
  MOD_RES (21)..(22)..(23)..(24): Xaa is A or G or is absent

SEQ ID NO: 36869 - protein, 37 aa, Artificial Sequence; identical to SEQ ID NO: 10631
  GFR-binding peptide
  MOD_RES (33)..(34): Xaa is C or S
  MOD_RES (11)..(12)..(13)..(14)..(15): Xaa is A or G
  MOD_RES (16)..(17)..(18)..(19): Xaa is A or G or is absent

SEQ ID NO: 36870 - protein, 39 aa, Artificial Sequence; identical to SEQ ID NO: 10632
  GFR-binding peptide
  MOD_RES (33)..(34): Xaa is C or S
  MOD_RES (11)..(12)..(13)..(14)..(15): Xaa is A or G
  MOD_RES (16)..(17)..(18)..(19): Xaa is A or G or is absent

SEQ ID NO: 36871 - protein, 34 aa, Artificial Sequence; identical to SEQ ID NO: 12541
  GFR-binding peptide
  MOD_RES (2)..(34): Xaa is C or S

SEQ ID NO: 36872 - protein, 33 aa, Artificial Sequence; identical to SEQ ID NO: 12543
  GFR-binding peptide
  MOD_RES (1)..(33): Xaa is C or S

SEQ ID NO: 36873 - protein, 40 aa, Artificial Sequence; identical to SEQ ID NO: 10634
  GFR-binding peptide
  MOD_RES (1)..(3)..(36)..(37): Xaa is C or S
  MOD_RES (14)..(15)..(16)..(17)..(18): Xaa is A or G
  MOD_RES (19)..(20)..(21)..(22): Xaa is A or G or is absent

SEQ ID NO: 36874 - protein, 35 aa, Artificial Sequence; identical to SEQ ID NO: 5116
  GFR-binding peptide
  MOD_RES (32)..(33): Xaa is C or S

SEQ ID NO: 36875 - protein, 32 aa, Artificial Sequence; identical to SEQ ID NO: 5117
  GFR-binding peptide
  MOD_RES (31)..(32): Xaa is C or S

SEQ ID NO: 36876 - protein, 39 aa, Artificial Sequence; identical to SEQ ID NO: 12547
  GFR-binding peptide
  MOD_RES (2)..(34)..(35): Xaa is C or S

SEQ ID NO: 36877 - protein, 39 aa, Artificial Sequence; identical to SEQ ID NO: 12548
  GFR-binding peptide
  MOD_RES (2)..(4)..(36)..(37): Xaa is C or S

SEQ ID NO: 36878 - protein, 35 aa, Artificial Sequence; identical to SEQ ID NO: 12549
  GFR-binding peptide
  MOD_RES (33)..(34): Xaa is C or S
  MOD_RES (11)..(12)..(13)..(14)..(15): Xaa is A or G
  MOD_RES (16)..(17)..(18)..(19): Xaa is A or G or is absent

SEQ ID NO: 36879 - protein, 36 aa, Artificial Sequence; identical to SEQ ID NO: 3189
  GFR-binding peptide
  MOD_RES (1)..(3)..(35)..(36): Xaa is C or S

SEQ ID NO: 36880 - protein, 42 aa, Artificial Sequence; identical to SEQ ID NO: 10637
  GFR-binding peptide
  MOD_RES (2)..(36)..(37): Xaa is C or S
  MOD_RES (14)..(15)..(16)..(17)..(18): Xaa is A or G
  MOD_RES (19)..(20)..(21)..(22): Xaa is A or G or is absent

SEQ ID NO: 36881 - protein, 31 aa, Artificial Sequence; identical to SEQ ID NO: 10638
  GFR-binding peptide
  MOD_RES (1)..(1): Xaa is C or S

SEQ ID NO: 36882 - protein, 38 aa, Artificial Sequence; identical to SEQ ID NO: 12550
  GFR-binding peptide
  MOD_RES (2)..(34)..(35): Xaa is C or S

SEQ ID NO: 36883 - protein, 43 aa, Artificial Sequence; identical to SEQ ID NO: 12551
  GFR-binding peptide
  MOD_RES (2)..(4)..(38)..(39): Xaa is C or S
  MOD_RES (16)..(17)..(18)..(19)..(20): Xaa is A or G
  MOD_RES (21)..(22)..(23)..(24): Xaa is A or G or is absent

SEQ ID NO: 36884 - protein, 34 aa, Artificial Sequence; identical to SEQ ID NO: 12552
  GFR-binding peptide
  MOD_RES (2)..(2): Xaa is C or S
  MOD_RES (13)..(14)..(15)..(16)..(17): Xaa is A or G
  MOD_RES (18)..(19)..(20)..(21): Xaa is A or G or is absent

SEQ ID NO: 36885 - protein, 35 aa, Artificial Sequence; identical to SEQ ID NO: 12553
  GFR-binding peptide
  MOD_RES (33)..(33): Xaa is C or S
  MOD_RES (11)..(12)..(13)..(14)..(15): Xaa is A or G
  MOD_RES (16)..(17)..(18)..(19): Xaa is A or G or is absent

SEQ ID NO: 36886 - protein, 44 aa, Artificial Sequence; identical to SEQ ID NO: 12554
  GFR-binding peptide
  MOD_RES (2)..(4)..(38)..(39): Xaa is C or S
  MOD_RES (16)..(17)..(18)..(19)..(20): Xaa is A or G
  MOD_RES (21)..(22)..(23)..(24): Xaa is A or G or is absent

SEQ ID NO: 36887 - protein, 41 aa, Artificial Sequence; identical to SEQ ID NO: 3195
  GFR-binding peptide
  MOD_RES (1)..(3)..(36)..(37): Xaa is C or S
  MOD_RES (14)..(15)..(16)..(17)..(18): Xaa is A or G
  MOD_RES (19)..(20)..(21)..(22): Xaa is A or G or is absent

SEQ ID NO: 36888 - protein, 31 aa, Artificial Sequence; identical to SEQ ID NO: 12555
  GFR-binding peptide
  MOD_RES (1)..(1): Xaa is C or S

SEQ ID NO: 36889 - protein, 36 aa, Artificial Sequence; identical to SEQ ID NO: 5122
  GFR-binding peptide
  MOD_RES (33)..(34): Xaa is C or S
  MOD_RES (11)..(12)..(13)..(14)..(15): Xaa is A or G
  MOD_RES (16)..(17)..(18)..(19): Xaa is A or G or is absent

SEQ ID NO: 36890 - protein, 39 aa, Artificial Sequence; identical to SEQ ID NO: 12557
  GFR-binding peptide
  MOD_RES (1)..(35)..(36): Xaa is C or S
  MOD_RES (13)..(14)..(15)..(16)..(17): Xaa is A or G
  MOD_RES (18)..(19)..(20)..(21): Xaa is A or G or is absent

SEQ ID NO: 36891 - protein, 35 aa, Artificial Sequence; identical to SEQ ID NO: 12558
  GFR-binding peptide
  MOD_RES (1)..(3)..(35): Xaa is C or S

SEQ ID NO: 36892 - protein, 36 aa, Artificial Sequence; identical to SEQ ID NO: 10641
  GFR-binding peptide
  MOD_RES (1)..(35): Xaa is C or S
  MOD_RES (13)..(14)..(15)..(16)..(17): Xaa is A or G
  MOD_RES (18)..(19)..(20)..(21): Xaa is A or G or is absent

SEQ ID NO: 36893 - protein, 34 aa, Artificial Sequence; identical to SEQ ID NO: 5124
  GFR-binding peptide
  MOD_RES (33)..(34): Xaa is C or S
  MOD_RES (11)..(12)..(13)..(14)..(15): Xaa is A or G
  MOD_RES (16)..(17)..(18)..(19): Xaa is A or G or is absent

SEQ ID NO: 36894 - protein, 38 aa, Artificial Sequence; identical to SEQ ID NO: 12560
  GFR-binding peptide
  MOD_RES (1)..(3)..(37)..(38): Xaa is C or S
  MOD_RES (15)..(16)..(17)..(18)..(19): Xaa is A or G
  MOD_RES (20)..(21)..(22)..(23): Xaa is A or G or is absent

SEQ ID NO: 36895 - protein, 38 aa, Artificial Sequence; identical to SEQ ID NO: 12561
  GFR-binding peptide
  MOD_RES (1)..(33)..(34): Xaa is C or S

SEQ ID NO: 36896 - protein, 40 aa, Artificial Sequence; identical to SEQ ID NO: 12562
  GFR-binding peptide
  MOD_RES (1)..(35): Xaa is C or S
  MOD_RES (13)..(14)..(15)..(16)..(17): Xaa is A or G
  MOD_RES (18)..(19)..(20)..(21): Xaa is A or G or is absent

SEQ ID NO: 36897 - protein, 37 aa, Artificial Sequence; identical to SEQ ID NO: 10643
  GFR-binding peptide
  MOD_RES (32)..(33): Xaa is C or S

SEQ ID NO: 36898 - protein, 37 aa, Artificial Sequence; identical to SEQ ID NO: 12563
  GFR-binding peptide
  MOD_RES (2)..(4)..(36)..(37): Xaa is C or S

SEQ ID NO: 36899 - protein, 34 aa, Artificial Sequence; identical to SEQ ID NO: 12564
  GFR-binding peptide
  MOD_RES (2)..(2): Xaa is C or S
  MOD_RES (13)..(14)..(15)..(16)..(17): Xaa is A or G
  MOD_RES (18)..(19)..(20)..(21): Xaa is A or G or is absent

SEQ ID NO: 36900 - protein, 32 aa, Artificial Sequence; identical to SEQ ID NO: 12565
  GFR-binding peptide
  MOD_RES (1)..(32): Xaa is C or S

SEQ ID NO: 36901 - protein, 37 aa, Artificial Sequence; identical to SEQ ID NO: 10644
  GFR-binding peptide
  MOD_RES (2)..(4): Xaa is C or S
  MOD_RES (16)..(17)..(18)..(19)..(20): Xaa is A or G
  MOD_RES (21)..(22)..(23)..(24): Xaa is A or G or is absent

SEQ ID NO: 36902 - protein, 36 aa, Artificial Sequence; identical to SEQ ID NO: 10645
  GFR-binding peptide
  MOD_RES (2)..(34)..(35): Xaa is C or S

SEQ ID NO: 36903 - protein, 44 aa, Artificial Sequence; identical to SEQ ID NO: 5130
  GFR-binding peptide
  MOD_RES (2)..(4)..(38)..(39): Xaa is C or S
  MOD_RES (16)..(17)..(18)..(19)..(20): Xaa is A or G
  MOD_RES (21)..(22)..(23)..(24): Xaa is A or G or is absent

SEQ ID NO: 36904 - protein, 42 aa, Artificial Sequence; identical to SEQ ID NO: 5131
  GFR-binding peptide
  MOD_RES (2)..(4)..(37)..(38): Xaa is C or S
  MOD_RES (15)..(16)..(17)..(18)..(19): Xaa is A or G
  MOD_RES (20)..(21)..(22)..(23): Xaa is A or G or is absent

SEQ ID NO: 36905 - protein, 37 aa, Artificial Sequence; identical to SEQ ID NO: 10646
  GFR-binding peptide
  MOD_RES (2)..(33)..(34): Xaa is C or S

SEQ ID NO: 36906 - protein, 39 aa, Artificial Sequence; identical to SEQ ID NO: 3207
  GFR-binding peptide
  MOD_RES (34)..(35): Xaa is C or S
  MOD_RES (12)..(13)..(14)..(15)..(16): Xaa is A or G
  MOD_RES (17)..(18)..(19)..(20): Xaa is A or G or is absent

SEQ ID NO: 36907 - protein, 34 aa, Artificial Sequence; identical to SEQ ID NO: 3208
  GFR-binding peptide
  MOD_RES (33)..(34): Xaa is C or S
  MOD_RES (11)..(12)..(13)..(14)..(15): Xaa is A or G
  MOD_RES (16)..(17)..(18)..(19): Xaa is A or G or is absent

SEQ ID NO: 36908 - protein, 39 aa, Artificial Sequence; identical to SEQ ID NO: 12571
  GFR-binding peptide
  MOD_RES (2)..(36)..(37): Xaa is C or S
  MOD_RES (14)..(15)..(16)..(17)..(18): Xaa is A or G
  MOD_RES (19)..(20)..(21)..(22): Xaa is A or G or is absent

SEQ ID NO: 36909 - protein, 30 aa, Artificial Sequence; identical to SEQ ID NO: 10650
  GFR-binding peptide

SEQ ID NO: 36910 - protein, 35 aa, Artificial Sequence; identical to SEQ ID NO: 10651
  GFR-binding peptide
  MOD_RES (1)..(35): Xaa is C or S
  MOD_RES (13)..(14)..(15)..(16)..(17): Xaa is A or G
  MOD_RES (18)..(19)..(20)..(21): Xaa is A or G or is absent

SEQ ID NO: 36911 - protein, 34 aa, Artificial Sequence; identical to SEQ ID NO: 10652
  GFR-binding peptide
  MOD_RES (1)..(34): Xaa is C or S
  MOD_RES (12)..(13)..(14)..(15)..(16): Xaa is A or G
  MOD_RES (17)..(18)..(19)..(20): Xaa is A or G or is absent

SEQ ID NO: 36912 - protein, 42 aa, Artificial Sequence; identical to SEQ ID NO: 12574
  GFR-binding peptide
  MOD_RES (2)..(4)..(38)..(39): Xaa is C or S
  MOD_RES (16)..(17)..(18)..(19)..(20): Xaa is A or G
  MOD_RES (21)..(22)..(23)..(24): Xaa is A or G or is absent

SEQ ID NO: 36913 - protein, 34 aa, Artificial Sequence; identical to SEQ ID NO: 10654
  GFR-binding peptide
  MOD_RES (31)..(32): Xaa is C or S

SEQ ID NO: 36914 - protein, 38 aa, Artificial Sequence; identical to SEQ ID NO: 5139
  GFR-binding peptide
  MOD_RES (2)..(34)..(35): Xaa is C or S

SEQ ID NO: 36915 - protein, 41 aa, Artificial Sequence; identical to SEQ ID NO: 10655
  GFR-binding peptide
  MOD_RES (2)..(36): Xaa is C or S
  MOD_RES (14)..(15)..(16)..(17)..(18): Xaa is A or G
  MOD_RES (19)..(20)..(21)..(22): Xaa is A or G or is absent

SEQ ID NO: 36916 - protein, 33 aa, Artificial Sequence; identical to SEQ ID NO: 5140
  GFR-binding peptide
  MOD_RES (12)..(13)..(14)..(15)..(16): Xaa is A or G
  MOD_RES (17)..(18)..(19)..(20): Xaa is A or G or is absent

SEQ ID NO: 36917 - protein, 36 aa, Artificial Sequence; identical to SEQ ID NO: 12579
  GFR-binding peptide
  MOD_RES (1)..(3)..(36): Xaa is C or S
  MOD_RES (14)..(15)..(16)..(17)..(18): Xaa is A or G
  MOD_RES (19)..(20)..(21)..(22): Xaa is A or G or is absent

SEQ ID NO: 36918 - protein, 39 aa, Artificial Sequence; identical to SEQ ID NO: 10657
  GFR-binding peptide
  MOD_RES (33)..(34): Xaa is C or S
  MOD_RES (11)..(12)..(13)..(14)..(15): Xaa is A or G
  MOD_RES (16)..(17)..(18)..(19): Xaa is A or G or is absent

SEQ ID NO: 36919 - protein, 35 aa, Artificial Sequence; identical to SEQ ID NO: 12580
  GFR-binding peptide
  MOD_RES (1)..(33)..(34): Xaa is C or S

SEQ ID NO: 36920 - protein, 34 aa, Artificial Sequence; identical to SEQ ID NO: 12581
  GFR-binding peptide
  MOD_RES (1)..(33)..(34): Xaa is C or S

SEQ ID NO: 36921 - protein, 40 aa, Artificial Sequence; identical to SEQ ID NO: 10658
  GFR-binding peptide
  MOD_RES (1)..(34)..(35): Xaa is C or S
  MOD_RES (12)..(13)..(14)..(15)..(16): Xaa is A or G
  MOD_RES (17)..(18)..(19)..(20): Xaa is A or G or is absent

SEQ ID NO: 36922 - protein, 36 aa, Artificial Sequence; identical to SEQ ID NO: 10659
  GFR-binding peptide
  MOD_RES (1)..(33)..(34): Xaa is C or S

SEQ ID NO: 36923 - protein, 33 aa, Artificial Sequence; identical to SEQ ID NO: 12582
  GFR-binding peptide
  MOD_RES (33)..(33): Xaa is C or S
  MOD_RES (11)..(12)..(13)..(14)..(15): Xaa is A or G
  MOD_RES (16)..(17)..(18)..(19): Xaa is A or G or is absent

SEQ ID NO: 36924 - protein, 37 aa, Artificial Sequence; identical to SEQ ID NO: 3223
  GFR-binding peptide
  MOD_RES (2)..(4)..(36)..(37): Xaa is C or S

SEQ ID NO: 36925 - protein, 40 aa, Artificial Sequence; identical to SEQ ID NO: 12583
  GFR-binding peptide
  MOD_RES (2)..(4)..(38)..(39): Xaa is C or S
  MOD_RES (16)..(17)..(18)..(19)..(20): Xaa is A or G
  MOD_RES (21)..(22)..(23)..(24): Xaa is A or G or is absent

SEQ ID NO: 36926 - protein, 39 aa, Artificial Sequence; identical to SEQ ID NO: 10662
  GFR-binding peptide
  MOD_RES (1)..(33)..(34): Xaa is C or S

SEQ ID NO: 36927 - protein, 35 aa, Artificial Sequence; identical to SEQ ID NO: 10663
  GFR-binding peptide
  MOD_RES (2)..(35): Xaa is C or S
  MOD_RES (13)..(14)..(15)..(16)..(17): Xaa is A or G
  MOD_RES (18)..(19)..(20)..(21): Xaa is A or G or is absent

SEQ ID NO: 36928 - protein, 36 aa, Artificial Sequence; identical to SEQ ID NO: 10664
  GFR-binding peptide
  MOD_RES (33)..(34): Xaa is C or S
  MOD_RES (11)..(12)..(13)..(14)..(15): Xaa is A or G
  MOD_RES (16)..(17)..(18)..(19): Xaa is A or G or is absent

SEQ ID NO: 36929 - protein, 41 aa, Artificial Sequence; identical to SEQ ID NO: 12585
  GFR-binding peptide
  MOD_RES (1)..(3)..(37): Xaa is C or S
  MOD_RES (15)..(16)..(17)..(18)..(19): Xaa is A or G
  MOD_RES (20)..(21)..(22)..(23): Xaa is A or G or is absent

SEQ ID NO: 36930 - protein, 31 aa, Artificial Sequence; identical to SEQ ID NO: 12586
  GFR-binding peptide
  MOD_RES (31)..(31): Xaa is C or S

SEQ ID NO: 36931 - protein, 40 aa, Artificial Sequence; identical to SEQ ID NO: 12587
  GFR-binding peptide
  MOD_RES (1)..(3)..(37)..(38): Xaa is C or S
  MOD_RES (15)..(16)..(17)..(18)..(19): Xaa is A or G
  MOD_RES (20)..(21)..(22)..(23): Xaa is A or G or is absent

SEQ ID NO: 36932 - protein, 38 aa, Artificial Sequence; identical to SEQ ID NO: 12588
  GFR-binding peptide
  MOD_RES (1)..(33)..(34): Xaa is C or S

SEQ ID NO: 36933 - protein, 39 aa, Artificial Sequence; identical to SEQ ID NO: 5147
  GFR-binding peptide
  MOD_RES (1)..(33)..(34): Xaa is C or S

SEQ ID NO: 36934 - protein, 36 aa, Artificial Sequence; identical to SEQ ID NO: 5148
  GFR-binding peptide
  MOD_RES (2)..(4)..(35)..(36): Xaa is C or S

SEQ ID NO: 36935 - protein, 39 aa, Artificial Sequence; identical to SEQ ID NO: 10666
  GFR-binding peptide
  MOD_RES (2)..(34)..(35): Xaa is C or S

SEQ ID NO: 36936 - protein, 42 aa, Artificial Sequence; identical to SEQ ID NO: 3231
  GFR-binding peptide
  MOD_RES (2)..(4)..(36)..(37): Xaa is C or S

SEQ ID NO: 36937 - protein, 35 aa, Artificial Sequence; identical to SEQ ID NO: 10669
  GFR-binding peptide
  MOD_RES (2)..(2): Xaa is C or S
  MOD_RES (14)..(15)..(16)..(17)..(18): Xaa is A or G
  MOD_RES (19)..(20)..(21)..(22): Xaa is A or G or is absent

SEQ ID NO: 36938 - protein, 38 aa, Artificial Sequence; identical to SEQ ID NO: 12595
  GFR-binding peptide
  MOD_RES (34)..(35): Xaa is C or S
  MOD_RES (12)..(13)..(14)..(15)..(16): Xaa is A or G
  MOD_RES (17)..(18)..(19)..(20): Xaa is A or G or is absent

SEQ ID NO: 36939 - protein, 33 aa, Artificial Sequence; identical to SEQ ID NO: 12596
  GFR-binding peptide
  MOD_RES (31)..(32): Xaa is C or S

SEQ ID NO: 36940 - protein, 35 aa, Artificial Sequence; identical to SEQ ID NO: 12597
  GFR-binding peptide
  MOD_RES (2)..(33)..(34): Xaa is C or S

SEQ ID NO: 36941 - protein, 37 aa, Artificial Sequence; identical to SEQ ID NO: 10670
  GFR-binding peptide
  MOD_RES (2)..(36): Xaa is C or S
  MOD_RES (14)..(15)..(16)..(17)..(18): Xaa is A or G
  MOD_RES (19)..(20)..(21)..(22): Xaa is A or G or is absent

SEQ ID NO: 36942 - protein, 38 aa, Artificial Sequence; identical to SEQ ID NO: 12598
  GFR-binding peptide
  MOD_RES (1)..(3)..(35): Xaa is C or S

SEQ ID NO: 36943 - protein, 36 aa, Artificial Sequence; identical to SEQ ID NO: 5154
  GFR-binding peptide
  MOD_RES (2)..(34)..(35): Xaa is C or S

SEQ ID NO: 36944 - protein, 39 aa, Artificial Sequence; identical to SEQ ID NO: 12602
  GFR-binding peptide
  MOD_RES (2)..(36)..(37): Xaa is C or S
  MOD_RES (14)..(15)..(16)..(17)..(18): Xaa is A or G
  MOD_RES (19)..(20)..(21)..(22): Xaa is A or G or is absent

SEQ ID NO: 36945 - protein, 39 aa, Artificial Sequence; identical to SEQ ID NO: 12604
  GFR-binding peptide
  MOD_RES (34)..(35): Xaa is C or S
  MOD_RES (12)..(13)..(14)..(15)..(16): Xaa is A or G
  MOD_RES (17)..(18)..(19)..(20): Xaa is A or G or is absent

SEQ ID NO: 36946 - protein, 37 aa, Artificial Sequence; identical to SEQ ID NO: 10673
  GFR-binding peptide
  MOD_RES (2)..(4)..(36)..(37): Xaa is C or S

SEQ ID NO: 36947 - protein, 40 aa, Artificial Sequence; identical to SEQ ID NO: 10674
  GFR-binding peptide
  MOD_RES (1)..(3)..(35)..(36): Xaa is C or S

SEQ ID NO: 36948 - protein, 35 aa, Artificial Sequence; identical to SEQ ID NO: 12607
  GFR-binding peptide
  MOD_RES (32)..(33): Xaa is C or S

SEQ ID NO: 36949 - protein, 41 aa, Artificial Sequence; identical to SEQ ID NO: 10675
  GFR-binding peptide
  MOD_RES (2)..(4)..(35)..(36): Xaa is C or S

SEQ ID NO: 36950 - protein, 39 aa, Artificial Sequence; identical to SEQ ID NO: 12608
  GFR-binding peptide
  MOD_RES (33)..(34): Xaa is C or S
  MOD_RES (11)..(12)..(13)..(14)..(15): Xaa is A or G
  MOD_RES (16)..(17)..(18)..(19): Xaa is A or G or is absent

SEQ ID NO: 36951 - protein, 36 aa, Artificial Sequence; identical to SEQ ID NO: 12609
  GFR-binding peptide
  MOD_RES (2)..(33)..(34): Xaa is C or S

SEQ ID NO: 36952 - protein, 40 aa, Artificial Sequence; identical to SEQ ID NO: 12610
  GFR-binding peptide
  MOD_RES (1)..(35)..(36): Xaa is C or S
  MOD_RES (13)..(14)..(15)..(16)..(17): Xaa is A or G
  MOD_RES (18)..(19)..(20)..(21): Xaa is A or G or is absent

SEQ ID NO: 36953 - protein, 36 aa, Artificial Sequence; identical to SEQ ID NO: 10676
  GFR-binding peptide
  MOD_RES (33)..(34): Xaa is C or S
  MOD_RES (11)..(12)..(13)..(14)..(15): Xaa is A or G
  MOD_RES (16)..(17)..(18)..(19): Xaa is A or G or is absent

SEQ ID NO: 36954 - protein, 37 aa, Artificial Sequence; identical to SEQ ID NO: 5168
  GFR-binding peptide
  MOD_RES (34)..(35): Xaa is C or S
  MOD_RES (12)..(13)..(14)..(15)..(16): Xaa is A or G
  MOD_RES (17)..(18)..(19)..(20): Xaa is A or G or is absent

SEQ ID NO: 36955 - protein, 34 aa, Artificial Sequence; identical to SEQ ID NO: 12613
  GFR-binding peptide
  MOD_RES (33)..(34): Xaa is C or S
  MOD_RES (11)..(12)..(13)..(14)..(15): Xaa is A or G
  MOD_RES (16)..(17)..(18)..(19): Xaa is A or G or is absent

SEQ ID NO: 36956 - protein, 33 aa, Artificial Sequence; identical to SEQ ID NO: 3250
  GFR-binding peptide
  MOD_RES (31)..(32): Xaa is C or S

SEQ ID NO: 36957 - protein, 35 aa, Artificial Sequence; identical to SEQ ID NO: 10679
  GFR-binding peptide
  MOD_RES (1)..(3)..(35): Xaa is C or S

SEQ ID NO: 36958 - protein, 32 aa, Artificial Sequence; identical to SEQ ID NO: 5171
  GFR-binding peptide
  MOD_RES (31)..(32): Xaa is C or S

SEQ ID NO: 36959 - protein, 35 aa, Artificial Sequence; identical to SEQ ID NO: 10680
  GFR-binding peptide
  MOD_RES (34)..(34): Xaa is C or S
  MOD_RES (12)..(13)..(14)..(15)..(16): Xaa is A or G
  MOD_RES (17)..(18)..(19)..(20): Xaa is A or G or is absent

SEQ ID NO: 36960 - protein, 40 aa, Artificial Sequence; identical to SEQ ID NO: 10682
  GFR-binding peptide
  MOD_RES (2)..(36)..(37): Xaa is C or S
  MOD_RES (14)..(15)..(16)..(17)..(18): Xaa is A or G
  MOD_RES (19)..(20)..(21)..(22): Xaa is A or G or is absent

SEQ ID NO: 36961 - protein, 33 aa, Artificial Sequence; identical to SEQ ID NO: 12615
  GFR-binding peptide
  MOD_RES (1)..(33): Xaa is C or S

SEQ ID NO: 36962 - protein, 36 aa, Artificial Sequence; identical to SEQ ID NO: 10683
  GFR-binding peptide
  MOD_RES (31)..(32): Xaa is C or S

SEQ ID NO: 36963 - protein, 36 aa, Artificial Sequence
  GFR-binding peptide
  MOD_RES (2)..(35)..(36): Xaa is C or S
  MOD_RES (13)..(14)..(15)..(16)..(17): Xaa is A or G
  MOD_RES (18)..(19)..(20)..(21): Xaa is A or G or is absent
KXSKVIMNSLQEXXXXXXXXXYYLITLPELDQSVXX

SEQ ID NO: 36964 - protein, 36 aa, Artificial Sequence; identical to SEQ ID NO: 12617
  GFR-binding peptide
  MOD_RES (1)..(33)..(34): Xaa is C or S

SEQ ID NO: 36965 - protein, 41 aa, Artificial Sequence; identical to SEQ ID NO: 10685
  GFR-binding peptide
  MOD_RES (2)..(4)..(36)..(37): Xaa is C or S

SEQ ID NO: 36966 - protein, 40 aa, Artificial Sequence; identical to SEQ ID NO: 10686
  GFR-binding peptide
  MOD_RES (1)..(3)..(34)..(35): Xaa is C or S

SEQ ID NO: 36967 - protein, 42 aa, Artificial Sequence; identical to SEQ ID NO: 10687
  GFR-binding peptide
  MOD_RES (1)..(3)..(36)..(37): Xaa is C or S
  MOD_RES (14)..(15)..(16)..(17)..(18): Xaa is A or G
  MOD_RES (19)..(20)..(21)..(22): Xaa is A or G or is absent

SEQ ID NO: 36968 - protein, 33 aa, Artificial Sequence; identical to SEQ ID NO: 12618
  GFR-binding peptide
  MOD_RES (2)..(33): Xaa is C or S

SEQ ID NO: 36969 - protein, 37 aa, Artificial Sequence; identical to SEQ ID NO: 10689
  GFR-binding peptide
  MOD_RES (34)..(35): Xaa is C or S
  MOD_RES (12)..(13)..(14)..(15)..(16): Xaa is A or G
  MOD_RES (17)..(18)..(19)..(20): Xaa is A or G or is absent

SEQ ID NO: 36970 - protein, 40 aa, Artificial Sequence; identical to SEQ ID NO: 10690
  GFR-binding peptide
  MOD_RES (1)..(3)..(34)..(35): Xaa is C or S

SEQ ID NO: 36971 - protein, 34 aa, Artificial Sequence; identical to SEQ ID NO: 10691
  GFR-binding peptide
  MOD_RES (1)..(34): Xaa is C or S
  MOD_RES (12)..(13)..(14)..(15)..(16): Xaa is A or G
  MOD_RES (17)..(18)..(19)..(20): Xaa is A or G or is absent

SEQ ID NO: 36972 - protein, 36 aa, Artificial Sequence; identical to SEQ ID NO: 10692
  GFR-binding peptide
  MOD_RES (33)..(34): Xaa is C or S
  MOD_RES (11)..(12)..(13)..(14)..(15): Xaa is A or G
  MOD_RES (16)..(17)..(18)..(19): Xaa is A or G or is absent

SEQ ID NO: 36973 - protein, 42 aa, Artificial Sequence; identical to SEQ ID NO: 10694
  GFR-binding peptide
  MOD_RES (2)..(4)..(38)..(39): Xaa is C or S
  MOD_RES (16)..(17)..(18)..(19)..(20): Xaa is A or G
  MOD_RES (21)..(22)..(23)..(24): Xaa is A or G or is absent

SEQ ID NO: 36974 - protein, 34 aa, Artificial Sequence; identical to SEQ ID NO: 5177
  GFR-binding peptide
  MOD_RES (33)..(34): Xaa is C or S
  MOD_RES (11)..(12)..(13)..(14)..(15): Xaa is A or G
  MOD_RES (16)..(17)..(18)..(19): Xaa is A or G or is absent

SEQ ID NO: 36975 - protein, 40 aa, Artificial Sequence; identical to SEQ ID NO: 12620
  GFR-binding peptide
  MOD_RES (2)..(4)..(38)..(39): Xaa is C or S
  MOD_RES (16)..(17)..(18)..(19)..(20): Xaa is A or G
  MOD_RES (21)..(22)..(23)..(24): Xaa is A or G or is absent

SEQ ID NO: 36976 - protein, 34 aa, Artificial Sequence; identical to SEQ ID NO: 12621
  GFR-binding peptide
  MOD_RES (32)..(33): Xaa is C or S

SEQ ID NO: 36977 - protein, 38 aa, Artificial Sequence; identical to SEQ ID NO: 10696
  GFR-binding peptide
  MOD_RES (33)..(34): Xaa is C or S
  MOD_RES (11)..(12)..(13)..(14)..(15): Xaa is A or G
  MOD_RES (16)..(17)..(18)..(19): Xaa is A or G or is absent

SEQ ID NO: 36978 - protein, 35 aa, Artificial Sequence; identical to SEQ ID NO: 10697
  GFR-binding peptide
  MOD_RES (32)..(33): Xaa is C or S

SEQ ID NO: 36979 - protein, 33 aa, Artificial Sequence; identical to SEQ ID NO: 5180
  GFR-binding peptide
  MOD_RES (12)..(13)..(14)..(15)..(16): Xaa is A or G
  MOD_RES (17)..(18)..(19)..(20): Xaa is A or G or is absent

SEQ ID NO: 36980 - protein, 33 aa, Artificial Sequence; identical to SEQ ID NO: 10699
  GFR-binding peptide
  MOD_RES (1)..(3): Xaa is C or S

SEQ ID NO: 36981 - protein, 36 aa, Artificial Sequence; identical to SEQ ID NO: 10700
  GFR-binding peptide
  MOD_RES (33)..(34): Xaa is C or S
  MOD_RES (11)..(12)..(13)..(14)..(15): Xaa is A or G
  MOD_RES (16)..(17)..(18)..(19): Xaa is A or G or is absent

SEQ ID NO: 36982 - protein, 41 aa, Artificial Sequence; identical to SEQ ID NO: 10701
  GFR-binding peptide
  MOD_RES (2)..(35)..(36): Xaa is C or S
  MOD_RES (13)..(14)..(15)..(16)..(17): Xaa is A or G
  MOD_RES (18)..(19)..(20)..(21): Xaa is A or G or is absent

SEQ ID NO: 36983 - protein, 35 aa, Artificial Sequence; identical to SEQ ID NO: 12623
  GFR-binding peptide
  MOD_RES (31)..(32): Xaa is C or S

SEQ ID NO: 36984 - protein, 35 aa, Artificial Sequence; identical to SEQ ID NO: 10702
  GFR-binding peptide
  MOD_RES (2)..(4)..(35): Xaa is C or S

SEQ ID NO: 36985 - protein, 37 aa, Artificial Sequence; identical to SEQ ID NO: 10704
  GFR-binding peptide
  MOD_RES (2)..(35)..(36): Xaa is C or S
  MOD_RES (13)..(14)..(15)..(16)..(17): Xaa is A or G
  MOD_RES (18)..(19)..(20)..(21): Xaa is A or G or is absent

SEQ ID NO: 36986 - protein, 33 aa, Artificial Sequence; identical to SEQ ID NO: 10705
  GFR-binding peptide
  MOD_RES (1)..(3): Xaa is C or S

SEQ ID NO: 36987 - protein, 36 aa, Artificial Sequence; identical to SEQ ID NO: 5185
  GFR-binding peptide
  MOD_RES (2)..(33)..(34): Xaa is C or S

SEQ ID NO: 36988 - protein, 40 aa, Artificial Sequence
  GFR-binding peptide
  MOD_RES (1)..(34)..(35): Xaa is C or S
  MOD_RES (12)..(13)..(14)..(15)..(16): Xaa is A or G
  MOD_RES (17)..(18)..(19)..(20): Xaa is A or G or is absent
XSKVIMNSLQEXXXXXXXXXYYLITLPELDQSVXXPSASA

SEQ ID NO: 36989 - protein, 39 aa, Artificial Sequence; identical to SEQ ID NO: 12626
  GFR-binding peptide
  MOD_RES (1)..(3)..(37)..(38): Xaa is C or S
  MOD_RES (15)..(16)..(17)..(18)..(19): Xaa is A or G
  MOD_RES (20)..(21)..(22)..(23): Xaa is A or G or is absent

SEQ ID NO: 36990 - protein, 33 aa, Artificial Sequence; identical to SEQ ID NO: 12627
  GFR-binding peptide
  MOD_RES (12)..(13)..(14)..(15)..(16): Xaa is A or G
  MOD_RES (17)..(18)..(19)..(20): Xaa is A or G or is absent

SEQ ID NO: 36991 - protein, 35 aa, Artificial Sequence
  GFR-binding peptide
  MOD_RES (2)..(4)..(35): Xaa is C or S
SXKXSKVIMNSLQEIKPTKGIYYLITLPELDQSVX

SEQ ID NO: 36992 - protein, 38 aa, Artificial Sequence; identical to SEQ ID NO: 10709
  GFR-binding peptide
  MOD_RES (1)..(3)..(36)..(37): Xaa is C or S
  MOD_RES (14)..(15)..(16)..(17)..(18): Xaa is A or G
  MOD_RES (19)..(20)..(21)..(22): Xaa is A or G or is absent

SEQ ID NO: 36993 - protein, 42 aa, Artificial Sequence; identical to SEQ ID NO: 12629
  GFR-binding peptide
  MOD_RES (2)..(4)..(38)..(39): Xaa is C or S
  MOD_RES (16)..(17)..(18)..(19)..(20): Xaa is A or G
  MOD_RES (21)..(22)..(23)..(24): Xaa is A or G or is absent

SEQ ID NO: 36994 - protein, 38 aa, Artificial Sequence; identical to SEQ ID NO: 12631
  GFR-binding peptide
  MOD_RES (33)..(34): Xaa is C or S
  MOD_RES (11)..(12)..(13)..(14)..(15): Xaa is A or G
  MOD_RES (16)..(17)..(18)..(19): Xaa is A or G or is absent

SEQ ID NO: 36995 - protein, 42 aa, Artificial Sequence; identical to SEQ ID NO: 3272
  GFR-binding peptide
  MOD_RES (2)..(4)..(36)..(37): Xaa is C or S

SEQ ID NO: 36996 - protein, 35 aa, Artificial Sequence; identical to SEQ ID NO: 5195
  GFR-binding peptide
  MOD_RES (1)..(32)..(33): Xaa is C or S

SEQ ID NO: 36997 - protein, 36 aa, Artificial Sequence; identical to SEQ ID NO: 10711
  GFR-binding peptide
  MOD_RES (2)..(4): Xaa is C or S
  MOD_RES (15)..(16)..(17)..(18)..(19): Xaa is A or G
  MOD_RES (20)..(21)..(22)..(23): Xaa is A or G or is absent

SEQ ID NO: 36998 - protein, 39 aa, Artificial Sequence; identical to SEQ ID NO: 12633
  GFR-binding peptide
  MOD_RES (33)..(34): Xaa is C or S
  MOD_RES (11)..(12)..(13)..(14)..(15): Xaa is A or G
  MOD_RES (16)..(17)..(18)..(19): Xaa is A or G or is absent

SEQ ID NO: 36999 - protein, 37 aa, Artificial Sequence; identical to SEQ ID NO: 10712
  GFR-binding peptide
  MOD_RES (1)..(35)..(36): Xaa is C or S
  MOD_RES (13)..(14)..(15)..(16)..(17): Xaa is A or G
  MOD_RES (18)..(19)..(20)..(21): Xaa is A or G or is absent

SEQ ID NO: 37000 - protein, 41 aa, Artificial Sequence; identical to SEQ ID NO: 12634
  GFR-binding peptide
  MOD_RES (1)..(3)..(35)..(36): Xaa is C or S

SEQ ID NO: 37001 - protein, 35 aa, Artificial Sequence; identical to SEQ ID NO: 10713
  GFR-binding peptide
  MOD_RES (2)..(4): Xaa is C or S

SEQ ID NO: 37002 - protein, 39 aa, Artificial Sequence; identical to SEQ ID NO: 12635
  GFR-binding peptide
  MOD_RES (2)..(4)..(36)..(37): Xaa is C or S

SEQ ID NO: 37003 - protein, 39 aa, Artificial Sequence; identical to SEQ ID NO: 12636
  GFR-binding peptide
  MOD_RES (1)..(33)..(34): Xaa is C or S

SEQ ID NO: 37004 - protein, 32 aa, Artificial Sequence; identical to SEQ ID NO: 10716
  GFR-binding peptide
  MOD_RES (11)..(12)..(13)..(14)..(15): Xaa is A or G
  MOD_RES (16)..(17)..(18)..(19): Xaa is A or G or is absent

SEQ ID NO: 37005 - protein, 43 aa, Artificial Sequence; identical to SEQ ID NO: 12638
  GFR-binding peptide
  MOD_RES (1)..(3)..(37)..(38): Xaa is C or S
  MOD_RES (15)..(16)..(17)..(18)..(19): Xaa is A or G
  MOD_RES (20)..(21)..(22)..(23): Xaa is A or G or is absent

SEQ ID NO: 37006 - protein, 33 aa, Artificial Sequence; identical to SEQ ID NO: 3281
  GFR-binding peptide
  MOD_RES (2)..(33): Xaa is C or S

SEQ ID NO: 37007 - protein, 38 aa, Artificial Sequence; identical to SEQ ID NO: 10719
  GFR-binding peptide
  MOD_RES (1)..(3)..(34)..(35): Xaa is C or S

SEQ ID NO: 37008 - protein, 34 aa, Artificial Sequence; identical to SEQ ID NO: 12640
  GFR-binding peptide
  MOD_RES (2)..(4): Xaa is C or S

SEQ ID NO: 37009 - protein, 35 aa, Artificial Sequence; identical to SEQ ID NO: 12641
  GFR-binding peptide
  MOD_RES (1)..(35): Xaa is C or S
  MOD_RES (13)..(14)..(15)..(16)..(17): Xaa is A or G
  MOD_RES (18)..(19)..(20)..(21): Xaa is A or G or is absent

SEQ ID NO: 37010 - protein, 36 aa, Artificial Sequence; identical to SEQ ID NO: 10720
  GFR-binding peptide
  MOD_RES (1)..(32)..(33): Xaa is C or S

SEQ ID NO: 37011 - protein, 43 aa, Artificial Sequence; identical to SEQ ID NO: 12642
  GFR-binding peptide
  MOD_RES (2)..(4)..(38)..(39): Xaa is C or S
  MOD_RES (16)..(17)..(18)..(19)..(20): Xaa is A or G
  MOD_RES (21)..(22)..(23)..(24): Xaa is A or G or is absent

SEQ ID NO: 37012 - protein, 36 aa, Artificial Sequence; identical to SEQ ID NO: 10721
  GFR-binding peptide
  MOD_RES (1)..(3): Xaa is C or S
  MOD_RES (15)..(16)..(17)..(18)..(19): Xaa is A or G
  MOD_RES (20)..(21)..(22)..(23): Xaa is A or G or is absent

SEQ ID NO: 37013 - protein, 35 aa, Artificial Sequence; identical to SEQ ID NO: 3283
  GFR-binding peptide
  MOD_RES (1)..(35): Xaa is C or S
  MOD_RES (13)..(14)..(15)..(16)..(17): Xaa is A or G
  MOD_RES (18)..(19)..(20)..(21): Xaa is A or G or is absent

SEQ ID NO: 37014 - protein, 33 aa, Artificial Sequence; identical to SEQ ID NO: 12643
  GFR-binding peptide
  MOD_RES (1)..(1): Xaa is C or S
  MOD_RES (12)..(13)..(14)..(15)..(16): Xaa is A or G
  MOD_RES (17)..(18)..(19)..(20): Xaa is A or G or is absent

SEQ ID NO: 37015 - protein, 36 aa, Artificial Sequence; identical to SEQ ID NO: 10724
  GFR-binding peptide
  MOD_RES (33)..(34): Xaa is C or S
  MOD_RES (11)..(12)..(13)..(14)..(15): Xaa is A or G
  MOD_RES (16)..(17)..(18)..(19): Xaa is A or G or is absent

SEQ ID NO: 37016 - protein, 40 aa, Artificial Sequence; identical to SEQ ID NO: 12644
  GFR-binding peptide
  MOD_RES (2)..(4)..(36)..(37): Xaa is C or S

SEQ ID NO: 37017 - protein, 36 aa, Artificial Sequence; identical to SEQ ID NO: 10725
  GFR-binding peptide
  MOD_RES (34)..(35): Xaa is C or S
  MOD_RES (12)..(13)..(14)..(15)..(16): Xaa is A or G
  MOD_RES (17)..(18)..(19)..(20): Xaa is A or G or is absent

SEQ ID NO: 37018 - protein, 37 aa, Artificial Sequence; identical to SEQ ID NO: 12645
  GFR-binding peptide
  MOD_RES (1)..(33)..(34): Xaa is C or S

SEQ ID NO: 37019 - protein, 35 aa, Artificial Sequence; identical to SEQ ID NO: 12646
  GFR-binding peptide
  MOD_RES (2)..(35): Xaa is C or S
  MOD_RES (13)..(14)..(15)..(16)..(17): Xaa is A or G
  MOD_RES (18)..(19)..(20)..(21): Xaa is A or G or is absent

SEQ ID NO: 37020 - protein, 34 aa, Artificial Sequence; identical to SEQ ID NO: 12647
  GFR-binding peptide
  MOD_RES (1)..(33)..(34): Xaa is C or S

SEQ ID NO: 37021 - protein, 40 aa, Artificial Sequence; identical to SEQ ID NO: 12648
  GFR-binding peptide
  MOD_RES (2)..(4)..(38)..(39): Xaa is C or S
  MOD_RES (16)..(17)..(18)..(19)..(20): Xaa is A or G
  MOD_RES (21)..(22)..(23)..(24): Xaa is A or G or is absent

SEQ ID NO: 37022 - protein, 40 aa, Artificial Sequence; identical to SEQ ID NO: 12649
  GFR-binding peptide
  MOD_RES (1)..(3)..(37): Xaa is C or S
  MOD_RES (15)..(16)..(17)..(18)..(19): Xaa is A or G
  MOD_RES (20)..(21)..(22)..(23): Xaa is A or G or is absent

SEQ ID NO: 37023 - protein, 38 aa, Artificial Sequence; identical to SEQ ID NO: 10726
  GFR-binding peptide
  MOD_RES (2)..(34)..(35): Xaa is C or S

SEQ ID NO: 37024 - protein, 34 aa, Artificial Sequence; identical to SEQ ID NO: 12652
  GFR-binding peptide
  MOD_RES (33)..(34): Xaa is C or S
  MOD_RES (11)..(12)..(13)..(14)..(15): Xaa is A or G
  MOD_RES (16)..(17)..(18)..(19): Xaa is A or G or is absent

SEQ ID NO: 37025 - protein, 32 aa, Artificial Sequence; identical to SEQ ID NO: 10727
  GFR-binding peptide
  MOD_RES (11)..(12)..(13)..(14)..(15): Xaa is A or G
  MOD_RES (16)..(17)..(18)..(19): Xaa is A or G or is absent

SEQ ID NO: 37026 - protein, 33 aa, Artificial Sequence; identical to SEQ ID NO: 12653
  GFR-binding peptide
  MOD_RES (33)..(33): Xaa is C or S
  MOD_RES (11)..(12)..(13)..(14)..(15): Xaa is A or G
  MOD_RES (16)..(17)..(18)..(19): Xaa is A or G or is absent

SEQ ID NO: 37027 - protein, 41 aa, Artificial Sequence; identical to SEQ ID NO: 10728
  GFR-binding peptide
  MOD_RES (2)..(36)..(37): Xaa is C or S
  MOD_RES (14)..(15)..(16)..(17)..(18): Xaa is A or G
  MOD_RES (19)..(20)..(21)..(22): Xaa is A or G or is absent

SEQ ID NO: 37028 - protein, 41 aa, Artificial Sequence; identical to SEQ ID NO: 3292
  GFR-binding peptide
  MOD_RES (1)..(3)..(36)..(37): Xaa is C or S
  MOD_RES (14)..(15)..(16)..(17)..(18): Xaa is A or G
  MOD_RES (19)..(20)..(21)..(22): Xaa is A or G or is absent

SEQ ID NO: 37029 - protein, 38 aa, Artificial Sequence; identical to SEQ ID NO: 10730
  GFR-binding peptide
  MOD_RES (1)..(3)..(37)..(38): Xaa is C or S
  MOD_RES (15)..(16)..(17)..(18)..(19): Xaa is A or G
  MOD_RES (20)..(21)..(22)..(23): Xaa is A or G or is absent

SEQ ID NO: 37030 - protein, 37 aa, Artificial Sequence; identical to SEQ ID NO: 12654
  GFR-binding peptide
  MOD_RES (1)..(35)..(36): Xaa is C or S
  MOD_RES (13)..(14)..(15)..(16)..(17): Xaa is A or G
  MOD_RES (18)..(19)..(20)..(21): Xaa is A or G or is absent

SEQ ID NO: 37031 - protein, 39 aa, Artificial Sequence; identical to SEQ ID NO: 10731
  GFR-binding peptide
  MOD_RES (1)..(33): Xaa is C or S

SEQ ID NO: 37032 - protein, 37 aa, Artificial Sequence; identical to SEQ ID NO: 5217
  GFR-binding peptide
  MOD_RES (1)..(3)..(36)..(37): Xaa is C or S
  MOD_RES (14)..(15)..(16)..(17)..(18): Xaa is A or G
  MOD_RES (19)..(20)..(21)..(22): Xaa is A or G or is absent

SEQ ID NO: 37033 - protein, 42 aa, Artificial Sequence; identical to SEQ ID NO: 10732
  GFR-binding peptide
  MOD_RES (1)..(3)..(37)..(38): Xaa is C or S
  MOD_RES (15)..(16)..(17)..(18)..(19): Xaa is A or G
  MOD_RES (20)..(21)..(22)..(23): Xaa is A or G or is absent

SEQ ID NO: 37034 - protein, 36 aa, Artificial Sequence; identical to SEQ ID NO: 12656
  GFR-binding peptide
  MOD_RES (1)..(32)..(33): Xaa is C or S

SEQ ID NO: 37035 - protein, 37 aa, Artificial Sequence; identical to SEQ ID NO: 12658
  GFR-binding peptide
  MOD_RES (2)..(36): Xaa is C or S
  MOD_RES (14)..(15)..(16)..(17)..(18): Xaa is A or G
  MOD_RES (19)..(20)..(21)..(22): Xaa is A or G or is absent

SEQ ID NO: 37036 - protein, 36 aa, Artificial Sequence; identical to SEQ ID NO: 10734
  GFR-binding peptide
  MOD_RES (2)..(4)..(36): Xaa is C or S

SEQ ID NO: 37037 - protein, 32 aa, Artificial Sequence; identical to SEQ ID NO: 12659
  GFR-binding peptide
  MOD_RES (31)..(32): Xaa is C or S

SEQ ID NO: 37038 - protein, 39 aa, Artificial Sequence; identical to SEQ ID NO: 10736
  GFR-binding peptide
  MOD_RES (2)..(4)..(35)..(36): Xaa is C or S

SEQ ID NO: 37039 - protein, 42 aa, Artificial Sequence; identical to SEQ ID NO: 10737
  GFR-binding peptide
  MOD_RES (2)..(4)..(36)..(37): Xaa is C or S

SEQ ID NO: 37040 - protein, 37 aa, Artificial Sequence; identical to SEQ ID NO: 5223
  GFR-binding peptide
  MOD_RES (31)..(32): Xaa is C or S

SEQ ID NO: 37041 - protein, 38 aa, Artificial Sequence; identical to SEQ ID NO: 10738
  GFR-binding peptide
  MOD_RES (2)..(4)..(37)..(38): Xaa is C or S
  MOD_RES (15)..(16)..(17)..(18)..(19): Xaa is A or G
  MOD_RES (20)..(21)..(22)..(23): Xaa is A or G or is absent

SEQ ID NO: 37042 - protein, 37 aa, Artificial Sequence; identical to SEQ ID NO: 12661
  GFR-binding peptide
  MOD_RES (2)..(35)..(36): Xaa is C or S
  MOD_RES (13)..(14)..(15)..(16)..(17): Xaa is A or G
  MOD_RES (18)..(19)..(20)..(21): Xaa is A or G or is absent

SEQ ID NO: 37043 - protein, 32 aa, Artificial Sequence; identical to SEQ ID NO: 12662
  GFR-binding peptide
  MOD_RES (11)..(12)..(13)..(14)..(15): Xaa is A or G
  MOD_RES (16)..(17)..(18)..(19): Xaa is A or G or is absent

SEQ ID NO: 37044 - protein, 33 aa, Artificial Sequence; identical to SEQ ID NO: 10739
  GFR-binding peptide
  MOD_RES (1)..(1): Xaa is C or S
  MOD_RES (12)..(13)..(14)..(15)..(16): Xaa is A or G
  MOD_RES (17)..(18)..(19)..(20): Xaa is A or G or is absent

SEQ ID NO: 37045 - protein, 38 aa, Artificial Sequence; identical to SEQ ID NO: 10740
  GFR-binding peptide
  MOD_RES (1)..(33)..(34): Xaa is C or S

SEQ ID NO: 37046 - protein, 38 aa, Artificial Sequence; identical to SEQ ID NO: 10741
  GFR-binding peptide
  MOD_RES (2)..(4)..(35)..(36): Xaa is C or S

SEQ ID NO: 37047 - protein, 38 aa, Artificial Sequence; identical to SEQ ID NO: 10742
  GFR-binding peptide
  MOD_RES (2)..(4)..(37)..(38): Xaa is C or S
  MOD_RES (15)..(16)..(17)..(18)..(19): Xaa is A or G
  MOD_RES (20)..(21)..(22)..(23): Xaa is A or G or is absent

SEQ ID NO: 37048 - protein, 37 aa, Artificial Sequence; identical to SEQ ID NO: 10743
  GFR-binding peptide
  MOD_RES (1)..(34)..(35): Xaa is C or S
  MOD_RES (12)..(13)..(14)..(15)..(16): Xaa is A or G
  MOD_RES (17)..(18)..(19)..(20): Xaa is A or G or is absent

SEQ ID NO: 37049 - protein, 33 aa, Artificial Sequence; identical to SEQ ID NO: 10746
  GFR-binding peptide
  MOD_RES (32)..(33): Xaa is C or S

SEQ ID NO: 37050 - protein, 36 aa, Artificial Sequence; identical to SEQ ID NO: 12666
  GFR-binding peptide
  MOD_RES (34)..(35): Xaa is C or S
  MOD_RES (12)..(13)..(14)..(15)..(16): Xaa is A or G
  MOD_RES (17)..(18)..(19)..(20): Xaa is A or G or is absent

SEQ ID NO: 37051 - protein, 31 aa, Artificial Sequence; identical to SEQ ID NO: 12667
  GFR-binding peptide

SEQ ID NO: 37052 - protein, 37 aa, Artificial Sequence; identical to SEQ ID NO: 10747
  GFR-binding peptide
  MOD_RES (1)..(3)..(35)..(36): Xaa is C or S

SEQ ID NO: 37053 - protein, 37 aa, Artificial Sequence; identical to SEQ ID NO: 10749
  GFR-binding peptide
  MOD_RES (32)..(33): Xaa is C or S

SEQ ID NO: 37054 - protein, 37 aa, Artificial Sequence; identical to SEQ ID NO: 10750
  GFR-binding peptide
  MOD_RES (2)..(4): Xaa is C or S
  MOD_RES (16)..(17)..(18)..(19)..(20): Xaa is A or G
  MOD_RES (21)..(22)..(23)..(24): Xaa is A or G or is absent

SEQ ID NO: 37055 - protein, 34 aa, Artificial Sequence; identical to SEQ ID NO: 12668
  GFR-binding peptide
  MOD_RES (1)..(3): Xaa is C or S

SEQ ID NO: 37056 - protein, 42 aa, Artificial Sequence; identical to SEQ ID NO: 10751
  GFR-binding peptide
  MOD_RES (1)..(3)..(37)..(38): Xaa is C or S
  MOD_RES (15)..(16)..(17)..(18)..(19): Xaa is A or G
  MOD_RES (20)..(21)..(22)..(23): Xaa is A or G or is absent

SEQ ID NO: 37057 - protein, 35 aa, Artificial Sequence; identical to SEQ ID NO: 10752
  GFR-binding peptide
  MOD_RES (2)..(34)..(35): Xaa is C or S

SEQ ID NO: 37058 - protein, 37 aa, Artificial Sequence; identical to SEQ ID NO: 10753
  GFR-binding peptide
  MOD_RES (1)..(33)..(34): Xaa is C or S

SEQ ID NO: 37059 - protein, 37 aa, Artificial Sequence; identical to SEQ ID NO: 12669
  GFR-binding peptide
  MOD_RES (1)..(3)..(35)..(36): Xaa is C or S

SEQ ID NO: 37060 - protein, 39 aa, Artificial Sequence; identical to SEQ ID NO: 10754
  GFR-binding peptide
  MOD_RES (1)..(33)..(34): Xaa is C or S

SEQ ID NO: 37061 - protein, 36 aa, Artificial Sequence; identical to SEQ ID NO: 10755
  GFR-binding peptide
  MOD_RES (1)..(3)..(34)..(35): Xaa is C or S

SEQ ID NO: 37062 - protein, 37 aa, Artificial Sequence
  GFR-binding peptide
  MOD_RES (1)..(34)..(35): Xaa is C or S
  MOD_RES (12)..(13)..(14)..(15)..(16): Xaa is A or G
  MOD_RES (17)..(18)..(19)..(20): Xaa is A or G or is absent
XSKVIMNSLQEXXXXXXXXXYYLITLPELDQSVXXPS

SEQ ID NO: 37063 - protein, 30 aa, Artificial Sequence; identical to SEQ ID NO: 10756
  GFR-binding peptide

SEQ ID NO: 37064 - protein, 38 aa, Artificial Sequence; identical to SEQ ID NO: 12672
  GFR-binding peptide
  MOD_RES (32)..(32): Xaa is C or S

SEQ ID NO: 37065 - protein, 39 aa, Artificial Sequence; identical to SEQ ID NO: 10757
  GFR-binding peptide
  MOD_RES (33)..(34): Xaa is C or S
  MOD_RES (11)..(12)..(13)..(14)..(15): Xaa is A or G
  MOD_RES (16)..(17)..(18)..(19): Xaa is A or G or is absent

SEQ ID NO: 37066 - protein, 37 aa, Artificial Sequence; identical to SEQ ID NO: 10758
  GFR-binding peptide
  MOD_RES (33)..(34): Xaa is C or S
  MOD_RES (11)..(12)..(13)..(14)..(15): Xaa is A or G
  MOD_RES (16)..(17)..(18)..(19): Xaa is A or G or is absent

SEQ ID NO: 37067 - protein, 40 aa, Artificial Sequence; identical to SEQ ID NO: 12673
  GFR-binding peptide
  MOD_RES (2)..(4)..(37)..(38): Xaa is C or S
  MOD_RES (15)..(16)..(17)..(18)..(19): Xaa is A or G
  MOD_RES (20)..(21)..(22)..(23): Xaa is A or G or is absent

SEQ ID NO: 37068 - protein, 30 aa, Artificial Sequence; identical to SEQ ID NO: 10759
  GFR-binding peptide

SEQ ID NO: 37069 - protein, 38 aa, Artificial Sequence; identical to SEQ ID NO: 10760
  GFR-binding peptide
  MOD_RES (2)..(34)..(35): Xaa is C or S

SEQ ID NO: 37070 - protein, 40 aa, Artificial Sequence; identical to SEQ ID NO: 3321
  GFR-binding peptide
  MOD_RES (1)..(3)..(37)..(38): Xaa is C or S
  MOD_RES (15)..(16)..(17)..(18)..(19): Xaa is A or G
  MOD_RES (20)..(21)..(22)..(23): Xaa is A or G or is absent

SEQ ID NO: 37071 - protein, 39 aa, Artificial Sequence; identical to SEQ ID NO: 12675
  GFR-binding peptide
  MOD_RES (33)..(34): Xaa is C or S
  MOD_RES (11)..(12)..(13)..(14)..(15): Xaa is A or G
  MOD_RES (16)..(17)..(18)..(19): Xaa is A or G or is absent

SEQ ID NO: 37072 - protein, 41 aa, Artificial Sequence; identical to SEQ ID NO: 5242
  GFR-binding peptide
  MOD_RES (2)..(35)..(36): Xaa is C or S
  MOD_RES (13)..(14)..(15)..(16)..(17): Xaa is A or G
  MOD_RES (18)..(19)..(20)..(21): Xaa is A or G or is absent

SEQ ID NO: 37073 - protein, 36 aa, Artificial Sequence; identical to SEQ ID NO: 10763
  GFR-binding peptide
  MOD_RES (2)..(35)..(36): Xaa is C or S
  MOD_RES (13)..(14)..(15)..(16)..(17): Xaa is A or G
  MOD_RES (18)..(19)..(20)..(21): Xaa is A or G or is absent

SEQ ID NO: 37074 - protein, 39 aa, Artificial Sequence; identical to SEQ ID NO: 3330
  GFR-binding peptide
  MOD_RES (1)..(33)..(34): Xaa is C or S

SEQ ID NO: 37075 - protein, 36 aa, Artificial Sequence; identical to SEQ ID NO: 12680
  GFR-binding peptide
  MOD_RES (1)..(3): Xaa is C or S
  MOD_RES (15)..(16)..(17)..(18)..(19): Xaa is A or G
  MOD_RES (20)..(21)..(22)..(23): Xaa is A or G or is absent

SEQ ID NO: 37076 - protein, 33 aa, Artificial Sequence; identical to SEQ ID NO: 10766
  GFR-binding peptide
  MOD_RES (31)..(31): Xaa is C or S

SEQ ID NO: 37077 - protein, 41 aa, Artificial Sequence; identical to SEQ ID NO: 12681
  GFR-binding peptide
  MOD_RES (2)..(4)..(38)..(39): Xaa is C or S
  MOD_RES (16)..(17)..(18)..(19)..(20): Xaa is A or G
  MOD_RES (21)..(22)..(23)..(24): Xaa is A or G or is absent

SEQ ID NO: 37078 - protein, 38 aa, Artificial Sequence
  GFR-binding peptide
  MOD_RES (1)..(3)..(34)..(35): Xaa is C or S
XKXSKVIMNSLQEIKPTKGIYYLITLPELDQSVXXPSA

SEQ ID NO: 37079 - protein, 33 aa, Artificial Sequence; identical to SEQ ID NO: 12682
  GFR-binding peptide
  MOD_RES (2)..(2): Xaa is C or S

SEQ ID NO: 37080 - protein, 38 aa, Artificial Sequence; identical to SEQ ID NO: 12683
  GFR-binding peptide
  MOD_RES (34)..(35): Xaa is C or S
  MOD_RES (12)..(13)..(14)..(15)..(16): Xaa is A or G
  MOD_RES (17)..(18)..(19)..(20): Xaa is A or G or is absent

SEQ ID NO: 37081 - protein, 38 aa, Artificial Sequence; identical to SEQ ID NO: 5250
  GFR-binding peptide
  MOD_RES (1)..(3)..(35)..(36): Xaa is C or S

SEQ ID NO: 37082 - protein, 41 aa, Artificial Sequence; identical to SEQ ID NO: 10768
  GFR-binding peptide
  MOD_RES (1)..(3)..(35)..(36): Xaa is C or S

SEQ ID NO: 37083 - protein, 33 aa, Artificial Sequence; identical to SEQ ID NO: 12685
  GFR-binding peptide
  MOD_RES (1)..(33): Xaa is C or S

SEQ ID NO: 37084 - protein, 35 aa, Artificial Sequence
  GFR-binding peptide
  MOD_RES (31)..(32): Xaa is C or S
SKVIMNSLQEIKPTKGIYYLITLPELDQSVXXPSA

SEQ ID NO: 37085 - protein, 43 aa, Artificial Sequence; identical to SEQ ID NO: 10769
  GFR-binding peptide
  MOD_RES (2)..(4)..(38)..(39): Xaa is C or S
  MOD_RES (16)..(17)..(18)..(19)..(20): Xaa is A or G
  MOD_RES (21)..(22)..(23)..(24): Xaa is A or G or is absent

SEQ ID NO: 37086 - protein, 33 aa, Artificial Sequence; identical to SEQ ID NO: 5255
  GFR-binding peptide
  MOD_RES (33)..(33): Xaa is C or S
  MOD_RES (11)..(12)..(13)..(14)..(15): Xaa is A or G
  MOD_RES (16)..(17)..(18)..(19): Xaa is A or G or is absent

SEQ ID NO: 37087 - protein, 43 aa, Artificial Sequence; identical to SEQ ID NO: 10770
  GFR-binding peptide
  MOD_RES (1)..(3)..(37)..(38): Xaa is C or S
  MOD_RES (15)..(16)..(17)..(18)..(19): Xaa is A or G
  MOD_RES (20)..(21)..(22)..(23): Xaa is A or G or is absent

SEQ ID NO: 37088 - protein, 40 aa, Artificial Sequence; identical to SEQ ID NO: 5256
  GFR-binding peptide
  MOD_RES (1)..(3)..(35)..(36): Xaa is C or S

SEQ ID NO: 37089 - protein, 33 aa, Artificial Sequence; identical to SEQ ID NO: 12688
  GFR-binding peptide
  MOD_RES (1)..(3): Xaa is C or S

SEQ ID NO: 37090 - protein, 37 aa, Artificial Sequence; identical to SEQ ID NO: 3341
  GFR-binding peptide
  MOD_RES (2)..(35)..(36): Xaa is C or S
  MOD_RES (13)..(14)..(15)..(16)..(17): Xaa is A or G
  MOD_RES (18)..(19)..(20)..(21): Xaa is A or G or is absent

SEQ ID NO: 37091 - protein, 33 aa, Artificial Sequence; identical to SEQ ID NO: 12690
  GFR-binding peptide
  MOD_RES (31)..(32): Xaa is C or S

SEQ ID NO: 37092 - protein, 33 aa, Artificial Sequence; identical to SEQ ID NO: 10773
  GFR-binding peptide
  MOD_RES (1)..(1): Xaa is C or S
  MOD_RES (12)..(13)..(14)..(15)..(16): Xaa is A or G
  MOD_RES (17)..(18)..(19)..(20): Xaa is A or G or is absent

SEQ ID NO: 37093 - protein, 37 aa, Artificial Sequence; identical to SEQ ID NO: 3342
  GFR-binding peptide
  MOD_RES (1)..(32)..(33): Xaa is C or S

SEQ ID NO: 37094 - protein, 36 aa, Artificial Sequence; identical to SEQ ID NO: 10775
  GFR-binding peptide
  MOD_RES (2)..(34)..(35): Xaa is C or S

SEQ ID NO: 37095 - protein, 33 aa, Artificial Sequence; identical to SEQ ID NO: 12693
  GFR-binding peptide
  MOD_RES (31)..(32): Xaa is C or S

SEQ ID NO: 37096 - protein, 34 aa, Artificial Sequence; identical to SEQ ID NO: 12694
  GFR-binding peptide
  MOD_RES (33)..(34): Xaa is C or S
  MOD_RES (11)..(12)..(13)..(14)..(15): Xaa is A or G
  MOD_RES (16)..(17)..(18)..(19): Xaa is A or G or is absent

SEQ ID NO: 37097 - protein, 43 aa, Artificial Sequence; identical to SEQ ID NO: 12695
  GFR-binding peptide
  MOD_RES (2)..(4)..(38)..(39): Xaa is C or S
  MOD_RES (16)..(17)..(18)..(19)..(20): Xaa is A or G
  MOD_RES (21)..(22)..(23)..(24): Xaa is A or G or is absent

SEQ ID NO: 37098 - protein, 39 aa, Artificial Sequence; identical to SEQ ID NO: 5265
  GFR-binding peptide
  MOD_RES (1)..(3)..(36)..(37): Xaa is C or S
  MOD_RES (14)..(15)..(16)..(17)..(18): Xaa is A or G
  MOD_RES (19)..(20)..(21)..(22): Xaa is A or G or is absent

SEQ ID NO: 37099 - protein, 33 aa, Artificial Sequence; identical to SEQ ID NO: 12697
  GFR-binding peptide
  MOD_RES (2)..(2): Xaa is C or S

SEQ ID NO: 37100 - protein, 39 aa, Artificial Sequence; identical to SEQ ID NO: 12698
  GFR-binding peptide
  MOD_RES (1)..(35)..(36): Xaa is C or S
  MOD_RES (13)..(14)..(15)..(16)..(17): Xaa is A or G
  MOD_RES (18)..(19)..(20)..(21): Xaa is A or G or is absent

SEQ ID NO: 37101 - protein, 38 aa, Artificial Sequence; identical to SEQ ID NO: 12699
  GFR-binding peptide
  MOD_RES (2)..(4)..(38): Xaa is C or S
  MOD_RES (16)..(17)..(18)..(19)..(20): Xaa is A or G
  MOD_RES (21)..(22)..(23)..(24): Xaa is A or G or is absent

SEQ ID NO: 37102 - protein, 36 aa, Artificial Sequence; identical to SEQ ID NO: 12701
  GFR-binding peptide
  MOD_RES (32)..(33): Xaa is C or S

SEQ ID NO: 37103 - protein, 40 aa, Artificial Sequence; identical to SEQ ID NO: 5268
  GFR-binding peptide
  MOD_RES (34)..(35): Xaa is C or S
  MOD_RES (12)..(13)..(14)..(15)..(16): Xaa is A or G
  MOD_RES (17)..(18)..(19)..(20): Xaa is A or G or is absent

SEQ ID NO: 37104 - protein, 40 aa, Artificial Sequence; identical to SEQ ID NO: 10780
  GFR-binding peptide
  MOD_RES (2)..(34)..(35): Xaa is C or S

SEQ ID NO: 37105 - protein, 40 aa, Artificial Sequence; identical to SEQ ID NO: 12703
  GFR-binding peptide
  MOD_RES (2)..(34)..(35): Xaa is C or S

SEQ ID NO: 37106 - protein, 35 aa, Artificial Sequence; identical to SEQ ID NO: 12704
  GFR-binding peptide
  MOD_RES (1)..(33): Xaa is C or S

SEQ ID NO: 37107 - protein, 43 aa, Artificial Sequence; identical to SEQ ID NO: 3356
  GFR-binding peptide
  MOD_RES (1)..(3)..(37)..(38): Xaa is C or S
  MOD_RES (15)..(16)..(17)..(18)..(19): Xaa is A or G
  MOD_RES (20)..(21)..(22)..(23): Xaa is A or G or is absent

SEQ ID NO: 37108 - protein, 32 aa, Artificial Sequence; identical to SEQ ID NO: 10782
  GFR-binding peptide
  MOD_RES (2)..(2): Xaa is C or S

SEQ ID NO: 37109 - protein, 42 aa, Artificial Sequence; identical to SEQ ID NO: 12706
  GFR-binding peptide
  MOD_RES (2)..(4)..(36)..(37): Xaa is C or S

SEQ ID NO: 37110 - protein, 41 aa, Artificial Sequence; identical to SEQ ID NO: 12707
  GFR-binding peptide
  MOD_RES (1)..(3)..(35)..(36): Xaa is C or S

SEQ ID NO: 37111 - protein, 38 aa, Artificial Sequence; identical to SEQ ID NO: 12708
  GFR-binding peptide
  MOD_RES (32)..(33): Xaa is C or S

SEQ ID NO: 37112 - protein, 38 aa, Artificial Sequence; identical to SEQ ID NO: 12709
  GFR-binding peptide
  MOD_RES (2)..(4)..(38): Xaa is C or S
  MOD_RES (16)..(17)..(18)..(19)..(20): Xaa is A or G
  MOD_RES (21)..(22)..(23)..(24): Xaa is A or G or is absent

SEQ ID NO: 37113 - protein, 32 aa, Artificial Sequence; identical to SEQ ID NO: 12710
  GFR-binding peptide
  MOD_RES (11)..(12)..(13)..(14)..(15): Xaa is A or G
  MOD_RES (16)..(17)..(18)..(19): Xaa is A or G or is absent

SEQ ID NO: 37114 - protein, 38 aa, Artificial Sequence; identical to SEQ ID NO: 10784
  GFR-binding peptide
  MOD_RES (32)..(33): Xaa is C or S

SEQ ID NO: 37115 - protein, 34 aa, Artificial Sequence; identical to SEQ ID NO: 10785
  GFR-binding peptide
  MOD_RES (1)..(3)..(34): Xaa is C or S

SEQ ID NO: 37116 - protein, 35 aa, Artificial Sequence; identical to SEQ ID NO: 10786
  GFR-binding peptide
  MOD_RES (32)..(32): Xaa is C or S

SEQ ID NO: 37117 - protein, 35 aa, Artificial Sequence; identical to SEQ ID NO: 10788
  GFR-binding peptide
  MOD_RES (31)..(32): Xaa is C or S

SEQ ID NO: 37118 - protein, 37 aa, Artificial Sequence; identical to SEQ ID NO: 3368
  GFR-binding peptide
  MOD_RES (2)..(4)..(36)..(37): Xaa is C or S

SEQ ID NO: 37119 - protein, 36 aa, Artificial Sequence; identical to SEQ ID NO: 3370
  GFR-binding peptide
  MOD_RES (1)..(35)..(36): Xaa is C or S
  MOD_RES (13)..(14)..(15)..(16)..(17): Xaa is A or G
  MOD_RES (18)..(19)..(20)..(21): Xaa is A or G or is absent

SEQ ID NO: 37120 - protein, 39 aa, Artificial Sequence; identical to SEQ ID NO: 10791
  GFR-binding peptide
  MOD_RES (2)..(36)..(37): Xaa is C or S
  MOD_RES (14)..(15)..(16)..(17)..(18): Xaa is A or G
  MOD_RES (19)..(20)..(21)..(22): Xaa is A or G or is absent

SEQ ID NO: 37121 - protein, 39 aa, Artificial Sequence; identical to SEQ ID NO: 12714
  GFR-binding peptide
  MOD_RES (2)..(4)..(36)..(37): Xaa is C or S

SEQ ID NO: 37122 - protein, 37 aa, Artificial Sequence; identical to SEQ ID NO: 3372
  GFR-binding peptide
  MOD_RES (1)..(3)..(37): Xaa is C or S
  MOD_RES (15)..(16)..(17)..(18)..(19): Xaa is A or G
  MOD_RES (20)..(21)..(22)..(23): Xaa is A or G or is absent

SEQ ID NO: 37123 - protein, 34 aa, Artificial Sequence; identical to SEQ ID NO: 12715
  GFR-binding peptide
  MOD_RES (1)..(33)..(34): Xaa is C or S

SEQ ID NO: 37124 - protein, 33 aa, Artificial Sequence; identical to SEQ ID NO: 10793
  GFR-binding peptide
  MOD_RES (33)..(33): Xaa is C or S
  MOD_RES (11)..(12)..(13)..(14)..(15): Xaa is A or G
  MOD_RES (16)..(17)..(18)..(19): Xaa is A or G or is absent

SEQ ID NO: 37125 - protein, 31 aa, Artificial Sequence; identical to SEQ ID NO: 10794
  GFR-binding peptide

SEQ ID NO: 37126 - protein, 37 aa, Artificial Sequence; identical to SEQ ID NO: 3373
  GFR-binding peptide
  MOD_RES (1)..(3)..(34)..(35): Xaa is C or S

SEQ ID NO: 37127 - protein, 35 aa, Artificial Sequence; identical to SEQ ID NO: 5290
  GFR-binding peptide
  MOD_RES (1)..(3)..(35): Xaa is C or S

SEQ ID NO: 37128 - protein, 39 aa, Artificial Sequence; identical to SEQ ID NO: 10796
  GFR-binding peptide
  MOD_RES (34)..(35): Xaa is C or S
  MOD_RES (12)..(13)..(14)..(15)..(16): Xaa is A or G
  MOD_RES (17)..(18)..(19)..(20): Xaa is A or G or is absent

SEQ ID NO: 37129 - protein, 40 aa, Artificial Sequence; identical to SEQ ID NO: 10797
  GFR-binding peptide
  MOD_RES (2)..(34)..(35): Xaa is C or S

SEQ ID NO: 37130 - protein, 40 aa, Artificial Sequence; identical to SEQ ID NO: 5292
  GFR-binding peptide
  MOD_RES (2)..(4)..(37)..(38): Xaa is C or S
  MOD_RES (15)..(16)..(17)..(18)..(19): Xaa is A or G
  MOD_RES (20)..(21)..(22)..(23): Xaa is A or G or is absent

SEQ ID NO: 37131 - protein, 35 aa, Artificial Sequence; identical to SEQ ID NO: 12720
  GFR-binding peptide
  MOD_RES (33)..(34): Xaa is C or S
  MOD_RES (11)..(12)..(13)..(14)..(15): Xaa is A or G
  MOD_RES (16)..(17)..(18)..(19): Xaa is A or G or is absent

SEQ ID NO: 37132 - protein, 36 aa, Artificial Sequence; identical to SEQ ID NO: 10800
  GFR-binding peptide
  MOD_RES (2)..(36): Xaa is C or S
  MOD_RES (14)..(15)..(16)..(17)..(18): Xaa is A or G
  MOD_RES (19)..(20)..(21)..(22): Xaa is A or G or is absent

SEQ ID NO: 37133 - protein, 38 aa, Artificial Sequence; identical to SEQ ID NO: 12721
  GFR-binding peptide
  MOD_RES (1)..(32)..(33): Xaa is C or S

SEQ ID NO: 37134 - protein, 42 aa, Artificial Sequence; identical to SEQ ID NO: 3378
  GFR-binding peptide
  MOD_RES (1)..(3)..(37)..(38): Xaa is C or S
  MOD_RES (15)..(16)..(17)..(18)..(19): Xaa is A or G
  MOD_RES (20)..(21)..(22)..(23): Xaa is A or G or is absent

SEQ ID NO: 37135 - protein, 40 aa, Artificial Sequence; identical to SEQ ID NO: 10802
  GFR-binding peptide
  MOD_RES (2)..(4)..(37)..(38): Xaa is C or S
  MOD_RES (15)..(16)..(17)..(18)..(19): Xaa is A or G
  MOD_RES (20)..(21)..(22)..(23): Xaa is A or G or is absent

SEQ ID NO: 37136 - protein, 32 aa, Artificial Sequence; identical to SEQ ID NO: 10803
  GFR-binding peptide
  MOD_RES (11)..(12)..(13)..(14)..(15): Xaa is A or G
  MOD_RES (16)..(17)..(18)..(19): Xaa is A or G or is absent

SEQ ID NO: 37137 - protein, 39 aa, Artificial Sequence; identical to SEQ ID NO: 10804
  GFR-binding peptide
  MOD_RES (2)..(34)..(35): Xaa is C or S

SEQ ID NO: 37138 - protein, 35 aa, Artificial Sequence; identical to SEQ ID NO: 5301
  GFR-binding peptide
  MOD_RES (2)..(4): Xaa is C or S

SEQ ID NO: 37139 - protein, 34 aa, Artificial Sequence
  GFR-binding peptide
  MOD_RES (1)..(32)..(33): Xaa is C or S
XSKVIMNSLQEIKPTKGIYYLITLPELDQSVXXP

SEQ ID NO: 37140 - protein, 41 aa, Artificial Sequence; identical to SEQ ID NO: 10805
  GFR-binding peptide
  MOD_RES (1)..(35)..(36): Xaa is C or S
  MOD_RES (13)..(14)..(15)..(16)..(17): Xaa is A or G
  MOD_RES (18)..(19)..(20)..(21): Xaa is A or G or is absent

SEQ ID NO: 37141 - protein, 43 aa, Artificial Sequence; identical to SEQ ID NO: 12724
  GFR-binding peptide
  MOD_RES (1)..(3)..(37)..(38): Xaa is C or S
  MOD_RES (15)..(16)..(17)..(18)..(19): Xaa is A or G
  MOD_RES (20)..(21)..(22)..(23): Xaa is A or G or is absent

SEQ ID NO: 37142 - protein, 35 aa, Artificial Sequence; identical to SEQ ID NO: 10807
  GFR-binding peptide
  MOD_RES (34)..(35): Xaa is C or S
  MOD_RES (12)..(13)..(14)..(15)..(16): Xaa is A or G
  MOD_RES (17)..(18)..(19)..(20): Xaa is A or G or is absent

SEQ ID NO: 37143 - protein, 38 aa, Artificial Sequence; identical to SEQ ID NO: 10808
  GFR-binding peptide
  MOD_RES (2)..(34)..(35): Xaa is C or S

SEQ ID NO: 37144 - protein, 36 aa, Artificial Sequence; identical to SEQ ID NO: 5304
  GFR-binding peptide
  MOD_RES (31)..(32): Xaa is C or S

SEQ ID NO: 37145 - protein, 40 aa, Artificial Sequence; identical to SEQ ID NO: 12726
  GFR-binding peptide
  MOD_RES (2)..(4)..(36): Xaa is C or S

SEQ ID NO: 37146 - protein, 41 aa, Artificial Sequence; identical to SEQ ID NO: 12727
  GFR-binding peptide
  MOD_RES (2)..(4)..(37)..(38): Xaa is C or S
  MOD_RES (15)..(16)..(17)..(18)..(19): Xaa is A or G
  MOD_RES (20)..(21)..(22)..(23): Xaa is A or G or is absent

SEQ ID NO: 37147 - protein, 34 aa, Artificial Sequence; identical to SEQ ID NO: 12728
  GFR-binding peptide
  MOD_RES (2)..(4): Xaa is C or S

SEQ ID NO: 37148 - protein, 30 aa, Artificial Sequence; identical to SEQ ID NO: 12729
  GFR-binding peptide

SEQ ID NO: 37149 - protein, 41 aa, Artificial Sequence; identical to SEQ ID NO: 5305
  GFR-binding peptide
  MOD_RES (2)..(4)..(37)..(38): Xaa is C or S
  MOD_RES (15)..(16)..(17)..(18)..(19): Xaa is A or G
  MOD_RES (20)..(21)..(22)..(23): Xaa is A or G or is absent

SEQ ID NO: 37150 - protein, 37 aa, Artificial Sequence; identical to SEQ ID NO: 12731
  GFR-binding peptide
  MOD_RES (31)..(32): Xaa is C or S

SEQ ID NO: 37151 - protein, 40 aa, Artificial Sequence; identical to SEQ ID NO: 10810
  GFR-binding peptide
  MOD_RES (1)..(3)..(35)..(36): Xaa is C or S

SEQ ID NO: 37152 - protein, 39 aa, Artificial Sequence; identical to SEQ ID NO: 12732
  GFR-binding peptide
  MOD_RES (2)..(36): Xaa is C or S
  MOD_RES (14)..(15)..(16)..(17)..(18): Xaa is A or G
  MOD_RES (19)..(20)..(21)..(22): Xaa is A or G or is absent

SEQ ID NO: 37153 - protein, 41 aa, Artificial Sequence; identical to SEQ ID NO: 12733
  GFR-binding peptide
  MOD_RES (1)..(3)..(35)..(36): Xaa is C or S

SEQ ID NO: 37154 - protein, 36 aa, Artificial Sequence; identical to SEQ ID NO: 3388
  GFR-binding peptide
  MOD_RES (2)..(4)..(36): Xaa is C or S

SEQ ID NO: 37155 - protein, 34 aa, Artificial Sequence; identical to SEQ ID NO: 12734
  GFR-binding peptide
  MOD_RES (2)..(34): Xaa is C or S

SEQ ID NO: 37156 - protein, 36 aa, Artificial Sequence; identical to SEQ ID NO: 12735
  GFR-binding peptide
  MOD_RES (33)..(34): Xaa is C or S
  MOD_RES (11)..(12)..(13)..(14)..(15): Xaa is A or G
  MOD_RES (16)..(17)..(18)..(19): Xaa is A or G or is absent

SEQ ID NO: 37157 - protein, 39 aa, Artificial Sequence; identical to SEQ ID NO: 10812
  GFR-binding peptide
  MOD_RES (2)..(4)..(38)..(39): Xaa is C or S
  MOD_RES (16)..(17)..(18)..(19)..(20): Xaa is A or G
  MOD_RES (21)..(22)..(23)..(24): Xaa is A or G or is absent

SEQ ID NO: 37158 - protein, 38 aa, Artificial Sequence; identical to SEQ ID NO: 5313
  GFR-binding peptide
  MOD_RES (1)..(33)..(34): Xaa is C or S

SEQ ID NO: 37159 - protein, 38 aa, Artificial Sequence; identical to SEQ ID NO: 10814
  GFR-binding peptide
  MOD_RES (1)..(35)..(36): Xaa is C or S
  MOD_RES (13)..(14)..(15)..(16)..(17): Xaa is A or G
  MOD_RES (18)..(19)..(20)..(21): Xaa is A or G or is absent

SEQ ID NO: 37160 - protein, 41 aa, Artificial Sequence; identical to SEQ ID NO: 12738
  GFR-binding peptide
  MOD_RES (1)..(3)..(35)..(36): Xaa is C or S

SEQ ID NO: 37161 - protein, 32 aa, Artificial Sequence; identical to SEQ ID NO: 5314
  GFR-binding peptide
  MOD_RES (2)..(2): Xaa is C or S

SEQ ID NO: 37162 - protein, 38 aa, Artificial Sequence; identical to SEQ ID NO: 12740
  GFR-binding peptide
  MOD_RES (1)..(3)..(36)..(37): Xaa is C or S
  MOD_RES (14)..(15)..(16)..(17)..(18): Xaa is A or G
  MOD_RES (19)..(20)..(21)..(22): Xaa is A or G or is absent

SEQ ID NO: 37163 - protein, 37 aa, Artificial Sequence; identical to SEQ ID NO: 12741
  GFR-binding peptide
  MOD_RES (2)..(4)..(37): Xaa is C or S
  MOD_RES (15)..(16)..(17)..(18)..(19): Xaa is A or G
  MOD_RES (20)..(21)..(22)..(23): Xaa is A or G or is absent

SEQ ID NO: 37164 - protein, 42 aa, Artificial Sequence; identical to SEQ ID NO: 12742
  GFR-binding peptide
  MOD_RES (2)..(4)..(38)..(39): Xaa is C or S
  MOD_RES (16)..(17)..(18)..(19)..(20): Xaa is A or G
  MOD_RES (21)..(22)..(23)..(24): Xaa is A or G or is absent

SEQ ID NO: 37165 - protein, 34 aa, Artificial Sequence; identical to SEQ ID NO: 10816
  GFR-binding peptide
  MOD_RES (1)..(34): Xaa is C or S
  MOD_RES (12)..(13)..(14)..(15)..(16): Xaa is A or G
  MOD_RES (17)..(18)..(19)..(20): Xaa is A or G or is absent

SEQ ID NO: 37166 - protein, 36 aa, Artificial Sequence; identical to SEQ ID NO: 12743
  GFR-binding peptide
  MOD_RES (1)..(3): Xaa is C or S
  MOD_RES (15)..(16)..(17)..(18)..(19): Xaa is A or G
  MOD_RES (20)..(21)..(22)..(23): Xaa is A or G or is absent

SEQ ID NO: 37167 - protein, 36 aa, Artificial Sequence; identical to SEQ ID NO: 12744
  GFR-binding peptide
  MOD_RES (33)..(34): Xaa is C or S
  MOD_RES (11)..(12)..(13)..(14)..(15): Xaa is A or G
  MOD_RES (16)..(17)..(18)..(19): Xaa is A or G or is absent

SEQ ID NO: 37168 - protein, 36 aa, Artificial Sequence; identical to SEQ ID NO: 10817
  GFR-binding peptide
  MOD_RES (1)..(35)..(36): Xaa is C or S
  MOD_RES (13)..(14)..(15)..(16)..(17): Xaa is A or G
  MOD_RES (18)..(19)..(20)..(21): Xaa is A or G or is absent

SEQ ID NO: 37169 - protein, 33 aa, Artificial Sequence; identical to SEQ ID NO: 12745
  GFR-binding peptide
  MOD_RES (31)..(32): Xaa is C or S

SEQ ID NO: 37170 - protein, 35 aa, Artificial Sequence; identical to SEQ ID NO: 10818
  GFR-binding peptide
  MOD_RES (2)..(4)..(35): Xaa is C or S

SEQ ID NO: 37171 - protein, 30 aa, Artificial Sequence; identical to SEQ ID NO: 12746
  GFR-binding peptide

SEQ ID NO: 37172 - protein, 39 aa, Artificial Sequence; identical to SEQ ID NO: 10819
  GFR-binding peptide
  MOD_RES (1)..(3)..(37)..(38): Xaa is C or S
  MOD_RES (15)..(16)..(17)..(18)..(19): Xaa is A or G
  MOD_RES (20)..(21)..(22)..(23): Xaa is A or G or is absent

SEQ ID NO: 37173 - protein, 39 aa, Artificial Sequence; identical to SEQ ID NO: 10820
  GFR-binding peptide
  MOD_RES (2)..(4)..(38)..(39): Xaa is C or S
  MOD_RES (16)..(17)..(18)..(19)..(20): Xaa is A or G
  MOD_RES (21)..(22)..(23)..(24): Xaa is A or G or is absent

SEQ ID NO: 37174 - protein, 39 aa, Artificial Sequence; identical to SEQ ID NO: 12747
  GFR-binding peptide
  MOD_RES (1)..(3)..(34)..(35): Xaa is C or S

SEQ ID NO: 37175 - protein, 38 aa, Artificial Sequence; identical to SEQ ID NO: 10821
  GFR-binding peptide
  MOD_RES (2)..(4)..(36): Xaa is C or S

SEQ ID NO: 37176 - protein, 39 aa, Artificial Sequence; identical to SEQ ID NO: 12749
  GFR-binding peptide
  MOD_RES (2)..(4)..(37)..(38): Xaa is C or S
  MOD_RES (15)..(16)..(17)..(18)..(19): Xaa is A or G
  MOD_RES (20)..(21)..(22)..(23): Xaa is A or G or is absent

SEQ ID NO: 37177 - protein, 39 aa, Artificial Sequence; identical to SEQ ID NO: 10822
  GFR-binding peptide
  MOD_RES (2)..(36): Xaa is C or S
  MOD_RES (14)..(15)..(16)..(17)..(18): Xaa is A or G
  MOD_RES (19)..(20)..(21)..(22): Xaa is A or G or is absent

SEQ ID NO: 37178 - protein, 39 aa, Artificial Sequence; identical to SEQ ID NO: 10824
  GFR-binding peptide
  MOD_RES (1)..(34)..(35): Xaa is C or S
  MOD_RES (12)..(13)..(14)..(15)..(16): Xaa is A or G
  MOD_RES (17)..(18)..(19)..(20): Xaa is A or G or is absent

SEQ ID NO: 37179 - protein, 35 aa, Artificial Sequence; identical to SEQ ID NO: 3404
  GFR-binding peptide
  MOD_RES (2)..(34)..(35): Xaa is C or S

SEQ ID NO: 37180 - protein, 40 aa, Artificial Sequence; identical to SEQ ID NO: 10826
  GFR-binding peptide
  MOD_RES (2)..(4)..(36)..(37): Xaa is C or S

SEQ ID NO: 37181 - protein, 36 aa, Artificial Sequence; identical to SEQ ID NO: 10827
  GFR-binding peptide
  MOD_RES (1)..(33): Xaa is C or S

SEQ ID NO: 37182 - protein, 38 aa, Artificial Sequence; identical to SEQ ID NO: 12751
  GFR-binding peptide
  MOD_RES (1)..(35)..(36): Xaa is C or S
  MOD_RES (13)..(14)..(15)..(16)..(17): Xaa is A or G
  MOD_RES (18)..(19)..(20)..(21): Xaa is A or G or is absent

SEQ ID NO: 37183 - protein, 38 aa, Artificial Sequence; identical to SEQ ID NO: 12752
  GFR-binding peptide
  MOD_RES (1)..(35): Xaa is C or S
  MOD_RES (13)..(14)..(15)..(16)..(17): Xaa is A or G
  MOD_RES (18)..(19)..(20)..(21): Xaa is A or G or is absent

SEQ ID NO: 37184 - protein, 35 aa, Artificial Sequence; identical to SEQ ID NO: 12753
  GFR-binding peptide
  MOD_RES (1)..(3)..(34)..(35): Xaa is C or S

SEQ ID NO: 37185 - protein, 40 aa, Artificial Sequence; identical to SEQ ID NO: 10828
  GFR-binding peptide
  MOD_RES (34)..(35): Xaa is C or S
  MOD_RES (12)..(13)..(14)..(15)..(16): Xaa is A or G
  MOD_RES (17)..(18)..(19)..(20): Xaa is A or G or is absent

SEQ ID NO: 37186 - protein, 36 aa, Artificial Sequence; identical to SEQ ID NO: 12755
  GFR-binding peptide
  MOD_RES (2)..(36): Xaa is C or S
  MOD_RES (14)..(15)..(16)..(17)..(18): Xaa is A or G
  MOD_RES (19)..(20)..(21)..(22): Xaa is A or G or is absent

SEQ ID NO: 37187 - protein, 33 aa, Artificial Sequence; identical to SEQ ID NO: 5330
  GFR-binding peptide
  MOD_RES (1)..(33): Xaa is C or S

SEQ ID NO: 37188 - protein, 41 aa, Artificial Sequence; identical to SEQ ID NO: 12757
  GFR-binding peptide
  MOD_RES (1)..(3)..(35)..(36): Xaa is C or S

SEQ ID NO: 37189 - protein, 34 aa, Artificial Sequence; identical to SEQ ID NO: 12758
  GFR-binding peptide
  MOD_RES (2)..(2): Xaa is C or S
  MOD_RES (13)..(14)..(15)..(16)..(17): Xaa is A or G
  MOD_RES (18)..(19)..(20)..(21): Xaa is A or G or is absent

SEQ ID NO: 37190 - protein, 37 aa, Artificial Sequence; identical to SEQ ID NO: 10829
  GFR-binding peptide
  MOD_RES (1)..(33)..(34): Xaa is C or S

SEQ ID NO: 37191 - protein, 36 aa, Artificial Sequence; identical to SEQ ID NO: 10830
  GFR-binding peptide
  MOD_RES (2)..(36): Xaa is C or S
  MOD_RES (14)..(15)..(16)..(17)..(18): Xaa is A or G
  MOD_RES (19)..(20)..(21)..(22): Xaa is A or G or is absent

SEQ ID NO: 37192 - protein, 33 aa, Artificial Sequence; identical to SEQ ID NO: 10831
  GFR-binding peptide
  MOD_RES (32)..(33): Xaa is C or S

SEQ ID NO: 37193 - protein, 40 aa, Artificial Sequence; identical to SEQ ID NO: 10832
  GFR-binding peptide
  MOD_RES (2)..(36): Xaa is C or S
  MOD_RES (14)..(15)..(16)..(17)..(18): Xaa is A or G
  MOD_RES (19)..(20)..(21)..(22): Xaa is A or G or is absent

SEQ ID NO: 37194 - protein, 34 aa, Artificial Sequence; identical to SEQ ID NO: 10833
  GFR-binding peptide
  MOD_RES (34)..(34): Xaa is C or S
  MOD_RES (12)..(13)..(14)..(15)..(16): Xaa is A or G
  MOD_RES (17)..(18)..(19)..(20): Xaa is A or G or is absent

SEQ ID NO: 37195 - protein, 40 aa, Artificial Sequence; identical to SEQ ID NO: 3411
  GFR-binding peptide
  MOD_RES (1)..(34)..(35): Xaa is C or S
  MOD_RES (12)..(13)..(14)..(15)..(16): Xaa is A or G
  MOD_RES (17)..(18)..(19)..(20): Xaa is A or G or is absent

SEQ ID NO: 37196 - protein, 36 aa, Artificial Sequence; identical to SEQ ID NO: 5334
  GFR-binding peptide
  MOD_RES (34)..(35): Xaa is C or S
  MOD_RES (12)..(13)..(14)..(15)..(16): Xaa is A or G
  MOD_RES (17)..(18)..(19)..(20): Xaa is A or G or is absent

SEQ ID NO: 37197 - protein, 37 aa, Artificial Sequence; identical to SEQ ID NO: 10835
  GFR-binding peptide
  MOD_RES (2)..(35)..(36): Xaa is C or S
  MOD_RES (13)..(14)..(15)..(16)..(17): Xaa is A or G
  MOD_RES (18)..(19)..(20)..(21): Xaa is A or G or is absent

SEQ ID NO: 37198 - protein, 37 aa, Artificial Sequence; identical to SEQ ID NO: 10836
  GFR-binding peptide
  MOD_RES (1)..(33): Xaa is C or S

SEQ ID NO: 37199 - protein, 37 aa, Artificial Sequence; identical to SEQ ID NO: 12760
  GFR-binding peptide
  MOD_RES (31)..(32): Xaa is C or S

SEQ ID NO: 37200 - protein, 36 aa, Artificial Sequence; identical to SEQ ID NO: 10839
  GFR-binding peptide
  MOD_RES (31)..(32): Xaa is C or S

SEQ ID NO: 37201 - protein, 33 aa, Artificial Sequence; identical to SEQ ID NO: 12761
  GFR-binding peptide
  MOD_RES (32)..(33): Xaa is C or S

SEQ ID NO: 37202 - protein, 42 aa, Artificial Sequence; identical to SEQ ID NO: 10840
  GFR-binding peptide
  MOD_RES (2)..(4)..(37)..(38): Xaa is C or S
  MOD_RES (15)..(16)..(17)..(18)..(19): Xaa is A or G
  MOD_RES (20)..(21)..(22)..(23): Xaa is A or G or is absent

SEQ ID NO: 37203 - protein, 38 aa, Artificial Sequence; identical to SEQ ID NO: 12762
  GFR-binding peptide
  MOD_RES (34)..(34): Xaa is C or S
  MOD_RES (12)..(13)..(14)..(15)..(16): Xaa is A or G
  MOD_RES (17)..(18)..(19)..(20): Xaa is A or G or is absent

SEQ ID NO: 37204 - protein, 36 aa, Artificial Sequence; identical to SEQ ID NO: 3418
  GFR-binding peptide
  MOD_RES (33)..(34): Xaa is C or S
  MOD_RES (11)..(12)..(13)..(14)..(15): Xaa is A or G
  MOD_RES (16)..(17)..(18)..(19): Xaa is A or G or is absent

SEQ ID NO: 37205 - protein, 31 aa, Artificial Sequence; identical to SEQ ID NO: 5336
  GFR-binding peptide
  MOD_RES (31)..(31): Xaa is C or S

SEQ ID NO: 37206 - protein, 35 aa, Artificial Sequence; identical to SEQ ID NO: 12764
  GFR-binding peptide
  MOD_RES (1)..(3)..(34)..(35): Xaa is C or S

SEQ ID NO: 37207 - protein, 35 aa, Artificial Sequence; identical to SEQ ID NO: 10843
  GFR-binding peptide
  MOD_RES (31)..(32): Xaa is C or S

SEQ ID NO: 37208 - protein, 36 aa, Artificial Sequence; identical to SEQ ID NO: 12765
  GFR-binding peptide
  MOD_RES (2)..(36): Xaa is C or S
  MOD_RES (14)..(15)..(16)..(17)..(18): Xaa is A or G
  MOD_RES (19)..(20)..(21)..(22): Xaa is A or G or is absent

SEQ ID NO: 37209 - protein, 38 aa, Artificial Sequence; identical to SEQ ID NO: 5338
  GFR-binding peptide
  MOD_RES (1)..(3)..(35)..(36): Xaa is C or S

SEQ ID NO: 37210 - protein, 42 aa, Artificial Sequence; identical to SEQ ID NO: 12770
  GFR-binding peptide
  MOD_RES (2)..(4)..(38)..(39): Xaa is C or S
  MOD_RES (16)..(17)..(18)..(19)..(20): Xaa is A or G
  MOD_RES (21)..(22)..(23)..(24): Xaa is A or G or is absent

SEQ ID NO: 37211 - protein, 41 aa, Artificial Sequence; identical to SEQ ID NO: 10844
  GFR-binding peptide
  MOD_RES (1)..(35)..(36): Xaa is C or S
  MOD_RES (13)..(14)..(15)..(16)..(17): Xaa is A or G
  MOD_RES (18)..(19)..(20)..(21): Xaa is A or G or is absent

SEQ ID NO: 37212 - protein, 41 aa, Artificial Sequence; identical to SEQ ID NO: 12771
  GFR-binding peptide
  MOD_RES (1)..(35)..(36): Xaa is C or S
  MOD_RES (13)..(14)..(15)..(16)..(17): Xaa is A or G
  MOD_RES (18)..(19)..(20)..(21): Xaa is A or G or is absent

SEQ ID NO: 37213 - protein, 35 aa, Artificial Sequence; identical to SEQ ID NO: 12772
  GFR-binding peptide
  MOD_RES (2)..(33)..(34): Xaa is C or S

SEQ ID NO: 37214 - protein, 31 aa, Artificial Sequence; identical to SEQ ID NO: 12773
  GFR-binding peptide

SEQ ID NO: 37215 - protein, 36 aa, Artificial Sequence; identical to SEQ ID NO: 12774
  GFR-binding peptide
  MOD_RES (2)..(4)..(35)..(36): Xaa is C or S

SEQ ID NO: 37216 - protein, 32 aa, Artificial Sequence; identical to SEQ ID NO: 5347
  GFR-binding peptide
  MOD_RES (31)..(32): Xaa is C or S

SEQ ID NO: 37217 - protein, 34 aa, Artificial Sequence; identical to SEQ ID NO: 12776
  GFR-binding peptide
  MOD_RES (1)..(34): Xaa is C or S
  MOD_RES (12)..(13)..(14)..(15)..(16): Xaa is A or G
  MOD_RES (17)..(18)..(19)..(20): Xaa is A or G or is absent

SEQ ID NO: 37218 - protein, 44 aa, Artificial Sequence; identical to SEQ ID NO: 5349
  GFR-binding peptide
  MOD_RES (2)..(4)..(38)..(39): Xaa is C or S
  MOD_RES (16)..(17)..(18)..(19)..(20): Xaa is A or G
  MOD_RES (21)..(22)..(23)..(24): Xaa is A or G or is absent

SEQ ID NO: 37219 - protein, 33 aa, Artificial Sequence; identical to SEQ ID NO: 12779
  GFR-binding peptide
  MOD_RES (1)..(33): Xaa is C or S

SEQ ID NO: 37220 - protein, 39 aa, Artificial Sequence; identical to SEQ ID NO: 12780
  GFR-binding peptide
  MOD_RES (1)..(33): Xaa is C or S

SEQ ID NO: 37221 - protein, 43 aa, Artificial Sequence; identical to SEQ ID NO: 3427
  GFR-binding peptide
  MOD_RES (2)..(4)..(38)..(39): Xaa is C or S
  MOD_RES (16)..(17)..(18)..(19)..(20): Xaa is A or G
  MOD_RES (21)..(22)..(23)..(24): Xaa is A or G or is absent

SEQ ID NO: 37222 - protein, 38 aa, Artificial Sequence; identical to SEQ ID NO: 10846
  GFR-binding peptide
  MOD_RES (2)..(35)..(36): Xaa is C or S
  MOD_RES (13)..(14)..(15)..(16)..(17): Xaa is A or G
  MOD_RES (18)..(19)..(20)..(21): Xaa is A or G or is absent

SEQ ID NO: 37223 - protein, 39 aa, Artificial Sequence; identical to SEQ ID NO: 12782
  GFR-binding peptide
  MOD_RES (1)..(35)..(36): Xaa is C or S
  MOD_RES (13)..(14)..(15)..(16)..(17): Xaa is A or G
  MOD_RES (18)..(19)..(20)..(21): Xaa is A or G or is absent

SEQ ID NO: 37224 - protein, 40 aa, Artificial Sequence; identical to SEQ ID NO: 5355
  GFR-binding peptide
  MOD_RES (1)..(35)..(36): Xaa is C or S
  MOD_RES (13)..(14)..(15)..(16)..(17): Xaa is A or G
  MOD_RES (18)..(19)..(20)..(21): Xaa is A or G or is absent

SEQ ID NO: 37225 - protein, 34 aa, Artificial Sequence
  GFR-binding peptide
  MOD_RES (33)..(34): Xaa is C or S
  MOD_RES (11)..(12)..(13)..(14)..(15): Xaa is A or G
  MOD_RES (16)..(17)..(18)..(19): Xaa is A or G or is absent
SKVIMNSLQEXXXXXXXXXYYLITLPELDQSVXX

SEQ ID NO: 37226 - protein, 41 aa, Artificial Sequence; identical to SEQ ID NO: 5357
  GFR-binding peptide
  MOD_RES (1)..(3)..(35)..(36): Xaa is C or S

SEQ ID NO: 37227 - protein, 39 aa, Artificial Sequence; identical to SEQ ID NO: 12786
  GFR-binding peptide
  MOD_RES (34)..(35): Xaa is C or S
  MOD_RES (12)..(13)..(14)..(15)..(16): Xaa is A or G
  MOD_RES (17)..(18)..(19)..(20): Xaa is A or G or is absent

SEQ ID NO: 37228 - protein, 36 aa, Artificial Sequence; identical to SEQ ID NO: 12787
  GFR-binding peptide
  MOD_RES (31)..(32): Xaa is C or S

SEQ ID NO: 37229 - protein, 37 aa, Artificial Sequence; identical to SEQ ID NO: 12788
  GFR-binding peptide
  MOD_RES (32)..(33): Xaa is C or S

SEQ ID NO: 37230 - protein, 40 aa, Artificial Sequence; identical to SEQ ID NO: 10847
  GFR-binding peptide
  MOD_RES (34)..(34): Xaa is C or S
  MOD_RES (12)..(13)..(14)..(15)..(16): Xaa is A or G
  MOD_RES (17)..(18)..(19)..(20): Xaa is A or G or is absent

SEQ ID NO: 37231 - protein, 38 aa, Artificial Sequence; identical to SEQ ID NO: 12790
  GFR-binding peptide
  MOD_RES (32)..(33): Xaa is C or S

SEQ ID NO: 37232 - protein, 37 aa, Artificial Sequence; identical to SEQ ID NO: 12791
  GFR-binding peptide
  MOD_RES (2)..(34)..(35): Xaa is C or S

SEQ ID NO: 37233 - protein, 37 aa, Artificial Sequence; identical to SEQ ID NO: 10850
  GFR-binding peptide
  MOD_RES (2)..(4)..(36)..(37): Xaa is C or S

SEQ ID NO: 37234 - protein, 39 aa, Artificial Sequence; identical to SEQ ID NO: 10851
  GFR-binding peptide
  MOD_RES (2)..(4)..(38)..(39): Xaa is C or S
  MOD_RES (16)..(17)..(18)..(19)..(20): Xaa is A or G
  MOD_RES (21)..(22)..(23)..(24): Xaa is A or G or is absent

SEQ ID NO: 37235 - protein, 37 aa, Artificial Sequence; identical to SEQ ID NO: 12792
  GFR-binding peptide
  MOD_RES (1)..(33)..(34): Xaa is C or S

SEQ ID NO: 37236 - protein, 40 aa, Artificial Sequence; identical to SEQ ID NO: 12794
  GFR-binding peptide
  MOD_RES (2)..(4)..(35)..(36): Xaa is C or S

SEQ ID NO: 37237 - protein, 43 aa, Artificial Sequence; identical to SEQ ID NO: 12795
  GFR-binding peptide
  MOD_RES (1)..(3)..(37)..(38): Xaa is C or S
  MOD_RES (15)..(16)..(17)..(18)..(19): Xaa is A or G
  MOD_RES (20)..(21)..(22)..(23): Xaa is A or G or is absent

SEQ ID NO: 37238 - protein, 37 aa, Artificial Sequence; identical to SEQ ID NO: 12796
  GFR-binding peptide
  MOD_RES (1)..(3)..(34)..(35): Xaa is C or S

SEQ ID NO: 37239 - protein, 40 aa, Artificial Sequence; identical to SEQ ID NO: 3439
  GFR-binding peptide
  MOD_RES (2)..(4)..(35)..(36): Xaa is C or S

SEQ ID NO: 37240 - protein, 44 aa, Artificial Sequence; identical to SEQ ID NO: 10856
  GFR-binding peptide
  MOD_RES (2)..(4)..(38)..(39): Xaa is C or S
  MOD_RES (16)..(17)..(18)..(19)..(20): Xaa is A or G
  MOD_RES (21)..(22)..(23)..(24): Xaa is A or G or is absent

SEQ ID NO: 37241 - protein, 41 aa, Artificial Sequence; identical to SEQ ID NO: 10857
  GFR-binding peptide
  MOD_RES (1)..(3)..(35)..(36): Xaa is C or S

SEQ ID NO: 37242 - protein, 40 aa, Artificial Sequence; identical to SEQ ID NO: 3440
  GFR-binding peptide
  MOD_RES (2)..(36)..(37): Xaa is C or S
  MOD_RES (14)..(15)..(16)..(17)..(18): Xaa is A or G
  MOD_RES (19)..(20)..(21)..(22): Xaa is A or G or is absent

SEQ ID NO: 37243 - protein, 38 aa, Artificial Sequence; identical to SEQ ID NO: 10859
  GFR-binding peptide
  MOD_RES (2)..(4)..(35)..(36): Xaa is C or S

SEQ ID NO: 37244 - protein, 38 aa, Artificial Sequence; identical to SEQ ID NO: 12797
  GFR-binding peptide
  MOD_RES (2)..(4)..(37)..(38): Xaa is C or S
  MOD_RES (15)..(16)..(17)..(18)..(19): Xaa is A or G
  MOD_RES (20)..(21)..(22)..(23): Xaa is A or G or is absent

SEQ ID NO: 37245 - protein, 41 aa, Artificial Sequence; identical to SEQ ID NO: 12798
  GFR-binding peptide
  MOD_RES (2)..(4)..(38)..(39): Xaa is C or S
  MOD_RES (16)..(17)..(18)..(19)..(20): Xaa is A or G
  MOD_RES (21)..(22)..(23)..(24): Xaa is A or G or is absent

SEQ ID NO: 37246 - protein, 33 aa, Artificial Sequence; identical to SEQ ID NO: 12799
  GFR-binding peptide
  MOD_RES (12)..(13)..(14)..(15)..(16): Xaa is A or G
  MOD_RES (17)..(18)..(19)..(20): Xaa is A or G or is absent

SEQ ID NO: 37247 - protein, 44 aa, Artificial Sequence; identical to SEQ ID NO: 12800
  GFR-binding peptide
  MOD_RES (2)..(4)..(38)..(39): Xaa is C or S
  MOD_RES (16)..(17)..(18)..(19)..(20): Xaa is A or G
  MOD_RES (21)..(22)..(23)..(24): Xaa is A or G or is absent

SEQ ID NO: 37248 - protein, 39 aa, Artificial Sequence; identical to SEQ ID NO: 12801
  GFR-binding peptide
  MOD_RES (34)..(35): Xaa is C or S
  MOD_RES (12)..(13)..(14)..(15)..(16): Xaa is A or G
  MOD_RES (17)..(18)..(19)..(20): Xaa is A or G or is absent

SEQ ID NO: 37249 - protein, 43 aa, Artificial Sequence; identical to SEQ ID NO: 10862
  GFR-binding peptide
  MOD_RES (2)..(4)..(37)..(38): Xaa is C or S
  MOD_RES (15)..(16)..(17)..(18)..(19): Xaa is A or G
  MOD_RES (20)..(21)..(22)..(23): Xaa is A or G or is absent

SEQ ID NO: 37250 - protein, 32 aa, Artificial Sequence; identical to SEQ ID NO: 10863
  GFR-binding peptide
  MOD_RES (31)..(32): Xaa is C or S

SEQ ID NO: 37251 - protein, 37 aa, Artificial Sequence; identical to SEQ ID NO: 10864
  GFR-binding peptide
  MOD_RES (31)..(32): Xaa is C or S

SEQ ID NO: 37252 - protein, 37 aa, Artificial Sequence; identical to SEQ ID NO: 10865
  GFR-binding peptide
  MOD_RES (1)..(3)..(37): Xaa is C or S
  MOD_RES (15)..(16)..(17)..(18)..(19): Xaa is A or G
  MOD_RES (20)..(21)..(22)..(23): Xaa is A or G or is absent

SEQ ID NO: 37253 - protein, 31 aa, Artificial Sequence
  GFR-binding peptide
  MOD_RES (1)..(1): Xaa is C or S
XSKVIMNSLQEIKPTKGIYYLITLPELDQSV

SEQ ID NO: 37254 - protein, 34 aa, Artificial Sequence; identical to SEQ ID NO: 10866
  GFR-binding peptide
  MOD_RES (1)..(33)..(34): Xaa is C or S

SEQ ID NO: 37255 - protein, 39 aa, Artificial Sequence; identical to SEQ ID NO: 12803
  GFR-binding peptide
  MOD_RES (2)..(4)..(36): Xaa is C or S

SEQ ID NO: 37256 - protein, 38 aa, Artificial Sequence; identical to SEQ ID NO: 10867
  GFR-binding peptide
  MOD_RES (2)..(4)..(36)..(37): Xaa is C or S

SEQ ID NO: 37257 - protein, 33 aa, Artificial Sequence; identical to SEQ ID NO: 10868
  GFR-binding peptide
  MOD_RES (31)..(31): Xaa is C or S

SEQ ID NO: 37258 - protein, 41 aa, Artificial Sequence; identical to SEQ ID NO: 12805
  GFR-binding peptide
  MOD_RES (2)..(4)..(37)..(38): Xaa is C or S
  MOD_RES (15)..(16)..(17)..(18)..(19): Xaa is A or G
  MOD_RES (20)..(21)..(22)..(23): Xaa is A or G or is absent

SEQ ID NO: 37259 - protein, 38 aa, Artificial Sequence; identical to SEQ ID NO: 10869
  GFR-binding peptide
  MOD_RES (2)..(4)..(36)..(37): Xaa is C or S

SEQ ID NO: 37260 - protein, 36 aa, Artificial Sequence; identical to SEQ ID NO: 12806
  GFR-binding peptide
  MOD_RES (31)..(32): Xaa is C or S

SEQ ID NO: 37261 - protein, 40 aa, Artificial Sequence; identical to SEQ ID NO: 10871
  GFR-binding peptide
  MOD_RES (34)..(35): Xaa is C or S
  MOD_RES (12)..(13)..(14)..(15)..(16): Xaa is A or G
  MOD_RES (17)..(18)..(19)..(20): Xaa is A or G or is absent

SEQ ID NO: 37262 - protein, 35 aa, Artificial Sequence; identical to SEQ ID NO: 12807
  GFR-binding peptide
  MOD_RES (34)..(35): Xaa is C or S
  MOD_RES (12)..(13)..(14)..(15)..(16): Xaa is A or G
  MOD_RES (17)..(18)..(19)..(20): Xaa is A or G or is absent

SEQ ID NO: 37263 - protein, 33 aa, Artificial Sequence; identical to SEQ ID NO: 10872
  GFR-binding peptide
  MOD_RES (32)..(33): Xaa is C or S

SEQ ID NO: 37264 - protein, 36 aa, Artificial Sequence; identical to SEQ ID NO: 10873
  GFR-binding peptide
  MOD_RES (2)..(33)..(34): Xaa is C or S

SEQ ID NO: 37265 - protein, 36 aa, Artificial Sequence; identical to SEQ ID NO: 5376
  GFR-binding peptide
  MOD_RES (1)..(3)..(36): Xaa is C or S
  MOD_RES (14)..(15)..(16)..(17)..(18): Xaa is A or G
  MOD_RES (19)..(20)..(21)..(22): Xaa is A or G or is absent

SEQ ID NO: 37266 - protein, 39 aa, Artificial Sequence; identical to SEQ ID NO: 10874
  GFR-binding peptide
  MOD_RES (1)..(35)..(36): Xaa is C or S
  MOD_RES (13)..(14)..(15)..(16)..(17): Xaa is A or G
  MOD_RES (18)..(19)..(20)..(21): Xaa is A or G or is absent

SEQ ID NO: 37267 - protein, 39 aa, Artificial Sequence; identical to SEQ ID NO: 12809
  GFR-binding peptide
  MOD_RES (2)..(4)..(35)..(36): Xaa is C or S

SEQ ID NO: 37268 - protein, 36 aa, Artificial Sequence; identical to SEQ ID NO: 5378
  GFR-binding peptide
  MOD_RES (2)..(4): Xaa is C or S
  MOD_RES (15)..(16)..(17)..(18)..(19): Xaa is A or G
  MOD_RES (20)..(21)..(22)..(23): Xaa is A or G or is absent

SEQ ID NO: 37269 - protein, 39 aa, Artificial Sequence; identical to SEQ ID NO: 5379
  GFR-binding peptide
  MOD_RES (1)..(3)..(36)..(37): Xaa is C or S
  MOD_RES (14)..(15)..(16)..(17)..(18): Xaa is A or G
  MOD_RES (19)..(20)..(21)..(22): Xaa is A or G or is absent

SEQ ID NO: 37270 - protein, 40 aa, Artificial Sequence; identical to SEQ ID NO: 12813
  GFR-binding peptide
  MOD_RES (1)..(3)..(37)..(38): Xaa is C or S
  MOD_RES (15)..(16)..(17)..(18)..(19): Xaa is A or G
  MOD_RES (20)..(21)..(22)..(23): Xaa is A or G or is absent

SEQ ID NO: 37271 - protein, 34 aa, Artificial Sequence; identical to SEQ ID NO: 10876
  GFR-binding peptide
  MOD_RES (2)..(33)..(34): Xaa is C or S

SEQ ID NO: 37272 - protein, 32 aa, Artificial Sequence; identical to SEQ ID NO: 12814
  GFR-binding peptide
  MOD_RES (31)..(32): Xaa is C or S

SEQ ID NO: 37273 - protein, 39 aa, Artificial Sequence; identical to SEQ ID NO: 12815
  GFR-binding peptide
  MOD_RES (2)..(4)..(38)..(39): Xaa is C or S
  MOD_RES (16)..(17)..(18)..(19)..(20): Xaa is A or G
  MOD_RES (21)..(22)..(23)..(24): Xaa is A or G or is absent

SEQ ID NO: 37274 - protein, 41 aa, Artificial Sequence; identical to SEQ ID NO: 10878
  GFR-binding peptide
  MOD_RES (1)..(3)..(35)..(36): Xaa is C or S

SEQ ID NO: 37275 - protein, 41 aa, Artificial Sequence
  GFR-binding peptide
  MOD_RES (2)..(35)..(36): Xaa is C or S
  MOD_RES (13)..(14)..(15)..(16)..(17): Xaa is A or G
  MOD_RES (18)..(19)..(20)..(21): Xaa is A or G or is absent
KXSKVIMNSLQEXXXXXXXXXYYLITLPELDQSVXXPSASA

SEQ ID NO: 37276 - protein, 39 aa, Artificial Sequence; identical to SEQ ID NO: 12817
  GFR-binding peptide
  MOD_RES (2)..(4)..(36)..(37): Xaa is C or S

SEQ ID NO: 37277 - protein, 41 aa, Artificial Sequence; identical to SEQ ID NO: 10879
  GFR-binding peptide
  MOD_RES (1)..(3)..(37)..(38): Xaa is C or S
  MOD_RES (15)..(16)..(17)..(18)..(19): Xaa is A or G
  MOD_RES (20)..(21)..(22)..(23): Xaa is A or G or is absent

SEQ ID NO: 37278 - protein, 37 aa, Artificial Sequence; identical to SEQ ID NO: 5383
  GFR-binding peptide
  MOD_RES (2)..(34)..(35): Xaa is C or S

SEQ ID NO: 37279 - protein, 35 aa, Artificial Sequence; identical to SEQ ID NO: 12820
  GFR-binding peptide
  MOD_RES (2)..(4): Xaa is C or S

SEQ ID NO: 37280 - protein, 38 aa, Artificial Sequence; identical to SEQ ID NO: 12822
  GFR-binding peptide
  MOD_RES (1)..(34)..(35): Xaa is C or S
  MOD_RES (12)..(13)..(14)..(15)..(16): Xaa is A or G
  MOD_RES (17)..(18)..(19)..(20): Xaa is A or G or is absent

SEQ ID NO: 37281 - protein, 34 aa, Artificial Sequence; identical to SEQ ID NO: 3465
  GFR-binding peptide
  MOD_RES (31)..(32): Xaa is C or S

SEQ ID NO: 37282 - protein, 39 aa, Artificial Sequence; identical to SEQ ID NO: 10881
  GFR-binding peptide
  MOD_RES (2)..(4)..(35)..(36): Xaa is C or S

SEQ ID NO: 37283 - protein, 36 aa, Artificial Sequence; identical to SEQ ID NO: 12823
  GFR-binding peptide
  MOD_RES (2)..(36): Xaa is C or S
  MOD_RES (14)..(15)..(16)..(17)..(18): Xaa is A or G
  MOD_RES (19)..(20)..(21)..(22): Xaa is A or G or is absent

SEQ ID NO: 37284 - protein, 34 aa, Artificial Sequence; identical to SEQ ID NO: 10882
  GFR-binding peptide
  MOD_RES (31)..(32): Xaa is C or S

SEQ ID NO: 37285 - protein, 39 aa, Artificial Sequence; identical to SEQ ID NO: 3468
  GFR-binding peptide
  MOD_RES (2)..(34)..(35): Xaa is C or S

SEQ ID NO: 37286 - protein, 43 aa, Artificial Sequence; identical to SEQ ID NO: 5393
  GFR-binding peptide
  MOD_RES (2)..(4)..(38)..(39): Xaa is C or S
  MOD_RES (16)..(17)..(18)..(19)..(20): Xaa is A or G
  MOD_RES (21)..(22)..(23)..(24): Xaa is A or G or is absent

SEQ ID NO: 37287 - protein, 34 aa, Artificial Sequence; identical to SEQ ID NO: 10885
  GFR-binding peptide
  MOD_RES (31)..(32): Xaa is C or S

SEQ ID NO: 37288 - protein, 43 aa, Artificial Sequence; identical to SEQ ID NO: 10886
  GFR-binding peptide
  MOD_RES (2)..(4)..(38): Xaa is C or S
  MOD_RES (16)..(17)..(18)..(19)..(20): Xaa is A or G
  MOD_RES (21)..(22)..(23)..(24): Xaa is A or G or is absent

SEQ ID NO: 37289 - protein, 42 aa, Artificial Sequence; identical to SEQ ID NO: 5396
  GFR-binding peptide
  MOD_RES (2)..(36)..(37): Xaa is C or S
  MOD_RES (14)..(15)..(16)..(17)..(18): Xaa is A or G
  MOD_RES (19)..(20)..(21)..(22): Xaa is A or G or is absent

SEQ ID NO: 37290 - protein, 36 aa, Artificial Sequence; identical to SEQ ID NO: 12829
  GFR-binding peptide
  MOD_RES (2)..(33)..(34): Xaa is C or S

SEQ ID NO: 37291 - protein, 42 aa, Artificial Sequence; identical to SEQ ID NO: 12830
  GFR-binding peptide
  MOD_RES (2)..(4)..(36)..(37): Xaa is C or S

SEQ ID NO: 37292 - protein, 36 aa, Artificial Sequence; identical to SEQ ID NO: 12831
  GFR-binding peptide
  MOD_RES (2)..(4)..(36): Xaa is C or S

SEQ ID NO: 37293 - protein, 40 aa, Artificial Sequence; identical to SEQ ID NO: 10887
  GFR-binding peptide
  MOD_RES (2)..(4)..(38): Xaa is C or S
  MOD_RES (16)..(17)..(18)..(19)..(20): Xaa is A or G
  MOD_RES (21)..(22)..(23)..(24): Xaa is A or G or is absent

SEQ ID NO: 37294 - protein, 42 aa, Artificial Sequence; identical to SEQ ID NO: 10888
  GFR-binding peptide
  MOD_RES (1)..(3)..(37)..(38): Xaa is C or S
  MOD_RES (15)..(16)..(17)..(18)..(19): Xaa is A or G
  MOD_RES (20)..(21)..(22)..(23): Xaa is A or G or is absent

SEQ ID NO: 37295 - protein, 39 aa, Artificial Sequence; identical to SEQ ID NO: 10889
  GFR-binding peptide
  MOD_RES (1)..(3)..(37)..(38): Xaa is C or S
  MOD_RES (15)..(16)..(17)..(18)..(19): Xaa is A or G
  MOD_RES (20)..(21)..(22)..(23): Xaa is A or G or is absent

SEQ ID NO: 37296 - protein, 38 aa, Artificial Sequence; identical to SEQ ID NO: 10891
  GFR-binding peptide
  MOD_RES (2)..(4)..(36)..(37): Xaa is C or S

SEQ ID NO: 37297 - protein, 37 aa, Artificial Sequence; identical to SEQ ID NO: 3475
  GFR-binding peptide
  MOD_RES (34)..(35): Xaa is C or S
  MOD_RES (12)..(13)..(14)..(15)..(16): Xaa is A or G
  MOD_RES (17)..(18)..(19)..(20): Xaa is A or G or is absent

SEQ ID NO: 37298 - protein, 38 aa, Artificial Sequence; identical to SEQ ID NO: 10893
  GFR-binding peptide
  MOD_RES (1)..(34)..(35): Xaa is C or S
  MOD_RES (12)..(13)..(14)..(15)..(16): Xaa is A or G
  MOD_RES (17)..(18)..(19)..(20): Xaa is A or G or is absent

SEQ ID NO: 37299 - protein, 37 aa, Artificial Sequence; identical to SEQ ID NO: 12833
  GFR-binding peptide
  MOD_RES (1)..(32)..(33): Xaa is C or S

SEQ ID NO: 37300 - protein, 40 aa, Artificial Sequence; identical to SEQ ID NO: 10894
  GFR-binding peptide
  MOD_RES (34)..(35): Xaa is C or S
  MOD_RES (12)..(13)..(14)..(15)..(16): Xaa is A or G
  MOD_RES (17)..(18)..(19)..(20): Xaa is A or G or is absent

SEQ ID NO: 37301 - protein, 34 aa, Artificial Sequence; identical to SEQ ID NO: 3477
  GFR-binding peptide
  MOD_RES (2)..(4): Xaa is C or S

SEQ ID NO: 37302 - protein, 31 aa, Artificial Sequence; identical to SEQ ID NO: 12834
  GFR-binding peptide
  MOD_RES (31)..(31): Xaa is C or S

SEQ ID NO: 37303 - protein, 42 aa, Artificial Sequence; identical to SEQ ID NO: 10896
  GFR-binding peptide
  MOD_RES (2)..(36)..(37): Xaa is C or S
  MOD_RES (14)..(15)..(16)..(17)..(18): Xaa is A or G
  MOD_RES (19)..(20)..(21)..(22): Xaa is A or G or is absent

SEQ ID NO: 37304 - protein, 37 aa, Artificial Sequence; identical to SEQ ID NO: 12835
  GFR-binding peptide
  MOD_RES (2)..(36)..(37): Xaa is C or S
  MOD_RES (14)..(15)..(16)..(17)..(18): Xaa is A or G
  MOD_RES (19)..(20)..(21)..(22): Xaa is A or G or is absent

SEQ ID NO: 37305 - protein, 35 aa, Artificial Sequence; identical to SEQ ID NO: 3481
  GFR-binding peptide
  MOD_RES (31)..(32): Xaa is C or S

SEQ ID NO: 37306 - protein, 38 aa, Artificial Sequence; identical to SEQ ID NO: 12837
  GFR-binding peptide
  MOD_RES (33)..(34): Xaa is C or S
  MOD_RES (11)..(12)..(13)..(14)..(15): Xaa is A or G
  MOD_RES (16)..(17)..(18)..(19): Xaa is A or G or is absent

SEQ ID NO: 37307 - protein, 35 aa, Artificial Sequence; identical to SEQ ID NO: 12838
  GFR-binding peptide
  MOD_RES (2)..(4): Xaa is C or S

SEQ ID NO: 37308 - protein, 36 aa, Artificial Sequence; identical to SEQ ID NO: 10898
  GFR-binding peptide
  MOD_RES (1)..(33)..(34): Xaa is C or S

SEQ ID NO: 37309 - protein, 36 aa, Artificial Sequence; identical to SEQ ID NO: 12839
  GFR-binding peptide
  MOD_RES (1)..(35): Xaa is C or S
  MOD_RES (13)..(14)..(15)..(16)..(17): Xaa is A or G
  MOD_RES (18)..(19)..(20)..(21): Xaa is A or G or is absent

SEQ ID NO: 37310 - protein, 38 aa, Artificial Sequence; identical to SEQ ID NO: 10899
  GFR-binding peptide
  MOD_RES (33)..(34): Xaa is C or S
  MOD_RES (11)..(12)..(13)..(14)..(15): Xaa is A or G
  MOD_RES (16)..(17)..(18)..(19): Xaa is A or G or is absent

SEQ ID NO: 37311 - protein, 32 aa, Artificial Sequence; identical to SEQ ID NO: 12840
  GFR-binding peptide
  MOD_RES (31)..(32): Xaa is C or S

SEQ ID NO: 37312 - protein, 37 aa, Artificial Sequence
  GFR-binding peptide
  MOD_RES (2)..(4)..(37): Xaa is C or S
  MOD_RES (15)..(16)..(17)..(18)..(19): Xaa is A or G
  MOD_RES (20)..(21)..(22)..(23): Xaa is A or G or is absent
SXKXSKVIMNSLQEXXXXXXXXXYYLITLPELDQSVX

SEQ ID NO: 37313 - protein, 35 aa, Artificial Sequence; identical to SEQ ID NO: 3487
  GFR-binding peptide
  MOD_RES (34)..(35): Xaa is C or S
  MOD_RES (12)..(13)..(14)..(15)..(16): Xaa is A or G
  MOD_RES (17)..(18)..(19)..(20): Xaa is A or G or is absent

SEQ ID NO: 37314 - protein, 36 aa, Artificial Sequence; identical to SEQ ID NO: 10901
  GFR-binding peptide
  MOD_RES (2)..(34)..(35): Xaa is C or S

SEQ ID NO: 37315 - protein, 31 aa, Artificial Sequence; identical to SEQ ID NO: 12841
  GFR-binding peptide

SEQ ID NO: 37316 - protein, 39 aa, Artificial Sequence; identical to SEQ ID NO: 5411
  GFR-binding peptide
  MOD_RES (1)..(3)..(36)..(37): Xaa is C or S
  MOD_RES (14)..(15)..(16)..(17)..(18): Xaa is A or G
  MOD_RES (19)..(20)..(21)..(22): Xaa is A or G or is absent

SEQ ID NO: 37317 - protein, 38 aa, Artificial Sequence; identical to SEQ ID NO: 5412
  GFR-binding peptide
  MOD_RES (2)..(35)..(36): Xaa is C or S
  MOD_RES (13)..(14)..(15)..(16)..(17): Xaa is A or G
  MOD_RES (18)..(19)..(20)..(21): Xaa is A or G or is absent

SEQ ID NO: 37318 - protein, 32 aa, Artificial Sequence; identical to SEQ ID NO: 10902
  GFR-binding peptide
  MOD_RES (1)..(1): Xaa is C or S

SEQ ID NO: 37319 - protein, 32 aa, Artificial Sequence; identical to SEQ ID NO: 12844
  GFR-binding peptide
  MOD_RES (1)..(1): Xaa is C or S

SEQ ID NO: 37320 - protein, 35 aa, Artificial Sequence; identical to SEQ ID NO: 12845
  GFR-binding peptide
  MOD_RES (33)..(33): Xaa is C or S
  MOD_RES (11)..(12)..(13)..(14)..(15): Xaa is A or G
  MOD_RES (16)..(17)..(18)..(19): Xaa is A or G or is absent

SEQ ID NO: 37321 - protein, 33 aa, Artificial Sequence; identical to SEQ ID NO: 10903
  GFR-binding peptide
  MOD_RES (2)..(2): Xaa is C or S

SEQ ID NO: 37322 - protein, 35 aa, Artificial Sequence; identical to SEQ ID NO: 5413
  GFR-binding peptide
  MOD_RES (1)..(35): Xaa is C or S
  MOD_RES (13)..(14)..(15)..(16)..(17): Xaa is A or G
  MOD_RES (18)..(19)..(20)..(21): Xaa is A or G or is absent

SEQ ID NO: 37323 - protein, 39 aa, Artificial Sequence; identical to SEQ ID NO: 3490
  GFR-binding peptide
  MOD_RES (1)..(3)..(35)..(36): Xaa is C or S

SEQ ID NO: 37324 - protein, 32 aa, Artificial Sequence; identical to SEQ ID NO: 10905
  GFR-binding peptide
  MOD_RES (32)..(32): Xaa is C or S

SEQ ID NO: 37325 - protein, 39 aa, Artificial Sequence; identical to SEQ ID NO: 12847
  GFR-binding peptide
  MOD_RES (1)..(3)..(35)..(36): Xaa is C or S

SEQ ID NO: 37326 - protein, 40 aa, Artificial Sequence; identical to SEQ ID NO: 10906
  GFR-binding peptide
  MOD_RES (2)..(35)..(36): Xaa is C or S
  MOD_RES (13)..(14)..(15)..(16)..(17): Xaa is A or G
  MOD_RES (18)..(19)..(20)..(21): Xaa is A or G or is absent

SEQ ID NO: 37327 - protein, 40 aa, Artificial Sequence; identical to SEQ ID NO: 10907
  GFR-binding peptide
  MOD_RES (2)..(34)..(35): Xaa is C or S

SEQ ID NO: 37328 - protein, 41 aa, Artificial Sequence; identical to SEQ ID NO: 3493
  GFR-binding peptide
  MOD_RES (1)..(3)..(36)..(37): Xaa is C or S
  MOD_RES (14)..(15)..(16)..(17)..(18): Xaa is A or G
  MOD_RES (19)..(20)..(21)..(22): Xaa is A or G or is absent

SEQ ID NO: 37329 - protein, 36 aa, Artificial Sequence; identical to SEQ ID NO: 12849
  GFR-binding peptide
  MOD_RES (32)..(32): Xaa is C or S

SEQ ID NO: 37330 - protein, 37 aa, Artificial Sequence; identical to SEQ ID NO: 10910
  GFR-binding peptide
  MOD_RES (32)..(32): Xaa is C or S

SEQ ID NO: 37331 - protein, 34 aa, Artificial Sequence; identical to SEQ ID NO: 3496
  GFR-binding peptide
  MOD_RES (33)..(34): Xaa is C or S
  MOD_RES (11)..(12)..(13)..(14)..(15): Xaa is A or G
  MOD_RES (16)..(17)..(18)..(19): Xaa is A or G or is absent

SEQ ID NO: 37332 - protein, 39 aa, Artificial Sequence; identical to SEQ ID NO: 10913
  GFR-binding peptide
  MOD_RES (1)..(35)..(36): Xaa is C or S
  MOD_RES (13)..(14)..(15)..(16)..(17): Xaa is A or G
  MOD_RES (18)..(19)..(20)..(21): Xaa is A or G or is absent

SEQ ID NO: 37333 - protein, 32 aa, Artificial Sequence; identical to SEQ ID NO: 10914
  GFR-binding peptide
  MOD_RES (31)..(31): Xaa is C or S

SEQ ID NO: 37334 - protein, 34 aa, Artificial Sequence
  GFR-binding peptide
  MOD_RES (2)..(33)..(34): Xaa is C or S
KXSKVIMNSLQEIKPTKGIYYLITLPELDQSVXX

SEQ ID NO: 37335 - protein, 35 aa, Artificial Sequence; identical to SEQ ID NO: 10916
  GFR-binding peptide
  MOD_RES (34)..(34): Xaa is C or S
  MOD_RES (12)..(13)..(14)..(15)..(16): Xaa is A or G
  MOD_RES (17)..(18)..(19)..(20): Xaa is A or G or is absent

SEQ ID NO: 37336 - protein, 34 aa, Artificial Sequence; identical to SEQ ID NO: 12853
  GFR-binding peptide
  MOD_RES (1)..(33): Xaa is C or S

SEQ ID NO: 37337 - protein, 35 aa, Artificial Sequence; identical to SEQ ID NO: 10917
  GFR-binding peptide
  MOD_RES (31)..(32): Xaa is C or S

SEQ ID NO: 37338 - protein, 35 aa, Artificial Sequence; identical to SEQ ID NO: 12854
  GFR-binding peptide
  MOD_RES (31)..(32): Xaa is C or S

SEQ ID NO: 37339 - protein, 33 aa, Artificial Sequence; identical to SEQ ID NO: 10918
  GFR-binding peptide
  MOD_RES (31)..(32): Xaa is C or S

SEQ ID NO: 37340 - protein, 36 aa, Artificial Sequence; identical to SEQ ID NO: 10919
  GFR-binding peptide
  MOD_RES (2)..(36): Xaa is C or S
  MOD_RES (14)..(15)..(16)..(17)..(18): Xaa is A or G
  MOD_RES (19)..(20)..(21)..(22): Xaa is A or G or is absent

SEQ ID NO: 37341 - protein, 33 aa, Artificial Sequence; identical to SEQ ID NO: 10920
  GFR-binding peptide
  MOD_RES (12)..(13)..(14)..(15)..(16): Xaa is A or G
  MOD_RES (17)..(18)..(19)..(20): Xaa is A or G or is absent

SEQ ID NO: 37342 - protein, 40 aa, Artificial Sequence; identical to SEQ ID NO: 12856
  GFR-binding peptide
  MOD_RES (2)..(4)..(38): Xaa is C or S
  MOD_RES (16)..(17)..(18)..(19)..(20): Xaa is A or G
  MOD_RES (21)..(22)..(23)..(24): Xaa is A or G or is absent

SEQ ID NO: 37343 - protein, 34 aa, Artificial Sequence; identical to SEQ ID NO: 10921
  GFR-binding peptide
  MOD_RES (33)..(33): Xaa is C or S
  MOD_RES (11)..(12)..(13)..(14)..(15): Xaa is A or G
  MOD_RES (16)..(17)..(18)..(19): Xaa is A or G or is absent

SEQ ID NO: 37344 - protein, 34 aa, Artificial Sequence; identical to SEQ ID NO: 3514
  GFR-binding peptide
  MOD_RES (34)..(34): Xaa is C or S
  MOD_RES (12)..(13)..(14)..(15)..(16): Xaa is A or G
  MOD_RES (17)..(18)..(19)..(20): Xaa is A or G or is absent

SEQ ID NO: 37345 - protein, 37 aa, Artificial Sequence; identical to SEQ ID NO: 3515
  GFR-binding peptide
  MOD_RES (2)..(4)..(35)..(36): Xaa is C or S

SEQ ID NO: 37346 - protein, 33 aa, Artificial Sequence; identical to SEQ ID NO: 12858
  GFR-binding peptide
  MOD_RES (12)..(13)..(14)..(15)..(16): Xaa is A or G
  MOD_RES (17)..(18)..(19)..(20): Xaa is A or G or is absent

SEQ ID NO: 37347 - protein, 43 aa, Artificial Sequence; identical to SEQ ID NO: 12859
  GFR-binding peptide
  MOD_RES (1)..(3)..(37)..(38): Xaa is C or S
  MOD_RES (15)..(16)..(17)..(18)..(19): Xaa is A or G
  MOD_RES (20)..(21)..(22)..(23): Xaa is A or G or is absent

SEQ ID NO: 37348 - protein, 37 aa, Artificial Sequence
  GFR-binding peptide
  MOD_RES (2)..(33)..(34): Xaa is C or S
KXSKVIMNSLQEIKPTKGIYYLITLPELDQSVXXPSA

SEQ ID NO: 37349 - protein, 32 aa, Artificial Sequence; identical to SEQ ID NO: 10927
  GFR-binding peptide
  MOD_RES (2)..(2): Xaa is C or S

SEQ ID NO: 37350 - protein, 37 aa, Artificial Sequence
  GFR-binding peptide
  MOD_RES (2)..(4)..(35)..(36): Xaa is C or S
SXKXSKVIMNSLQEIKPTKGIYYLITLPELDQSVXXP

SEQ ID NO: 37351 - protein, 42 aa, Artificial Sequence; identical to SEQ ID NO: 10928
  GFR-binding peptide
  MOD_RES (2)..(4)..(37)..(38): Xaa is C or S
  MOD_RES (15)..(16)..(17)..(18)..(19): Xaa is A or G
  MOD_RES (20)..(21)..(22)..(23): Xaa is A or G or is absent

SEQ ID NO: 37352 - protein, 41 aa, Artificial Sequence; identical to SEQ ID NO: 10929
  GFR-binding peptide
  MOD_RES (1)..(3)..(35)..(36): Xaa is C or S

SEQ ID NO: 37353 - protein, 37 aa, Artificial Sequence; identical to SEQ ID NO: 10930
  GFR-binding peptide
  MOD_RES (2)..(34)..(35): Xaa is C or S

SEQ ID NO: 37354 - protein, 37 aa, Artificial Sequence; identical to SEQ ID NO: 10931
  GFR-binding peptide
  MOD_RES (2)..(33)..(34): Xaa is C or S

SEQ ID NO: 37355 - protein, 37 aa, Artificial Sequence; identical to SEQ ID NO: 12861
  GFR-binding peptide
  MOD_RES (2)..(4)..(35)..(36): Xaa is C or S

SEQ ID NO: 37356 - protein, 39 aa, Artificial Sequence; identical to SEQ ID NO: 12864
  GFR-binding peptide
  MOD_RES (1)..(3)..(35)..(36): Xaa is C or S

SEQ ID NO: 37357 - protein, 39 aa, Artificial Sequence; identical to SEQ ID NO: 12865
  GFR-binding peptide
  MOD_RES (1)..(3)..(37)..(38): Xaa is C or S
  MOD_RES (15)..(16)..(17)..(18)..(19): Xaa is A or G
  MOD_RES (20)..(21)..(22)..(23): Xaa is A or G or is absent

SEQ ID NO: 37358 - protein, 32 aa, Artificial Sequence; identical to SEQ ID NO: 3520
  GFR-binding peptide
  MOD_RES (1)..(1): Xaa is C or S

SEQ ID NO: 37359 - protein, 42 aa, Artificial Sequence; identical to SEQ ID NO: 3521
  GFR-binding peptide
  MOD_RES (2)..(4)..(36): Xaa is C or S

SEQ ID NO: 37360 - protein, 41 aa, Artificial Sequence; identical to SEQ ID NO: 3522
  GFR-binding peptide
  MOD_RES (2)..(4)..(37)..(38): Xaa is C or S
  MOD_RES (15)..(16)..(17)..(18)..(19): Xaa is A or G
  MOD_RES (20)..(21)..(22)..(23): Xaa is A or G or is absent

SEQ ID NO: 37361 - protein, 39 aa, Artificial Sequence; identical to SEQ ID NO: 10935
  GFR-binding peptide
  MOD_RES (2)..(4)..(36)..(37): Xaa is C or S

SEQ ID NO: 37362 - protein, 35 aa, Artificial Sequence; identical to SEQ ID NO: 5448
  GFR-binding peptide
  MOD_RES (1)..(3): Xaa is C or S
  MOD_RES (14)..(15)..(16)..(17)..(18): Xaa is A or G
  MOD_RES (19)..(20)..(21)..(22): Xaa is A or G or is absent

SEQ ID NO: 37363 - protein, 33 aa, Artificial Sequence; identical to SEQ ID NO: 12868
  GFR-binding peptide
  MOD_RES (12)..(13)..(14)..(15)..(16): Xaa is A or G
  MOD_RES (17)..(18)..(19)..(20): Xaa is A or G or is absent

SEQ ID NO: 37364 - protein, 33 aa, Artificial Sequence; identical to SEQ ID NO: 5451
  GFR-binding peptide
  MOD_RES (12)..(13)..(14)..(15)..(16): Xaa is A or G
  MOD_RES (17)..(18)..(19)..(20): Xaa is A or G or is absent

SEQ ID NO: 37365 - protein, 31 aa, Artificial Sequence; identical to SEQ ID NO: 12872
  GFR-binding peptide
  MOD_RES (31)..(31): Xaa is C or S

SEQ ID NO: 37366 - protein, 36 aa, Artificial Sequence; identical to SEQ ID NO: 3527
  GFR-binding peptide
  MOD_RES (1)..(3)..(34)..(35): Xaa is C or S

SEQ ID NO: 37367 - protein, 31 aa, Artificial Sequence; identical to SEQ ID NO: 5457
  GFR-binding peptide
  MOD_RES (1)..(1): Xaa is C or S

SEQ ID NO: 37368 - protein, 41 aa, Artificial Sequence; identical to SEQ ID NO: 10939
  GFR-binding peptide
  MOD_RES (1)..(3)..(35)..(36): Xaa is C or S

SEQ ID NO: 37369 - protein, 39 aa, Artificial Sequence; identical to SEQ ID NO: 12876
  GFR-binding peptide
  MOD_RES (2)..(4)..(35)..(36): Xaa is C or S

SEQ ID NO: 37370 - protein, 36 aa, Artificial Sequence; identical to SEQ ID NO: 12877
  GFR-binding peptide
  MOD_RES (1)..(3): Xaa is C or S
  MOD_RES (15)..(16)..(17)..(18)..(19): Xaa is A or G
  MOD_RES (20)..(21)..(22)..(23): Xaa is A or G or is absent

SEQ ID NO: 37371 - protein, 36 aa, Artificial Sequence; identical to SEQ ID NO: 12878
  GFR-binding peptide
  MOD_RES (31)..(32): Xaa is C or S

SEQ ID NO: 37372 - protein, 39 aa, Artificial Sequence
  GFR-binding peptide
  MOD_RES (2)..(4)..(37)..(38): Xaa is C or S
  MOD_RES (15)..(16)..(17)..(18)..(19): Xaa is A or G
  MOD_RES (20)..(21)..(22)..(23): Xaa is A or G or is absent
SXKXSKVIMNSLQEXXXXXXXXXYYLITLPELDQSVXXP

SEQ ID NO: 37373 - protein, 39 aa, Artificial Sequence; identical to SEQ ID NO: 10940
  GFR-binding peptide
  MOD_RES (1)..(3)..(37)..(38): Xaa is C or S
  MOD_RES (15)..(16)..(17)..(18)..(19): Xaa is A or G
  MOD_RES (20)..(21)..(22)..(23): Xaa is A or G or is absent

SEQ ID NO: 37374 - protein, 33 aa, Artificial Sequence; identical to SEQ ID NO: 12881
  GFR-binding peptide
  MOD_RES (32)..(32): Xaa is C or S

SEQ ID NO: 37375 - protein, 36 aa, Artificial Sequence; identical to SEQ ID NO: 10941
  GFR-binding peptide
  MOD_RES (2)..(4)..(36): Xaa is C or S

SEQ ID NO: 37376 - protein, 36 aa, Artificial Sequence; identical to SEQ ID NO: 12882
  GFR-binding peptide
  MOD_RES (1)..(33): Xaa is C or S

SEQ ID NO: 37377 - protein, 35 aa, Artificial Sequence; identical to SEQ ID NO: 10943
  GFR-binding peptide
  MOD_RES (1)..(3)..(35): Xaa is C or S

SEQ ID NO: 37378 - protein, 40 aa, Artificial Sequence; identical to SEQ ID NO: 10944
  GFR-binding peptide
  MOD_RES (1)..(35)..(36): Xaa is C or S
  MOD_RES (13)..(14)..(15)..(16)..(17): Xaa is A or G
  MOD_RES (18)..(19)..(20)..(21): Xaa is A or G or is absent

SEQ ID NO: 37379 - protein, 38 aa, Artificial Sequence; identical to SEQ ID NO: 10945
  GFR-binding peptide
  MOD_RES (1)..(3)..(34)..(35): Xaa is C or S

SEQ ID NO: 37380 - protein, 37 aa, Artificial Sequence; identical to SEQ ID NO: 12883
  GFR-binding peptide
  MOD_RES (2)..(36)..(37): Xaa is C or S
  MOD_RES (14)..(15)..(16)..(17)..(18): Xaa is A or G
  MOD_RES (19)..(20)..(21)..(22): Xaa is A or G or is absent

SEQ ID NO: 37381 - protein, 37 aa, Artificial Sequence
  GFR-binding peptide
  MOD_RES (1)..(32)..(33): Xaa is C or S
XSKVIMNSLQEIKPTKGIYYLITLPELDQSVXXPSAS

SEQ ID NO: 37382 - protein, 37 aa, Artificial Sequence; identical to SEQ ID NO: 12884
  GFR-binding peptide
  MOD_RES (32)..(33): Xaa is C or S

SEQ ID NO: 37383 - protein, 37 aa, Artificial Sequence; identical to SEQ ID NO: 10946
  GFR-binding peptide
  MOD_RES (34)..(34): Xaa is C or S
  MOD_RES (12)..(13)..(14)..(15)..(16): Xaa is A or G
  MOD_RES (17)..(18)..(19)..(20): Xaa is A or G or is absent

SEQ ID NO: 37384 - protein, 40 aa, Artificial Sequence; identical to SEQ ID NO: 12885
  GFR-binding peptide
  MOD_RES (34)..(35): Xaa is C or S
  MOD_RES (12)..(13)..(14)..(15)..(16): Xaa is A or G
  MOD_RES (17)..(18)..(19)..(20): Xaa is A or G or is absent

SEQ ID NO: 37385 - protein, 43 aa, Artificial Sequence; identical to SEQ ID NO: 10947
  GFR-binding peptide
  MOD_RES (1)..(3)..(37)..(38): Xaa is C or S
  MOD_RES (15)..(16)..(17)..(18)..(19): Xaa is A or G
  MOD_RES (20)..(21)..(22)..(23): Xaa is A or G or is absent

SEQ ID NO: 37386 - protein, 38 aa, Artificial Sequence; identical to SEQ ID NO: 12887
  GFR-binding peptide
  MOD_RES (2)..(34): Xaa is C or S

SEQ ID NO: 37387 - protein, 35 aa, Artificial Sequence; identical to SEQ ID NO: 10948
  GFR-binding peptide
  MOD_RES (1)..(35): Xaa is C or S
  MOD_RES (13)..(14)..(15)..(16)..(17): Xaa is A or G
  MOD_RES (18)..(19)..(20)..(21): Xaa is A or G or is absent

SEQ ID NO: 37388 - protein, 44 aa, Artificial Sequence; identical to SEQ ID NO: 5477
  GFR-binding peptide
  MOD_RES (2)..(4)..(38)..(39): Xaa is C or S
  MOD_RES (16)..(17)..(18)..(19)..(20): Xaa is A or G
  MOD_RES (21)..(22)..(23)..(24): Xaa is A or G or is absent

SEQ ID NO: 37389 - protein, 33 aa, Artificial Sequence; identical to SEQ ID NO: 12891
  GFR-binding peptide
  MOD_RES (31)..(32): Xaa is C or S

SEQ ID NO: 37390 - protein, 36 aa, Artificial Sequence; identical to SEQ ID NO: 10949
  GFR-binding peptide
  MOD_RES (2)..(4)..(36): Xaa is C or S

SEQ ID NO: 37391 - protein, 35 aa, Artificial Sequence; identical to SEQ ID NO: 10951
  GFR-binding peptide
  MOD_RES (2)..(34)..(35): Xaa is C or S

SEQ ID NO: 37392 - protein, 39 aa, Artificial Sequence; identical to SEQ ID NO: 10952
  GFR-binding peptide
  MOD_RES (1)..(33)..(34): Xaa is C or S

SEQ ID NO: 37393 - protein, 42 aa, Artificial Sequence; identical to SEQ ID NO: 10953
  GFR-binding peptide
  MOD_RES (1)..(3)..(37)..(38): Xaa is C or S
  MOD_RES (15)..(16)..(17)..(18)..(19): Xaa is A or G
  MOD_RES (20)..(21)..(22)..(23): Xaa is A or G or is absent

SEQ ID NO: 37394 - protein, 40 aa, Artificial Sequence; identical to SEQ ID NO: 10954
  GFR-binding peptide
  MOD_RES (1)..(3)..(37)..(38): Xaa is C or S
  MOD_RES (15)..(16)..(17)..(18)..(19): Xaa is A or G
  MOD_RES (20)..(21)..(22)..(23): Xaa is A or G or is absent

SEQ ID NO: 37395 - protein, 37 aa, Artificial Sequence; identical to SEQ ID NO: 10955
  GFR-binding peptide
  MOD_RES (2)..(36)..(37): Xaa is C or S
  MOD_RES (14)..(15)..(16)..(17)..(18): Xaa is A or G
  MOD_RES (19)..(20)..(21)..(22): Xaa is A or G or is absent

SEQ ID NO: 37396 - protein, 36 aa, Artificial Sequence; identical to SEQ ID NO: 12892
  GFR-binding peptide
  MOD_RES (2)..(36): Xaa is C or S
  MOD_RES (14)..(15)..(16)..(17)..(18): Xaa is A or G
  MOD_RES (19)..(20)..(21)..(22): Xaa is A or G or is absent

SEQ ID NO: 37397 - protein, 38 aa, Artificial Sequence; identical to SEQ ID NO: 10957
  GFR-binding peptide
  MOD_RES (33)..(34): Xaa is C or S
  MOD_RES (11)..(12)..(13)..(14)..(15): Xaa is A or G
  MOD_RES (16)..(17)..(18)..(19): Xaa is A or G or is absent

SEQ ID NO: 37398 - protein, 40 aa, Artificial Sequence; identical to SEQ ID NO: 12893
  GFR-binding peptide
  MOD_RES (1)..(3)..(35)..(36): Xaa is C or S

SEQ ID NO: 37399 - protein, 39 aa, Artificial Sequence; identical to SEQ ID NO: 5484
  GFR-binding peptide
  MOD_RES (2)..(35)..(36): Xaa is C or S
  MOD_RES (13)..(14)..(15)..(16)..(17): Xaa is A or G
  MOD_RES (18)..(19)..(20)..(21): Xaa is A or G or is absent

SEQ ID NO: 37400 - protein, 32 aa, Artificial Sequence; identical to SEQ ID NO: 12895
  GFR-binding peptide
  MOD_RES (32)..(32): Xaa is C or S

SEQ ID NO: 37401 - protein, 33 aa, Artificial Sequence; identical to SEQ ID NO: 12896
  GFR-binding peptide
  MOD_RES (12)..(13)..(14)..(15)..(16): Xaa is A or G
  MOD_RES (17)..(18)..(19)..(20): Xaa is A or G or is absent

SEQ ID NO: 37402 - protein, 34 aa, Artificial Sequence; identical to SEQ ID NO: 10958
  GFR-binding peptide
  MOD_RES (1)..(3): Xaa is C or S

SEQ ID NO: 37403 - protein, 34 aa, Artificial Sequence; identical to SEQ ID NO: 3549
  GFR-binding peptide
  MOD_RES (2)..(2): Xaa is C or S
  MOD_RES (13)..(14)..(15)..(16)..(17): Xaa is A or G
  MOD_RES (18)..(19)..(20)..(21): Xaa is A or G or is absent

SEQ ID NO: 37404 - protein, 43 aa, Artificial Sequence; identical to SEQ ID NO: 10961
  GFR-binding peptide
  MOD_RES (1)..(3)..(37)..(38): Xaa is C or S
  MOD_RES (15)..(16)..(17)..(18)..(19): Xaa is A or G
  MOD_RES (20)..(21)..(22)..(23): Xaa is A or G or is absent

SEQ ID NO: 37405 - protein, 32 aa, Artificial Sequence; identical to SEQ ID NO: 10962
  GFR-binding peptide
  MOD_RES (1)..(1): Xaa is C or S

SEQ ID NO: 37406 - protein, 39 aa, Artificial Sequence; identical to SEQ ID NO: 12899
  GFR-binding peptide
  MOD_RES (1)..(34)..(35): Xaa is C or S
  MOD_RES (12)..(13)..(14)..(15)..(16): Xaa is A or G
  MOD_RES (17)..(18)..(19)..(20): Xaa is A or G or is absent

SEQ ID NO: 37407 - protein, 37 aa, Artificial Sequence; identical to SEQ ID NO: 10963
  GFR-binding peptide
  MOD_RES (1)..(3)..(35)..(36): Xaa is C or S

SEQ ID NO: 37408 - protein, 36 aa, Artificial Sequence; identical to SEQ ID NO: 10964
  GFR-binding peptide
  MOD_RES (2)..(4)..(36): Xaa is C or S

SEQ ID NO: 37409 - protein, 35 aa, Artificial Sequence; identical to SEQ ID NO: 12901
  GFR-binding peptide
  MOD_RES (1)..(32)..(33): Xaa is C or S

SEQ ID NO: 37410 - protein, 38 aa, Artificial Sequence; identical to SEQ ID NO: 12902
  GFR-binding peptide
  MOD_RES (1)..(3)..(34)..(35): Xaa is C or S

SEQ ID NO: 37411 - protein, 40 aa, Artificial Sequence; identical to SEQ ID NO: 3550
  GFR-binding peptide
  MOD_RES (2)..(4)..(38)..(39): Xaa is C or S
  MOD_RES (16)..(17)..(18)..(19)..(20): Xaa is A or G
  MOD_RES (21)..(22)..(23)..(24): Xaa is A or G or is absent

SEQ ID NO: 37412 - protein, 38 aa, Artificial Sequence; identical to SEQ ID NO: 10966
  GFR-binding peptide
  MOD_RES (32)..(33): Xaa is C or S

SEQ ID NO: 37413 - protein, 35 aa, Artificial Sequence; identical to SEQ ID NO: 12904
  GFR-binding peptide
  MOD_RES (32)..(33): Xaa is C or S

SEQ ID NO: 37414 - protein, 36 aa, Artificial Sequence; identical to SEQ ID NO: 10967
  GFR-binding peptide
  MOD_RES (1)..(34)..(35): Xaa is C or S
  MOD_RES (12)..(13)..(14)..(15)..(16): Xaa is A or G
  MOD_RES (17)..(18)..(19)..(20): Xaa is A or G or is absent

SEQ ID NO: 37415 - protein, 37 aa, Artificial Sequence; identical to SEQ ID NO: 10968
  GFR-binding peptide
  MOD_RES (2)..(4)..(36): Xaa is C or S

SEQ ID NO: 37416 - protein, 40 aa, Artificial Sequence; identical to SEQ ID NO: 12905
  GFR-binding peptide
  MOD_RES (2)..(35)..(36): Xaa is C or S
  MOD_RES (13)..(14)..(15)..(16)..(17): Xaa is A or G
  MOD_RES (18)..(19)..(20)..(21): Xaa is A or G or is absent

SEQ ID NO: 37417 - protein, 39 aa, Artificial Sequence; identical to SEQ ID NO: 10969
  GFR-binding peptide
  MOD_RES (34)..(35): Xaa is C or S
  MOD_RES (12)..(13)..(14)..(15)..(16): Xaa is A or G
  MOD_RES (17)..(18)..(19)..(20): Xaa is A or G or is absent

SEQ ID NO: 37418 - protein, 43 aa, Artificial Sequence; identical to SEQ ID NO: 10970
  GFR-binding peptide
  MOD_RES (1)..(3)..(37): Xaa is C or S
  MOD_RES (15)..(16)..(17)..(18)..(19): Xaa is A or G
  MOD_RES (20)..(21)..(22)..(23): Xaa is A or G or is absent

SEQ ID NO: 37419 - protein, 31 aa, Artificial Sequence; identical to SEQ ID NO: 10972
  GFR-binding peptide
  MOD_RES (31)..(31): Xaa is C or S

SEQ ID NO: 37420 - protein, 37 aa, Artificial Sequence; identical to SEQ ID NO: 12907
  GFR-binding peptide
  MOD_RES (1)..(33)..(34): Xaa is C or S

SEQ ID NO: 37421 - protein, 37 aa, Artificial Sequence; identical to SEQ ID NO: 10973
  GFR-binding peptide
  MOD_RES (1)..(3)..(35)..(36): Xaa is C or S

SEQ ID NO: 37422 - protein, 39 aa, Artificial Sequence; identical to SEQ ID NO: 5501
  GFR-binding peptide
  MOD_RES (1)..(35)..(36): Xaa is C or S
  MOD_RES (13)..(14)..(15)..(16)..(17): Xaa is A or G
  MOD_RES (18)..(19)..(20)..(21): Xaa is A or G or is absent

SEQ ID NO: 37423 - protein, 40 aa, Artificial Sequence; identical to SEQ ID NO: 12909
  GFR-binding peptide
  MOD_RES (1)..(3)..(37)..(38): Xaa is C or S
  MOD_RES (15)..(16)..(17)..(18)..(19): Xaa is A or G
  MOD_RES (20)..(21)..(22)..(23): Xaa is A or G or is absent

SEQ ID NO: 37424 - protein, 36 aa, Artificial Sequence; identical to SEQ ID NO: 12910
  GFR-binding peptide
  MOD_RES (34)..(35): Xaa is C or S
  MOD_RES (12)..(13)..(14)..(15)..(16): Xaa is A or G
  MOD_RES (17)..(18)..(19)..(20): Xaa is A or G or is absent

SEQ ID NO: 37425 - protein, 38 aa, Artificial Sequence; identical to SEQ ID NO: 10974
  GFR-binding peptide
  MOD_RES (34)..(35): Xaa is C or S
  MOD_RES (12)..(13)..(14)..(15)..(16): Xaa is A or G
  MOD_RES (17)..(18)..(19)..(20): Xaa is A or G or is absent

SEQ ID NO: 37426 - protein, 35 aa, Artificial Sequence; identical to SEQ ID NO: 12911
  GFR-binding peptide
  MOD_RES (1)..(33): Xaa is C or S

SEQ ID NO: 37427 - protein, 35 aa, Artificial Sequence; identical to SEQ ID NO: 12912
  GFR-binding peptide
  MOD_RES (2)..(2): Xaa is C or S
  MOD_RES (14)..(15)..(16)..(17)..(18): Xaa is A or G
  MOD_RES (19)..(20)..(21)..(22): Xaa is A or G or is absent

SEQ ID NO: 37428 - protein, 36 aa, Artificial Sequence
  GFR-binding peptide
  MOD_RES (33)..(34): Xaa is C or S
  MOD_RES (11)..(12)..(13)..(14)..(15): Xaa is A or G
  MOD_RES (16)..(17)..(18)..(19): Xaa is A or G or is absent
SKVIMNSLQEXXXXXXXXXYYLITLPELDQSVXXPS

SEQ ID NO: 37429 - protein, 35 aa, Artificial Sequence; identical to SEQ ID NO: 5503
  GFR-binding peptide
  MOD_RES (2)..(2): Xaa is C or S
  MOD_RES (14)..(15)..(16)..(17)..(18): Xaa is A or G
  MOD_RES (19)..(20)..(21)..(22): Xaa is A or G or is absent

SEQ ID NO: 37430 - protein, 42 aa, Artificial Sequence; identical to SEQ ID NO: 12914
  GFR-binding peptide
  MOD_RES (2)..(36): Xaa is C or S
  MOD_RES (14)..(15)..(16)..(17)..(18): Xaa is A or G
  MOD_RES (19)..(20)..(21)..(22): Xaa is A or G or is absent

SEQ ID NO: 37431 - protein, 40 aa, Artificial Sequence; identical to SEQ ID NO: 12915
  GFR-binding peptide
  MOD_RES (1)..(3)..(35)..(36): Xaa is C or S

SEQ ID NO: 37432 - protein, 34 aa, Artificial Sequence; identical to SEQ ID NO: 10975
  GFR-binding peptide
  MOD_RES (1)..(3): Xaa is C or S

SEQ ID NO: 37433 - protein, 38 aa, Artificial Sequence; identical to SEQ ID NO: 12916
  GFR-binding peptide
  MOD_RES (32)..(33): Xaa is C or S

SEQ ID NO: 37434 - protein, 39 aa, Artificial Sequence; identical to SEQ ID NO: 12917
  GFR-binding peptide
  MOD_RES (33)..(34): Xaa is C or S
  MOD_RES (11)..(12)..(13)..(14)..(15): Xaa is A or G
  MOD_RES (16)..(17)..(18)..(19): Xaa is A or G or is absent

SEQ ID NO: 37435 - protein, 39 aa, Artificial Sequence; identical to SEQ ID NO: 3556
  GFR-binding peptide
  MOD_RES (2)..(33)..(34): Xaa is C or S

SEQ ID NO: 37436 - protein, 41 aa, Artificial Sequence; identical to SEQ ID NO: 10977
  GFR-binding peptide
  MOD_RES (1)..(3)..(35)..(36): Xaa is C or S

SEQ ID NO: 37437 - protein, 40 aa, Artificial Sequence; identical to SEQ ID NO: 12918
  GFR-binding peptide
  MOD_RES (1)..(35)..(36): Xaa is C or S
  MOD_RES (13)..(14)..(15)..(16)..(17): Xaa is A or G
  MOD_RES (18)..(19)..(20)..(21): Xaa is A or G or is absent

SEQ ID NO: 37438 - protein, 40 aa, Artificial Sequence; identical to SEQ ID NO: 5507
  GFR-binding peptide
  MOD_RES (1)..(3)..(36)..(37): Xaa is C or S
  MOD_RES (14)..(15)..(16)..(17)..(18): Xaa is A or G
  MOD_RES (19)..(20)..(21)..(22): Xaa is A or G or is absent

SEQ ID NO: 37439 - protein, 30 aa, Artificial Sequence; identical to SEQ ID NO: 10978
  GFR-binding peptide

SEQ ID NO: 37440 - protein, 34 aa, Artificial Sequence; identical to SEQ ID NO: 12920
  GFR-binding peptide
  MOD_RES (34)..(34): Xaa is C or S
  MOD_RES (12)..(13)..(14)..(15)..(16): Xaa is A or G
  MOD_RES (17)..(18)..(19)..(20): Xaa is A or G or is absent

SEQ ID NO: 37441 - protein, 35 aa, Artificial Sequence; identical to SEQ ID NO: 3562
  GFR-binding peptide
  MOD_RES (2)..(4): Xaa is C or S

SEQ ID NO: 37442 - protein, 36 aa, Artificial Sequence; identical to SEQ ID NO: 3563
  GFR-binding peptide
  MOD_RES (31)..(32): Xaa is C or S

SEQ ID NO: 37443 - protein, 33 aa, Artificial Sequence; identical to SEQ ID NO: 10982
  GFR-binding peptide
  MOD_RES (32)..(33): Xaa is C or S

SEQ ID NO: 37444 - protein, 37 aa, Artificial Sequence; identical to SEQ ID NO: 12923
  GFR-binding peptide
  MOD_RES (1)..(33)..(34): Xaa is C or S

SEQ ID NO: 37445 - protein, 31 aa, Artificial Sequence; identical to SEQ ID NO: 12924
  GFR-binding peptide

SEQ ID NO: 37446 - protein, 36 aa, Artificial Sequence; identical to SEQ ID NO: 10983
  GFR-binding peptide
  MOD_RES (2)..(34): Xaa is C or S

SEQ ID NO: 37447 - protein, 38 aa, Artificial Sequence; identical to SEQ ID NO: 12926
  GFR-binding peptide
  MOD_RES (1)..(33)..(34): Xaa is C or S

SEQ ID NO: 37448 - protein, 42 aa, Artificial Sequence; identical to SEQ ID NO: 12927
  GFR-binding peptide
  MOD_RES (2)..(4)..(36)..(37): Xaa is C or S

SEQ ID NO: 37449 - protein, 35 aa, Artificial Sequence; identical to SEQ ID NO: 12928
  GFR-binding peptide
  MOD_RES (31)..(32): Xaa is C or S

SEQ ID NO: 37450 - protein, 35 aa, Artificial Sequence; identical to SEQ ID NO: 10984
  GFR-binding peptide
  MOD_RES (1)..(3)..(34)..(35): Xaa is C or S

SEQ ID NO: 37451 - protein, 33 aa, Artificial Sequence; identical to SEQ ID NO: 12929
  GFR-binding peptide
  MOD_RES (31)..(32): Xaa is C or S

SEQ ID NO: 37452 - protein, 36 aa, Artificial Sequence; identical to SEQ ID NO: 12930
  GFR-binding peptide
  MOD_RES (2)..(34)..(35): Xaa is C or S

SEQ ID NO: 37453 - protein, 38 aa, Artificial Sequence; identical to SEQ ID NO: 12931
  GFR-binding peptide
  MOD_RES (1)..(34)..(35): Xaa is C or S
  MOD_RES (12)..(13)..(14)..(15)..(16): Xaa is A or G
  MOD_RES (17)..(18)..(19)..(20): Xaa is A or G or is absent

SEQ ID NO: 37454 - protein, 36 aa, Artificial Sequence; identical to SEQ ID NO: 10985
  GFR-binding peptide
  MOD_RES (1)..(35)..(36): Xaa is C or S
  MOD_RES (13)..(14)..(15)..(16)..(17): Xaa is A or G
  MOD_RES (18)..(19)..(20)..(21): Xaa is A or G or is absent

SEQ ID NO: 37455 - protein, 35 aa, Artificial Sequence; identical to SEQ ID NO: 10986
  GFR-binding peptide
  MOD_RES (1)..(3)..(35): Xaa is C or S

SEQ ID NO: 37456 - protein, 43 aa, Artificial Sequence; identical to SEQ ID NO: 10987
  GFR-binding peptide
  MOD_RES (2)..(4)..(38)..(39): Xaa is C or S
  MOD_RES (16)..(17)..(18)..(19)..(20): Xaa is A or G
  MOD_RES (21)..(22)..(23)..(24): Xaa is A or G or is absent

SEQ ID NO: 37457 - protein, 34 aa, Artificial Sequence; identical to SEQ ID NO: 12934
  GFR-binding peptide
  MOD_RES (34)..(34): Xaa is C or S
  MOD_RES (12)..(13)..(14)..(15)..(16): Xaa is A or G
  MOD_RES (17)..(18)..(19)..(20): Xaa is A or G or is absent

SEQ ID NO: 37458 - protein, 30 aa, Artificial Sequence; identical to SEQ ID NO: 3571
  GFR-binding peptide

SEQ ID NO: 37459 - protein, 35 aa, Artificial Sequence; identical to SEQ ID NO: 12935
  GFR-binding peptide
  MOD_RES (34)..(35): Xaa is C or S
  MOD_RES (12)..(13)..(14)..(15)..(16): Xaa is A or G
  MOD_RES (17)..(18)..(19)..(20): Xaa is A or G or is absent

SEQ ID NO: 37460 - protein, 36 aa, Artificial Sequence; identical to SEQ ID NO: 10989
  GFR-binding peptide
  MOD_RES (2)..(34)..(35): Xaa is C or S

SEQ ID NO: 37461 - protein, 36 aa, Artificial Sequence; identical to SEQ ID NO: 12936
  GFR-binding peptide
  MOD_RES (2)..(34)..(35): Xaa is C or S

SEQ ID NO: 37462 - protein, 35 aa, Artificial Sequence
  GFR-binding peptide
  MOD_RES (1)..(3)..(34)..(35): Xaa is C or S
XKXSKVIMNSLQEIKPTKGIYYLITLPELDQSVXX

SEQ ID NO: 37463 - protein, 40 aa, Artificial Sequence; identical to SEQ ID NO: 10990
  GFR-binding peptide
  MOD_RES (2)..(34)..(35): Xaa is C or S

SEQ ID NO: 37464 - protein, 36 aa, Artificial Sequence; identical to SEQ ID NO: 12937
  GFR-binding peptide
  MOD_RES (33)..(34): Xaa is C or S
  MOD_RES (11)..(12)..(13)..(14)..(15): Xaa is A or G
  MOD_RES (16)..(17)..(18)..(19): Xaa is A or G or is absent

SEQ ID NO: 37465 - protein, 39 aa, Artificial Sequence; identical to SEQ ID NO: 10991
  GFR-binding peptide
  MOD_RES (2)..(4)..(38)..(39): Xaa is C or S
  MOD_RES (16)..(17)..(18)..(19)..(20): Xaa is A or G
  MOD_RES (21)..(22)..(23)..(24): Xaa is A or G or is absent

SEQ ID NO: 37466 - protein, 38 aa, Artificial Sequence; identical to SEQ ID NO: 3573
  GFR-binding peptide
  MOD_RES (2)..(4)..(35)..(36): Xaa is C or S

SEQ ID NO: 37467 - protein, 32 aa, Artificial Sequence; identical to SEQ ID NO: 10993
  GFR-binding peptide
  MOD_RES (2)..(2): Xaa is C or S

SEQ ID NO: 37468 - protein, 36 aa, Artificial Sequence; identical to SEQ ID NO: 12938
  GFR-binding peptide
  MOD_RES (32)..(32): Xaa is C or S

SEQ ID NO: 37469 - protein, 40 aa, Artificial Sequence; identical to SEQ ID NO: 12939
  GFR-binding peptide
  MOD_RES (2)..(4)..(35)..(36): Xaa is C or S

SEQ ID NO: 37470 - protein, 40 aa, Artificial Sequence; identical to SEQ ID NO: 12940
  GFR-binding peptide
  MOD_RES (2)..(34)..(35): Xaa is C or S

SEQ ID NO: 37471 - protein, 40 aa, Artificial Sequence; identical to SEQ ID NO: 3576
  GFR-binding peptide
  MOD_RES (2)..(36)..(37): Xaa is C or S
  MOD_RES (14)..(15)..(16)..(17)..(18): Xaa is A or G
  MOD_RES (19)..(20)..(21)..(22): Xaa is A or G or is absent

SEQ ID NO: 37472 - protein, 35 aa, Artificial Sequence; identical to SEQ ID NO: 10996
  GFR-binding peptide
  MOD_RES (2)..(34)..(35): Xaa is C or S

SEQ ID NO: 37473 - protein, 34 aa, Artificial Sequence; identical to SEQ ID NO: 12941
  GFR-binding peptide
  MOD_RES (33)..(34): Xaa is C or S
  MOD_RES (11)..(12)..(13)..(14)..(15): Xaa is A or G
  MOD_RES (16)..(17)..(18)..(19): Xaa is A or G or is absent

SEQ ID NO: 37474 - protein, 37 aa, Artificial Sequence; identical to SEQ ID NO: 10997
  GFR-binding peptide
  MOD_RES (31)..(31): Xaa is C or S

SEQ ID NO: 37475 - protein, 34 aa, Artificial Sequence; identical to SEQ ID NO: 12942
  GFR-binding peptide
  MOD_RES (32)..(33): Xaa is C or S

SEQ ID NO: 37476 - protein, 38 aa, Artificial Sequence; identical to SEQ ID NO: 12943
  GFR-binding peptide
  MOD_RES (2)..(34)..(35): Xaa is C or S

SEQ ID NO: 37477 - protein, 37 aa, Artificial Sequence; identical to SEQ ID NO: 10998
  GFR-binding peptide
  MOD_RES (2)..(34)..(35): Xaa is C or S

SEQ ID NO: 37478 - protein, 37 aa, Artificial Sequence; identical to SEQ ID NO: 12944
  GFR-binding peptide
  MOD_RES (2)..(4)..(36)..(37): Xaa is C or S

SEQ ID NO: 37479 - protein, 36 aa, Artificial Sequence; identical to SEQ ID NO: 3589
  GFR-binding peptide
  MOD_RES (1)..(3)..(36): Xaa is C or S
  MOD_RES (14)..(15)..(16)..(17)..(18): Xaa is A or G
  MOD_RES (19)..(20)..(21)..(22): Xaa is A or G or is absent

SEQ ID NO: 37480 - protein, 31 aa, Artificial Sequence; identical to SEQ ID NO: 12945
  GFR-binding peptide

SEQ ID NO: 37481 - protein, 43 aa, Artificial Sequence; identical to SEQ ID NO: 12946
  GFR-binding peptide
  MOD_RES (2)..(4)..(37)..(38): Xaa is C or S
  MOD_RES (15)..(16)..(17)..(18)..(19): Xaa is A or G
  MOD_RES (20)..(21)..(22)..(23): Xaa is A or G or is absent

SEQ ID NO: 37482 - protein, 39 aa, Artificial Sequence; identical to SEQ ID NO: 12947
  GFR-binding peptide
  MOD_RES (33)..(34): Xaa is C or S
  MOD_RES (11)..(12)..(13)..(14)..(15): Xaa is A or G
  MOD_RES (16)..(17)..(18)..(19): Xaa is A or G or is absent

SEQ ID NO: 37483 - protein, 41 aa, Artificial Sequence; identical to SEQ ID NO: 11000
  GFR-binding peptide
  MOD_RES (2)..(35)..(36): Xaa is C or S
  MOD_RES (13)..(14)..(15)..(16)..(17): Xaa is A or G
  MOD_RES (18)..(19)..(20)..(21): Xaa is A or G or is absent

SEQ ID NO: 37484 - protein, 39 aa, Artificial Sequence; identical to SEQ ID NO: 12948
  GFR-binding peptide
  MOD_RES (33)..(34): Xaa is C or S
  MOD_RES (11)..(12)..(13)..(14)..(15): Xaa is A or G
  MOD_RES (16)..(17)..(18)..(19): Xaa is A or G or is absent

SEQ ID NO: 37485 - protein, 37 aa, Artificial Sequence; identical to SEQ ID NO: 11001
  GFR-binding peptide
  MOD_RES (2)..(34)..(35): Xaa is C or S

SEQ ID NO: 37486 - protein, 40 aa, Artificial Sequence; identical to SEQ ID NO: 11002
  GFR-binding peptide
  MOD_RES (1)..(3)..(36)..(37): Xaa is C or S
  MOD_RES (14)..(15)..(16)..(17)..(18): Xaa is A or G
  MOD_RES (19)..(20)..(21)..(22): Xaa is A or G or is absent

SEQ ID NO: 37487 - protein, 37 aa, Artificial Sequence; identical to SEQ ID NO: 11003
  GFR-binding peptide
  MOD_RES (2)..(4)..(35)..(36): Xaa is C or S

SEQ ID NO: 37488 - protein, 31 aa, Artificial Sequence
  GFR-binding peptide
  MOD_RES (31)..(31): Xaa is C or S
SKVIMNSLQEIKPTKGIYYLITLPELDQSVX

SEQ ID NO: 37489 - protein, 34 aa, Artificial Sequence; identical to SEQ ID NO: 11005
  GFR-binding peptide
  MOD_RES (34)..(34): Xaa is C or S
  MOD_RES (12)..(13)..(14)..(15)..(16): Xaa is A or G
  MOD_RES (17)..(18)..(19)..(20): Xaa is A or G or is absent

SEQ ID NO: 37490 - protein, 37 aa, Artificial Sequence; identical to SEQ ID NO: 12953
  GFR-binding peptide
  MOD_RES (32)..(33): Xaa is C or S

SEQ ID NO: 37491 - protein, 35 aa, Artificial Sequence; identical to SEQ ID NO: 11008
  GFR-binding peptide
  MOD_RES (31)..(32): Xaa is C or S

SEQ ID NO: 37492 - protein, 37 aa, Artificial Sequence; identical to SEQ ID NO: 11009
  GFR-binding peptide
  MOD_RES (2)..(4)..(36): Xaa is C or S

SEQ ID NO: 37493 - protein, 31 aa, Artificial Sequence; identical to SEQ ID NO: 12954
  GFR-binding peptide
  MOD_RES (31)..(31): Xaa is C or S

SEQ ID NO: 37494 - protein, 38 aa, Artificial Sequence; identical to SEQ ID NO: 12955
  GFR-binding peptide
  MOD_RES (1)..(3)..(37)..(38): Xaa is C or S
  MOD_RES (15)..(16)..(17)..(18)..(19): Xaa is A or G
  MOD_RES (20)..(21)..(22)..(23): Xaa is A or G or is absent

SEQ ID NO: 37495 - protein, 41 aa, Artificial Sequence; identical to SEQ ID NO: 11010
  GFR-binding peptide
  MOD_RES (2)..(4)..(37)..(38): Xaa is C or S
  MOD_RES (15)..(16)..(17)..(18)..(19): Xaa is A or G
  MOD_RES (20)..(21)..(22)..(23): Xaa is A or G or is absent

SEQ ID NO: 37496 - protein, 36 aa, Artificial Sequence; identical to SEQ ID NO: 12956
  GFR-binding peptide
  MOD_RES (1)..(3)..(35)..(36): Xaa is C or S

SEQ ID NO: 37497 - protein, 41 aa, Artificial Sequence; identical to SEQ ID NO: 12957
  GFR-binding peptide
  MOD_RES (1)..(3)..(37): Xaa is C or S
  MOD_RES (15)..(16)..(17)..(18)..(19): Xaa is A or G
  MOD_RES (20)..(21)..(22)..(23): Xaa is A or G or is absent

SEQ ID NO: 37498 - protein, 38 aa, Artificial Sequence; identical to SEQ ID NO: 11011
  GFR-binding peptide
  MOD_RES (1)..(34)..(35): Xaa is C or S
  MOD_RES (12)..(13)..(14)..(15)..(16): Xaa is A or G
  MOD_RES (17)..(18)..(19)..(20): Xaa is A or G or is absent

SEQ ID NO: 37499 - protein, 37 aa, Artificial Sequence; identical to SEQ ID NO: 11012
  GFR-binding peptide
  MOD_RES (1)..(35)..(36): Xaa is C or S
  MOD_RES (13)..(14)..(15)..(16)..(17): Xaa is A or G
  MOD_RES (18)..(19)..(20)..(21): Xaa is A or G or is absent

SEQ ID NO: 37500 - protein, 34 aa, Artificial Sequence; identical to SEQ ID NO: 12958
  GFR-binding peptide
  MOD_RES (2)..(4): Xaa is C or S

SEQ ID NO: 37501 - protein, 40 aa, Artificial Sequence; identical to SEQ ID NO: 5544
  GFR-binding peptide
  MOD_RES (1)..(3)..(37)..(38): Xaa is C or S
  MOD_RES (15)..(16)..(17)..(18)..(19): Xaa is A or G
  MOD_RES (20)..(21)..(22)..(23): Xaa is A or G or is absent

SEQ ID NO: 37502 - protein, 40 aa, Artificial Sequence; identical to SEQ ID NO: 11014
  GFR-binding peptide
  MOD_RES (34)..(35): Xaa is C or S
  MOD_RES (12)..(13)..(14)..(15)..(16): Xaa is A or G
  MOD_RES (17)..(18)..(19)..(20): Xaa is A or G or is absent

SEQ ID NO: 37503 - protein, 32 aa, Artificial Sequence; identical to SEQ ID NO: 11015
  GFR-binding peptide
  MOD_RES (1)..(1): Xaa is C or S

SEQ ID NO: 37504 - protein, 39 aa, Artificial Sequence; identical to SEQ ID NO: 3609
  GFR-binding peptide
  MOD_RES (1)..(3)..(34)..(35): Xaa is C or S

SEQ ID NO: 37505 - protein, 34 aa, Artificial Sequence; identical to SEQ ID NO: 11017
  GFR-binding peptide
  MOD_RES (2)..(34): Xaa is C or S

SEQ ID NO: 37506 - protein, 38 aa, Artificial Sequence; identical to SEQ ID NO: 11018
  GFR-binding peptide
  MOD_RES (1)..(33)..(34): Xaa is C or S

SEQ ID NO: 37507 - protein, 36 aa, Artificial Sequence; identical to SEQ ID NO: 11019
  GFR-binding peptide
  MOD_RES (1)..(35)..(36): Xaa is C or S
  MOD_RES (13)..(14)..(15)..(16)..(17): Xaa is A or G
  MOD_RES (18)..(19)..(20)..(21): Xaa is A or G or is absent

SEQ ID NO: 37508 - protein, 40 aa, Artificial Sequence; identical to SEQ ID NO: 11020
  GFR-binding peptide
  MOD_RES (34)..(35): Xaa is C or S
  MOD_RES (12)..(13)..(14)..(15)..(16): Xaa is A or G
  MOD_RES (17)..(18)..(19)..(20): Xaa is A or G or is absent

SEQ ID NO: 37509 - protein, 34 aa, Artificial Sequence; identical to SEQ ID NO: 5551
  GFR-binding peptide
  MOD_RES (2)..(4): Xaa is C or S

SEQ ID NO: 37510 - protein, 40 aa, Artificial Sequence; identical to SEQ ID NO: 11022
  GFR-binding peptide
  MOD_RES (2)..(34): Xaa is C or S

SEQ ID NO: 37511 - protein, 42 aa, Artificial Sequence; identical to SEQ ID NO: 12963
  GFR-binding peptide
  MOD_RES (1)..(3)..(37)..(38): Xaa is C or S
  MOD_RES (15)..(16)..(17)..(18)..(19): Xaa is A or G
  MOD_RES (20)..(21)..(22)..(23): Xaa is A or G or is absent

SEQ ID NO: 37512 - protein, 35 aa, Artificial Sequence; identical to SEQ ID NO: 11023
  GFR-binding peptide
  MOD_RES (2)..(33)..(34): Xaa is C or S

SEQ ID NO: 37513 - protein, 37 aa, Artificial Sequence; identical to SEQ ID NO: 11024
  GFR-binding peptide
  MOD_RES (2)..(4): Xaa is C or S
  MOD_RES (16)..(17)..(18)..(19)..(20): Xaa is A or G
  MOD_RES (21)..(22)..(23)..(24): Xaa is A or G or is absent

SEQ ID NO: 37514 - protein, 39 aa, Artificial Sequence; identical to SEQ ID NO: 11025
  GFR-binding peptide
  MOD_RES (1)..(33)..(34): Xaa is C or S

SEQ ID NO: 37515 - protein, 34 aa, Artificial Sequence; identical to SEQ ID NO: 12964
  GFR-binding peptide
  MOD_RES (1)..(32)..(33): Xaa is C or S

SEQ ID NO: 37516 - protein, 37 aa, Artificial Sequence; identical to SEQ ID NO: 11026
  GFR-binding peptide
  MOD_RES (2)..(36)..(37): Xaa is C or S
  MOD_RES (14)..(15)..(16)..(17)..(18): Xaa is A or G
  MOD_RES (19)..(20)..(21)..(22): Xaa is A or G or is absent

SEQ ID NO: 37517 - protein, 37 aa, Artificial Sequence; identical to SEQ ID NO: 11028
  GFR-binding peptide
  MOD_RES (2)..(34)..(35): Xaa is C or S

SEQ ID NO: 37518 - protein, 34 aa, Artificial Sequence; identical to SEQ ID NO: 11029
  GFR-binding peptide
  MOD_RES (1)..(33)..(34): Xaa is C or S

SEQ ID NO: 37519 - protein, 34 aa, Artificial Sequence; identical to SEQ ID NO: 3615
  GFR-binding peptide
  MOD_RES (31)..(32): Xaa is C or S

SEQ ID NO: 37520 - protein, 38 aa, Artificial Sequence; identical to SEQ ID NO: 12965
  GFR-binding peptide
  MOD_RES (2)..(35)..(36): Xaa is C or S
  MOD_RES (13)..(14)..(15)..(16)..(17): Xaa is A or G
  MOD_RES (18)..(19)..(20)..(21): Xaa is A or G or is absent

SEQ ID NO: 37521 - protein, 37 aa, Artificial Sequence; identical to SEQ ID NO: 12966
  GFR-binding peptide
  MOD_RES (31)..(32): Xaa is C or S

SEQ ID NO: 37522 - protein, 39 aa, Artificial Sequence; identical to SEQ ID NO: 11031
  GFR-binding peptide
  MOD_RES (2)..(36)..(37): Xaa is C or S
  MOD_RES (14)..(15)..(16)..(17)..(18): Xaa is A or G
  MOD_RES (19)..(20)..(21)..(22): Xaa is A or G or is absent

SEQ ID NO: 37523 - protein, 33 aa, Artificial Sequence; identical to SEQ ID NO: 12967
  GFR-binding peptide
  MOD_RES (33)..(33): Xaa is C or S
  MOD_RES (11)..(12)..(13)..(14)..(15): Xaa is A or G
  MOD_RES (16)..(17)..(18)..(19): Xaa is A or G or is absent

SEQ ID NO: 37524 - protein, 39 aa, Artificial Sequence; identical to SEQ ID NO: 12968
  GFR-binding peptide
  MOD_RES (1)..(34)..(35): Xaa is C or S
  MOD_RES (12)..(13)..(14)..(15)..(16): Xaa is A or G
  MOD_RES (17)..(18)..(19)..(20): Xaa is A or G or is absent

SEQ ID NO: 37525 - protein, 36 aa, Artificial Sequence; identical to SEQ ID NO: 11032
  GFR-binding peptide
  MOD_RES (31)..(32): Xaa is C or S

SEQ ID NO: 37526 - protein, 36 aa, Artificial Sequence; identical to SEQ ID NO: 12969
  GFR-binding peptide
  MOD_RES (2)..(36): Xaa is C or S
  MOD_RES (14)..(15)..(16)..(17)..(18): Xaa is A or G
  MOD_RES (19)..(20)..(21)..(22): Xaa is A or G or is absent

SEQ ID NO: 37527 - protein, 37 aa, Artificial Sequence; identical to SEQ ID NO: 11033
  GFR-binding peptide
  MOD_RES (2)..(4)..(36)..(37): Xaa is C or S

SEQ ID NO: 37528 - protein, 35 aa, Artificial Sequence; identical to SEQ ID NO: 12970
  GFR-binding peptide
  MOD_RES (33)..(34): Xaa is C or S
  MOD_RES (11)..(12)..(13)..(14)..(15): Xaa is A or G
  MOD_RES (16)..(17)..(18)..(19): Xaa is A or G or is absent

SEQ ID NO: 37529 - protein, 35 aa, Artificial Sequence; identical to SEQ ID NO: 11034
  GFR-binding peptide
  MOD_RES (33)..(34): Xaa is C or S
  MOD_RES (11)..(12)..(13)..(14)..(15): Xaa is A or G
  MOD_RES (16)..(17)..(18)..(19): Xaa is A or G or is absent

SEQ ID NO: 37530 - protein, 33 aa, Artificial Sequence; identical to SEQ ID NO: 12971
  GFR-binding peptide
  MOD_RES (31)..(32): Xaa is C or S

SEQ ID NO: 37531 - protein, 37 aa, Artificial Sequence; identical to SEQ ID NO: 11036
  GFR-binding peptide
  MOD_RES (1)..(35)..(36): Xaa is C or S
  MOD_RES (13)..(14)..(15)..(16)..(17): Xaa is A or G
  MOD_RES (18)..(19)..(20)..(21): Xaa is A or G or is absent

SEQ ID NO: 37532 - protein, 37 aa, Artificial Sequence; identical to SEQ ID NO: 12972
  GFR-binding peptide
  MOD_RES (2)..(4)..(36)..(37): Xaa is C or S

SEQ ID NO: 37533 - protein, 36 aa, Artificial Sequence; identical to SEQ ID NO: 5563
  GFR-binding peptide
  MOD_RES (2)..(36): Xaa is C or S
  MOD_RES (14)..(15)..(16)..(17)..(18): Xaa is A or G
  MOD_RES (19)..(20)..(21)..(22): Xaa is A or G or is absent

SEQ ID NO: 37534 - protein, 30 aa, Artificial Sequence; identical to SEQ ID NO: 11038
  GFR-binding peptide

SEQ ID NO: 37535 - protein, 38 aa, Artificial Sequence; identical to SEQ ID NO: 11039
  GFR-binding peptide
  MOD_RES (1)..(3)..(37)..(38): Xaa is C or S
  MOD_RES (15)..(16)..(17)..(18)..(19): Xaa is A or G
  MOD_RES (20)..(21)..(22)..(23): Xaa is A or G or is absent

SEQ ID NO: 37536 - protein, 39 aa, Artificial Sequence; identical to SEQ ID NO: 11040
  GFR-binding peptide
  MOD_RES (2)..(4)..(36)..(37): Xaa is C or S

SEQ ID NO: 37537 - protein, 39 aa, Artificial Sequence; identical to SEQ ID NO: 11041
  GFR-binding peptide
  MOD_RES (33)..(34): Xaa is C or S
  MOD_RES (11)..(12)..(13)..(14)..(15): Xaa is A or G
  MOD_RES (16)..(17)..(18)..(19): Xaa is A or G or is absent

SEQ ID NO: 37538 - protein, 36 aa, Artificial Sequence; identical to SEQ ID NO: 12975
  GFR-binding peptide
  MOD_RES (1)..(3)..(35)..(36): Xaa is C or S

SEQ ID NO: 37539 - protein, 37 aa, Artificial Sequence; identical to SEQ ID NO: 12976
  GFR-binding peptide
  MOD_RES (2)..(36)..(37): Xaa is C or S
  MOD_RES (14)..(15)..(16)..(17)..(18): Xaa is A or G
  MOD_RES (19)..(20)..(21)..(22): Xaa is A or G or is absent

SEQ ID NO: 37540 - protein, 41 aa, Artificial Sequence; identical to SEQ ID NO: 11042
  GFR-binding peptide
  MOD_RES (2)..(35)..(36): Xaa is C or S
  MOD_RES (13)..(14)..(15)..(16)..(17): Xaa is A or G
  MOD_RES (18)..(19)..(20)..(21): Xaa is A or G or is absent

SEQ ID NO: 37541 - protein, 33 aa, Artificial Sequence; identical to SEQ ID NO: 3626
  GFR-binding peptide
  MOD_RES (1)..(33): Xaa is C or S

SEQ ID NO: 37542 - protein, 38 aa, Artificial Sequence; identical to SEQ ID NO: 12977
  GFR-binding peptide
  MOD_RES (2)..(33)..(34): Xaa is C or S

SEQ ID NO: 37543 - protein, 38 aa, Artificial Sequence; identical to SEQ ID NO: 12978
  GFR-binding peptide
  MOD_RES (1)..(33)..(34): Xaa is C or S

SEQ ID NO: 37544 - protein, 43 aa, Artificial Sequence; identical to SEQ ID NO: 11044
  GFR-binding peptide
  MOD_RES (2)..(4)..(38)..(39): Xaa is C or S
  MOD_RES (16)..(17)..(18)..(19)..(20): Xaa is A or G
  MOD_RES (21)..(22)..(23)..(24): Xaa is A or G or is absent

SEQ ID NO: 37545 - protein, 43 aa, Artificial Sequence; identical to SEQ ID NO: 3628
  GFR-binding peptide
  MOD_RES (1)..(3)..(37)..(38): Xaa is C or S
  MOD_RES (15)..(16)..(17)..(18)..(19): Xaa is A or G
  MOD_RES (20)..(21)..(22)..(23): Xaa is A or G or is absent

SEQ ID NO: 37546 - protein, 42 aa, Artificial Sequence; identical to SEQ ID NO: 11046
  GFR-binding peptide
  MOD_RES (2)..(4)..(36)..(37): Xaa is C or S

SEQ ID NO: 37547 - protein, 39 aa, Artificial Sequence; identical to SEQ ID NO: 12980
  GFR-binding peptide
  MOD_RES (2)..(4)..(37)..(38): Xaa is C or S
  MOD_RES (15)..(16)..(17)..(18)..(19): Xaa is A or G
  MOD_RES (20)..(21)..(22)..(23): Xaa is A or G or is absent

SEQ ID NO: 37548 - protein, 34 aa, Artificial Sequence; identical to SEQ ID NO: 12981
  GFR-binding peptide
  MOD_RES (2)..(34): Xaa is C or S

SEQ ID NO: 37549 - protein, 37 aa, Artificial Sequence; identical to SEQ ID NO: 12982
  GFR-binding peptide
  MOD_RES (1)..(32)..(33): Xaa is C or S

SEQ ID NO: 37550 - protein, 38 aa, Artificial Sequence; identical to SEQ ID NO: 3630
  GFR-binding peptide
  MOD_RES (33)..(34): Xaa is C or S
  MOD_RES (11)..(12)..(13)..(14)..(15): Xaa is A or G
  MOD_RES (16)..(17)..(18)..(19): Xaa is A or G or is absent

SEQ ID NO: 37551 - protein, 34 aa, Artificial Sequence; identical to SEQ ID NO: 3631
  GFR-binding peptide
  MOD_RES (1)..(33)..(34): Xaa is C or S

SEQ ID NO: 37552 - protein, 37 aa, Artificial Sequence; identical to SEQ ID NO: 11049
  GFR-binding peptide
  MOD_RES (2)..(34)..(35): Xaa is C or S

SEQ ID NO: 37553 - protein, 34 aa, Artificial Sequence; identical to SEQ ID NO: 11050
  GFR-binding peptide
  MOD_RES (2)..(33)..(34): Xaa is C or S

SEQ ID NO: 37554 - protein, 36 aa, Artificial Sequence; identical to SEQ ID NO: 12985
  GFR-binding peptide
  MOD_RES (34)..(35): Xaa is C or S
  MOD_RES (12)..(13)..(14)..(15)..(16): Xaa is A or G
  MOD_RES (17)..(18)..(19)..(20): Xaa is A or G or is absent

SEQ ID NO: 37555 - protein, 38 aa, Artificial Sequence; identical to SEQ ID NO: 11051
  GFR-binding peptide
  MOD_RES (2)..(33)..(34): Xaa is C or S

SEQ ID NO: 37556 - protein, 36 aa, Artificial Sequence; identical to SEQ ID NO: 5573
  GFR-binding peptide
  MOD_RES (34)..(35): Xaa is C or S
  MOD_RES (12)..(13)..(14)..(15)..(16): Xaa is A or G
  MOD_RES (17)..(18)..(19)..(20): Xaa is A or G or is absent

SEQ ID NO: 37557 - protein, 42 aa, Artificial Sequence; identical to SEQ ID NO: 5575
  GFR-binding peptide
  MOD_RES (1)..(3)..(37)..(38): Xaa is C or S
  MOD_RES (15)..(16)..(17)..(18)..(19): Xaa is A or G
  MOD_RES (20)..(21)..(22)..(23): Xaa is A or G or is absent

SEQ ID NO: 37558 - protein, 37 aa, Artificial Sequence; identical to SEQ ID NO: 11052
  GFR-binding peptide
  MOD_RES (33)..(33): Xaa is C or S
  MOD_RES (11)..(12)..(13)..(14)..(15): Xaa is A or G
  MOD_RES (16)..(17)..(18)..(19): Xaa is A or G or is absent

SEQ ID NO: 37559 - protein, 34 aa, Artificial Sequence; identical to SEQ ID NO: 11053
  GFR-binding peptide
  MOD_RES (32)..(33): Xaa is C or S

SEQ ID NO: 37560 - protein, 36 aa, Artificial Sequence
  GFR-binding peptide
  MOD_RES (2)..(4)..(35)..(36): Xaa is C or S
SXKXSKVIMNSLQEIKPTKGIYYLITLPELDQSVXX

SEQ ID NO: 37561 - protein, 34 aa, Artificial Sequence; identical to SEQ ID NO: 12988
  GFR-binding peptide
  MOD_RES (33)..(34): Xaa is C or S
  MOD_RES (11)..(12)..(13)..(14)..(15): Xaa is A or G
  MOD_RES (16)..(17)..(18)..(19): Xaa is A or G or is absent

SEQ ID NO: 37562 - protein, 38 aa, Artificial Sequence; identical to SEQ ID NO: 5578
  GFR-binding peptide
  MOD_RES (1)..(3)..(37)..(38): Xaa is C or S
  MOD_RES (15)..(16)..(17)..(18)..(19): Xaa is A or G
  MOD_RES (20)..(21)..(22)..(23): Xaa is A or G or is absent

SEQ ID NO: 37563 - protein, 34 aa, Artificial Sequence; identical to SEQ ID NO: 12990
  GFR-binding peptide
  MOD_RES (31)..(32): Xaa is C or S

SEQ ID NO: 37564 - protein, 36 aa, Artificial Sequence; identical to SEQ ID NO: 12991
  GFR-binding peptide
  MOD_RES (34)..(35): Xaa is C or S
  MOD_RES (12)..(13)..(14)..(15)..(16): Xaa is A or G
  MOD_RES (17)..(18)..(19)..(20): Xaa is A or G or is absent

SEQ ID NO: 37565 - protein, 35 aa, Artificial Sequence; identical to SEQ ID NO: 3637
  GFR-binding peptide
  MOD_RES (2)..(35): Xaa is C or S
  MOD_RES (13)..(14)..(15)..(16)..(17): Xaa is A or G
  MOD_RES (18)..(19)..(20)..(21): Xaa is A or G or is absent

SEQ ID NO: 37566 - protein, 37 aa, Artificial Sequence; identical to SEQ ID NO: 11055
  GFR-binding peptide
  MOD_RES (1)..(33)..(34): Xaa is C or S

SEQ ID NO: 37567 - protein, 36 aa, Artificial Sequence; identical to SEQ ID NO: 3639
  GFR-binding peptide
  MOD_RES (2)..(4)..(35)..(36): Xaa is C or S

SEQ ID NO: 37568 - protein, 36 aa, Artificial Sequence; identical to SEQ ID NO: 12992
  GFR-binding peptide
  MOD_RES (1)..(3): Xaa is C or S
  MOD_RES (15)..(16)..(17)..(18)..(19): Xaa is A or G
  MOD_RES (20)..(21)..(22)..(23): Xaa is A or G or is absent

SEQ ID NO: 37569 - protein, 39 aa, Artificial Sequence; identical to SEQ ID NO: 12993
  GFR-binding peptide
  MOD_RES (2)..(36)..(37): Xaa is C or S
  MOD_RES (14)..(15)..(16)..(17)..(18): Xaa is A or G
  MOD_RES (19)..(20)..(21)..(22): Xaa is A or G or is absent

SEQ ID NO: 37570 - protein, 43 aa, Artificial Sequence; identical to SEQ ID NO: 12994
  GFR-binding peptide
  MOD_RES (2)..(4)..(38): Xaa is C or S
  MOD_RES (16)..(17)..(18)..(19)..(20): Xaa is A or G
  MOD_RES (21)..(22)..(23)..(24): Xaa is A or G or is absent

SEQ ID NO: 37571 - protein, 36 aa, Artificial Sequence; identical to SEQ ID NO: 3640
  GFR-binding peptide
  MOD_RES (1)..(35)..(36): Xaa is C or S
  MOD_RES (13)..(14)..(15)..(16)..(17): Xaa is A or G
  MOD_RES (18)..(19)..(20)..(21): Xaa is A or G or is absent

SEQ ID NO: 37572 - protein, 42 aa, Artificial Sequence; identical to SEQ ID NO: 11058
  GFR-binding peptide
  MOD_RES (2)..(4)..(36): Xaa is C or S

SEQ ID NO: 37573 - protein, 40 aa, Artificial Sequence; identical to SEQ ID NO: 12996
  GFR-binding peptide
  MOD_RES (1)..(35)..(36): Xaa is C or S
  MOD_RES (13)..(14)..(15)..(16)..(17): Xaa is A or G
  MOD_RES (18)..(19)..(20)..(21): Xaa is A or G or is absent

SEQ ID NO: 37574 - protein, 37 aa, Artificial Sequence; identical to SEQ ID NO: 5586
  GFR-binding peptide
  MOD_RES (2)..(35)..(36): Xaa is C or S
  MOD_RES (13)..(14)..(15)..(16)..(17): Xaa is A or G
  MOD_RES (18)..(19)..(20)..(21): Xaa is A or G or is absent

SEQ ID NO: 37575 - protein, 40 aa, Artificial Sequence; identical to SEQ ID NO: 12999
  GFR-binding peptide
  MOD_RES (2)..(36)..(37): Xaa is C or S
  MOD_RES (14)..(15)..(16)..(17)..(18): Xaa is A or G
  MOD_RES (19)..(20)..(21)..(22): Xaa is A or G or is absent

SEQ ID NO: 37576 - protein, 39 aa, Artificial Sequence; identical to SEQ ID NO: 13000
  GFR-binding peptide
  MOD_RES (2)..(34)..(35): Xaa is C or S

SEQ ID NO: 37577 - protein, 38 aa, Artificial Sequence; identical to SEQ ID NO: 13001
  GFR-binding peptide
  MOD_RES (34)..(35): Xaa is C or S
  MOD_RES (12)..(13)..(14)..(15)..(16): Xaa is A or G
  MOD_RES (17)..(18)..(19)..(20): Xaa is A or G or is absent

SEQ ID NO: 37578 - protein, 37 aa, Artificial Sequence; identical to SEQ ID NO: 5589
  GFR-binding peptide
  MOD_RES (1)..(3)..(36)..(37): Xaa is C or S
  MOD_RES (14)..(15)..(16)..(17)..(18): Xaa is A or G
  MOD_RES (19)..(20)..(21)..(22): Xaa is A or G or is absent

SEQ ID NO: 37579 - protein, 33 aa, Artificial Sequence; identical to SEQ ID NO: 11060
  GFR-binding peptide
  MOD_RES (32)..(33): Xaa is C or S

SEQ ID NO: 37580 - protein, 38 aa, Artificial Sequence; identical to SEQ ID NO: 3644
  GFR-binding peptide
  MOD_RES (1)..(33)..(34): Xaa is C or S

SEQ ID NO: 37581 - protein, 40 aa, Artificial Sequence; identical to SEQ ID NO: 11063
  GFR-binding peptide
  MOD_RES (1)..(3)..(35)..(36): Xaa is C or S

SEQ ID NO: 37582 - protein, 38 aa, Artificial Sequence; identical to SEQ ID NO: 13003
  GFR-binding peptide
  MOD_RES (2)..(34)..(35): Xaa is C or S

SEQ ID NO: 37583 - protein, 39 aa, Artificial Sequence; identical to SEQ ID NO: 5593
  GFR-binding peptide
  MOD_RES (1)..(3)..(37)..(38): Xaa is C or S
  MOD_RES (15)..(16)..(17)..(18)..(19): Xaa is A or G
  MOD_RES (20)..(21)..(22)..(23): Xaa is A or G or is absent

SEQ ID NO: 37584 - protein, 38 aa, Artificial Sequence; identical to SEQ ID NO: 3648
  GFR-binding peptide
  MOD_RES (2)..(36)..(37): Xaa is C or S
  MOD_RES (14)..(15)..(16)..(17)..(18): Xaa is A or G
  MOD_RES (19)..(20)..(21)..(22): Xaa is A or G or is absent

SEQ ID NO: 37585 - protein, 40 aa, Artificial Sequence; identical to SEQ ID NO: 13005
  GFR-binding peptide
  MOD_RES (1)..(35): Xaa is C or S
  MOD_RES (13)..(14)..(15)..(16)..(17): Xaa is A or G
  MOD_RES (18)..(19)..(20)..(21): Xaa is A or G or is absent

SEQ ID NO: 37586 - protein, 31 aa, Artificial Sequence; identical to SEQ ID NO: 11066
  GFR-binding peptide
  MOD_RES (31)..(31): Xaa is C or S

SEQ ID NO: 37587 - protein, 38 aa, Artificial Sequence; identical to SEQ ID NO: 13006
  GFR-binding peptide
  MOD_RES (1)..(3)..(37)..(38): Xaa is C or S
  MOD_RES (15)..(16)..(17)..(18)..(19): Xaa is A or G
  MOD_RES (20)..(21)..(22)..(23): Xaa is A or G or is absent

SEQ ID NO: 37588 - protein, 35 aa, Artificial Sequence; identical to SEQ ID NO: 11067
  GFR-binding peptide
  MOD_RES (33)..(34): Xaa is C or S
  MOD_RES (11)..(12)..(13)..(14)..(15): Xaa is A or G
  MOD_RES (16)..(17)..(18)..(19): Xaa is A or G or is absent

SEQ ID NO: 37589 - protein, 42 aa, Artificial Sequence; identical to SEQ ID NO: 11068
  GFR-binding peptide
  MOD_RES (1)..(3)..(37): Xaa is C or S
  MOD_RES (15)..(16)..(17)..(18)..(19): Xaa is A or G
  MOD_RES (20)..(21)..(22)..(23): Xaa is A or G or is absent

SEQ ID NO: 37590 - protein, 37 aa, Artificial Sequence; identical to SEQ ID NO: 5596
  GFR-binding peptide
  MOD_RES (1)..(34)..(35): Xaa is C or S
  MOD_RES (12)..(13)..(14)..(15)..(16): Xaa is A or G
  MOD_RES (17)..(18)..(19)..(20): Xaa is A or G or is absent

SEQ ID NO: 37591 - protein, 34 aa, Artificial Sequence; identical to SEQ ID NO: 13009
  GFR-binding peptide
  MOD_RES (2)..(34): Xaa is C or S

SEQ ID NO: 37592 - protein, 37 aa, Artificial Sequence; identical to SEQ ID NO: 13010
  GFR-binding peptide
  MOD_RES (1)..(35)..(36): Xaa is C or S
  MOD_RES (13)..(14)..(15)..(16)..(17): Xaa is A or G
  MOD_RES (18)..(19)..(20)..(21): Xaa is A or G or is absent

SEQ ID NO: 37593 - protein, 37 aa, Artificial Sequence; identical to SEQ ID NO: 13011
  GFR-binding peptide
  MOD_RES (1)..(3)..(37): Xaa is C or S
  MOD_RES (15)..(16)..(17)..(18)..(19): Xaa is A or G
  MOD_RES (20)..(21)..(22)..(23): Xaa is A or G or is absent

SEQ ID NO: 37594 - protein, 36 aa, Artificial Sequence; identical to SEQ ID NO: 11071
  GFR-binding peptide
  MOD_RES (33)..(34): Xaa is C or S
  MOD_RES (11)..(12)..(13)..(14)..(15): Xaa is A or G
  MOD_RES (16)..(17)..(18)..(19): Xaa is A or G or is absent

SEQ ID NO: 37595 - protein, 35 aa, Artificial Sequence; identical to SEQ ID NO: 13012
  GFR-binding peptide
  MOD_RES (2)..(35): Xaa is C or S
  MOD_RES (13)..(14)..(15)..(16)..(17): Xaa is A or G
  MOD_RES (18)..(19)..(20)..(21): Xaa is A or G or is absent

SEQ ID NO: 37596 - protein, 35 aa, Artificial Sequence; identical to SEQ ID NO: 13013
  GFR-binding peptide
  MOD_RES (32)..(33): Xaa is C or S

SEQ ID NO: 37597 - protein, 36 aa, Artificial Sequence; identical to SEQ ID NO: 11072
  GFR-binding peptide
  MOD_RES (33)..(34): Xaa is C or S
  MOD_RES (11)..(12)..(13)..(14)..(15): Xaa is A or G
  MOD_RES (16)..(17)..(18)..(19): Xaa is A or G or is absent

SEQ ID NO: 37598 - protein, 39 aa, Artificial Sequence; identical to SEQ ID NO: 13014
  GFR-binding peptide
  MOD_RES (33)..(34): Xaa is C or S
  MOD_RES (11)..(12)..(13)..(14)..(15): Xaa is A or G
  MOD_RES (16)..(17)..(18)..(19): Xaa is A or G or is absent

SEQ ID NO: 37599 - protein, 37 aa, Artificial Sequence; identical to SEQ ID NO: 11073
  GFR-binding peptide
  MOD_RES (2)..(4)..(36)..(37): Xaa is C or S

SEQ ID NO: 37600 - protein, 41 aa, Artificial Sequence; identical to SEQ ID NO: 13015
  GFR-binding peptide
  MOD_RES (1)..(3)..(37)..(38): Xaa is C or S
  MOD_RES (15)..(16)..(17)..(18)..(19): Xaa is A or G
  MOD_RES (20)..(21)..(22)..(23): Xaa is A or G or is absent

SEQ ID NO: 37601 - protein, 42 aa, Artificial Sequence; identical to SEQ ID NO: 11074
  GFR-binding peptide
  MOD_RES (2)..(4)..(36)..(37): Xaa is C or S

SEQ ID NO: 37602 - protein, 33 aa, Artificial Sequence; identical to SEQ ID NO: 11075
  GFR-binding peptide
  MOD_RES (33)..(33): Xaa is C or S
  MOD_RES (11)..(12)..(13)..(14)..(15): Xaa is A or G
  MOD_RES (16)..(17)..(18)..(19): Xaa is A or G or is absent

SEQ ID NO: 37603 - protein, 40 aa, Artificial Sequence; identical to SEQ ID NO: 11076
  GFR-binding peptide
  MOD_RES (2)..(35)..(36): Xaa is C or S
  MOD_RES (13)..(14)..(15)..(16)..(17): Xaa is A or G
  MOD_RES (18)..(19)..(20)..(21): Xaa is A or G or is absent

SEQ ID NO: 37604 - protein, 37 aa, Artificial Sequence; identical to SEQ ID NO: 11078
  GFR-binding peptide
  MOD_RES (33)..(34): Xaa is C or S
  MOD_RES (11)..(12)..(13)..(14)..(15): Xaa is A or G
  MOD_RES (16)..(17)..(18)..(19): Xaa is A or G or is absent

SEQ ID NO: 37605 - protein, 35 aa, Artificial Sequence; identical to SEQ ID NO: 13017
  GFR-binding peptide
  MOD_RES (1)..(35): Xaa is C or S
  MOD_RES (13)..(14)..(15)..(16)..(17): Xaa is A or G
  MOD_RES (18)..(19)..(20)..(21): Xaa is A or G or is absent

SEQ ID NO: 37606 - protein, 33 aa, Artificial Sequence; identical to SEQ ID NO: 11079
  GFR-binding peptide
  MOD_RES (33)..(33): Xaa is C or S
  MOD_RES (11)..(12)..(13)..(14)..(15): Xaa is A or G
  MOD_RES (16)..(17)..(18)..(19): Xaa is A or G or is absent

SEQ ID NO: 37607 - protein, 42 aa, Artificial Sequence; identical to SEQ ID NO: 13018
  GFR-binding peptide
  MOD_RES (2)..(36): Xaa is C or S
  MOD_RES (14)..(15)..(16)..(17)..(18): Xaa is A or G
  MOD_RES (19)..(20)..(21)..(22): Xaa is A or G or is absent

SEQ ID NO: 37608 - protein, 36 aa, Artificial Sequence; identical to SEQ ID NO: 5605
  GFR-binding peptide
  MOD_RES (1)..(3)..(36): Xaa is C or S
  MOD_RES (14)..(15)..(16)..(17)..(18): Xaa is A or G
  MOD_RES (19)..(20)..(21)..(22): Xaa is A or G or is absent

SEQ ID NO: 37609 - protein, 34 aa, Artificial Sequence; identical to SEQ ID NO: 13020
  GFR-binding peptide
  MOD_RES (1)..(33)..(34): Xaa is C or S

SEQ ID NO: 37610 - protein, 40 aa, Artificial Sequence; identical to SEQ ID NO: 11080
  GFR-binding peptide
  MOD_RES (2)..(4)..(35)..(36): Xaa is C or S

SEQ ID NO: 37611 - protein, 33 aa, Artificial Sequence; identical to SEQ ID NO: 13021
  GFR-binding peptide
  MOD_RES (31)..(32): Xaa is C or S

SEQ ID NO: 37612 - protein, 38 aa, Artificial Sequence; identical to SEQ ID NO: 5607
  GFR-binding peptide
  MOD_RES (2)..(33)..(34): Xaa is C or S

SEQ ID NO: 37613 - protein, 36 aa, Artificial Sequence; identical to SEQ ID NO: 11082
  GFR-binding peptide
  MOD_RES (2)..(4): Xaa is C or S
  MOD_RES (15)..(16)..(17)..(18)..(19): Xaa is A or G
  MOD_RES (20)..(21)..(22)..(23): Xaa is A or G or is absent

SEQ ID NO: 37614 - protein, 36 aa, Artificial Sequence; identical to SEQ ID NO: 5609
  GFR-binding peptide
  MOD_RES (2)..(4)..(36): Xaa is C or S

SEQ ID NO: 37615 - protein, 43 aa, Artificial Sequence; identical to SEQ ID NO: 13026
  GFR-binding peptide
  MOD_RES (1)..(3)..(37)..(38): Xaa is C or S
  MOD_RES (15)..(16)..(17)..(18)..(19): Xaa is A or G
  MOD_RES (20)..(21)..(22)..(23): Xaa is A or G or is absent

SEQ ID NO: 37616 - protein, 37 aa, Artificial Sequence; identical to SEQ ID NO: 5610
  GFR-binding peptide
  MOD_RES (2)..(33)..(34): Xaa is C or S

SEQ ID NO: 37617 - protein, 41 aa, Artificial Sequence; identical to SEQ ID NO: 13028
  GFR-binding peptide
  MOD_RES (1)..(3)..(37)..(38): Xaa is C or S
  MOD_RES (15)..(16)..(17)..(18)..(19): Xaa is A or G
  MOD_RES (20)..(21)..(22)..(23): Xaa is A or G or is absent

SEQ ID NO: 37618 - protein, 34 aa, Artificial Sequence; identical to SEQ ID NO: 5613
  GFR-binding peptide
  MOD_RES (31)..(32): Xaa is C or S

SEQ ID NO: 37619 - protein, 41 aa, Artificial Sequence; identical to SEQ ID NO: 13030
  GFR-binding peptide
  MOD_RES (1)..(3)..(35)..(36): Xaa is C or S

SEQ ID NO: 37620 - protein, 37 aa, Artificial Sequence; identical to SEQ ID NO: 5614
  GFR-binding peptide
  MOD_RES (31)..(32): Xaa is C or S

SEQ ID NO: 37621 - protein, 41 aa, Artificial Sequence; identical to SEQ ID NO: 3668
  GFR-binding peptide
  MOD_RES (1)..(3)..(35)..(36): Xaa is C or S

SEQ ID NO: 37622 - protein, 38 aa, Artificial Sequence; identical to SEQ ID NO: 11086
  GFR-binding peptide
  MOD_RES (1)..(35)..(36): Xaa is C or S
  MOD_RES (13)..(14)..(15)..(16)..(17): Xaa is A or G
  MOD_RES (18)..(19)..(20)..(21): Xaa is A or G or is absent

SEQ ID NO: 37623 - protein, 42 aa, Artificial Sequence; identical to SEQ ID NO: 11087
  GFR-binding peptide
  MOD_RES (1)..(3)..(37)..(38): Xaa is C or S
  MOD_RES (15)..(16)..(17)..(18)..(19): Xaa is A or G
  MOD_RES (20)..(21)..(22)..(23): Xaa is A or G or is absent

SEQ ID NO: 37624 - protein, 32 aa, Artificial Sequence; identical to SEQ ID NO: 11088
  GFR-binding peptide
  MOD_RES (1)..(1): Xaa is C or S

SEQ ID NO: 37625 - protein, 32 aa, Artificial Sequence; identical to SEQ ID NO: 11089
  GFR-binding peptide
  MOD_RES (11)..(12)..(13)..(14)..(15): Xaa is A or G
  MOD_RES (16)..(17)..(18)..(19): Xaa is A or G or is absent

SEQ ID NO: 37626 - protein, 36 aa, Artificial Sequence; identical to SEQ ID NO: 11090
  GFR-binding peptide
  MOD_RES (1)..(3)..(36): Xaa is C or S
  MOD_RES (14)..(15)..(16)..(17)..(18): Xaa is A or G
  MOD_RES (19)..(20)..(21)..(22): Xaa is A or G or is absent

SEQ ID NO: 37627 - protein, 37 aa, Artificial Sequence; identical to SEQ ID NO: 5618
  GFR-binding peptide
  MOD_RES (33)..(34): Xaa is C or S
  MOD_RES (11)..(12)..(13)..(14)..(15): Xaa is A or G
  MOD_RES (16)..(17)..(18)..(19): Xaa is A or G or is absent

SEQ ID NO: 37628 - protein, 37 aa, Artificial Sequence; identical to SEQ ID NO: 11091
  GFR-binding peptide
  MOD_RES (31)..(32): Xaa is C or S

SEQ ID NO: 37629 - protein, 32 aa, Artificial Sequence; identical to SEQ ID NO: 13035
  GFR-binding peptide
  MOD_RES (31)..(32): Xaa is C or S

SEQ ID NO: 37630 - protein, 36 aa, Artificial Sequence; identical to SEQ ID NO: 11093
  GFR-binding peptide
  MOD_RES (31)..(32): Xaa is C or S

SEQ ID NO: 37631 - protein, 38 aa, Artificial Sequence; identical to SEQ ID NO: 13036
  GFR-binding peptide
  MOD_RES (1)..(33): Xaa is C or S

SEQ ID NO: 37632 - protein, 32 aa, Artificial Sequence; identical to SEQ ID NO: 11094
  GFR-binding peptide
  MOD_RES (31)..(32): Xaa is C or S

SEQ ID NO: 37633 - protein, 38 aa, Artificial Sequence; identical to SEQ ID NO: 11095
  GFR-binding peptide
  MOD_RES (1)..(3)..(34)..(35): Xaa is C or S

SEQ ID NO: 37634 - protein, 34 aa, Artificial Sequence; identical to SEQ ID NO: 3682
  GFR-binding peptide
  MOD_RES (1)..(32)..(33): Xaa is C or S

SEQ ID NO: 37635 - protein, 36 aa, Artificial Sequence; identical to SEQ ID NO: 13038
  GFR-binding peptide
  MOD_RES (31)..(32): Xaa is C or S

SEQ ID NO: 37636 - protein, 40 aa, Artificial Sequence; identical to SEQ ID NO: 11098
  GFR-binding peptide
  MOD_RES (2)..(36)..(37): Xaa is C or S
  MOD_RES (14)..(15)..(16)..(17)..(18): Xaa is A or G
  MOD_RES (19)..(20)..(21)..(22): Xaa is A or G or is absent

SEQ ID NO: 37637 - protein, 40 aa, Artificial Sequence; identical to SEQ ID NO: 13039
  GFR-binding peptide
  MOD_RES (2)..(36)..(37): Xaa is C or S
  MOD_RES (14)..(15)..(16)..(17)..(18): Xaa is A or G
  MOD_RES (19)..(20)..(21)..(22): Xaa is A or G or is absent

SEQ ID NO: 37638 - protein, 38 aa, Artificial Sequence; identical to SEQ ID NO: 13040
  GFR-binding peptide
  MOD_RES (2)..(4)..(36)..(37): Xaa is C or S

SEQ ID NO: 37639 - protein, 33 aa, Artificial Sequence; identical to SEQ ID NO: 11099
  GFR-binding peptide
  MOD_RES (1)..(3): Xaa is C or S

SEQ ID NO: 37640 - protein, 36 aa, Artificial Sequence; identical to SEQ ID NO: 11100
  GFR-binding peptide
  MOD_RES (1)..(3): Xaa is C or S
  MOD_RES (15)..(16)..(17)..(18)..(19): Xaa is A or G
  MOD_RES (20)..(21)..(22)..(23): Xaa is A or G or is absent

SEQ ID NO: 37641 - protein, 38 aa, Artificial Sequence; identical to SEQ ID NO: 11101
  GFR-binding peptide
  MOD_RES (33)..(34): Xaa is C or S
  MOD_RES (11)..(12)..(13)..(14)..(15): Xaa is A or G
  MOD_RES (16)..(17)..(18)..(19): Xaa is A or G or is absent

SEQ ID NO: 37642 - protein, 41 aa, Artificial Sequence; identical to SEQ ID NO: 5629
  GFR-binding peptide
  MOD_RES (2)..(4)..(35)..(36): Xaa is C or S

SEQ ID NO: 37643 - protein, 36 aa, Artificial Sequence; identical to SEQ ID NO: 13043
  GFR-binding peptide
  MOD_RES (1)..(33)..(34): Xaa is C or S

SEQ ID NO: 37644 - protein, 38 aa, Artificial Sequence; identical to SEQ ID NO: 3687
  GFR-binding peptide
  MOD_RES (1)..(3)..(37)..(38): Xaa is C or S
  MOD_RES (15)..(16)..(17)..(18)..(19): Xaa is A or G
  MOD_RES (20)..(21)..(22)..(23): Xaa is A or G or is absent

SEQ ID NO: 37645 - protein, 30 aa, Artificial Sequence; identical to SEQ ID NO: 13044
  GFR-binding peptide

SEQ ID NO: 37646 - protein, 33 aa, Artificial Sequence; identical to SEQ ID NO: 13045
  GFR-binding peptide
  MOD_RES (12)..(13)..(14)..(15)..(16): Xaa is A or G
  MOD_RES (17)..(18)..(19)..(20): Xaa is A or G or is absent

SEQ ID NO: 37647 - protein, 40 aa, Artificial Sequence; identical to SEQ ID NO: 11103
  GFR-binding peptide
  MOD_RES (1)..(35)..(36): Xaa is C or S
  MOD_RES (13)..(14)..(15)..(16)..(17): Xaa is A or G
  MOD_RES (18)..(19)..(20)..(21): Xaa is A or G or is absent

SEQ ID NO: 37648 - protein, 34 aa, Artificial Sequence; identical to SEQ ID NO: 11104
  GFR-binding peptide
  MOD_RES (32)..(33): Xaa is C or S

SEQ ID NO: 37649 - protein, 44 aa, Artificial Sequence; identical to SEQ ID NO: 13046
  GFR-binding peptide
  MOD_RES (2)..(4)..(38)..(39): Xaa is C or S
  MOD_RES (16)..(17)..(18)..(19)..(20): Xaa is A or G
  MOD_RES (21)..(22)..(23)..(24): Xaa is A or G or is absent

SEQ ID NO: 37650 - protein, 36 aa, Artificial Sequence; identical to SEQ ID NO: 13047
  GFR-binding peptide
  MOD_RES (2)..(35)..(36): Xaa is C or S
  MOD_RES (13)..(14)..(15)..(16)..(17): Xaa is A or G
  MOD_RES (18)..(19)..(20)..(21): Xaa is A or G or is absent

SEQ ID NO: 37651 - protein, 32 aa, Artificial Sequence; identical to SEQ ID NO: 11105
  GFR-binding peptide
  MOD_RES (1)..(32): Xaa is C or S

SEQ ID NO: 37652 - protein, 39 aa, Artificial Sequence; identical to SEQ ID NO: 5632
  GFR-binding peptide
  MOD_RES (2)..(4)..(35)..(36): Xaa is C or S

SEQ ID NO: 37653 - protein, 42 aa, Artificial Sequence; identical to SEQ ID NO: 11106
  GFR-binding peptide
  MOD_RES (1)..(3)..(37)..(38): Xaa is C or S
  MOD_RES (15)..(16)..(17)..(18)..(19): Xaa is A or G
  MOD_RES (20)..(21)..(22)..(23): Xaa is A or G or is absent

SEQ ID NO: 37654 - protein, 37 aa, Artificial Sequence; identical to SEQ ID NO: 11109
  GFR-binding peptide
  MOD_RES (2)..(34)..(35): Xaa is C or S

SEQ ID NO: 37655 - protein, 34 aa, Artificial Sequence; identical to SEQ ID NO: 3692
  GFR-binding peptide
  MOD_RES (2)..(34): Xaa is C or S

SEQ ID NO: 37656 - protein, 40 aa, Artificial Sequence; identical to SEQ ID NO: 13051
  GFR-binding peptide
  MOD_RES (2)..(35)..(36): Xaa is C or S
  MOD_RES (13)..(14)..(15)..(16)..(17): Xaa is A or G
  MOD_RES (18)..(19)..(20)..(21): Xaa is A or G or is absent

SEQ ID NO: 37657 - protein, 41 aa, Artificial Sequence; identical to SEQ ID NO: 11112
  GFR-binding peptide
  MOD_RES (2)..(4)..(37)..(38): Xaa is C or S
  MOD_RES (15)..(16)..(17)..(18)..(19): Xaa is A or G
  MOD_RES (20)..(21)..(22)..(23): Xaa is A or G or is absent

SEQ ID NO: 37658 - protein, 37 aa, Artificial Sequence; identical to SEQ ID NO: 13052
  GFR-binding peptide
  MOD_RES (2)..(4)..(36)..(37): Xaa is C or S

SEQ ID NO: 37659 - protein, 39 aa, Artificial Sequence; identical to SEQ ID NO: 11113
  GFR-binding peptide
  MOD_RES (1)..(35): Xaa is C or S
  MOD_RES (13)..(14)..(15)..(16)..(17): Xaa is A or G
  MOD_RES (18)..(19)..(20)..(21): Xaa is A or G or is absent

SEQ ID NO: 37660 - protein, 38 aa, Artificial Sequence; identical to SEQ ID NO: 11114
  GFR-binding peptide
  MOD_RES (2)..(4)..(38): Xaa is C or S
  MOD_RES (16)..(17)..(18)..(19)..(20): Xaa is A or G
  MOD_RES (21)..(22)..(23)..(24): Xaa is A or G or is absent

SEQ ID NO: 37661 - protein, 34 aa, Artificial Sequence; identical to SEQ ID NO: 3696
  GFR-binding peptide
  MOD_RES (1)..(33)..(34): Xaa is C or S

SEQ ID NO: 37662 - protein, 38 aa, Artificial Sequence; identical to SEQ ID NO: 11117
  GFR-binding peptide
  MOD_RES (33)..(34): Xaa is C or S
  MOD_RES (11)..(12)..(13)..(14)..(15): Xaa is A or G
  MOD_RES (16)..(17)..(18)..(19): Xaa is A or G or is absent

SEQ ID NO: 37663 - protein, 37 aa, Artificial Sequence; identical to SEQ ID NO: 3697
  GFR-binding peptide
  MOD_RES (31)..(32): Xaa is C or S

SEQ ID NO: 37664 - protein, 40 aa, Artificial Sequence; identical to SEQ ID NO: 11119
  GFR-binding peptide
  MOD_RES (34)..(35): Xaa is C or S
  MOD_RES (12)..(13)..(14)..(15)..(16): Xaa is A or G
  MOD_RES (17)..(18)..(19)..(20): Xaa is A or G or is absent

SEQ ID NO: 37665 - protein, 33 aa, Artificial Sequence; identical to SEQ ID NO: 13053
  GFR-binding peptide
  MOD_RES (1)..(33): Xaa is C or S

SEQ ID NO: 37666 - protein, 36 aa, Artificial Sequence; identical to SEQ ID NO: 13054
  GFR-binding peptide
  MOD_RES (1)..(3)..(35)..(36): Xaa is C or S

SEQ ID NO: 37667 - protein, 41 aa, Artificial Sequence; identical to SEQ ID NO: 11120
  GFR-binding peptide
  MOD_RES (2)..(4)..(38)..(39): Xaa is C or S
  MOD_RES (16)..(17)..(18)..(19)..(20): Xaa is A or G
  MOD_RES (21)..(22)..(23)..(24): Xaa is A or G or is absent

SEQ ID NO: 37668 - protein, 32 aa, Artificial Sequence; identical to SEQ ID NO: 11121
  GFR-binding peptide
  MOD_RES (31)..(31): Xaa is C or S

SEQ ID NO: 37669 - protein, 38 aa, Artificial Sequence; identical to SEQ ID NO: 13055
  GFR-binding peptide
  MOD_RES (1)..(32)..(33): Xaa is C or S

SEQ ID NO: 37670 - protein, 37 aa, Artificial Sequence; identical to SEQ ID NO: 11124
  GFR-binding peptide
  MOD_RES (2)..(4)..(37): Xaa is C or S
  MOD_RES (15)..(16)..(17)..(18)..(19): Xaa is A or G
  MOD_RES (20)..(21)..(22)..(23): Xaa is A or G or is absent

SEQ ID NO: 37671 - protein, 33 aa, Artificial Sequence; identical to SEQ ID NO: 13056
  GFR-binding peptide
  MOD_RES (1)..(3): Xaa is C or S

SEQ ID NO: 37672 - protein, 37 aa, Artificial Sequence; identical to SEQ ID NO: 11126
  GFR-binding peptide
  MOD_RES (1)..(3)..(35): Xaa is C or S

SEQ ID NO: 37673 - protein, 31 aa, Artificial Sequence; identical to SEQ ID NO: 13058
  GFR-binding peptide

SEQ ID NO: 37674 - protein, 37 aa, Artificial Sequence; identical to SEQ ID NO: 11127
  GFR-binding peptide
  MOD_RES (33)..(34): Xaa is C or S
  MOD_RES (11)..(12)..(13)..(14)..(15): Xaa is A or G
  MOD_RES (16)..(17)..(18)..(19): Xaa is A or G or is absent

SEQ ID NO: 37675 - protein, 37 aa, Artificial Sequence; identical to SEQ ID NO: 5638
  GFR-binding peptide
  MOD_RES (33)..(34): Xaa is C or S
  MOD_RES (11)..(12)..(13)..(14)..(15): Xaa is A or G
  MOD_RES (16)..(17)..(18)..(19): Xaa is A or G or is absent

SEQ ID NO: 37676 - protein, 34 aa, Artificial Sequence; identical to SEQ ID NO: 13060
  GFR-binding peptide
  MOD_RES (1)..(1): Xaa is C or S
  MOD_RES (13)..(14)..(15)..(16)..(17): Xaa is A or G
  MOD_RES (18)..(19)..(20)..(21): Xaa is A or G or is absent

SEQ ID NO: 37677 - protein, 37 aa, Artificial Sequence; identical to SEQ ID NO: 11128
  GFR-binding peptide
  MOD_RES (33)..(33): Xaa is C or S
  MOD_RES (11)..(12)..(13)..(14)..(15): Xaa is A or G
  MOD_RES (16)..(17)..(18)..(19): Xaa is A or G or is absent

SEQ ID NO: 37678 - protein, 37 aa, Artificial Sequence; identical to SEQ ID NO: 13061
  GFR-binding peptide
  MOD_RES (2)..(4)..(35)..(36): Xaa is C or S

SEQ ID NO: 37679 - protein, 40 aa, Artificial Sequence; identical to SEQ ID NO: 11129
  GFR-binding peptide
  MOD_RES (2)..(4)..(38)..(39): Xaa is C or S
  MOD_RES (16)..(17)..(18)..(19)..(20): Xaa is A or G
  MOD_RES (21)..(22)..(23)..(24): Xaa is A or G or is absent

SEQ ID NO: 37680 - protein, 33 aa, Artificial Sequence; identical to SEQ ID NO: 3706
  GFR-binding peptide
  MOD_RES (32)..(33): Xaa is C or S

SEQ ID NO: 37681 - protein, 41 aa, Artificial Sequence; identical to SEQ ID NO: 13062
  GFR-binding peptide
  MOD_RES (1)..(3)..(37): Xaa is C or S
  MOD_RES (15)..(16)..(17)..(18)..(19): Xaa is A or G
  MOD_RES (20)..(21)..(22)..(23): Xaa is A or G or is absent

SEQ ID NO: 37682 - protein, 36 aa, Artificial Sequence; identical to SEQ ID NO: 13063
  GFR-binding peptide
  MOD_RES (1)..(34)..(35): Xaa is C or S
  MOD_RES (12)..(13)..(14)..(15)..(16): Xaa is A or G
  MOD_RES (17)..(18)..(19)..(20): Xaa is A or G or is absent

SEQ ID NO: 37683 - protein, 37 aa, Artificial Sequence; identical to SEQ ID NO: 11133
  GFR-binding peptide
  MOD_RES (2)..(33)..(34): Xaa is C or S

SEQ ID NO: 37684 - protein, 35 aa, Artificial Sequence; identical to SEQ ID NO: 13064
  GFR-binding peptide
  MOD_RES (31)..(32): Xaa is C or S

SEQ ID NO: 37685 - protein, 36 aa, Artificial Sequence; identical to SEQ ID NO: 11134
  GFR-binding peptide
  MOD_RES (33)..(34): Xaa is C or S
  MOD_RES (11)..(12)..(13)..(14)..(15): Xaa is A or G
  MOD_RES (16)..(17)..(18)..(19): Xaa is A or G or is absent

SEQ ID NO: 37686 - protein, 40 aa, Artificial Sequence; identical to SEQ ID NO: 13065
  GFR-binding peptide
  MOD_RES (2)..(4)..(36)..(37): Xaa is C or S

SEQ ID NO: 37687 - protein, 40 aa, Artificial Sequence; identical to SEQ ID NO: 5640
  GFR-binding peptide
  MOD_RES (1)..(3)..(35)..(36): Xaa is C or S

SEQ ID NO: 37688 - protein, 33 aa, Artificial Sequence; identical to SEQ ID NO: 13067
  GFR-binding peptide
  MOD_RES (1)..(1): Xaa is C or S
  MOD_RES (12)..(13)..(14)..(15)..(16): Xaa is A or G
  MOD_RES (17)..(18)..(19)..(20): Xaa is A or G or is absent

SEQ ID NO: 37689 - protein, 35 aa, Artificial Sequence; identical to SEQ ID NO: 13068
  GFR-binding peptide
  MOD_RES (34)..(35): Xaa is C or S
  MOD_RES (12)..(13)..(14)..(15)..(16): Xaa is A or G
  MOD_RES (17)..(18)..(19)..(20): Xaa is A or G or is absent

SEQ ID NO: 37690 - protein, 34 aa, Artificial Sequence; identical to SEQ ID NO: 13069
  GFR-binding peptide
  MOD_RES (1)..(1): Xaa is C or S
  MOD_RES (13)..(14)..(15)..(16)..(17): Xaa is A or G
  MOD_RES (18)..(19)..(20)..(21): Xaa is A or G or is absent

SEQ ID NO: 37691 - protein, 40 aa, Artificial Sequence; identical to SEQ ID NO: 11135
  GFR-binding peptide
  MOD_RES (34)..(35): Xaa is C or S
  MOD_RES (12)..(13)..(14)..(15)..(16): Xaa is A or G
  MOD_RES (17)..(18)..(19)..(20): Xaa is A or G or is absent

SEQ ID NO: 37692 - protein, 37 aa, Artificial Sequence; identical to SEQ ID NO: 11136
  GFR-binding peptide
  MOD_RES (2)..(36)..(37): Xaa is C or S
  MOD_RES (14)..(15)..(16)..(17)..(18): Xaa is A or G
  MOD_RES (19)..(20)..(21)..(22): Xaa is A or G or is absent

SEQ ID NO: 37693 - protein, 34 aa, Artificial Sequence; identical to SEQ ID NO: 13070
  GFR-binding peptide
  MOD_RES (1)..(1): Xaa is C or S
  MOD_RES (13)..(14)..(15)..(16)..(17): Xaa is A or G
  MOD_RES (18)..(19)..(20)..(21): Xaa is A or G or is absent

SEQ ID NO: 37694 - protein, 37 aa, Artificial Sequence; identical to SEQ ID NO: 3710
  GFR-binding peptide
  MOD_RES (2)..(4)..(36)..(37): Xaa is C or S

SEQ ID NO: 37695 - protein, 37 aa, Artificial Sequence; identical to SEQ ID NO: 13071
  GFR-binding peptide
  MOD_RES (2)..(33)..(34): Xaa is C or S

SEQ ID NO: 37696 - protein, 31 aa, Artificial Sequence; identical to SEQ ID NO: 13072
  GFR-binding peptide
  MOD_RES (31)..(31): Xaa is C or S

SEQ ID NO: 37697 - protein, 39 aa, Artificial Sequence; identical to SEQ ID NO: 5645
  GFR-binding peptide
  MOD_RES (33)..(34): Xaa is C or S
  MOD_RES (11)..(12)..(13)..(14)..(15): Xaa is A or G
  MOD_RES (16)..(17)..(18)..(19): Xaa is A or G or is absent

SEQ ID NO: 37698 - protein, 41 aa, Artificial Sequence; identical to SEQ ID NO: 11139
  GFR-binding peptide
  MOD_RES (1)..(35)..(36): Xaa is C or S
  MOD_RES (13)..(14)..(15)..(16)..(17): Xaa is A or G
  MOD_RES (18)..(19)..(20)..(21): Xaa is A or G or is absent

SEQ ID NO: 37699 - protein, 44 aa, Artificial Sequence; identical to SEQ ID NO: 5647
  GFR-binding peptide
  MOD_RES (2)..(4)..(38)..(39): Xaa is C or S
  MOD_RES (16)..(17)..(18)..(19)..(20): Xaa is A or G
  MOD_RES (21)..(22)..(23)..(24): Xaa is A or G or is absent

SEQ ID NO: 37700 - protein, 35 aa, Artificial Sequence; identical to SEQ ID NO: 13076
  GFR-binding peptide
  MOD_RES (2)..(4): Xaa is C or S

SEQ ID NO: 37701 - protein, 34 aa, Artificial Sequence; identical to SEQ ID NO: 13077
  GFR-binding peptide
  MOD_RES (32)..(33): Xaa is C or S

SEQ ID NO: 37702 - protein, 40 aa, Artificial Sequence; identical to SEQ ID NO: 13078
  GFR-binding peptide
  MOD_RES (1)..(3)..(35)..(36): Xaa is C or S

SEQ ID NO: 37703 - protein, 38 aa, Artificial Sequence; identical to SEQ ID NO: 13079
  GFR-binding peptide
  MOD_RES (1)..(35)..(36): Xaa is C or S
  MOD_RES (13)..(14)..(15)..(16)..(17): Xaa is A or G
  MOD_RES (18)..(19)..(20)..(21): Xaa is A or G or is absent

SEQ ID NO: 37704 - protein, 36 aa, Artificial Sequence; identical to SEQ ID NO: 3716
  GFR-binding peptide
  MOD_RES (31)..(32): Xaa is C or S

SEQ ID NO: 37705 - protein, 40 aa, Artificial Sequence; identical to SEQ ID NO: 13080
  GFR-binding peptide
  MOD_RES (1)..(3)..(35)..(36): Xaa is C or S

SEQ ID NO: 37706 - protein, 39 aa, Artificial Sequence; identical to SEQ ID NO: 11141
  GFR-binding peptide
  MOD_RES (2)..(36)..(37): Xaa is C or S
  MOD_RES (14)..(15)..(16)..(17)..(18): Xaa is A or G
  MOD_RES (19)..(20)..(21)..(22): Xaa is A or G or is absent

SEQ ID NO: 37707 - protein, 39 aa, Artificial Sequence; identical to SEQ ID NO: 11142
  GFR-binding peptide
  MOD_RES (2)..(4)..(35)..(36): Xaa is C or S

SEQ ID NO: 37708 - protein, 34 aa, Artificial Sequence; identical to SEQ ID NO: 13082
  GFR-binding peptide
  MOD_RES (2)..(33)..(34): Xaa is C or S

SEQ ID NO: 37709 - protein, 40 aa, Artificial Sequence; identical to SEQ ID NO: 11143
  GFR-binding peptide
  MOD_RES (1)..(3)..(35)..(36): Xaa is C or S

SEQ ID NO: 37710 - protein, 42 aa, Artificial Sequence; identical to SEQ ID NO: 5655
  GFR-binding peptide
  MOD_RES (1)..(3)..(36)..(37): Xaa is C or S
  MOD_RES (14)..(15)..(16)..(17)..(18): Xaa is A or G
  MOD_RES (19)..(20)..(21)..(22): Xaa is A or G or is absent

SEQ ID NO: 37711 - protein, 43 aa, Artificial Sequence; identical to SEQ ID NO: 11144
  GFR-binding peptide
  MOD_RES (1)..(3)..(37)..(38): Xaa is C or S
  MOD_RES (15)..(16)..(17)..(18)..(19): Xaa is A or G
  MOD_RES (20)..(21)..(22)..(23): Xaa is A or G or is absent

SEQ ID NO: 37712 - protein, 33 aa, Artificial Sequence; identical to SEQ ID NO: 11145
  GFR-binding peptide
  MOD_RES (12)..(13)..(14)..(15)..(16): Xaa is A or G
  MOD_RES (17)..(18)..(19)..(20): Xaa is A or G or is absent

SEQ ID NO: 37713 - protein, 32 aa, Artificial Sequence; identical to SEQ ID NO: 11146
  GFR-binding peptide
  MOD_RES (31)..(32): Xaa is C or S

SEQ ID NO: 37714 - protein, 39 aa, Artificial Sequence; identical to SEQ ID NO: 13084
  GFR-binding peptide
  MOD_RES (33)..(33): Xaa is C or S
  MOD_RES (11)..(12)..(13)..(14)..(15): Xaa is A or G
  MOD_RES (16)..(17)..(18)..(19): Xaa is A or G or is absent

SEQ ID NO: 37715 - protein, 36 aa, Artificial Sequence; identical to SEQ ID NO: 13085
  GFR-binding peptide
  MOD_RES (1)..(35)..(36): Xaa is C or S
  MOD_RES (13)..(14)..(15)..(16)..(17): Xaa is A or G
  MOD_RES (18)..(19)..(20)..(21): Xaa is A or G or is absent

SEQ ID NO: 37716 - protein, 42 aa, Artificial Sequence; identical to SEQ ID NO: 11147
  GFR-binding peptide
  MOD_RES (2)..(4)..(38)..(39): Xaa is C or S
  MOD_RES (16)..(17)..(18)..(19)..(20): Xaa is A or G
  MOD_RES (21)..(22)..(23)..(24): Xaa is A or G or is absent

SEQ ID NO: 37717 - protein, 34 aa, Artificial Sequence; identical to SEQ ID NO: 11148
  GFR-binding peptide
  MOD_RES (32)..(33): Xaa is C or S

SEQ ID NO: 37718 - protein, 37 aa, Artificial Sequence; identical to SEQ ID NO: 13086
  GFR-binding peptide
  MOD_RES (1)..(34)..(35): Xaa is C or S
  MOD_RES (12)..(13)..(14)..(15)..(16): Xaa is A or G
  MOD_RES (17)..(18)..(19)..(20): Xaa is A or G or is absent

SEQ ID NO: 37719 - protein, 40 aa, Artificial Sequence; identical to SEQ ID NO: 11149
  GFR-binding peptide
  MOD_RES (2)..(34): Xaa is C or S

SEQ ID NO: 37720 - protein, 38 aa, Artificial Sequence; identical to SEQ ID NO: 11150
  GFR-binding peptide
  MOD_RES (1)..(32)..(33): Xaa is C or S

SEQ ID NO: 37721 - protein, 41 aa, Artificial Sequence; identical to SEQ ID NO: 11151
  GFR-binding peptide
  MOD_RES (1)..(3)..(35)..(36): Xaa is C or S

SEQ ID NO: 37722 - protein, 43 aa, Artificial Sequence; identical to SEQ ID NO: 5656
  GFR-binding peptide
  MOD_RES (2)..(4)..(37)..(38): Xaa is C or S
  MOD_RES (15)..(16)..(17)..(18)..(19): Xaa is A or G
  MOD_RES (20)..(21)..(22)..(23): Xaa is A or G or is absent

SEQ ID NO: 37723 - protein, 35 aa, Artificial Sequence; identical to SEQ ID NO: 11152
  GFR-binding peptide
  MOD_RES (1)..(3)..(35): Xaa is C or S

SEQ ID NO: 37724 - protein, 33 aa, Artificial Sequence; identical to SEQ ID NO: 5657
  GFR-binding peptide
  MOD_RES (1)..(3): Xaa is C or S

SEQ ID NO: 37725 - protein, 37 aa, Artificial Sequence; identical to SEQ ID NO: 13089
  GFR-binding peptide
  MOD_RES (1)..(35): Xaa is C or S
  MOD_RES (13)..(14)..(15)..(16)..(17): Xaa is A or G
  MOD_RES (18)..(19)..(20)..(21): Xaa is A or G or is absent

SEQ ID NO: 37726 - protein, 38 aa, Artificial Sequence; identical to SEQ ID NO: 13091
  GFR-binding peptide
  MOD_RES (33)..(34): Xaa is C or S
  MOD_RES (11)..(12)..(13)..(14)..(15): Xaa is A or G
  MOD_RES (16)..(17)..(18)..(19): Xaa is A or G or is absent

SEQ ID NO: 37727 - protein, 37 aa, Artificial Sequence; identical to SEQ ID NO: 13092
  GFR-binding peptide
  MOD_RES (32)..(33): Xaa is C or S

SEQ ID NO: 37728 - protein, 34 aa, Artificial Sequence; identical to SEQ ID NO: 11154
  GFR-binding peptide
  MOD_RES (2)..(4): Xaa is C or S

SEQ ID NO: 37729 - protein, 40 aa, Artificial Sequence; identical to SEQ ID NO: 11155
  GFR-binding peptide
  MOD_RES (1)..(3)..(36)..(37): Xaa is C or S
  MOD_RES (14)..(15)..(16)..(17)..(18): Xaa is A or G
  MOD_RES (19)..(20)..(21)..(22): Xaa is A or G or is absent

SEQ ID NO: 37730 - protein, 38 aa, Artificial Sequence; identical to SEQ ID NO: 11156
  GFR-binding peptide
  MOD_RES (1)..(3)..(37): Xaa is C or S
  MOD_RES (15)..(16)..(17)..(18)..(19): Xaa is A or G
  MOD_RES (20)..(21)..(22)..(23): Xaa is A or G or is absent

SEQ ID NO: 37731 - protein, 34 aa, Artificial Sequence; identical to SEQ ID NO: 13093
  GFR-binding peptide
  MOD_RES (1)..(33)..(34): Xaa is C or S

SEQ ID NO: 37732 - protein, 41 aa, Artificial Sequence; identical to SEQ ID NO: 13094
  GFR-binding peptide
  MOD_RES (2)..(4)..(36): Xaa is C or S

SEQ ID NO: 37733 - protein, 39 aa, Artificial Sequence; identical to SEQ ID NO: 11157
  GFR-binding peptide
  MOD_RES (2)..(33)..(34): Xaa is C or S

SEQ ID NO: 37734 - protein, 39 aa, Artificial Sequence; identical to SEQ ID NO: 13095
  GFR-binding peptide
  MOD_RES (2)..(34)..(35): Xaa is C or S

SEQ ID NO: 37735 - protein, 40 aa, Artificial Sequence; identical to SEQ ID NO: 11158
  GFR-binding peptide
  MOD_RES (1)..(3)..(37)..(38): Xaa is C or S
  MOD_RES (15)..(16)..(17)..(18)..(19): Xaa is A or G
  MOD_RES (20)..(21)..(22)..(23): Xaa is A or G or is absent

SEQ ID NO: 37736 - protein, 39 aa, Artificial Sequence; identical to SEQ ID NO: 11159
  GFR-binding peptide
  MOD_RES (34)..(35): Xaa is C or S
  MOD_RES (12)..(13)..(14)..(15)..(16): Xaa is A or G
  MOD_RES (17)..(18)..(19)..(20): Xaa is A or G or is absent

SEQ ID NO: 37737 - protein, 41 aa, Artificial Sequence; identical to SEQ ID NO: 13097
  GFR-binding peptide
  MOD_RES (1)..(35)..(36): Xaa is C or S
  MOD_RES (13)..(14)..(15)..(16)..(17): Xaa is A or G
  MOD_RES (18)..(19)..(20)..(21): Xaa is A or G or is absent

SEQ ID NO: 37738 - protein, 39 aa, Artificial Sequence; identical to SEQ ID NO: 13098
  GFR-binding peptide
  MOD_RES (2)..(34)..(35): Xaa is C or S

SEQ ID NO: 37739 - protein, 38 aa, Artificial Sequence; identical to SEQ ID NO: 13099
  GFR-binding peptide
  MOD_RES (2)..(4)..(36)..(37): Xaa is C or S

SEQ ID NO: 37740 - protein, 37 aa, Artificial Sequence
  GFR-binding peptide
  MOD_RES (33)..(34): Xaa is C or S
  MOD_RES (11)..(12)..(13)..(14)..(15): Xaa is A or G
  MOD_RES (16)..(17)..(18)..(19): Xaa is A or G or is absent
SKVIMNSLQEXXXXXXXXXYYLITLPELDQSVXXPSA

SEQ ID NO: 37741 - protein, 38 aa, Artificial Sequence; identical to SEQ ID NO: 13101
  GFR-binding peptide
  MOD_RES (1)..(3)..(37)..(38): Xaa is C or S
  MOD_RES (15)..(16)..(17)..(18)..(19): Xaa is A or G
  MOD_RES (20)..(21)..(22)..(23): Xaa is A or G or is absent

SEQ ID NO: 37742 - protein, 38 aa, Artificial Sequence; identical to SEQ ID NO: 13102
  GFR-binding peptide
  MOD_RES (33)..(34): Xaa is C or S
  MOD_RES (11)..(12)..(13)..(14)..(15): Xaa is A or G
  MOD_RES (16)..(17)..(18)..(19): Xaa is A or G or is absent

SEQ ID NO: 37743 - protein, 36 aa, Artificial Sequence; identical to SEQ ID NO: 11160
  GFR-binding peptide
  MOD_RES (1)..(3)..(35)..(36): Xaa is C or S

SEQ ID NO: 37744 - protein, 36 aa, Artificial Sequence; identical to SEQ ID NO: 3728
  GFR-binding peptide
  MOD_RES (1)..(3)..(35)..(36): Xaa is C or S

SEQ ID NO: 37745 - protein, 36 aa, Artificial Sequence; identical to SEQ ID NO: 11162
  GFR-binding peptide
  MOD_RES (2)..(34): Xaa is C or S

SEQ ID NO: 37746 - protein, 39 aa, Artificial Sequence; identical to SEQ ID NO: 11163
  GFR-binding peptide
  MOD_RES (1)..(33)..(34): Xaa is C or S

SEQ ID NO: 37747 - protein, 36 aa, Artificial Sequence; identical to SEQ ID NO: 13104
  GFR-binding peptide
  MOD_RES (31)..(32): Xaa is C or S

SEQ ID NO: 37748 - protein, 38 aa, Artificial Sequence; identical to SEQ ID NO: 3731
  GFR-binding peptide
  MOD_RES (1)..(35)..(36): Xaa is C or S
  MOD_RES (13)..(14)..(15)..(16)..(17): Xaa is A or G
  MOD_RES (18)..(19)..(20)..(21): Xaa is A or G or is absent

SEQ ID NO: 37749 - protein, 34 aa, Artificial Sequence; identical to SEQ ID NO: 13105
  GFR-binding peptide
  MOD_RES (34)..(34): Xaa is C or S
  MOD_RES (12)..(13)..(14)..(15)..(16): Xaa is A or G
  MOD_RES (17)..(18)..(19)..(20): Xaa is A or G or is absent

SEQ ID NO: 37750 - protein, 35 aa, Artificial Sequence; identical to SEQ ID NO: 11165
  GFR-binding peptide
  MOD_RES (2)..(2): Xaa is C or S
  MOD_RES (14)..(15)..(16)..(17)..(18): Xaa is A or G
  MOD_RES (19)..(20)..(21)..(22): Xaa is A or G or is absent

SEQ ID NO: 37751 - protein, 34 aa, Artificial Sequence; identical to SEQ ID NO: 13106
  GFR-binding peptide
  MOD_RES (33)..(34): Xaa is C or S
  MOD_RES (11)..(12)..(13)..(14)..(15): Xaa is A or G
  MOD_RES (16)..(17)..(18)..(19): Xaa is A or G or is absent

SEQ ID NO: 37752 - protein, 39 aa, Artificial Sequence; identical to SEQ ID NO: 3732
  GFR-binding peptide
  MOD_RES (33)..(34): Xaa is C or S
  MOD_RES (11)..(12)..(13)..(14)..(15): Xaa is A or G
  MOD_RES (16)..(17)..(18)..(19): Xaa is A or G or is absent

SEQ ID NO: 37753 - protein, 40 aa, Artificial Sequence; identical to SEQ ID NO: 13107
  GFR-binding peptide
  MOD_RES (1)..(3)..(36)..(37): Xaa is C or S
  MOD_RES (14)..(15)..(16)..(17)..(18): Xaa is A or G
  MOD_RES (19)..(20)..(21)..(22): Xaa is A or G or is absent

SEQ ID NO: 37754 - protein, 36 aa, Artificial Sequence; identical to SEQ ID NO: 5670
  GFR-binding peptide
  MOD_RES (33)..(34): Xaa is C or S
  MOD_RES (11)..(12)..(13)..(14)..(15): Xaa is A or G
  MOD_RES (16)..(17)..(18)..(19): Xaa is A or G or is absent

SEQ ID NO: 37755 - protein, 39 aa, Artificial Sequence; identical to SEQ ID NO: 11167
  GFR-binding peptide
  MOD_RES (1)..(3)..(35)..(36): Xaa is C or S

SEQ ID NO: 37756 - protein, 37 aa, Artificial Sequence; identical to SEQ ID NO: 13110
  GFR-binding peptide
  MOD_RES (2)..(4): Xaa is C or S
  MOD_RES (16)..(17)..(18)..(19)..(20): Xaa is A or G
  MOD_RES (21)..(22)..(23)..(24): Xaa is A or G or is absent

SEQ ID NO: 37757 - protein, 37 aa, Artificial Sequence; identical to SEQ ID NO: 5671
  GFR-binding peptide
  MOD_RES (1)..(34)..(35): Xaa is C or S
  MOD_RES (12)..(13)..(14)..(15)..(16): Xaa is A or G
  MOD_RES (17)..(18)..(19)..(20): Xaa is A or G or is absent

SEQ ID NO: 37758 - protein, 39 aa, Artificial Sequence; identical to SEQ ID NO: 13112
  GFR-binding peptide
  MOD_RES (2)..(36): Xaa is C or S
  MOD_RES (14)..(15)..(16)..(17)..(18): Xaa is A or G
  MOD_RES (19)..(20)..(21)..(22): Xaa is A or G or is absent

SEQ ID NO: 37759 - protein, 39 aa, Artificial Sequence; identical to SEQ ID NO: 3738
  GFR-binding peptide
  MOD_RES (34)..(35): Xaa is C or S
  MOD_RES (12)..(13)..(14)..(15)..(16): Xaa is A or G
  MOD_RES (17)..(18)..(19)..(20): Xaa is A or G or is absent

SEQ ID NO: 37760 - protein, 37 aa, Artificial Sequence; identical to SEQ ID NO: 11169
  GFR-binding peptide
  MOD_RES (2)..(4): Xaa is C or S
  MOD_RES (16)..(17)..(18)..(19)..(20): Xaa is A or G
  MOD_RES (21)..(22)..(23)..(24): Xaa is A or G or is absent

SEQ ID NO: 37761 - protein, 38 aa, Artificial Sequence; identical to SEQ ID NO: 11170
  GFR-binding peptide
  MOD_RES (34)..(35): Xaa is C or S
  MOD_RES (12)..(13)..(14)..(15)..(16): Xaa is A or G
  MOD_RES (17)..(18)..(19)..(20): Xaa is A or G or is absent

SEQ ID NO: 37762 - protein, 42 aa, Artificial Sequence; identical to SEQ ID NO: 11171
  GFR-binding peptide
  MOD_RES (1)..(3)..(37)..(38): Xaa is C or S
  MOD_RES (15)..(16)..(17)..(18)..(19): Xaa is A or G
  MOD_RES (20)..(21)..(22)..(23): Xaa is A or G or is absent

SEQ ID NO: 37763 - protein, 33 aa, Artificial Sequence; identical to SEQ ID NO: 11172
  GFR-binding peptide
  MOD_RES (1)..(3): Xaa is C or S

SEQ ID NO: 37764 - protein, 35 aa, Artificial Sequence; identical to SEQ ID NO: 11173
  GFR-binding peptide
  MOD_RES (1)..(3)..(35): Xaa is C or S

SEQ ID NO: 37765 - protein, 41 aa, Artificial Sequence; identical to SEQ ID NO: 13114
  GFR-binding peptide
  MOD_RES (1)..(3)..(37)..(38): Xaa is C or S
  MOD_RES (15)..(16)..(17)..(18)..(19): Xaa is A or G
  MOD_RES (20)..(21)..(22)..(23): Xaa is A or G or is absent

SEQ ID NO: 37766 - protein, 37 aa, Artificial Sequence; identical to SEQ ID NO: 11174
  GFR-binding peptide
  MOD_RES (1)..(3)..(35): Xaa is C or S

SEQ ID NO: 37767 - protein, 42 aa, Artificial Sequence; identical to SEQ ID NO: 11175
  GFR-binding peptide
  MOD_RES (2)..(4)..(37)..(38): Xaa is C or S
  MOD_RES (15)..(16)..(17)..(18)..(19): Xaa is A or G
  MOD_RES (20)..(21)..(22)..(23): Xaa is A or G or is absent

SEQ ID NO: 37768 - protein, 35 aa, Artificial Sequence; identical to SEQ ID NO: 13117
  GFR-binding peptide
  MOD_RES (2)..(4): Xaa is C or S

SEQ ID NO: 37769 - protein, 41 aa, Artificial Sequence; identical to SEQ ID NO: 13118
  GFR-binding peptide
  MOD_RES (1)..(35): Xaa is C or S
  MOD_RES (13)..(14)..(15)..(16)..(17): Xaa is A or G
  MOD_RES (18)..(19)..(20)..(21): Xaa is A or G or is absent

SEQ ID NO: 37770 - protein, 35 aa, Artificial Sequence; identical to SEQ ID NO: 5679
  GFR-binding peptide
  MOD_RES (1)..(3)..(35): Xaa is C or S

SEQ ID NO: 37771 - protein, 34 aa, Artificial Sequence; identical to SEQ ID NO: 11176
  GFR-binding peptide
  MOD_RES (1)..(1): Xaa is C or S
  MOD_RES (13)..(14)..(15)..(16)..(17): Xaa is A or G
  MOD_RES (18)..(19)..(20)..(21): Xaa is A or G or is absent

SEQ ID NO: 37772 - protein, 43 aa, Artificial Sequence; identical to SEQ ID NO: 11177
  GFR-binding peptide
  MOD_RES (2)..(4)..(38)..(39): Xaa is C or S
  MOD_RES (16)..(17)..(18)..(19)..(20): Xaa is A or G
  MOD_RES (21)..(22)..(23)..(24): Xaa is A or G or is absent

SEQ ID NO: 37773 - protein, 37 aa, Artificial Sequence; identical to SEQ ID NO: 5682
  GFR-binding peptide
  MOD_RES (1)..(3)..(36)..(37): Xaa is C or S
  MOD_RES (14)..(15)..(16)..(17)..(18): Xaa is A or G
  MOD_RES (19)..(20)..(21)..(22): Xaa is A or G or is absent

SEQ ID NO: 37774 - protein, 35 aa, Artificial Sequence; identical to SEQ ID NO: 13121
  GFR-binding peptide
  MOD_RES (1)..(3): Xaa is C or S
  MOD_RES (14)..(15)..(16)..(17)..(18): Xaa is A or G
  MOD_RES (19)..(20)..(21)..(22): Xaa is A or G or is absent

SEQ ID NO: 37775 - protein, 37 aa, Artificial Sequence; identical to SEQ ID NO: 5683
  GFR-binding peptide
  MOD_RES (2)..(34)..(35): Xaa is C or S

SEQ ID NO: 37776 - protein, 35 aa, Artificial Sequence; identical to SEQ ID NO: 13123
  GFR-binding peptide
  MOD_RES (33)..(34): Xaa is C or S
  MOD_RES (11)..(12)..(13)..(14)..(15): Xaa is A or G
  MOD_RES (16)..(17)..(18)..(19): Xaa is A or G or is absent

SEQ ID NO: 37777 - protein, 32 aa, Artificial Sequence; identical to SEQ ID NO: 13124
  GFR-binding peptide
  MOD_RES (1)..(1): Xaa is C or S

SEQ ID NO: 37778 - protein, 37 aa, Artificial Sequence; identical to SEQ ID NO: 11179
  GFR-binding peptide
  MOD_RES (2)..(35)..(36): Xaa is C or S
  MOD_RES (13)..(14)..(15)..(16)..(17): Xaa is A or G
  MOD_RES (18)..(19)..(20)..(21): Xaa is A or G or is absent

SEQ ID NO: 37779 - protein, 42 aa, Artificial Sequence; identical to SEQ ID NO: 11180
  GFR-binding peptide
  MOD_RES (1)..(3)..(37)..(38): Xaa is C or S
  MOD_RES (15)..(16)..(17)..(18)..(19): Xaa is A or G
  MOD_RES (20)..(21)..(22)..(23): Xaa is A or G or is absent

SEQ ID NO: 37780 - protein, 36 aa, Artificial Sequence; identical to SEQ ID NO: 5685
  GFR-binding peptide
  MOD_RES (1)..(3): Xaa is C or S
  MOD_RES (15)..(16)..(17)..(18)..(19): Xaa is A or G
  MOD_RES (20)..(21)..(22)..(23): Xaa is A or G or is absent

SEQ ID NO: 37781 - protein, 37 aa, Artificial Sequence; identical to SEQ ID NO: 3749
  GFR-binding peptide
  MOD_RES (2)..(4)..(37): Xaa is C or S
  MOD_RES (15)..(16)..(17)..(18)..(19): Xaa is A or G
  MOD_RES (20)..(21)..(22)..(23): Xaa is A or G or is absent

SEQ ID NO: 37782 - protein, 35 aa, Artificial Sequence; identical to SEQ ID NO: 5688
  GFR-binding peptide
  MOD_RES (1)..(32)..(33): Xaa is C or S

SEQ ID NO: 37783 - protein, 38 aa, Artificial Sequence; identical to SEQ ID NO: 13128
  GFR-binding peptide
  MOD_RES (33)..(34): Xaa is C or S
  MOD_RES (11)..(12)..(13)..(14)..(15): Xaa is A or G
  MOD_RES (16)..(17)..(18)..(19): Xaa is A or G or is absent

SEQ ID NO: 37784 - protein, 39 aa, Artificial Sequence; identical to SEQ ID NO: 13129
  GFR-binding peptide
  MOD_RES (34)..(35): Xaa is C or S
  MOD_RES (12)..(13)..(14)..(15)..(16): Xaa is A or G
  MOD_RES (17)..(18)..(19)..(20): Xaa is A or G or is absent

SEQ ID NO: 37785 - protein, 39 aa, Artificial Sequence; identical to SEQ ID NO: 3750
  GFR-binding peptide
  MOD_RES (1)..(3)..(34)..(35): Xaa is C or S

SEQ ID NO: 37786 - protein, 40 aa, Artificial Sequence; identical to SEQ ID NO: 11183
  GFR-binding peptide
  MOD_RES (1)..(3)..(37)..(38): Xaa is C or S
  MOD_RES (15)..(16)..(17)..(18)..(19): Xaa is A or G
  MOD_RES (20)..(21)..(22)..(23): Xaa is A or G or is absent

SEQ ID NO: 37787 - protein, 36 aa, Artificial Sequence; identical to SEQ ID NO: 11184
  GFR-binding peptide
  MOD_RES (2)..(4)..(36): Xaa is C or S

SEQ ID NO: 37788 - protein, 35 aa, Artificial Sequence; identical to SEQ ID NO: 5691
  GFR-binding peptide
  MOD_RES (2)..(33)..(34): Xaa is C or S

SEQ ID NO: 37789 - protein, 37 aa, Artificial Sequence; identical to SEQ ID NO: 13132
  GFR-binding peptide
  MOD_RES (31)..(32): Xaa is C or S

SEQ ID NO: 37790 - protein, 40 aa, Artificial Sequence; identical to SEQ ID NO: 11186
  GFR-binding peptide
  MOD_RES (1)..(3)..(37)..(38): Xaa is C or S
  MOD_RES (15)..(16)..(17)..(18)..(19): Xaa is A or G
  MOD_RES (20)..(21)..(22)..(23): Xaa is A or G or is absent

SEQ ID NO: 37791 - protein, 38 aa, Artificial Sequence; identical to SEQ ID NO: 3755
  GFR-binding peptide
  MOD_RES (2)..(36)..(37): Xaa is C or S
  MOD_RES (14)..(15)..(16)..(17)..(18): Xaa is A or G
  MOD_RES (19)..(20)..(21)..(22): Xaa is A or G or is absent

SEQ ID NO: 37792 - protein, 35 aa, Artificial Sequence; identical to SEQ ID NO: 13134
  GFR-binding peptide
  MOD_RES (1)..(35): Xaa is C or S
  MOD_RES (13)..(14)..(15)..(16)..(17): Xaa is A or G
  MOD_RES (18)..(19)..(20)..(21): Xaa is A or G or is absent

SEQ ID NO: 37793 - protein, 38 aa, Artificial Sequence; identical to SEQ ID NO: 11189
  GFR-binding peptide
  MOD_RES (1)..(3)..(35)..(36): Xaa is C or S

SEQ ID NO: 37794 - protein, 37 aa, Artificial Sequence; identical to SEQ ID NO: 11190
  GFR-binding peptide
  MOD_RES (31)..(32): Xaa is C or S

SEQ ID NO: 37795 - protein, 33 aa, Artificial Sequence; identical to SEQ ID NO: 13135
  GFR-binding peptide
  MOD_RES (33)..(33): Xaa is C or S
  MOD_RES (11)..(12)..(13)..(14)..(15): Xaa is A or G
  MOD_RES (16)..(17)..(18)..(19): Xaa is A or G or is absent

SEQ ID NO: 37796 - protein, 38 aa, Artificial Sequence; identical to SEQ ID NO: 3758
  GFR-binding peptide
  MOD_RES (2)..(4)..(38): Xaa is C or S
  MOD_RES (16)..(17)..(18)..(19)..(20): Xaa is A or G
  MOD_RES (21)..(22)..(23)..(24): Xaa is A or G or is absent

SEQ ID NO: 37797 - protein, 37 aa, Artificial Sequence; identical to SEQ ID NO: 3761
  GFR-binding peptide
  MOD_RES (31)..(32): Xaa is C or S

SEQ ID NO: 37798 - protein, 37 aa, Artificial Sequence; identical to SEQ ID NO: 11195
  GFR-binding peptide
  MOD_RES (1)..(3)..(36)..(37): Xaa is C or S
  MOD_RES (14)..(15)..(16)..(17)..(18): Xaa is A or G
  MOD_RES (19)..(20)..(21)..(22): Xaa is A or G or is absent

SEQ ID NO: 37799 - protein, 41 aa, Artificial Sequence; identical to SEQ ID NO: 3765
  GFR-binding peptide
  MOD_RES (2)..(36)..(37): Xaa is C or S
  MOD_RES (14)..(15)..(16)..(17)..(18): Xaa is A or G
  MOD_RES (19)..(20)..(21)..(22): Xaa is A or G or is absent

SEQ ID NO: 37800 - protein, 31 aa, Artificial Sequence; identical to SEQ ID NO: 5701
  GFR-binding peptide

SEQ ID NO: 37801 - protein, 33 aa, Artificial Sequence
  GFR-binding peptide
  MOD_RES (31)..(32): Xaa is C or S
SKVIMNSLQEIKPTKGIYYLITLPELDQSVXXP

SEQ ID NO: 37802 - protein, 38 aa, Artificial Sequence; identical to SEQ ID NO: 13139
  GFR-binding peptide
  MOD_RES (2)..(36)..(37): Xaa is C or S
  MOD_RES (14)..(15)..(16)..(17)..(18): Xaa is A or G
  MOD_RES (19)..(20)..(21)..(22): Xaa is A or G or is absent

SEQ ID NO: 37803 - protein, 37 aa, Artificial Sequence; identical to SEQ ID NO: 3768
  GFR-binding peptide
  MOD_RES (33)..(34): Xaa is C or S
  MOD_RES (11)..(12)..(13)..(14)..(15): Xaa is A or G
  MOD_RES (16)..(17)..(18)..(19): Xaa is A or G or is absent

SEQ ID NO: 37804 - protein, 41 aa, Artificial Sequence; identical to SEQ ID NO: 13140
  GFR-binding peptide
  MOD_RES (1)..(3)..(35)..(36): Xaa is C or S

SEQ ID NO: 37805 - protein, 41 aa, Artificial Sequence; identical to SEQ ID NO: 11200
  GFR-binding peptide
  MOD_RES (1)..(35)..(36): Xaa is C or S
  MOD_RES (13)..(14)..(15)..(16)..(17): Xaa is A or G
  MOD_RES (18)..(19)..(20)..(21): Xaa is A or G or is absent

SEQ ID NO: 37806 - protein, 40 aa, Artificial Sequence; identical to SEQ ID NO: 13141
  GFR-binding peptide
  MOD_RES (1)..(35)..(36): Xaa is C or S
  MOD_RES (13)..(14)..(15)..(16)..(17): Xaa is A or G
  MOD_RES (18)..(19)..(20)..(21): Xaa is A or G or is absent

SEQ ID NO: 37807 - protein, 40 aa, Artificial Sequence; identical to SEQ ID NO: 13142
  GFR-binding peptide
  MOD_RES (1)..(3)..(35)..(36): Xaa is C or S

SEQ ID NO: 37808 - protein, 33 aa, Artificial Sequence; identical to SEQ ID NO: 11201
  GFR-binding peptide
  MOD_RES (33)..(33): Xaa is C or S
  MOD_RES (11)..(12)..(13)..(14)..(15): Xaa is A or G
  MOD_RES (16)..(17)..(18)..(19): Xaa is A or G or is absent

SEQ ID NO: 37809 - protein, 38 aa, Artificial Sequence; identical to SEQ ID NO: 11202
  GFR-binding peptide
  MOD_RES (33)..(34): Xaa is C or S
  MOD_RES (11)..(12)..(13)..(14)..(15): Xaa is A or G
  MOD_RES (16)..(17)..(18)..(19): Xaa is A or G or is absent

SEQ ID NO: 37810 - protein, 32 aa, Artificial Sequence; identical to SEQ ID NO: 11203
  GFR-binding peptide
  MOD_RES (31)..(32): Xaa is C or S

SEQ ID NO: 37811 - protein, 42 aa, Artificial Sequence; identical to SEQ ID NO: 11204
  GFR-binding peptide
  MOD_RES (2)..(4)..(38): Xaa is C or S
  MOD_RES (16)..(17)..(18)..(19)..(20): Xaa is A or G
  MOD_RES (21)..(22)..(23)..(24): Xaa is A or G or is absent

SEQ ID NO: 37812 - protein, 35 aa, Artificial Sequence; identical to SEQ ID NO: 11205
  GFR-binding peptide
  MOD_RES (2)..(35): Xaa is C or S
  MOD_RES (13)..(14)..(15)..(16)..(17): Xaa is A or G
  MOD_RES (18)..(19)..(20)..(21): Xaa is A or G or is absent

SEQ ID NO: 37813 - protein, 39 aa, Artificial Sequence; identical to SEQ ID NO: 13143
  GFR-binding peptide
  MOD_RES (2)..(4)..(36)..(37): Xaa is C or S

SEQ ID NO: 37814 - protein, 37 aa, Artificial Sequence; identical to SEQ ID NO: 11206
  GFR-binding peptide
  MOD_RES (2)..(36)..(37): Xaa is C or S
  MOD_RES (14)..(15)..(16)..(17)..(18): Xaa is A or G
  MOD_RES (19)..(20)..(21)..(22): Xaa is A or G or is absent

SEQ ID NO: 37815 - protein, 36 aa, Artificial Sequence; identical to SEQ ID NO: 11210
  GFR-binding peptide
  MOD_RES (2)..(34)..(35): Xaa is C or S

SEQ ID NO: 37816 - protein, 33 aa, Artificial Sequence; identical to SEQ ID NO: 13147
  GFR-binding peptide
  MOD_RES (31)..(32): Xaa is C or S

SEQ ID NO: 37817 - protein, 38 aa, Artificial Sequence; identical to SEQ ID NO: 11211
  GFR-binding peptide
  MOD_RES (1)..(32)..(33): Xaa is C or S

SEQ ID NO: 37818 - protein, 35 aa, Artificial Sequence; identical to SEQ ID NO: 11212
  GFR-binding peptide
  MOD_RES (2)..(4): Xaa is C or S

SEQ ID NO: 37819 - protein, 39 aa, Artificial Sequence; identical to SEQ ID NO: 5712
  GFR-binding peptide
  MOD_RES (2)..(34)..(35): Xaa is C or S

SEQ ID NO: 37820 - protein, 32 aa, Artificial Sequence
  GFR-binding peptide
  MOD_RES (11)..(12)..(13)..(14)..(15): Xaa is A or G
  MOD_RES (16)..(17)..(18)..(19): Xaa is A or G or is absent
SKVIMNSLQEXXXXXXXXXYYLITLPELDQSV

SEQ ID NO: 37821 - protein, 40 aa, Artificial Sequence; identical to SEQ ID NO: 11213
  GFR-binding peptide
  MOD_RES (1)..(3)..(35)..(36): Xaa is C or S

SEQ ID NO: 37822 - protein, 36 aa, Artificial Sequence; identical to SEQ ID NO: 3786
  GFR-binding peptide
  MOD_RES (1)..(3): Xaa is C or S
  MOD_RES (15)..(16)..(17)..(18)..(19): Xaa is A or G
  MOD_RES (20)..(21)..(22)..(23): Xaa is A or G or is absent

SEQ ID NO: 37823 - protein, 40 aa, Artificial Sequence; identical to SEQ ID NO: 13150
  GFR-binding peptide
  MOD_RES (1)..(3)..(35)..(36): Xaa is C or S

SEQ ID NO: 37824 - protein, 40 aa, Artificial Sequence; identical to SEQ ID NO: 11215
  GFR-binding peptide
  MOD_RES (1)..(35)..(36): Xaa is C or S
  MOD_RES (13)..(14)..(15)..(16)..(17): Xaa is A or G
  MOD_RES (18)..(19)..(20)..(21): Xaa is A or G or is absent

SEQ ID NO: 37825 - protein, 39 aa, Artificial Sequence; identical to SEQ ID NO: 13151
  GFR-binding peptide
  MOD_RES (1)..(33)..(34): Xaa is C or S

SEQ ID NO: 37826 - protein, 39 aa, Artificial Sequence; identical to SEQ ID NO: 13152
  GFR-binding peptide
  MOD_RES (2)..(34)..(35): Xaa is C or S

SEQ ID NO: 37827 - protein, 39 aa, Artificial Sequence; identical to SEQ ID NO: 13153
  GFR-binding peptide
  MOD_RES (1)..(3)..(35)..(36): Xaa is C or S

SEQ ID NO: 37828 - protein, 35 aa, Artificial Sequence; identical to SEQ ID NO: 5719
  GFR-binding peptide
  MOD_RES (31)..(32): Xaa is C or S

SEQ ID NO: 37829 - protein, 36 aa, Artificial Sequence; identical to SEQ ID NO: 13155
  GFR-binding peptide
  MOD_RES (2)..(4)..(35)..(36): Xaa is C or S

SEQ ID NO: 37830 - protein, 38 aa, Artificial Sequence; identical to SEQ ID NO: 5721
  GFR-binding peptide
  MOD_RES (1)..(35)..(36): Xaa is C or S
  MOD_RES (13)..(14)..(15)..(16)..(17): Xaa is A or G
  MOD_RES (18)..(19)..(20)..(21): Xaa is A or G or is absent

SEQ ID NO: 37831 - protein, 36 aa, Artificial Sequence; identical to SEQ ID NO: 13157
  GFR-binding peptide
  MOD_RES (2)..(4)..(36): Xaa is C or S

SEQ ID NO: 37832 - protein, 33 aa, Artificial Sequence; identical to SEQ ID NO: 11218
  GFR-binding peptide
  MOD_RES (1)..(32)..(33): Xaa is C or S

SEQ ID NO: 37833 - protein, 42 aa, Artificial Sequence; identical to SEQ ID NO: 13159
  GFR-binding peptide
  MOD_RES (2)..(4)..(38)..(39): Xaa is C or S
  MOD_RES (16)..(17)..(18)..(19)..(20): Xaa is A or G
  MOD_RES (21)..(22)..(23)..(24): Xaa is A or G or is absent

SEQ ID NO: 37834 - protein, 40 aa, Artificial Sequence; identical to SEQ ID NO: 3795
  GFR-binding peptide
  MOD_RES (2)..(36)..(37): Xaa is C or S
  MOD_RES (14)..(15)..(16)..(17)..(18): Xaa is A or G
  MOD_RES (19)..(20)..(21)..(22): Xaa is A or G or is absent

SEQ ID NO: 37835 - protein, 37 aa, Artificial Sequence; identical to SEQ ID NO: 11220
  GFR-binding peptide
  MOD_RES (33)..(34): Xaa is C or S
  MOD_RES (11)..(12)..(13)..(14)..(15): Xaa is A or G
  MOD_RES (16)..(17)..(18)..(19): Xaa is A or G or is absent

SEQ ID NO: 37836 - protein, 36 aa, Artificial Sequence; identical to SEQ ID NO: 13160
  GFR-binding peptide
  MOD_RES (2)..(4)..(35)..(36): Xaa is C or S

SEQ ID NO: 37837 - protein, 35 aa, Artificial Sequence; identical to SEQ ID NO: 11222
  GFR-binding peptide
  MOD_RES (1)..(32)..(33): Xaa is C or S

SEQ ID NO: 37838 - protein, 38 aa, Artificial Sequence; identical to SEQ ID NO: 13162
  GFR-binding peptide
  MOD_RES (1)..(3)..(35)..(36): Xaa is C or S

SEQ ID NO: 37839 - protein, 37 aa, Artificial Sequence; identical to SEQ ID NO: 11223
  GFR-binding peptide
  MOD_RES (2)..(36)..(37): Xaa is C or S
  MOD_RES (14)..(15)..(16)..(17)..(18): Xaa is A or G
  MOD_RES (19)..(20)..(21)..(22): Xaa is A or G or is absent

SEQ ID NO: 37840 - protein, 39 aa, Artificial Sequence; identical to SEQ ID NO: 11224
  GFR-binding peptide
  MOD_RES (2)..(35)..(36): Xaa is C or S
  MOD_RES (13)..(14)..(15)..(16)..(17): Xaa is A or G
  MOD_RES (18)..(19)..(20)..(21): Xaa is A or G or is absent

SEQ ID NO: 37841 - protein, 38 aa, Artificial Sequence; identical to SEQ ID NO: 13163
  GFR-binding peptide
  MOD_RES (33)..(34): Xaa is C or S
  MOD_RES (11)..(12)..(13)..(14)..(15): Xaa is A or G
  MOD_RES (16)..(17)..(18)..(19): Xaa is A or G or is absent

SEQ ID NO: 37842 - protein, 39 aa, Artificial Sequence; identical to SEQ ID NO: 3801
  GFR-binding peptide
  MOD_RES (33)..(34): Xaa is C or S
  MOD_RES (11)..(12)..(13)..(14)..(15): Xaa is A or G
  MOD_RES (16)..(17)..(18)..(19): Xaa is A or G or is absent

SEQ ID NO: 37843 - protein, 39 aa, Artificial Sequence; identical to SEQ ID NO: 13164
  GFR-binding peptide
  MOD_RES (1)..(3)..(35)..(36): Xaa is C or S

SEQ ID NO: 37844 - protein, 39 aa, Artificial Sequence; identical to SEQ ID NO: 11226
  GFR-binding peptide
  MOD_RES (2)..(4)..(38)..(39): Xaa is C or S
  MOD_RES (16)..(17)..(18)..(19)..(20): Xaa is A or G
  MOD_RES (21)..(22)..(23)..(24): Xaa is A or G or is absent

SEQ ID NO: 37845 - protein, 34 aa, Artificial Sequence; identical to SEQ ID NO: 11227
  GFR-binding peptide
  MOD_RES (1)..(1): Xaa is C or S
  MOD_RES (13)..(14)..(15)..(16)..(17): Xaa is A or G
  MOD_RES (18)..(19)..(20)..(21): Xaa is A or G or is absent

SEQ ID NO: 37846 - protein, 35 aa, Artificial Sequence; identical to SEQ ID NO: 11228
  GFR-binding peptide
  MOD_RES (34)..(35): Xaa is C or S
  MOD_RES (12)..(13)..(14)..(15)..(16): Xaa is A or G
  MOD_RES (17)..(18)..(19)..(20): Xaa is A or G or is absent

SEQ ID NO: 37847 - protein, 40 aa, Artificial Sequence; identical to SEQ ID NO: 13165
  GFR-binding peptide
  MOD_RES (2)..(4)..(38)..(39): Xaa is C or S
  MOD_RES (16)..(17)..(18)..(19)..(20): Xaa is A or G
  MOD_RES (21)..(22)..(23)..(24): Xaa is A or G or is absent

SEQ ID NO: 37848 - protein, 44 aa, Artificial Sequence; identical to SEQ ID NO: 13166
  GFR-binding peptide
  MOD_RES (2)..(4)..(38): Xaa is C or S
  MOD_RES (16)..(17)..(18)..(19)..(20): Xaa is A or G
  MOD_RES (21)..(22)..(23)..(24): Xaa is A or G or is absent

SEQ ID NO: 37849 - protein, 33 aa, Artificial Sequence; identical to SEQ ID NO: 13167
  GFR-binding peptide
  MOD_RES (2)..(2): Xaa is C or S

SEQ ID NO: 37850 - protein, 39 aa, Artificial Sequence; identical to SEQ ID NO: 11231
  GFR-binding peptide
  MOD_RES (34)..(35): Xaa is C or S
  MOD_RES (12)..(13)..(14)..(15)..(16): Xaa is A or G
  MOD_RES (17)..(18)..(19)..(20): Xaa is A or G or is absent

SEQ ID NO: 37851 - protein, 33 aa, Artificial Sequence
  GFR-binding peptide
  MOD_RES (1)..(32)..(33): Xaa is C or S
XSKVIMNSLQEIKPTKGIYYLITLPELDQSVXX

SEQ ID NO: 37852 - protein, 35 aa, Artificial Sequence; identical to SEQ ID NO: 3809
  GFR-binding peptide
  MOD_RES (1)..(34)..(35): Xaa is C or S
  MOD_RES (12)..(13)..(14)..(15)..(16): Xaa is A or G
  MOD_RES (17)..(18)..(19)..(20): Xaa is A or G or is absent

SEQ ID NO: 37853 - protein, 39 aa, Artificial Sequence; identical to SEQ ID NO: 5733
  GFR-binding peptide
  MOD_RES (2)..(4)..(35)..(36): Xaa is C or S

SEQ ID NO: 37854 - protein, 41 aa, Artificial Sequence; identical to SEQ ID NO: 13169
  GFR-binding peptide
  MOD_RES (2)..(4)..(38)..(39): Xaa is C or S
  MOD_RES (16)..(17)..(18)..(19)..(20): Xaa is A or G
  MOD_RES (21)..(22)..(23)..(24): Xaa is A or G or is absent

SEQ ID NO: 37855 - protein, 38 aa, Artificial Sequence; identical to SEQ ID NO: 5734
  GFR-binding peptide
  MOD_RES (2)..(4)..(36)..(37): Xaa is C or S

SEQ ID NO: 37856 - protein, 42 aa, Artificial Sequence; identical to SEQ ID NO: 13171
  GFR-binding peptide
  MOD_RES (2)..(4)..(38)..(39): Xaa is C or S
  MOD_RES (16)..(17)..(18)..(19)..(20): Xaa is A or G
  MOD_RES (21)..(22)..(23)..(24): Xaa is A or G or is absent

SEQ ID NO: 37857 - protein, 40 aa, Artificial Sequence; identical to SEQ ID NO: 13172
  GFR-binding peptide
  MOD_RES (1)..(35)..(36): Xaa is C or S
  MOD_RES (13)..(14)..(15)..(16)..(17): Xaa is A or G
  MOD_RES (18)..(19)..(20)..(21): Xaa is A or G or is absent

SEQ ID NO: 37858 - protein, 36 aa, Artificial Sequence; identical to SEQ ID NO: 13173
  GFR-binding peptide
  MOD_RES (2)..(4): Xaa is C or S
  MOD_RES (15)..(16)..(17)..(18)..(19): Xaa is A or G
  MOD_RES (20)..(21)..(22)..(23): Xaa is A or G or is absent

SEQ ID NO: 37859 - protein, 33 aa, Artificial Sequence; identical to SEQ ID NO: 13174
  GFR-binding peptide
  MOD_RES (32)..(33): Xaa is C or S

SEQ ID NO: 37860 - protein, 33 aa, Artificial Sequence; identical to SEQ ID NO: 13175
  GFR-binding peptide
  MOD_RES (1)..(32)..(33): Xaa is C or S

SEQ ID NO: 37861 - protein, 36 aa, Artificial Sequence; identical to SEQ ID NO: 11233
  GFR-binding peptide
  MOD_RES (31)..(32): Xaa is C or S

SEQ ID NO: 37862 - protein, 35 aa, Artificial Sequence; identical to SEQ ID NO: 13176
  GFR-binding peptide
  MOD_RES (1)..(32)..(33): Xaa is C or S

SEQ ID NO: 37863 - protein, 41 aa, Artificial Sequence; identical to SEQ ID NO: 13177
  GFR-binding peptide
  MOD_RES (2)..(4)..(36)..(37): Xaa is C or S

SEQ ID NO: 37864 - protein, 42 aa, Artificial Sequence; identical to SEQ ID NO: 11235
  GFR-binding peptide
  MOD_RES (2)..(4)..(38)..(39): Xaa is C or S
  MOD_RES (16)..(17)..(18)..(19)..(20): Xaa is A or G
  MOD_RES (21)..(22)..(23)..(24): Xaa is A or G or is absent

SEQ ID NO: 37865 - protein, 40 aa, Artificial Sequence; identical to SEQ ID NO: 11236
  GFR-binding peptide
  MOD_RES (34)..(35): Xaa is C or S
  MOD_RES (12)..(13)..(14)..(15)..(16): Xaa is A or G
  MOD_RES (17)..(18)..(19)..(20): Xaa is A or G or is absent

SEQ ID NO: 37866 - protein, 43 aa, Artificial Sequence; identical to SEQ ID NO: 11237
  GFR-binding peptide
  MOD_RES (2)..(4)..(38): Xaa is C or S
  MOD_RES (16)..(17)..(18)..(19)..(20): Xaa is A or G
  MOD_RES (21)..(22)..(23)..(24): Xaa is A or G or is absent

SEQ ID NO: 37867 - protein, 35 aa, Artificial Sequence; identical to SEQ ID NO: 5742
  GFR-binding peptide
  MOD_RES (2)..(4): Xaa is C or S

SEQ ID NO: 37868 - protein, 32 aa, Artificial Sequence; identical to SEQ ID NO: 13182
  GFR-binding peptide
  MOD_RES (11)..(12)..(13)..(14)..(15): Xaa is A or G
  MOD_RES (16)..(17)..(18)..(19): Xaa is A or G or is absent

SEQ ID NO: 37869 - protein, 32 aa, Artificial Sequence; identical to SEQ ID NO: 11238
  GFR-binding peptide
  MOD_RES (31)..(32): Xaa is C or S

SEQ ID NO: 37870 - protein, 38 aa, Artificial Sequence; identical to SEQ ID NO: 13183
  GFR-binding peptide
  MOD_RES (34)..(34): Xaa is C or S
  MOD_RES (12)..(13)..(14)..(15)..(16): Xaa is A or G
  MOD_RES (17)..(18)..(19)..(20): Xaa is A or G or is absent

SEQ ID NO: 37871 - protein, 32 aa, Artificial Sequence; identical to SEQ ID NO: 5746
  GFR-binding peptide
  MOD_RES (11)..(12)..(13)..(14)..(15): Xaa is A or G
  MOD_RES (16)..(17)..(18)..(19): Xaa is A or G or is absent

SEQ ID NO: 37872 - protein, 35 aa, Artificial Sequence; identical to SEQ ID NO: 3820
  GFR-binding peptide
  MOD_RES (2)..(33)..(34): Xaa is C or S

SEQ ID NO: 37873 - protein, 40 aa, Artificial Sequence; identical to SEQ ID NO: 11242
  GFR-binding peptide
  MOD_RES (2)..(36)..(37): Xaa is C or S
  MOD_RES (14)..(15)..(16)..(17)..(18): Xaa is A or G
  MOD_RES (19)..(20)..(21)..(22): Xaa is A or G or is absent

SEQ ID NO: 37874 - protein, 40 aa, Artificial Sequence; identical to SEQ ID NO: 13186
  GFR-binding peptide
  MOD_RES (2)..(36): Xaa is C or S
  MOD_RES (14)..(15)..(16)..(17)..(18): Xaa is A or G
  MOD_RES (19)..(20)..(21)..(22): Xaa is A or G or is absent

SEQ ID NO: 37875 - protein, 39 aa, Artificial Sequence; identical to SEQ ID NO: 5750
  GFR-binding peptide
  MOD_RES (1)..(35)..(36): Xaa is C or S
  MOD_RES (13)..(14)..(15)..(16)..(17): Xaa is A or G
  MOD_RES (18)..(19)..(20)..(21): Xaa is A or G or is absent

SEQ ID NO: 37876 - protein, 35 aa, Artificial Sequence; identical to SEQ ID NO: 3825
  GFR-binding peptide
  MOD_RES (31)..(32): Xaa is C or S

SEQ ID NO: 37877 - protein, 38 aa, Artificial Sequence; identical to SEQ ID NO: 5753
  GFR-binding peptide
  MOD_RES (2)..(4)..(37)..(38): Xaa is C or S
  MOD_RES (15)..(16)..(17)..(18)..(19): Xaa is A or G
  MOD_RES (20)..(21)..(22)..(23): Xaa is A or G or is absent

SEQ ID NO: 37878 - protein, 40 aa, Artificial Sequence; identical to SEQ ID NO: 13189
  GFR-binding peptide
  MOD_RES (1)..(3)..(35)..(36): Xaa is C or S

SEQ ID NO: 37879 - protein, 37 aa, Artificial Sequence; identical to SEQ ID NO: 11245
  GFR-binding peptide
  MOD_RES (2)..(34)..(35): Xaa is C or S

SEQ ID NO: 37880 - protein, 35 aa, Artificial Sequence; identical to SEQ ID NO: 13190
  GFR-binding peptide
  MOD_RES (33)..(34): Xaa is C or S
  MOD_RES (11)..(12)..(13)..(14)..(15): Xaa is A or G
  MOD_RES (16)..(17)..(18)..(19): Xaa is A or G or is absent

SEQ ID NO: 37881 - protein, 33 aa, Artificial Sequence; identical to SEQ ID NO: 13191
  GFR-binding peptide
  MOD_RES (31)..(32): Xaa is C or S

SEQ ID NO: 37882 - protein, 39 aa, Artificial Sequence; identical to SEQ ID NO: 13192
  GFR-binding peptide
  MOD_RES (1)..(33)..(34): Xaa is C or S

SEQ ID NO: 37883 - protein, 40 aa, Artificial Sequence; identical to SEQ ID NO: 11246
  GFR-binding peptide
  MOD_RES (2)..(34)..(35): Xaa is C or S

SEQ ID NO: 37884 - protein, 39 aa, Artificial Sequence; identical to SEQ ID NO: 13194
  GFR-binding peptide
  MOD_RES (33)..(34): Xaa is C or S
  MOD_RES (11)..(12)..(13)..(14)..(15): Xaa is A or G
  MOD_RES (16)..(17)..(18)..(19): Xaa is A or G or is absent

SEQ ID NO: 37885 - protein, 36 aa, Artificial Sequence; identical to SEQ ID NO: 11247
  GFR-binding peptide
  MOD_RES (1)..(32)..(33): Xaa is C or S

SEQ ID NO: 37886 - protein, 32 aa, Artificial Sequence; identical to SEQ ID NO: 3829
  GFR-binding peptide
  MOD_RES (1)..(1): Xaa is C or S

SEQ ID NO: 37887 - protein, 42 aa, Artificial Sequence; identical to SEQ ID NO: 11249
  GFR-binding peptide
  MOD_RES (2)..(36)..(37): Xaa is C or S
  MOD_RES (14)..(15)..(16)..(17)..(18): Xaa is A or G
  MOD_RES (19)..(20)..(21)..(22): Xaa is A or G or is absent

SEQ ID NO: 37888 - protein, 38 aa, Artificial Sequence; identical to SEQ ID NO: 11250
  GFR-binding peptide
  MOD_RES (2)..(36)..(37): Xaa is C or S
  MOD_RES (14)..(15)..(16)..(17)..(18): Xaa is A or G
  MOD_RES (19)..(20)..(21)..(22): Xaa is A or G or is absent

SEQ ID NO: 37889 - protein, 33 aa, Artificial Sequence; identical to SEQ ID NO: 13196
  GFR-binding peptide
  MOD_RES (1)..(33): Xaa is C or S

SEQ ID NO: 37890 - protein, 33 aa, Artificial Sequence; identical to SEQ ID NO: 11251
  GFR-binding peptide
  MOD_RES (32)..(33): Xaa is C or S

SEQ ID NO: 37891 - protein, 33 aa, Artificial Sequence; identical to SEQ ID NO: 11252
  GFR-binding peptide
  MOD_RES (32)..(33): Xaa is C or S

SEQ ID NO: 37892 - protein, 37 aa, Artificial Sequence; identical to SEQ ID NO: 13198
  GFR-binding peptide
  MOD_RES (1)..(3)..(35)..(36): Xaa is C or S

SEQ ID NO: 37893 - protein, 35 aa, Artificial Sequence; identical to SEQ ID NO: 13199
  GFR-binding peptide
  MOD_RES (2)..(2): Xaa is C or S
  MOD_RES (14)..(15)..(16)..(17)..(18): Xaa is A or G
  MOD_RES (19)..(20)..(21)..(22): Xaa is A or G or is absent

SEQ ID NO: 37894 - protein, 32 aa, Artificial Sequence
  GFR-binding peptide
  MOD_RES (31)..(32): Xaa is C or S
SKVIMNSLQEIKPTKGIYYLITLPELDQSVXX

SEQ ID NO: 37895 - protein, 33 aa, Artificial Sequence; identical to SEQ ID NO: 11254
  GFR-binding peptide
  MOD_RES (33)..(33): Xaa is C or S
  MOD_RES (11)..(12)..(13)..(14)..(15): Xaa is A or G
  MOD_RES (16)..(17)..(18)..(19): Xaa is A or G or is absent

SEQ ID NO: 37896 - protein, 39 aa, Artificial Sequence; identical to SEQ ID NO: 13201
  GFR-binding peptide
  MOD_RES (1)..(34)..(35): Xaa is C or S
  MOD_RES (12)..(13)..(14)..(15)..(16): Xaa is A or G
  MOD_RES (17)..(18)..(19)..(20): Xaa is A or G or is absent

SEQ ID NO: 37897 - protein, 40 aa, Artificial Sequence; identical to SEQ ID NO: 13202
  GFR-binding peptide
  MOD_RES (2)..(4)..(36)..(37): Xaa is C or S

SEQ ID NO: 37898 - protein, 40 aa, Artificial Sequence; identical to SEQ ID NO: 11255
  GFR-binding peptide
  MOD_RES (2)..(4)..(37)..(38): Xaa is C or S
  MOD_RES (15)..(16)..(17)..(18)..(19): Xaa is A or G
  MOD_RES (20)..(21)..(22)..(23): Xaa is A or G or is absent

SEQ ID NO: 37899 - protein, 35 aa, Artificial Sequence; identical to SEQ ID NO: 13204
  GFR-binding peptide
  MOD_RES (32)..(33): Xaa is C or S

SEQ ID NO: 37900 - protein, 37 aa, Artificial Sequence; identical to SEQ ID NO: 11256
  GFR-binding peptide
  MOD_RES (32)..(33): Xaa is C or S

SEQ ID NO: 37901 - protein, 33 aa, Artificial Sequence; identical to SEQ ID NO: 11257
  GFR-binding peptide
  MOD_RES (12)..(13)..(14)..(15)..(16): Xaa is A or G
  MOD_RES (17)..(18)..(19)..(20): Xaa is A or G or is absent

SEQ ID NO: 37902 - protein, 34 aa, Artificial Sequence; identical to SEQ ID NO: 5769
  GFR-binding peptide
  MOD_RES (1)..(33)..(34): Xaa is C or S

SEQ ID NO: 37903 - protein, 39 aa, Artificial Sequence; identical to SEQ ID NO: 11258
  GFR-binding peptide
  MOD_RES (1)..(3)..(35)..(36): Xaa is C or S

SEQ ID NO: 37904 - protein, 33 aa, Artificial Sequence; identical to SEQ ID NO: 13206
  GFR-binding peptide
  MOD_RES (2)..(2): Xaa is C or S

SEQ ID NO: 37905 - protein, 35 aa, Artificial Sequence; identical to SEQ ID NO: 13207
  GFR-binding peptide
  MOD_RES (33)..(34): Xaa is C or S
  MOD_RES (11)..(12)..(13)..(14)..(15): Xaa is A or G
  MOD_RES (16)..(17)..(18)..(19): Xaa is A or G or is absent

SEQ ID NO: 37906 - protein, 34 aa, Artificial Sequence; identical to SEQ ID NO: 11259
  GFR-binding peptide
  MOD_RES (33)..(34): Xaa is C or S
  MOD_RES (11)..(12)..(13)..(14)..(15): Xaa is A or G
  MOD_RES (16)..(17)..(18)..(19): Xaa is A or G or is absent

SEQ ID NO: 37907 - protein, 42 aa, Artificial Sequence; identical to SEQ ID NO: 13209
  GFR-binding peptide
  MOD_RES (2)..(4)..(36)..(37): Xaa is C or S

SEQ ID NO: 37908 - protein, 37 aa, Artificial Sequence; identical to SEQ ID NO: 5771
  GFR-binding peptide
  MOD_RES (2)..(33)..(34): Xaa is C or S

SEQ ID NO: 37909 - protein, 33 aa, Artificial Sequence; identical to SEQ ID NO: 11261
  GFR-binding peptide
  MOD_RES (2)..(2): Xaa is C or S

SEQ ID NO: 37910 - protein, 38 aa, Artificial Sequence; identical to SEQ ID NO: 13211
  GFR-binding peptide
  MOD_RES (33)..(34): Xaa is C or S
  MOD_RES (11)..(12)..(13)..(14)..(15): Xaa is A or G
  MOD_RES (16)..(17)..(18)..(19): Xaa is A or G or is absent

SEQ ID NO: 37911 - protein, 39 aa, Artificial Sequence; identical to SEQ ID NO: 11262
  GFR-binding peptide
  MOD_RES (2)..(33)..(34): Xaa is C or S

SEQ ID NO: 37912 - protein, 36 aa, Artificial Sequence; identical to SEQ ID NO: 11263
  GFR-binding peptide
  MOD_RES (1)..(35)..(36): Xaa is C or S
  MOD_RES (13)..(14)..(15)..(16)..(17): Xaa is A or G
  MOD_RES (18)..(19)..(20)..(21): Xaa is A or G or is absent

SEQ ID NO: 37913 - protein, 41 aa, Artificial Sequence; identical to SEQ ID NO: 11265
  GFR-binding peptide
  MOD_RES (1)..(35): Xaa is C or S
  MOD_RES (13)..(14)..(15)..(16)..(17): Xaa is A or G
  MOD_RES (18)..(19)..(20)..(21): Xaa is A or G or is absent

SEQ ID NO: 37914 - protein, 37 aa, Artificial Sequence; identical to SEQ ID NO: 13212
  GFR-binding peptide
  MOD_RES (1)..(35)..(36): Xaa is C or S
  MOD_RES (13)..(14)..(15)..(16)..(17): Xaa is A or G
  MOD_RES (18)..(19)..(20)..(21): Xaa is A or G or is absent

SEQ ID NO: 37915 - protein, 43 aa, Artificial Sequence; identical to SEQ ID NO: 13214
  GFR-binding peptide
  MOD_RES (1)..(3)..(37)..(38): Xaa is C or S
  MOD_RES (15)..(16)..(17)..(18)..(19): Xaa is A or G
  MOD_RES (20)..(21)..(22)..(23): Xaa is A or G or is absent

SEQ ID NO: 37916 - protein, 34 aa, Artificial Sequence; identical to SEQ ID NO: 11267
  GFR-binding peptide
  MOD_RES (31)..(32): Xaa is C or S

SEQ ID NO: 37917 - protein, 42 aa, Artificial Sequence; identical to SEQ ID NO: 11268
  GFR-binding peptide
  MOD_RES (2)..(4)..(36)..(37): Xaa is C or S

SEQ ID NO: 37918 - protein, 38 aa, Artificial Sequence; identical to SEQ ID NO: 11269
  GFR-binding peptide
  MOD_RES (2)..(4)..(38): Xaa is C or S
  MOD_RES (16)..(17)..(18)..(19)..(20): Xaa is A or G
  MOD_RES (21)..(22)..(23)..(24): Xaa is A or G or is absent

SEQ ID NO: 37919 - protein, 39 aa, Artificial Sequence; identical to SEQ ID NO: 11270
  GFR-binding peptide
  MOD_RES (2)..(4)..(36)..(37): Xaa is C or S

SEQ ID NO: 37920 - protein, 34 aa, Artificial Sequence; identical to SEQ ID NO: 3846
  GFR-binding peptide
  MOD_RES (2)..(33)..(34): Xaa is C or S

SEQ ID NO: 37921 - protein, 36 aa, Artificial Sequence; identical to SEQ ID NO: 13215
  GFR-binding peptide
  MOD_RES (33)..(34): Xaa is C or S
  MOD_RES (11)..(12)..(13)..(14)..(15): Xaa is A or G
  MOD_RES (16)..(17)..(18)..(19): Xaa is A or G or is absent

SEQ ID NO: 37922 - protein, 32 aa, Artificial Sequence; identical to SEQ ID NO: 5783
  GFR-binding peptide
  MOD_RES (1)..(32): Xaa is C or S

SEQ ID NO: 37923 - protein, 38 aa, Artificial Sequence; identical to SEQ ID NO: 11272
  GFR-binding peptide
  MOD_RES (2)..(33)..(34): Xaa is C or S

SEQ ID NO: 37924 - protein, 36 aa, Artificial Sequence; identical to SEQ ID NO: 3849
  GFR-binding peptide
  MOD_RES (33)..(34): Xaa is C or S
  MOD_RES (11)..(12)..(13)..(14)..(15): Xaa is A or G
  MOD_RES (16)..(17)..(18)..(19): Xaa is A or G or is absent

SEQ ID NO: 37925 - protein, 38 aa, Artificial Sequence; identical to SEQ ID NO: 11274
  GFR-binding peptide
  MOD_RES (1)..(3)..(35)..(36): Xaa is C or S

SEQ ID NO: 37926 - protein, 33 aa, Artificial Sequence; identical to SEQ ID NO: 13219
  GFR-binding peptide
  MOD_RES (33)..(33): Xaa is C or S
  MOD_RES (11)..(12)..(13)..(14)..(15): Xaa is A or G
  MOD_RES (16)..(17)..(18)..(19): Xaa is A or G or is absent

SEQ ID NO: 37927 - protein, 39 aa, Artificial Sequence
  GFR-binding peptide
  MOD_RES (33)..(34): Xaa is C or S
  MOD_RES (11)..(12)..(13)..(14)..(15): Xaa is A or G
  MOD_RES (16)..(17)..(18)..(19): Xaa is A or G or is absent
SKVIMNSLQEXXXXXXXXXYYLITLPELDQSVXXPSASA

SEQ ID NO: 37928 - protein, 37 aa, Artificial Sequence; identical to SEQ ID NO: 11275
  GFR-binding peptide
  MOD_RES (1)..(35): Xaa is C or S
  MOD_RES (13)..(14)..(15)..(16)..(17): Xaa is A or G
  MOD_RES (18)..(19)..(20)..(21): Xaa is A or G or is absent

SEQ ID NO: 37929 - protein, 35 aa, Artificial Sequence; identical to SEQ ID NO: 11276
  GFR-binding peptide
  MOD_RES (32)..(33): Xaa is C or S

SEQ ID NO: 37930 - protein, 34 aa, Artificial Sequence; identical to SEQ ID NO: 11277
  GFR-binding peptide
  MOD_RES (33)..(34): Xaa is C or S
  MOD_RES (11)..(12)..(13)..(14)..(15): Xaa is A or G
  MOD_RES (16)..(17)..(18)..(19): Xaa is A or G or is absent

SEQ ID NO: 37931 - protein, 36 aa, Artificial Sequence; identical to SEQ ID NO: 5788
  GFR-binding peptide
  MOD_RES (34)..(35): Xaa is C or S
  MOD_RES (12)..(13)..(14)..(15)..(16): Xaa is A or G
  MOD_RES (17)..(18)..(19)..(20): Xaa is A or G or is absent

SEQ ID NO: 37932 - protein, 38 aa, Artificial Sequence; identical to SEQ ID NO: 11278
  GFR-binding peptide
  MOD_RES (2)..(36)..(37): Xaa is C or S
  MOD_RES (14)..(15)..(16)..(17)..(18): Xaa is A or G
  MOD_RES (19)..(20)..(21)..(22): Xaa is A or G or is absent

SEQ ID NO: 37933 - protein, 32 aa, Artificial Sequence; identical to SEQ ID NO: 13221
  GFR-binding peptide
  MOD_RES (1)..(1): Xaa is C or S

SEQ ID NO: 37934 - protein, 40 aa, Artificial Sequence; identical to SEQ ID NO: 11279
  GFR-binding peptide
  MOD_RES (1)..(34)..(35): Xaa is C or S
  MOD_RES (12)..(13)..(14)..(15)..(16): Xaa is A or G
  MOD_RES (17)..(18)..(19)..(20): Xaa is A or G or is absent

SEQ ID NO: 37935 - protein, 34 aa, Artificial Sequence; identical to SEQ ID NO: 11280
  GFR-binding peptide
  MOD_RES (34)..(34): Xaa is C or S
  MOD_RES (12)..(13)..(14)..(15)..(16): Xaa is A or G
  MOD_RES (17)..(18)..(19)..(20): Xaa is A or G or is absent

SEQ ID NO: 37936 - protein, 43 aa, Artificial Sequence; identical to SEQ ID NO: 13222
  GFR-binding peptide
  MOD_RES (2)..(4)..(38)..(39): Xaa is C or S
  MOD_RES (16)..(17)..(18)..(19)..(20): Xaa is A or G
  MOD_RES (21)..(22)..(23)..(24): Xaa is A or G or is absent

SEQ ID NO: 37937 - protein, 35 aa, Artificial Sequence; identical to SEQ ID NO: 11281
  GFR-binding peptide
  MOD_RES (2)..(34)..(35): Xaa is C or S

SEQ ID NO: 37938 - protein, 37 aa, Artificial Sequence; identical to SEQ ID NO: 13223
  GFR-binding peptide
  MOD_RES (1)..(3)..(35): Xaa is C or S

SEQ ID NO: 37939 - protein, 35 aa, Artificial Sequence; identical to SEQ ID NO: 11282
  GFR-binding peptide
  MOD_RES (31)..(32): Xaa is C or S

SEQ ID NO: 37940 - protein, 37 aa, Artificial Sequence; identical to SEQ ID NO: 11283
  GFR-binding peptide
  MOD_RES (34)..(35): Xaa is C or S
  MOD_RES (12)..(13)..(14)..(15)..(16): Xaa is A or G
  MOD_RES (17)..(18)..(19)..(20): Xaa is A or G or is absent

SEQ ID NO: 37941 - protein, 37 aa, Artificial Sequence; identical to SEQ ID NO: 11284
  GFR-binding peptide
  MOD_RES (1)..(3)..(34)..(35): Xaa is C or S

SEQ ID NO: 37942 - protein, 34 aa, Artificial Sequence; identical to SEQ ID NO: 13224
  GFR-binding peptide
  MOD_RES (1)..(33)..(34): Xaa is C or S

SEQ ID NO: 37943 - protein, 37 aa, Artificial Sequence; identical to SEQ ID NO: 11285
  GFR-binding peptide
  MOD_RES (33)..(34): Xaa is C or S
  MOD_RES (11)..(12)..(13)..(14)..(15): Xaa is A or G
  MOD_RES (16)..(17)..(18)..(19): Xaa is A or G or is absent

SEQ ID NO: 37944 - protein, 37 aa, Artificial Sequence; identical to SEQ ID NO: 11286
  GFR-binding peptide
  MOD_RES (2)..(4)..(35)..(36): Xaa is C or S

SEQ ID NO: 37945 - protein, 39 aa, Artificial Sequence; identical to SEQ ID NO: 13225
  GFR-binding peptide
  MOD_RES (1)..(34)..(35): Xaa is C or S
  MOD_RES (12)..(13)..(14)..(15)..(16): Xaa is A or G
  MOD_RES (17)..(18)..(19)..(20): Xaa is A or G or is absent

SEQ ID NO: 37946 - protein, 36 aa, Artificial Sequence; identical to SEQ ID NO: 3855
  GFR-binding peptide
  MOD_RES (1)..(3)..(34)..(35): Xaa is C or S

SEQ ID NO: 37947 - protein, 37 aa, Artificial Sequence; identical to SEQ ID NO: 11288
  GFR-binding peptide
  MOD_RES (2)..(4)..(35)..(36): Xaa is C or S

SEQ ID NO: 37948 - protein, 41 aa, Artificial Sequence; identical to SEQ ID NO: 13226
  GFR-binding peptide
  MOD_RES (1)..(3)..(35): Xaa is C or S

SEQ ID NO: 37949 - protein, 37 aa, Artificial Sequence; identical to SEQ ID NO: 13227
  GFR-binding peptide
  MOD_RES (2)..(36)..(37): Xaa is C or S
  MOD_RES (14)..(15)..(16)..(17)..(18): Xaa is A or G
  MOD_RES (19)..(20)..(21)..(22): Xaa is A or G or is absent

SEQ ID NO: 37950 - protein, 36 aa, Artificial Sequence
  GFR-binding peptide
  MOD_RES (2)..(4): Xaa is C or S
  MOD_RES (15)..(16)..(17)..(18)..(19): Xaa is A or G
  MOD_RES (20)..(21)..(22)..(23): Xaa is A or G or is absent
SXKXSKVIMNSLQEXXXXXXXXXYYLITLPELDQSV

SEQ ID NO: 37951 - protein, 40 aa, Artificial Sequence; identical to SEQ ID NO: 13230
  GFR-binding peptide
  MOD_RES (1)..(34)..(35): Xaa is C or S
  MOD_RES (12)..(13)..(14)..(15)..(16): Xaa is A or G
  MOD_RES (17)..(18)..(19)..(20): Xaa is A or G or is absent

SEQ ID NO: 37952 - protein, 31 aa, Artificial Sequence; identical to SEQ ID NO: 13232
  GFR-binding peptide

SEQ ID NO: 37953 - protein, 34 aa, Artificial Sequence; identical to SEQ ID NO: 11289
  GFR-binding peptide
  MOD_RES (1)..(3): Xaa is C or S

SEQ ID NO: 37954 - protein, 34 aa, Artificial Sequence; identical to SEQ ID NO: 11290
  GFR-binding peptide
  MOD_RES (1)..(1): Xaa is C or S
  MOD_RES (13)..(14)..(15)..(16)..(17): Xaa is A or G
  MOD_RES (18)..(19)..(20)..(21): Xaa is A or G or is absent

SEQ ID NO: 37955 - protein, 38 aa, Artificial Sequence; identical to SEQ ID NO: 3859
  GFR-binding peptide
  MOD_RES (34)..(35): Xaa is C or S
  MOD_RES (12)..(13)..(14)..(15)..(16): Xaa is A or G
  MOD_RES (17)..(18)..(19)..(20): Xaa is A or G or is absent

SEQ ID NO: 37956 - protein, 38 aa, Artificial Sequence; identical to SEQ ID NO: 13233
  GFR-binding peptide
  MOD_RES (32)..(33): Xaa is C or S

SEQ ID NO: 37957 - protein, 40 aa, Artificial Sequence; identical to SEQ ID NO: 3861
  GFR-binding peptide
  MOD_RES (34)..(35): Xaa is C or S
  MOD_RES (12)..(13)..(14)..(15)..(16): Xaa is A or G
  MOD_RES (17)..(18)..(19)..(20): Xaa is A or G or is absent

SEQ ID NO: 37958 - protein, 39 aa, Artificial Sequence; identical to SEQ ID NO: 13234
  GFR-binding peptide
  MOD_RES (1)..(35)..(36): Xaa is C or S
  MOD_RES (13)..(14)..(15)..(16)..(17): Xaa is A or G
  MOD_RES (18)..(19)..(20)..(21): Xaa is A or G or is absent

SEQ ID NO: 37959 - protein, 32 aa, Artificial Sequence; identical to SEQ ID NO: 11293
  GFR-binding peptide
  MOD_RES (31)..(32): Xaa is C or S

SEQ ID NO: 37960 - protein, 38 aa, Artificial Sequence; identical to SEQ ID NO: 13237
  GFR-binding peptide
  MOD_RES (2)..(35)..(36): Xaa is C or S
  MOD_RES (13)..(14)..(15)..(16)..(17): Xaa is A or G
  MOD_RES (18)..(19)..(20)..(21): Xaa is A or G or is absent

SEQ ID NO: 37961 - protein, 41 aa, Artificial Sequence; identical to SEQ ID NO: 13238
  GFR-binding peptide
  MOD_RES (1)..(3)..(35)..(36): Xaa is C or S

SEQ ID NO: 37962 - protein, 39 aa, Artificial Sequence; identical to SEQ ID NO: 11294
  GFR-binding peptide
  MOD_RES (2)..(35)..(36): Xaa is C or S
  MOD_RES (13)..(14)..(15)..(16)..(17): Xaa is A or G
  MOD_RES (18)..(19)..(20)..(21): Xaa is A or G or is absent

SEQ ID NO: 37963 - protein, 43 aa, Artificial Sequence; identical to SEQ ID NO: 13239
  GFR-binding peptide
  MOD_RES (2)..(4)..(38)..(39): Xaa is C or S
  MOD_RES (16)..(17)..(18)..(19)..(20): Xaa is A or G
  MOD_RES (21)..(22)..(23)..(24): Xaa is A or G or is absent

SEQ ID NO: 37964 - protein, 36 aa, Artificial Sequence
  GFR-binding peptide
  MOD_RES (1)..(3)..(34)..(35): Xaa is C or S
XKXSKVIMNSLQEIKPTKGIYYLITLPELDQSVXXP

SEQ ID NO: 37965 - protein, 37 aa, Artificial Sequence; identical to SEQ ID NO: 13242
  GFR-binding peptide
  MOD_RES (2)..(4)..(36)..(37): Xaa is C or S

SEQ ID NO: 37966 - protein, 30 aa, Artificial Sequence; identical to SEQ ID NO: 5814
  GFR-binding peptide

SEQ ID NO: 37967 - protein, 36 aa, Artificial Sequence; identical to SEQ ID NO: 13244
  GFR-binding peptide
  MOD_RES (2)..(33)..(34): Xaa is C or S

SEQ ID NO: 37968 - protein, 37 aa, Artificial Sequence; identical to SEQ ID NO: 11297
  GFR-binding peptide
  MOD_RES (2)..(4): Xaa is C or S
  MOD_RES (16)..(17)..(18)..(19)..(20): Xaa is A or G
  MOD_RES (21)..(22)..(23)..(24): Xaa is A or G or is absent

SEQ ID NO: 37969 - protein, 34 aa, Artificial Sequence; identical to SEQ ID NO: 11298
  GFR-binding peptide
  MOD_RES (33)..(34): Xaa is C or S
  MOD_RES (11)..(12)..(13)..(14)..(15): Xaa is A or G
  MOD_RES (16)..(17)..(18)..(19): Xaa is A or G or is absent

SEQ ID NO: 37970 - protein, 35 aa, Artificial Sequence; identical to SEQ ID NO: 13245
  GFR-binding peptide
  MOD_RES (2)..(2): Xaa is C or S
  MOD_RES (14)..(15)..(16)..(17)..(18): Xaa is A or G
  MOD_RES (19)..(20)..(21)..(22): Xaa is A or G or is absent

SEQ ID NO: 37971 - protein, 40 aa, Artificial Sequence; identical to SEQ ID NO: 11299
  GFR-binding peptide
  MOD_RES (2)..(4)..(36): Xaa is C or S

SEQ ID NO: 37972 - protein, 36 aa, Artificial Sequence; identical to SEQ ID NO: 11300
  GFR-binding peptide
  MOD_RES (32)..(33): Xaa is C or S

SEQ ID NO: 37973 - protein, 36 aa, Artificial Sequence; identical to SEQ ID NO: 13247
  GFR-binding peptide
  MOD_RES (2)..(34)..(35): Xaa is C or S

SEQ ID NO: 37974 - protein, 36 aa, Artificial Sequence; identical to SEQ ID NO: 3875
  GFR-binding peptide
  MOD_RES (2)..(4)..(36): Xaa is C or S

SEQ ID NO: 37975 - protein, 33 aa, Artificial Sequence; identical to SEQ ID NO: 3877
  GFR-binding peptide
  MOD_RES (32)..(33): Xaa is C or S

SEQ ID NO: 37976 - protein, 37 aa, Artificial Sequence; identical to SEQ ID NO: 13252
  GFR-binding peptide
  MOD_RES (34)..(35): Xaa is C or S
  MOD_RES (12)..(13)..(14)..(15)..(16): Xaa is A or G
  MOD_RES (17)..(18)..(19)..(20): Xaa is A or G or is absent

SEQ ID NO: 37977 - protein, 31 aa, Artificial Sequence; identical to SEQ ID NO: 13255
  GFR-binding peptide
  MOD_RES (31)..(31): Xaa is C or S

SEQ ID NO: 37978 - protein, 42 aa, Artificial Sequence; identical to SEQ ID NO: 13256
  GFR-binding peptide
  MOD_RES (1)..(3)..(37)..(38): Xaa is C or S
  MOD_RES (15)..(16)..(17)..(18)..(19): Xaa is A or G
  MOD_RES (20)..(21)..(22)..(23): Xaa is A or G or is absent

SEQ ID NO: 37979 - protein, 33 aa, Artificial Sequence; identical to SEQ ID NO: 13257
  GFR-binding peptide
  MOD_RES (2)..(2): Xaa is C or S

SEQ ID NO: 37980 - protein, 38 aa, Artificial Sequence; identical to SEQ ID NO: 13258
  GFR-binding peptide
  MOD_RES (2)..(4)..(35)..(36): Xaa is C or S

SEQ ID NO: 37981 - protein, 34 aa, Artificial Sequence; identical to SEQ ID NO: 5826
  GFR-binding peptide
  MOD_RES (32)..(33): Xaa is C or S

SEQ ID NO: 37982 - protein, 39 aa, Artificial Sequence; identical to SEQ ID NO: 11306
  GFR-binding peptide
  MOD_RES (1)..(3)..(35)..(36): Xaa is C or S

SEQ ID NO: 37983 - protein, 38 aa, Artificial Sequence; identical to SEQ ID NO: 13261
  GFR-binding peptide
  MOD_RES (2)..(33)..(34): Xaa is C or S

SEQ ID NO: 37984 - protein, 41 aa, Artificial Sequence; identical to SEQ ID NO: 13262
  GFR-binding peptide
  MOD_RES (2)..(4)..(36)..(37): Xaa is C or S

SEQ ID NO: 37985 - protein, 36 aa, Artificial Sequence; identical to SEQ ID NO: 13263
  GFR-binding peptide
  MOD_RES (2)..(4)..(36): Xaa is C or S

SEQ ID NO: 37986 - protein, 36 aa, Artificial Sequence; identical to SEQ ID NO: 13264
  GFR-binding peptide
  MOD_RES (33)..(34): Xaa is C or S
  MOD_RES (11)..(12)..(13)..(14)..(15): Xaa is A or G
  MOD_RES (16)..(17)..(18)..(19): Xaa is A or G or is absent

SEQ ID NO: 37987 - protein, 39 aa, Artificial Sequence; identical to SEQ ID NO: 13265
  GFR-binding peptide
  MOD_RES (1)..(35)..(36): Xaa is C or S
  MOD_RES (13)..(14)..(15)..(16)..(17): Xaa is A or G
  MOD_RES (18)..(19)..(20)..(21): Xaa is A or G or is absent

SEQ ID NO: 37988 - protein, 39 aa, Artificial Sequence; identical to SEQ ID NO: 11308
  GFR-binding peptide
  MOD_RES (2)..(34)..(35): Xaa is C or S

SEQ ID NO: 37989 - protein, 33 aa, Artificial Sequence; identical to SEQ ID NO: 3886
  GFR-binding peptide
  MOD_RES (2)..(2): Xaa is C or S

SEQ ID NO: 37990 - protein, 38 aa, Artificial Sequence; identical to SEQ ID NO: 3888
  GFR-binding peptide
  MOD_RES (1)..(3)..(34)..(35): Xaa is C or S

SEQ ID NO: 37991 - protein, 35 aa, Artificial Sequence; identical to SEQ ID NO: 13267
  GFR-binding peptide
  MOD_RES (1)..(34)..(35): Xaa is C or S
  MOD_RES (12)..(13)..(14)..(15)..(16): Xaa is A or G
  MOD_RES (17)..(18)..(19)..(20): Xaa is A or G or is absent

SEQ ID NO: 37992 - protein, 41 aa, Artificial Sequence; identical to SEQ ID NO: 11311
  GFR-binding peptide
  MOD_RES (1)..(35)..(36): Xaa is C or S
  MOD_RES (13)..(14)..(15)..(16)..(17): Xaa is A or G
  MOD_RES (18)..(19)..(20)..(21): Xaa is A or G or is absent

SEQ ID NO: 37993 - protein, 34 aa, Artificial Sequence; identical to SEQ ID NO: 13269
  GFR-binding peptide
  MOD_RES (31)..(32): Xaa is C or S

SEQ ID NO: 37994 - protein, 34 aa, Artificial Sequence; identical to SEQ ID NO: 13270
  GFR-binding peptide
  MOD_RES (34)..(34): Xaa is C or S
  MOD_RES (12)..(13)..(14)..(15)..(16): Xaa is A or G
  MOD_RES (17)..(18)..(19)..(20): Xaa is A or G or is absent

SEQ ID NO: 37995 - protein, 33 aa, Artificial Sequence; identical to SEQ ID NO: 13271
  GFR-binding peptide
  MOD_RES (1)..(33): Xaa is C or S

SEQ ID NO: 37996 - protein, 37 aa, Artificial Sequence; identical to SEQ ID NO: 11312
  GFR-binding peptide
  MOD_RES (1)..(3)..(36)..(37): Xaa is C or S
  MOD_RES (14)..(15)..(16)..(17)..(18): Xaa is A or G
  MOD_RES (19)..(20)..(21)..(22): Xaa is A or G or is absent

SEQ ID NO: 37997 - protein, 37 aa, Artificial Sequence; identical to SEQ ID NO: 11313
  GFR-binding peptide
  MOD_RES (1)..(32)..(33): Xaa is C or S

SEQ ID NO: 37998 - protein, 42 aa, Artificial Sequence; identical to SEQ ID NO: 11314
  GFR-binding peptide
  MOD_RES (2)..(36): Xaa is C or S
  MOD_RES (14)..(15)..(16)..(17)..(18): Xaa is A or G
  MOD_RES (19)..(20)..(21)..(22): Xaa is A or G or is absent

SEQ ID NO: 37999 - protein, 41 aa, Artificial Sequence; identical to SEQ ID NO: 11315
  GFR-binding peptide
  MOD_RES (1)..(3)..(35): Xaa is C or S

SEQ ID NO: 38000 - protein, 35 aa, Artificial Sequence; identical to SEQ ID NO: 11317
  GFR-binding peptide
  MOD_RES (31)..(32): Xaa is C or S

SEQ ID NO: 38001 - protein, 36 aa, Artificial Sequence; identical to SEQ ID NO: 5841
  GFR-binding peptide
  MOD_RES (2)..(33)..(34): Xaa is C or S

SEQ ID NO: 38002 - protein, 34 aa, Artificial Sequence; identical to SEQ ID NO: 3896
  GFR-binding peptide
  MOD_RES (1)..(3): Xaa is C or S

SEQ ID NO: 38003 - protein, 39 aa, Artificial Sequence; identical to SEQ ID NO: 13275
  GFR-binding peptide
  MOD_RES (1)..(33)..(34): Xaa is C or S

SEQ ID NO: 38004 - protein, 35 aa, Artificial Sequence; identical to SEQ ID NO: 13276
  GFR-binding peptide
  MOD_RES (33)..(34): Xaa is C or S
  MOD_RES (11)..(12)..(13)..(14)..(15): Xaa is A or G
  MOD_RES (16)..(17)..(18)..(19): Xaa is A or G or is absent

SEQ ID NO: 38005 - protein, 42 aa, Artificial Sequence; identical to SEQ ID NO: 3898
  GFR-binding peptide
  MOD_RES (2)..(4)..(36)..(37): Xaa is C or S

SEQ ID NO: 38006 - protein, 40 aa, Artificial Sequence; identical to SEQ ID NO: 13277
  GFR-binding peptide
  MOD_RES (1)..(3)..(35): Xaa is C or S

SEQ ID NO: 38007 - protein, 35 aa, Artificial Sequence; identical to SEQ ID NO: 5848
  GFR-binding peptide
  MOD_RES (2)..(33)..(34): Xaa is C or S

SEQ ID NO: 38008 - protein, 39 aa, Artificial Sequence; identical to SEQ ID NO: 13280
  GFR-binding peptide
  MOD_RES (1)..(35)..(36): Xaa is C or S
  MOD_RES (13)..(14)..(15)..(16)..(17): Xaa is A or G
  MOD_RES (18)..(19)..(20)..(21): Xaa is A or G or is absent

SEQ ID NO: 38009 - protein, 36 aa, Artificial Sequence; identical to SEQ ID NO: 3899
  GFR-binding peptide
  MOD_RES (2)..(34)..(35): Xaa is C or S

SEQ ID NO: 38010 - protein, 34 aa, Artificial Sequence; identical to SEQ ID NO: 13281
  GFR-binding peptide
  MOD_RES (2)..(34): Xaa is C or S

SEQ ID NO: 38011 - protein, 33 aa, Artificial Sequence; identical to SEQ ID NO: 11321
  GFR-binding peptide
  MOD_RES (12)..(13)..(14)..(15)..(16): Xaa is A or G
  MOD_RES (17)..(18)..(19)..(20): Xaa is A or G or is absent

SEQ ID NO: 38012 - protein, 37 aa, Artificial Sequence; identical to SEQ ID NO: 13282
  GFR-binding peptide
  MOD_RES (1)..(34)..(35): Xaa is C or S
  MOD_RES (12)..(13)..(14)..(15)..(16): Xaa is A or G
  MOD_RES (17)..(18)..(19)..(20): Xaa is A or G or is absent

SEQ ID NO: 38013 - protein, 33 aa, Artificial Sequence
  GFR-binding peptide
  MOD_RES (2)..(33): Xaa is C or S
KXSKVIMNSLQEIKPTKGIYYLITLPELDQSVX

SEQ ID NO: 38014 - protein, 38 aa, Artificial Sequence; identical to SEQ ID NO: 11323
  GFR-binding peptide
  MOD_RES (2)..(34)..(35): Xaa is C or S

SEQ ID NO: 38015 - protein, 30 aa, Artificial Sequence; identical to SEQ ID NO: 11324
  GFR-binding peptide

SEQ ID NO: 38016 - protein, 42 aa, Artificial Sequence; identical to SEQ ID NO: 13283
  GFR-binding peptide
  MOD_RES (1)..(3)..(37)..(38): Xaa is C or S
  MOD_RES (15)..(16)..(17)..(18)..(19): Xaa is A or G
  MOD_RES (20)..(21)..(22)..(23): Xaa is A or G or is absent

SEQ ID NO: 38017 - protein, 40 aa, Artificial Sequence; identical to SEQ ID NO: 13284
  GFR-binding peptide
  MOD_RES (2)..(4)..(36): Xaa is C or S

SEQ ID NO: 38018 - protein, 38 aa, Artificial Sequence; identical to SEQ ID NO: 13285
  GFR-binding peptide
  MOD_RES (1)..(35)..(36): Xaa is C or S
  MOD_RES (13)..(14)..(15)..(16)..(17): Xaa is A or G
  MOD_RES (18)..(19)..(20)..(21): Xaa is A or G or is absent

SEQ ID NO: 38019 - protein, 38 aa, Artificial Sequence; identical to SEQ ID NO: 11325
  GFR-binding peptide
  MOD_RES (1)..(3)..(36)..(37): Xaa is C or S
  MOD_RES (14)..(15)..(16)..(17)..(18): Xaa is A or G
  MOD_RES (19)..(20)..(21)..(22): Xaa is A or G or is absent

SEQ ID NO: 38020 - protein, 30 aa, Artificial Sequence; identical to SEQ ID NO: 13286
  GFR-binding peptide

SEQ ID NO: 38021 - protein, 43 aa, Artificial Sequence; identical to SEQ ID NO: 11326
  GFR-binding peptide
  MOD_RES (2)..(4)..(38)..(39): Xaa is C or S
  MOD_RES (16)..(17)..(18)..(19)..(20): Xaa is A or G
  MOD_RES (21)..(22)..(23)..(24): Xaa is A or G or is absent

SEQ ID NO: 38022 - protein, 37 aa, Artificial Sequence; identical to SEQ ID NO: 13287
  GFR-binding peptide
  MOD_RES (33)..(34): Xaa is C or S
  MOD_RES (11)..(12)..(13)..(14)..(15): Xaa is A or G
  MOD_RES (16)..(17)..(18)..(19): Xaa is A or G or is absent

SEQ ID NO: 38023 - protein, 35 aa, Artificial Sequence; identical to SEQ ID NO: 13288
  GFR-binding peptide
  MOD_RES (2)..(4): Xaa is C or S

SEQ ID NO: 38024 - protein, 41 aa, Artificial Sequence; identical to SEQ ID NO: 5860
  GFR-binding peptide
  MOD_RES (2)..(4)..(38)..(39): Xaa is C or S
  MOD_RES (16)..(17)..(18)..(19)..(20): Xaa is A or G
  MOD_RES (21)..(22)..(23)..(24): Xaa is A or G or is absent

SEQ ID NO: 38025 - protein, 34 aa, Artificial Sequence; identical to SEQ ID NO: 13291
  GFR-binding peptide
  MOD_RES (1)..(3): Xaa is C or S

SEQ ID NO: 38026 - protein, 36 aa, Artificial Sequence; identical to SEQ ID NO: 13292
  GFR-binding peptide
  MOD_RES (1)..(35)..(36): Xaa is C or S
  MOD_RES (13)..(14)..(15)..(16)..(17): Xaa is A or G
  MOD_RES (18)..(19)..(20)..(21): Xaa is A or G or is absent

SEQ ID NO: 38027 - protein, 37 aa, Artificial Sequence; identical to SEQ ID NO: 3907
  GFR-binding peptide
  MOD_RES (1)..(3)..(37): Xaa is C or S
  MOD_RES (15)..(16)..(17)..(18)..(19): Xaa is A or G
  MOD_RES (20)..(21)..(22)..(23): Xaa is A or G or is absent

SEQ ID NO: 38028 - protein, 31 aa, Artificial Sequence; identical to SEQ ID NO: 5867
  GFR-binding peptide

SEQ ID NO: 38029 - protein, 40 aa, Artificial Sequence; identical to SEQ ID NO: 5868
  GFR-binding peptide
  MOD_RES (2)..(4)..(38)..(39): Xaa is C or S
  MOD_RES (16)..(17)..(18)..(19)..(20): Xaa is A or G
  MOD_RES (21)..(22)..(23)..(24): Xaa is A or G or is absent

SEQ ID NO: 38030 - protein, 35 aa, Artificial Sequence; identical to SEQ ID NO: 11329
  GFR-binding peptide
  MOD_RES (2)..(34)..(35): Xaa is C or S

SEQ ID NO: 38031 - protein, 35 aa, Artificial Sequence; identical to SEQ ID NO: 3910
  GFR-binding peptide
  MOD_RES (31)..(32): Xaa is C or S

SEQ ID NO: 38032 - protein, 41 aa, Artificial Sequence; identical to SEQ ID NO: 3911
  GFR-binding peptide
  MOD_RES (2)..(35)..(36): Xaa is C or S
  MOD_RES (13)..(14)..(15)..(16)..(17): Xaa is A or G
  MOD_RES (18)..(19)..(20)..(21): Xaa is A or G or is absent

SEQ ID NO: 38033 - protein, 39 aa, Artificial Sequence; identical to SEQ ID NO: 13296
  GFR-binding peptide
  MOD_RES (1)..(3)..(37): Xaa is C or S
  MOD_RES (15)..(16)..(17)..(18)..(19): Xaa is A or G
  MOD_RES (20)..(21)..(22)..(23): Xaa is A or G or is absent

SEQ ID NO: 38034 - protein, 37 aa, Artificial Sequence; identical to SEQ ID NO: 13297
  GFR-binding peptide
  MOD_RES (34)..(35): Xaa is C or S
  MOD_RES (12)..(13)..(14)..(15)..(16): Xaa is A or G
  MOD_RES (17)..(18)..(19)..(20): Xaa is A or G or is absent

SEQ ID NO: 38035 - protein, 35 aa, Artificial Sequence; identical to SEQ ID NO: 11332
  GFR-binding peptide
  MOD_RES (1)..(3): Xaa is C or S
  MOD_RES (14)..(15)..(16)..(17)..(18): Xaa is A or G
  MOD_RES (19)..(20)..(21)..(22): Xaa is A or G or is absent

SEQ ID NO: 38036 - protein, 41 aa, Artificial Sequence; identical to SEQ ID NO: 11333
  GFR-binding peptide
  MOD_RES (2)..(4)..(38)..(39): Xaa is C or S
  MOD_RES (16)..(17)..(18)..(19)..(20): Xaa is A or G
  MOD_RES (21)..(22)..(23)..(24): Xaa is A or G or is absent

SEQ ID NO: 38037 - protein, 41 aa, Artificial Sequence; identical to SEQ ID NO: 11334
  GFR-binding peptide
  MOD_RES (2)..(4)..(38)..(39): Xaa is C or S
  MOD_RES (16)..(17)..(18)..(19)..(20): Xaa is A or G
  MOD_RES (21)..(22)..(23)..(24): Xaa is A or G or is absent

SEQ ID NO: 38038 - protein, 38 aa, Artificial Sequence; identical to SEQ ID NO: 13299
  GFR-binding peptide
  MOD_RES (2)..(34): Xaa is C or S

SEQ ID NO: 38039 - protein, 37 aa, Artificial Sequence; identical to SEQ ID NO: 5871
  GFR-binding peptide
  MOD_RES (1)..(33)..(34): Xaa is C or S

SEQ ID NO: 38040 - protein, 37 aa, Artificial Sequence; identical to SEQ ID NO: 11335
  GFR-binding peptide
  MOD_RES (32)..(33): Xaa is C or S

SEQ ID NO: 38041 - protein, 37 aa, Artificial Sequence; identical to SEQ ID NO: 11336
  GFR-binding peptide
  MOD_RES (1)..(3)..(37): Xaa is C or S
  MOD_RES (15)..(16)..(17)..(18)..(19): Xaa is A or G
  MOD_RES (20)..(21)..(22)..(23): Xaa is A or G or is absent

SEQ ID NO: 38042 - protein, 34 aa, Artificial Sequence; identical to SEQ ID NO: 13302
  GFR-binding peptide
  MOD_RES (31)..(32): Xaa is C or S

SEQ ID NO: 38043 - protein, 39 aa, Artificial Sequence; identical to SEQ ID NO: 3918
  GFR-binding peptide
  MOD_RES (33)..(34): Xaa is C or S
  MOD_RES (11)..(12)..(13)..(14)..(15): Xaa is A or G
  MOD_RES (16)..(17)..(18)..(19): Xaa is A or G or is absent

SEQ ID NO: 38044 - protein, 31 aa, Artificial Sequence; identical to SEQ ID NO: 11338
  GFR-binding peptide
  MOD_RES (31)..(31): Xaa is C or S

SEQ ID NO: 38045 - protein, 38 aa, Artificial Sequence; identical to SEQ ID NO: 11339
  GFR-binding peptide
  MOD_RES (34)..(35): Xaa is C or S
  MOD_RES (12)..(13)..(14)..(15)..(16): Xaa is A or G
  MOD_RES (17)..(18)..(19)..(20): Xaa is A or G or is absent

SEQ ID NO: 38046 - protein, 36 aa, Artificial Sequence; identical to SEQ ID NO: 13303
  GFR-binding peptide
  MOD_RES (1)..(32)..(33): Xaa is C or S

SEQ ID NO: 38047 - protein, 34 aa, Artificial Sequence; identical to SEQ ID NO: 5878
  GFR-binding peptide
  MOD_RES (1)..(1): Xaa is C or S
  MOD_RES (13)..(14)..(15)..(16)..(17): Xaa is A or G
  MOD_RES (18)..(19)..(20)..(21): Xaa is A or G or is absent

SEQ ID NO: 38048 - protein, 43 aa, Artificial Sequence; identical to SEQ ID NO: 5882
  GFR-binding peptide
  MOD_RES (2)..(4)..(37)..(38): Xaa is C or S
  MOD_RES (15)..(16)..(17)..(18)..(19): Xaa is A or G
  MOD_RES (20)..(21)..(22)..(23): Xaa is A or G or is absent

SEQ ID NO: 38049 - protein, 35 aa, Artificial Sequence; identical to SEQ ID NO: 13307
  GFR-binding peptide
  MOD_RES (33)..(34): Xaa is C or S
  MOD_RES (11)..(12)..(13)..(14)..(15): Xaa is A or G
  MOD_RES (16)..(17)..(18)..(19): Xaa is A or G or is absent

SEQ ID NO: 38050 - protein, 34 aa, Artificial Sequence
  GFR-binding peptide
  MOD_RES (2)..(4): Xaa is C or S
SXKXSKVIMNSLQEIKPTKGIYYLITLPELDQSV

SEQ ID NO: 38051 - protein, 41 aa, Artificial Sequence; identical to SEQ ID NO: 5883
  GFR-binding peptide
  MOD_RES (2)..(4)..(35)..(36): Xaa is C or S

SEQ ID NO: 38052 - protein, 39 aa, Artificial Sequence; identical to SEQ ID NO: 11341
  GFR-binding peptide
  MOD_RES (1)..(3)..(37)..(38): Xaa is C or S
  MOD_RES (15)..(16)..(17)..(18)..(19): Xaa is A or G
  MOD_RES (20)..(21)..(22)..(23): Xaa is A or G or is absent

SEQ ID NO: 38053 - protein, 41 aa, Artificial Sequence; identical to SEQ ID NO: 13310
  GFR-binding peptide
  MOD_RES (1)..(3)..(35): Xaa is C or S

SEQ ID NO: 38054 - protein, 37 aa, Artificial Sequence; identical to SEQ ID NO: 13311
  GFR-binding peptide
  MOD_RES (1)..(3)..(37): Xaa is C or S
  MOD_RES (15)..(16)..(17)..(18)..(19): Xaa is A or G
  MOD_RES (20)..(21)..(22)..(23): Xaa is A or G or is absent

SEQ ID NO: 38055 - protein, 38 aa, Artificial Sequence; identical to SEQ ID NO: 3927
  GFR-binding peptide
  MOD_RES (33)..(34): Xaa is C or S
  MOD_RES (11)..(12)..(13)..(14)..(15): Xaa is A or G
  MOD_RES (16)..(17)..(18)..(19): Xaa is A or G or is absent

SEQ ID NO: 38056 - protein, 38 aa, Artificial Sequence; identical to SEQ ID NO: 13312
  GFR-binding peptide
  MOD_RES (1)..(35)..(36): Xaa is C or S
  MOD_RES (13)..(14)..(15)..(16)..(17): Xaa is A or G
  MOD_RES (18)..(19)..(20)..(21): Xaa is A or G or is absent

SEQ ID NO: 38057 - protein, 35 aa, Artificial Sequence; identical to SEQ ID NO: 5885
  GFR-binding peptide
  MOD_RES (2)..(34)..(35): Xaa is C or S

SEQ ID NO: 38058 - protein, 37 aa, Artificial Sequence; identical to SEQ ID NO: 11343
  GFR-binding peptide
  MOD_RES (2)..(36)..(37): Xaa is C or S
  MOD_RES (14)..(15)..(16)..(17)..(18): Xaa is A or G
  MOD_RES (19)..(20)..(21)..(22): Xaa is A or G or is absent

SEQ ID NO: 38059 - protein, 34 aa, Artificial Sequence; identical to SEQ ID NO: 11344
  GFR-binding peptide
  MOD_RES (1)..(32)..(33): Xaa is C or S

SEQ ID NO: 38060 - protein, 35 aa, Artificial Sequence; identical to SEQ ID NO: 3930
  GFR-binding peptide
  MOD_RES (1)..(33)..(34): Xaa is C or S

SEQ ID NO: 38061 - protein, 38 aa, Artificial Sequence; identical to SEQ ID NO: 13314
  GFR-binding peptide
  MOD_RES (1)..(3)..(35)..(36): Xaa is C or S

SEQ ID NO: 38062 - protein, 41 aa, Artificial Sequence; identical to SEQ ID NO: 11346
  GFR-binding peptide
  MOD_RES (2)..(36)..(37): Xaa is C or S
  MOD_RES (14)..(15)..(16)..(17)..(18): Xaa is A or G
  MOD_RES (19)..(20)..(21)..(22): Xaa is A or G or is absent

SEQ ID NO: 38063 - protein, 35 aa, Artificial Sequence; identical to SEQ ID NO: 3931
  GFR-binding peptide
  MOD_RES (33)..(34): Xaa is C or S
  MOD_RES (11)..(12)..(13)..(14)..(15): Xaa is A or G
  MOD_RES (16)..(17)..(18)..(19): Xaa is A or G or is absent

SEQ ID NO: 38064 - protein, 34 aa, Artificial Sequence; identical to SEQ ID NO: 13315
  GFR-binding peptide
  MOD_RES (2)..(2): Xaa is C or S
  MOD_RES (13)..(14)..(15)..(16)..(17): Xaa is A or G
  MOD_RES (18)..(19)..(20)..(21): Xaa is A or G or is absent

SEQ ID NO: 38065 - protein, 32 aa, Artificial Sequence; identical to SEQ ID NO: 11348
  GFR-binding peptide
  MOD_RES (32)..(32): Xaa is C or S

SEQ ID NO: 38066 - protein, 35 aa, Artificial Sequence; identical to SEQ ID NO: 3933
  GFR-binding peptide
  MOD_RES (1)..(3)..(34)..(35): Xaa is C or S

SEQ ID NO: 38067 - protein, 35 aa, Artificial Sequence; identical to SEQ ID NO: 11350
  GFR-binding peptide
  MOD_RES (32)..(33): Xaa is C or S

SEQ ID NO: 38068 - protein, 41 aa, Artificial Sequence; identical to SEQ ID NO: 13317
  GFR-binding peptide
  MOD_RES (1)..(3)..(37)..(38): Xaa is C or S
  MOD_RES (15)..(16)..(17)..(18)..(19): Xaa is A or G
  MOD_RES (20)..(21)..(22)..(23): Xaa is A or G or is absent

SEQ ID NO: 38069 - protein, 39 aa, Artificial Sequence; identical to SEQ ID NO: 11351
  GFR-binding peptide
  MOD_RES (2)..(4)..(36): Xaa is C or S

SEQ ID NO: 38070 - protein, 35 aa, Artificial Sequence; identical to SEQ ID NO: 11352
  GFR-binding peptide
  MOD_RES (33)..(34): Xaa is C or S
  MOD_RES (11)..(12)..(13)..(14)..(15): Xaa is A or G
  MOD_RES (16)..(17)..(18)..(19): Xaa is A or G or is absent

SEQ ID NO: 38071 - protein, 37 aa, Artificial Sequence; identical to SEQ ID NO: 11353
  GFR-binding peptide
  MOD_RES (1)..(32)..(33): Xaa is C or S

SEQ ID NO: 38072 - protein, 32 aa, Artificial Sequence; identical to SEQ ID NO: 13318
  GFR-binding peptide
  MOD_RES (32)..(32): Xaa is C or S

SEQ ID NO: 38073 - protein, 40 aa, Artificial Sequence; identical to SEQ ID NO: 13320
  GFR-binding peptide
  MOD_RES (1)..(3)..(35)..(36): Xaa is C or S

SEQ ID NO: 38074 - protein, 34 aa, Artificial Sequence; identical to SEQ ID NO: 11354
  GFR-binding peptide
  MOD_RES (2)..(4): Xaa is C or S

SEQ ID NO: 38075 - protein, 38 aa, Artificial Sequence; identical to SEQ ID NO: 13322
  GFR-binding peptide
  MOD_RES (34)..(35): Xaa is C or S
  MOD_RES (12)..(13)..(14)..(15)..(16): Xaa is A or G
  MOD_RES (17)..(18)..(19)..(20): Xaa is A or G or is absent

SEQ ID NO: 38076 - protein, 35 aa, Artificial Sequence; identical to SEQ ID NO: 13323
  GFR-binding peptide
  MOD_RES (2)..(4): Xaa is C or S

SEQ ID NO: 38077 - protein, 35 aa, Artificial Sequence; identical to SEQ ID NO: 3943
  GFR-binding peptide
  MOD_RES (1)..(3)..(34)..(35): Xaa is C or S

SEQ ID NO: 38078 - protein, 35 aa, Artificial Sequence; identical to SEQ ID NO: 11358
  GFR-binding peptide
  MOD_RES (32)..(33): Xaa is C or S

SEQ ID NO: 38079 - protein, 42 aa, Artificial Sequence; identical to SEQ ID NO: 5901
  GFR-binding peptide
  MOD_RES (2)..(4)..(38)..(39): Xaa is C or S
  MOD_RES (16)..(17)..(18)..(19)..(20): Xaa is A or G
  MOD_RES (21)..(22)..(23)..(24): Xaa is A or G or is absent

SEQ ID NO: 38080 - protein, 33 aa, Artificial Sequence; identical to SEQ ID NO: 13326
  GFR-binding peptide
  MOD_RES (1)..(33): Xaa is C or S

SEQ ID NO: 38081 - protein, 34 aa, Artificial Sequence; identical to SEQ ID NO: 13328
  GFR-binding peptide
  MOD_RES (32)..(33): Xaa is C or S

SEQ ID NO: 38082 - protein, 37 aa, Artificial Sequence
  GFR-binding peptide
  MOD_RES (1)..(3)..(36)..(37): Xaa is C or S
  MOD_RES (14)..(15)..(16)..(17)..(18): Xaa is A or G
  MOD_RES (19)..(20)..(21)..(22): Xaa is A or G or is absent
XKXSKVIMNSLQEXXXXXXXXXYYLITLPELDQSVXX

SEQ ID NO: 38083 - protein, 36 aa, Artificial Sequence; identical to SEQ ID NO: 13329
  GFR-binding peptide
  MOD_RES (1)..(3): Xaa is C or S
  MOD_RES (15)..(16)..(17)..(18)..(19): Xaa is A or G
  MOD_RES (20)..(21)..(22)..(23): Xaa is A or G or is absent

SEQ ID NO: 38084 - protein, 39 aa, Artificial Sequence; identical to SEQ ID NO: 5904
  GFR-binding peptide
  MOD_RES (2)..(4)..(37)..(38): Xaa is C or S
  MOD_RES (15)..(16)..(17)..(18)..(19): Xaa is A or G
  MOD_RES (20)..(21)..(22)..(23): Xaa is A or G or is absent

SEQ ID NO: 38085 - protein, 35 aa, Artificial Sequence; identical to SEQ ID NO: 11359
  GFR-binding peptide
  MOD_RES (1)..(34)..(35): Xaa is C or S
  MOD_RES (12)..(13)..(14)..(15)..(16): Xaa is A or G
  MOD_RES (17)..(18)..(19)..(20): Xaa is A or G or is absent

SEQ ID NO: 38086 - protein, 33 aa, Artificial Sequence; identical to SEQ ID NO: 13332
  GFR-binding peptide
  MOD_RES (12)..(13)..(14)..(15)..(16): Xaa is A or G
  MOD_RES (17)..(18)..(19)..(20): Xaa is A or G or is absent

SEQ ID NO: 38087 - protein, 39 aa, Artificial Sequence; identical to SEQ ID NO: 5907
  GFR-binding peptide
  MOD_RES (2)..(4)..(36)..(37): Xaa is C or S

SEQ ID NO: 38088 - protein, 39 aa, Artificial Sequence; identical to SEQ ID NO: 3949
  GFR-binding peptide
  MOD_RES (2)..(36)..(37): Xaa is C or S
  MOD_RES (14)..(15)..(16)..(17)..(18): Xaa is A or G
  MOD_RES (19)..(20)..(21)..(22): Xaa is A or G or is absent

SEQ ID NO: 38089 - protein, 34 aa, Artificial Sequence; identical to SEQ ID NO: 3950
  GFR-binding peptide
  MOD_RES (1)..(3): Xaa is C or S

SEQ ID NO: 38090 - protein, 38 aa, Artificial Sequence; identical to SEQ ID NO: 11364
  GFR-binding peptide
  MOD_RES (1)..(33)..(34): Xaa is C or S

SEQ ID NO: 38091 - protein, 35 aa, Artificial Sequence; identical to SEQ ID NO: 13335
  GFR-binding peptide
  MOD_RES (32)..(33): Xaa is C or S

SEQ ID NO: 38092 - protein, 39 aa, Artificial Sequence; identical to SEQ ID NO: 13336
  GFR-binding peptide
  MOD_RES (33)..(34): Xaa is C or S
  MOD_RES (11)..(12)..(13)..(14)..(15): Xaa is A or G
  MOD_RES (16)..(17)..(18)..(19): Xaa is A or G or is absent

SEQ ID NO: 38093 - protein, 36 aa, Artificial Sequence; identical to SEQ ID NO: 11365
  GFR-binding peptide
  MOD_RES (1)..(3)..(34)..(35): Xaa is C or S

SEQ ID NO: 38094 - protein, 40 aa, Artificial Sequence; identical to SEQ ID NO: 5912
  GFR-binding peptide
  MOD_RES (2)..(4)..(38)..(39): Xaa is C or S
  MOD_RES (16)..(17)..(18)..(19)..(20): Xaa is A or G
  MOD_RES (21)..(22)..(23)..(24): Xaa is A or G or is absent

SEQ ID NO: 38095 - protein, 40 aa, Artificial Sequence; identical to SEQ ID NO: 11366
  GFR-binding peptide
  MOD_RES (2)..(4)..(36)..(37): Xaa is C or S

SEQ ID NO: 38096 - protein, 33 aa, Artificial Sequence; identical to SEQ ID NO: 11368
  GFR-binding peptide
  MOD_RES (32)..(33): Xaa is C or S

SEQ ID NO: 38097 - protein, 40 aa, Artificial Sequence; identical to SEQ ID NO: 11369
  GFR-binding peptide
  MOD_RES (2)..(35)..(36): Xaa is C or S
  MOD_RES (13)..(14)..(15)..(16)..(17): Xaa is A or G
  MOD_RES (18)..(19)..(20)..(21): Xaa is A or G or is absent

SEQ ID NO: 38098 - protein, 38 aa, Artificial Sequence; identical to SEQ ID NO: 11370
  GFR-binding peptide
  MOD_RES (1)..(33): Xaa is C or S

SEQ ID NO: 38099 - protein, 36 aa, Artificial Sequence; identical to SEQ ID NO: 11372
  GFR-binding peptide
  MOD_RES (2)..(36): Xaa is C or S
  MOD_RES (14)..(15)..(16)..(17)..(18): Xaa is A or G
  MOD_RES (19)..(20)..(21)..(22): Xaa is A or G or is absent

SEQ ID NO: 38100 - protein, 37 aa, Artificial Sequence; identical to SEQ ID NO: 11373
  GFR-binding peptide
  MOD_RES (1)..(35)..(36): Xaa is C or S
  MOD_RES (13)..(14)..(15)..(16)..(17): Xaa is A or G
  MOD_RES (18)..(19)..(20)..(21): Xaa is A or G or is absent

SEQ ID NO: 38101 - protein, 36 aa, Artificial Sequence; identical to SEQ ID NO: 13338
  GFR-binding peptide
  MOD_RES (31)..(32): Xaa is C or S

SEQ ID NO: 38102 - protein, 39 aa, Artificial Sequence; identical to SEQ ID NO: 3955
  GFR-binding peptide
  MOD_RES (2)..(4)..(36)..(37): Xaa is C or S

SEQ ID NO: 38103 - protein, 38 aa, Artificial Sequence; identical to SEQ ID NO: 5916
  GFR-binding peptide
  MOD_RES (32)..(33): Xaa is C or S

SEQ ID NO: 38104 - protein, 41 aa, Artificial Sequence; identical to SEQ ID NO: 11376
  GFR-binding peptide
  MOD_RES (1)..(3)..(37)..(38): Xaa is C or S
  MOD_RES (15)..(16)..(17)..(18)..(19): Xaa is A or G
  MOD_RES (20)..(21)..(22)..(23): Xaa is A or G or is absent

SEQ ID NO: 38105 - protein, 34 aa, Artificial Sequence; identical to SEQ ID NO: 13341
  GFR-binding peptide
  MOD_RES (1)..(3): Xaa is C or S

SEQ ID NO: 38106 - protein, 37 aa, Artificial Sequence; identical to SEQ ID NO: 13342
  GFR-binding peptide
  MOD_RES (2)..(4)..(35)..(36): Xaa is C or S

SEQ ID NO: 38107 - protein, 37 aa, Artificial Sequence; identical to SEQ ID NO: 11377
  GFR-binding peptide
  MOD_RES (2)..(4): Xaa is C or S
  MOD_RES (16)..(17)..(18)..(19)..(20): Xaa is A or G
  MOD_RES (21)..(22)..(23)..(24): Xaa is A or G or is absent

SEQ ID NO: 38108 - protein, 35 aa, Artificial Sequence; identical to SEQ ID NO: 11378
  GFR-binding peptide
  MOD_RES (1)..(35): Xaa is C or S
  MOD_RES (13)..(14)..(15)..(16)..(17): Xaa is A or G
  MOD_RES (18)..(19)..(20)..(21): Xaa is A or G or is absent

SEQ ID NO: 38109 - protein, 38 aa, Artificial Sequence; identical to SEQ ID NO: 13343
  GFR-binding peptide
  MOD_RES (33)..(34): Xaa is C or S
  MOD_RES (11)..(12)..(13)..(14)..(15): Xaa is A or G
  MOD_RES (16)..(17)..(18)..(19): Xaa is A or G or is absent

SEQ ID NO: 38110 - protein, 33 aa, Artificial Sequence; identical to SEQ ID NO: 13344
  GFR-binding peptide
  MOD_RES (32)..(33): Xaa is C or S

SEQ ID NO: 38111 - protein, 36 aa, Artificial Sequence; identical to SEQ ID NO: 11379
  GFR-binding peptide
  MOD_RES (1)..(3): Xaa is C or S
  MOD_RES (15)..(16)..(17)..(18)..(19): Xaa is A or G
  MOD_RES (20)..(21)..(22)..(23): Xaa is A or G or is absent

SEQ ID NO: 38112 - protein, 40 aa, Artificial Sequence; identical to SEQ ID NO: 5918
  GFR-binding peptide
  MOD_RES (2)..(4)..(35)..(36): Xaa is C or S

SEQ ID NO: 38113 - protein, 39 aa, Artificial Sequence; identical to SEQ ID NO: 11381
  GFR-binding peptide
  MOD_RES (2)..(34): Xaa is C or S

SEQ ID NO: 38114 - protein, 33 aa, Artificial Sequence; identical to SEQ ID NO: 11382
  GFR-binding peptide
  MOD_RES (31)..(31): Xaa is C or S

SEQ ID NO: 38115 - protein, 38 aa, Artificial Sequence; identical to SEQ ID NO: 13348
  GFR-binding peptide
  MOD_RES (32)..(33): Xaa is C or S

SEQ ID NO: 38116 - protein, 36 aa, Artificial Sequence; identical to SEQ ID NO: 11384
  GFR-binding peptide
  MOD_RES (1)..(33)..(34): Xaa is C or S

SEQ ID NO: 38117 - protein, 37 aa, Artificial Sequence; identical to SEQ ID NO: 13349
  GFR-binding peptide
  MOD_RES (31)..(32): Xaa is C or S

SEQ ID NO: 38118 - protein, 31 aa, Artificial Sequence; identical to SEQ ID NO: 11386
  GFR-binding peptide
  MOD_RES (31)..(31): Xaa is C or S

SEQ ID NO: 38119 - protein, 44 aa, Artificial Sequence; identical to SEQ ID NO: 11387
  GFR-binding peptide
  MOD_RES (2)..(4)..(38)..(39): Xaa is C or S
  MOD_RES (16)..(17)..(18)..(19)..(20): Xaa is A or G
  MOD_RES (21)..(22)..(23)..(24): Xaa is A or G or is absent

SEQ ID NO: 38120 - protein, 41 aa, Artificial Sequence; identical to SEQ ID NO: 11388
  GFR-binding peptide
  MOD_RES (1)..(3)..(36)..(37): Xaa is C or S
  MOD_RES (14)..(15)..(16)..(17)..(18): Xaa is A or G
  MOD_RES (19)..(20)..(21)..(22): Xaa is A or G or is absent

SEQ ID NO: 38121 - protein, 37 aa, Artificial Sequence; identical to SEQ ID NO: 11390
  GFR-binding peptide
  MOD_RES (1)..(35)..(36): Xaa is C or S
  MOD_RES (13)..(14)..(15)..(16)..(17): Xaa is A or G
  MOD_RES (18)..(19)..(20)..(21): Xaa is A or G or is absent

SEQ ID NO: 38122 - protein, 41 aa, Artificial Sequence; identical to SEQ ID NO: 11391
  GFR-binding peptide
  MOD_RES (1)..(35)..(36): Xaa is C or S
  MOD_RES (13)..(14)..(15)..(16)..(17): Xaa is A or G
  MOD_RES (18)..(19)..(20)..(21): Xaa is A or G or is absent

SEQ ID NO: 38123 - protein, 41 aa, Artificial Sequence; identical to SEQ ID NO: 13350
  GFR-binding peptide
  MOD_RES (2)..(4)..(38)..(39): Xaa is C or S
  MOD_RES (16)..(17)..(18)..(19)..(20): Xaa is A or G
  MOD_RES (21)..(22)..(23)..(24): Xaa is A or G or is absent

SEQ ID NO: 38124 - protein, 39 aa, Artificial Sequence; identical to SEQ ID NO: 5926
  GFR-binding peptide
  MOD_RES (2)..(33)..(34): Xaa is C or S

SEQ ID NO: 38125 - protein, 41 aa, Artificial Sequence; identical to SEQ ID NO: 11392
  GFR-binding peptide
  MOD_RES (2)..(4)..(38)..(39): Xaa is C or S
  MOD_RES (16)..(17)..(18)..(19)..(20): Xaa is A or G
  MOD_RES (21)..(22)..(23)..(24): Xaa is A or G or is absent

SEQ ID NO: 38126 - protein, 36 aa, Artificial Sequence; identical to SEQ ID NO: 13352
  GFR-binding peptide
  MOD_RES (33)..(33): Xaa is C or S
  MOD_RES (11)..(12)..(13)..(14)..(15): Xaa is A or G
  MOD_RES (16)..(17)..(18)..(19): Xaa is A or G or is absent

SEQ ID NO: 38127 - protein, 39 aa, Artificial Sequence; identical to SEQ ID NO: 11394
  GFR-binding peptide
  MOD_RES (1)..(3)..(34)..(35): Xaa is C or S

SEQ ID NO: 38128 - protein, 37 aa, Artificial Sequence; identical to SEQ ID NO: 13353
  GFR-binding peptide
  MOD_RES (1)..(33): Xaa is C or S

SEQ ID NO: 38129 - protein, 34 aa, Artificial Sequence; identical to SEQ ID NO: 11396
  GFR-binding peptide
  MOD_RES (34)..(34): Xaa is C or S
  MOD_RES (12)..(13)..(14)..(15)..(16): Xaa is A or G
  MOD_RES (17)..(18)..(19)..(20): Xaa is A or G or is absent

SEQ ID NO: 38130 - protein, 35 aa, Artificial Sequence; identical to SEQ ID NO: 13355
  GFR-binding peptide
  MOD_RES (31)..(31): Xaa is C or S

SEQ ID NO: 38131 - protein, 36 aa, Artificial Sequence; identical to SEQ ID NO: 13356
  GFR-binding peptide
  MOD_RES (1)..(33)..(34): Xaa is C or S

SEQ ID NO: 38132 - protein, 41 aa, Artificial Sequence; identical to SEQ ID NO: 5932
  GFR-binding peptide
  MOD_RES (2)..(4)..(36)..(37): Xaa is C or S

SEQ ID NO: 38133 - protein, 38 aa, Artificial Sequence; identical to SEQ ID NO: 13358
  GFR-binding peptide
  MOD_RES (2)..(4)..(38): Xaa is C or S
  MOD_RES (16)..(17)..(18)..(19)..(20): Xaa is A or G
  MOD_RES (21)..(22)..(23)..(24): Xaa is A or G or is absent

SEQ ID NO: 38134 - protein, 34 aa, Artificial Sequence; identical to SEQ ID NO: 3976
  GFR-binding peptide
  MOD_RES (31)..(32): Xaa is C or S

SEQ ID NO: 38135 - protein, 42 aa, Artificial Sequence; identical to SEQ ID NO: 13359
  GFR-binding peptide
  MOD_RES (1)..(3)..(37): Xaa is C or S
  MOD_RES (15)..(16)..(17)..(18)..(19): Xaa is A or G
  MOD_RES (20)..(21)..(22)..(23): Xaa is A or G or is absent

SEQ ID NO: 38136 - protein, 38 aa, Artificial Sequence
  GFR-binding peptide
  MOD_RES (2)..(4)..(37)..(38): Xaa is C or S
  MOD_RES (15)..(16)..(17)..(18)..(19): Xaa is A or G
  MOD_RES (20)..(21)..(22)..(23): Xaa is A or G or is absent
SXKXSKVIMNSLQEXXXXXXXXXYYLITLPELDQSVXX

SEQ ID NO: 38137 - protein, 40 aa, Artificial Sequence; identical to SEQ ID NO: 13360
  GFR-binding peptide
  MOD_RES (2)..(36)..(37): Xaa is C or S
  MOD_RES (14)..(15)..(16)..(17)..(18): Xaa is A or G
  MOD_RES (19)..(20)..(21)..(22): Xaa is A or G or is absent

SEQ ID NO: 38138 - protein, 36 aa, Artificial Sequence; identical to SEQ ID NO: 3978
  GFR-binding peptide
  MOD_RES (1)..(3)..(34)..(35): Xaa is C or S

SEQ ID NO: 38139 - protein, 41 aa, Artificial Sequence; identical to SEQ ID NO: 3981
  GFR-binding peptide
  MOD_RES (1)..(3)..(37)..(38): Xaa is C or S
  MOD_RES (15)..(16)..(17)..(18)..(19): Xaa is A or G
  MOD_RES (20)..(21)..(22)..(23): Xaa is A or G or is absent

SEQ ID NO: 38140 - protein, 39 aa, Artificial Sequence; identical to SEQ ID NO: 13361
  GFR-binding peptide
  MOD_RES (2)..(34)..(35): Xaa is C or S

SEQ ID NO: 38141 - protein, 42 aa, Artificial Sequence; identical to SEQ ID NO: 11400
  GFR-binding peptide
  MOD_RES (1)..(3)..(36)..(37): Xaa is C or S
  MOD_RES (14)..(15)..(16)..(17)..(18): Xaa is A or G
  MOD_RES (19)..(20)..(21)..(22): Xaa is A or G or is absent

SEQ ID NO: 38142 - protein, 39 aa, Artificial Sequence; identical to SEQ ID NO: 3982
  GFR-binding peptide
  MOD_RES (2)..(35)..(36): Xaa is C or S
  MOD_RES (13)..(14)..(15)..(16)..(17): Xaa is A or G
  MOD_RES (18)..(19)..(20)..(21): Xaa is A or G or is absent

SEQ ID NO: 38143 - protein, 40 aa, Artificial Sequence; identical to SEQ ID NO: 11402
  GFR-binding peptide
  MOD_RES (1)..(34)..(35): Xaa is C or S
  MOD_RES (12)..(13)..(14)..(15)..(16): Xaa is A or G
  MOD_RES (17)..(18)..(19)..(20): Xaa is A or G or is absent

SEQ ID NO: 38144 - protein, 35 aa, Artificial Sequence; identical to SEQ ID NO: 13362
  GFR-binding peptide
  MOD_RES (2)..(34)..(35): Xaa is C or S

SEQ ID NO: 38145 - protein, 34 aa, Artificial Sequence; identical to SEQ ID NO: 13363
  GFR-binding peptide
  MOD_RES (1)..(1): Xaa is C or S
  MOD_RES (13)..(14)..(15)..(16)..(17): Xaa is A or G
  MOD_RES (18)..(19)..(20)..(21): Xaa is A or G or is absent

SEQ ID NO: 38146 - protein, 34 aa, Artificial Sequence; identical to SEQ ID NO: 5940
  GFR-binding peptide
  MOD_RES (1)..(3)..(34): Xaa is C or S

SEQ ID NO: 38147 - protein, 36 aa, Artificial Sequence
  GFR-binding peptide
  MOD_RES (31)..(32): Xaa is C or S
SKVIMNSLQEIKPTKGIYYLITLPELDQSVXXPSAS

SEQ ID NO: 38148 - protein, 36 aa, Artificial Sequence; identical to SEQ ID NO: 13366
  GFR-binding peptide
  MOD_RES (1)..(3): Xaa is C or S
  MOD_RES (15)..(16)..(17)..(18)..(19): Xaa is A or G
  MOD_RES (20)..(21)..(22)..(23): Xaa is A or G or is absent

SEQ ID NO: 38149 - protein, 38 aa, Artificial Sequence; identical to SEQ ID NO: 11404
  GFR-binding peptide
  MOD_RES (2)..(4)..(38): Xaa is C or S
  MOD_RES (16)..(17)..(18)..(19)..(20): Xaa is A or G
  MOD_RES (21)..(22)..(23)..(24): Xaa is A or G or is absent

SEQ ID NO: 38150 - protein, 42 aa, Artificial Sequence; identical to SEQ ID NO: 11405
  GFR-binding peptide
  MOD_RES (2)..(4)..(38)..(39): Xaa is C or S
  MOD_RES (16)..(17)..(18)..(19)..(20): Xaa is A or G
  MOD_RES (21)..(22)..(23)..(24): Xaa is A or G or is absent

SEQ ID NO: 38151 - protein, 37 aa, Artificial Sequence; identical to SEQ ID NO: 13368
  GFR-binding peptide
  MOD_RES (31)..(32): Xaa is C or S

SEQ ID NO: 38152 - protein, 40 aa, Artificial Sequence; identical to SEQ ID NO: 5943
  GFR-binding peptide
  MOD_RES (2)..(35)..(36): Xaa is C or S
  MOD_RES (13)..(14)..(15)..(16)..(17): Xaa is A or G
  MOD_RES (18)..(19)..(20)..(21): Xaa is A or G or is absent

SEQ ID NO: 38153 - protein, 33 aa, Artificial Sequence; identical to SEQ ID NO: 13370
  GFR-binding peptide
  MOD_RES (1)..(33): Xaa is C or S

SEQ ID NO: 38154 - protein, 37 aa, Artificial Sequence; identical to SEQ ID NO: 11406
  GFR-binding peptide
  MOD_RES (2)..(36): Xaa is C or S
  MOD_RES (14)..(15)..(16)..(17)..(18): Xaa is A or G
  MOD_RES (19)..(20)..(21)..(22): Xaa is A or G or is absent

SEQ ID NO: 38155 - protein, 33 aa, Artificial Sequence; identical to SEQ ID NO: 13371
  GFR-binding peptide
  MOD_RES (1)..(32)..(33): Xaa is C or S

SEQ ID NO: 38156 - protein, 36 aa, Artificial Sequence; identical to SEQ ID NO: 3985
  GFR-binding peptide
  MOD_RES (1)..(34)..(35): Xaa is C or S
  MOD_RES (12)..(13)..(14)..(15)..(16): Xaa is A or G
  MOD_RES (17)..(18)..(19)..(20): Xaa is A or G or is absent

SEQ ID NO: 38157 - protein, 43 aa, Artificial Sequence; identical to SEQ ID NO: 13372
  GFR-binding peptide
  MOD_RES (2)..(4)..(38)..(39): Xaa is C or S
  MOD_RES (16)..(17)..(18)..(19)..(20): Xaa is A or G
  MOD_RES (21)..(22)..(23)..(24): Xaa is A or G or is absent

SEQ ID NO: 38158 - protein, 41 aa, Artificial Sequence; identical to SEQ ID NO: 13373
  GFR-binding peptide
  MOD_RES (1)..(3)..(35)..(36): Xaa is C or S

SEQ ID NO: 38159 - protein, 35 aa, Artificial Sequence; identical to SEQ ID NO: 11409
  GFR-binding peptide
  MOD_RES (2)..(2): Xaa is C or S
  MOD_RES (14)..(15)..(16)..(17)..(18): Xaa is A or G
  MOD_RES (19)..(20)..(21)..(22): Xaa is A or G or is absent

SEQ ID NO: 38160 - protein, 41 aa, Artificial Sequence; identical to SEQ ID NO: 11410
  GFR-binding peptide
  MOD_RES (2)..(36)..(37): Xaa is C or S
  MOD_RES (14)..(15)..(16)..(17)..(18): Xaa is A or G
  MOD_RES (19)..(20)..(21)..(22): Xaa is A or G or is absent

SEQ ID NO: 38161 - protein, 40 aa, Artificial Sequence; identical to SEQ ID NO: 13374
  GFR-binding peptide
  MOD_RES (2)..(4)..(37)..(38): Xaa is C or S
  MOD_RES (15)..(16)..(17)..(18)..(19): Xaa is A or G
  MOD_RES (20)..(21)..(22)..(23): Xaa is A or G or is absent

SEQ ID NO: 38162 - protein, 34 aa, Artificial Sequence; identical to SEQ ID NO: 13375
  GFR-binding peptide
  MOD_RES (1)..(3)..(34): Xaa is C or S

SEQ ID NO: 38163 - protein, 39 aa, Artificial Sequence; identical to SEQ ID NO: 11411
  GFR-binding peptide
  MOD_RES (1)..(3)..(35)..(36): Xaa is C or S

SEQ ID NO: 38164 - protein, 41 aa, Artificial Sequence; identical to SEQ ID NO: 11412
  GFR-binding peptide
  MOD_RES (1)..(3)..(37)..(38): Xaa is C or S
  MOD_RES (15)..(16)..(17)..(18)..(19): Xaa is A or G
  MOD_RES (20)..(21)..(22)..(23): Xaa is A or G or is absent

SEQ ID NO: 38165 - protein, 40 aa, Artificial Sequence; identical to SEQ ID NO: 11413
  GFR-binding peptide
  MOD_RES (2)..(35)..(36): Xaa is C or S
  MOD_RES (13)..(14)..(15)..(16)..(17): Xaa is A or G
  MOD_RES (18)..(19)..(20)..(21): Xaa is A or G or is absent

SEQ ID NO: 38166 - protein, 38 aa, Artificial Sequence; identical to SEQ ID NO: 11414
  GFR-binding peptide
  MOD_RES (1)..(35)..(36): Xaa is C or S
  MOD_RES (13)..(14)..(15)..(16)..(17): Xaa is A or G
  MOD_RES (18)..(19)..(20)..(21): Xaa is A or G or is absent

SEQ ID NO: 38167 - protein, 36 aa, Artificial Sequence; identical to SEQ ID NO: 13376
  GFR-binding peptide
  MOD_RES (1)..(3)..(35)..(36): Xaa is C or S

SEQ ID NO: 38168 - protein, 38 aa, Artificial Sequence; identical to SEQ ID NO: 11416
  GFR-binding peptide
  MOD_RES (2)..(36)..(37): Xaa is C or S
  MOD_RES (14)..(15)..(16)..(17)..(18): Xaa is A or G
  MOD_RES (19)..(20)..(21)..(22): Xaa is A or G or is absent

SEQ ID NO: 38169 - protein, 34 aa, Artificial Sequence; identical to SEQ ID NO: 11417
  GFR-binding peptide
  MOD_RES (32)..(33): Xaa is C or S

SEQ ID NO: 38170 - protein, 35 aa, Artificial Sequence; identical to SEQ ID NO: 13379
  GFR-binding peptide
  MOD_RES (1)..(34)..(35): Xaa is C or S
  MOD_RES (12)..(13)..(14)..(15)..(16): Xaa is A or G
  MOD_RES (17)..(18)..(19)..(20): Xaa is A or G or is absent

SEQ ID NO: 38171 - protein, 39 aa, Artificial Sequence; identical to SEQ ID NO: 11419
  GFR-binding peptide
  MOD_RES (34)..(34): Xaa is C or S
  MOD_RES (12)..(13)..(14)..(15)..(16): Xaa is A or G
  MOD_RES (17)..(18)..(19)..(20): Xaa is A or G or is absent

SEQ ID NO: 38172 - protein, 34 aa, Artificial Sequence; identical to SEQ ID NO: 11420
  GFR-binding peptide
  MOD_RES (31)..(32): Xaa is C or S

SEQ ID NO: 38173 - protein, 35 aa, Artificial Sequence; identical to SEQ ID NO: 13380
  GFR-binding peptide
  MOD_RES (1)..(34)..(35): Xaa is C or S
  MOD_RES (12)..(13)..(14)..(15)..(16): Xaa is A or G
  MOD_RES (17)..(18)..(19)..(20): Xaa is A or G or is absent

SEQ ID NO: 38174 - protein, 33 aa, Artificial Sequence; identical to SEQ ID NO: 5957
  GFR-binding peptide
  MOD_RES (33)..(33): Xaa is C or S
  MOD_RES (11)..(12)..(13)..(14)..(15): Xaa is A or G
  MOD_RES (16)..(17)..(18)..(19): Xaa is A or G or is absent

SEQ ID NO: 38175 - protein, 38 aa, Artificial Sequence; identical to SEQ ID NO: 13382
  GFR-binding peptide
  MOD_RES (1)..(33)..(34): Xaa is C or S

SEQ ID NO: 38176 - protein, 38 aa, Artificial Sequence; identical to SEQ ID NO: 13383
  GFR-binding peptide
  MOD_RES (1)..(3)..(35)..(36): Xaa is C or S

SEQ ID NO: 38177 - protein, 38 aa, Artificial Sequence; identical to SEQ ID NO: 13384
  GFR-binding peptide
  MOD_RES (1)..(33): Xaa is C or S

SEQ ID NO: 38178 - protein, 34 aa, Artificial Sequence; identical to SEQ ID NO: 13385
  GFR-binding peptide
  MOD_RES (1)..(1): Xaa is C or S
  MOD_RES (13)..(14)..(15)..(16)..(17): Xaa is A or G
  MOD_RES (18)..(19)..(20)..(21): Xaa is A or G or is absent

SEQ ID NO: 38179 - protein, 36 aa, Artificial Sequence; identical to SEQ ID NO: 13386
  GFR-binding peptide
  MOD_RES (33)..(34): Xaa is C or S
  MOD_RES (11)..(12)..(13)..(14)..(15): Xaa is A or G
  MOD_RES (16)..(17)..(18)..(19): Xaa is A or G or is absent

SEQ ID NO: 38180 - protein, 36 aa, Artificial Sequence; identical to SEQ ID NO: 4000
  GFR-binding peptide
  MOD_RES (31)..(32): Xaa is C or S

SEQ ID NO: 38181 - protein, 40 aa, Artificial Sequence; identical to SEQ ID NO: 13387
  GFR-binding peptide
  MOD_RES (1)..(3)..(37)..(38): Xaa is C or S
  MOD_RES (15)..(16)..(17)..(18)..(19): Xaa is A or G
  MOD_RES (20)..(21)..(22)..(23): Xaa is A or G or is absent

SEQ ID NO: 38182 - protein, 31 aa, Artificial Sequence; identical to SEQ ID NO: 11422
  GFR-binding peptide
  MOD_RES (31)..(31): Xaa is C or S

SEQ ID NO: 38183 - protein, 33 aa, Artificial Sequence; identical to SEQ ID NO: 11423
  GFR-binding peptide
  MOD_RES (32)..(33): Xaa is C or S

SEQ ID NO: 38184 - protein, 34 aa, Artificial Sequence; identical to SEQ ID NO: 11426
  GFR-binding peptide
  MOD_RES (1)..(3): Xaa is C or S

SEQ ID NO: 38185 - protein, 38 aa, Artificial Sequence; identical to SEQ ID NO: 5964
  GFR-binding peptide
  MOD_RES (2)..(34)..(35): Xaa is C or S

SEQ ID NO: 38186 - protein, 37 aa, Artificial Sequence; identical to SEQ ID NO: 13390
  GFR-binding peptide
  MOD_RES (32)..(33): Xaa is C or S

SEQ ID NO: 38187 - protein, 41 aa, Artificial Sequence; identical to SEQ ID NO: 5967
  GFR-binding peptide
  MOD_RES (1)..(35)..(36): Xaa is C or S
  MOD_RES (13)..(14)..(15)..(16)..(17): Xaa is A or G
  MOD_RES (18)..(19)..(20)..(21): Xaa is A or G or is absent

SEQ ID NO: 38188 - protein, 33 aa, Artificial Sequence; identical to SEQ ID NO: 11427
  GFR-binding peptide
  MOD_RES (2)..(33): Xaa is C or S

SEQ ID NO: 38189 - protein, 38 aa, Artificial Sequence; identical to SEQ ID NO: 11428
  GFR-binding peptide
  MOD_RES (1)..(3)..(35)..(36): Xaa is C or S

SEQ ID NO: 38190 - protein, 38 aa, Artificial Sequence; identical to SEQ ID NO: 11429
  GFR-binding peptide
  MOD_RES (2)..(36)..(37): Xaa is C or S
  MOD_RES (14)..(15)..(16)..(17)..(18): Xaa is A or G
  MOD_RES (19)..(20)..(21)..(22): Xaa is A or G or is absent

SEQ ID NO: 38191 - protein, 38 aa, Artificial Sequence; identical to SEQ ID NO: 11430
  GFR-binding peptide
  MOD_RES (2)..(4)..(38): Xaa is C or S
  MOD_RES (16)..(17)..(18)..(19)..(20): Xaa is A or G
  MOD_RES (21)..(22)..(23)..(24): Xaa is A or G or is absent

SEQ ID NO: 38192 - protein, 37 aa, Artificial Sequence; identical to SEQ ID NO: 5968
  GFR-binding peptide
  MOD_RES (33)..(34): Xaa is C or S
  MOD_RES (11)..(12)..(13)..(14)..(15): Xaa is A or G
  MOD_RES (16)..(17)..(18)..(19): Xaa is A or G or is absent

SEQ ID NO: 38193 - protein, 34 aa, Artificial Sequence; identical to SEQ ID NO: 11431
  GFR-binding peptide
  MOD_RES (32)..(33): Xaa is C or S

SEQ ID NO: 38194 - protein, 40 aa, Artificial Sequence; identical to SEQ ID NO: 11432
  GFR-binding peptide
  MOD_RES (2)..(4)..(36)..(37): Xaa is C or S

SEQ ID NO: 38195 - protein, 32 aa, Artificial Sequence; identical to SEQ ID NO: 13393
  GFR-binding peptide
  MOD_RES (11)..(12)..(13)..(14)..(15): Xaa is A or G
  MOD_RES (16)..(17)..(18)..(19): Xaa is A or G or is absent

SEQ ID NO: 38196 - protein, 40 aa, Artificial Sequence; identical to SEQ ID NO: 11433
  GFR-binding peptide
  MOD_RES (2)..(36)..(37): Xaa is C or S
  MOD_RES (14)..(15)..(16)..(17)..(18): Xaa is A or G
  MOD_RES (19)..(20)..(21)..(22): Xaa is A or G or is absent

SEQ ID NO: 38197 - protein, 36 aa, Artificial Sequence; identical to SEQ ID NO: 4007
  GFR-binding peptide
  MOD_RES (1)..(32)..(33): Xaa is C or S

SEQ ID NO: 38198 - protein, 43 aa, Artificial Sequence; identical to SEQ ID NO: 11435
  GFR-binding peptide
  MOD_RES (2)..(4)..(38)..(39): Xaa is C or S
  MOD_RES (16)..(17)..(18)..(19)..(20): Xaa is A or G
  MOD_RES (21)..(22)..(23)..(24): Xaa is A or G or is absent

SEQ ID NO: 38199 - protein, 42 aa, Artificial Sequence
  GFR-binding peptide
  MOD_RES (2)..(4)..(37)..(38): Xaa is C or S
  MOD_RES (15)..(16)..(17)..(18)..(19): Xaa is A or G
  MOD_RES (20)..(21)..(22)..(23): Xaa is A or G or is absent
SXKXSKVIMNSLQEXXXXXXXXXYYLITLPELDQSVXXPSAS

SEQ ID NO: 38200 - protein, 38 aa, Artificial Sequence; identical to SEQ ID NO: 11436
  GFR-binding peptide
  MOD_RES (2)..(34)..(35): Xaa is C or S

SEQ ID NO: 38201 - protein, 37 aa, Artificial Sequence; identical to SEQ ID NO: 11437
  GFR-binding peptide
  MOD_RES (1)..(3)..(34)..(35): Xaa is C or S

SEQ ID NO: 38202 - protein, 37 aa, Artificial Sequence; identical to SEQ ID NO: 11438
  GFR-binding peptide
  MOD_RES (2)..(4): Xaa is C or S
  MOD_RES (16)..(17)..(18)..(19)..(20): Xaa is A or G
  MOD_RES (21)..(22)..(23)..(24): Xaa is A or G or is absent

SEQ ID NO: 38203 - protein, 43 aa, Artificial Sequence; identical to SEQ ID NO: 13396
  GFR-binding peptide
  MOD_RES (1)..(3)..(37)..(38): Xaa is C or S
  MOD_RES (15)..(16)..(17)..(18)..(19): Xaa is A or G
  MOD_RES (20)..(21)..(22)..(23): Xaa is A or G or is absent

SEQ ID NO: 38204 - protein, 36 aa, Artificial Sequence; identical to SEQ ID NO: 11439
  GFR-binding peptide
  MOD_RES (2)..(4)..(35)..(36): Xaa is C or S

SEQ ID NO: 38205 - protein, 32 aa, Artificial Sequence; identical to SEQ ID NO: 5983
  GFR-binding peptide
  MOD_RES (11)..(12)..(13)..(14)..(15): Xaa is A or G
  MOD_RES (16)..(17)..(18)..(19): Xaa is A or G or is absent

SEQ ID NO: 38206 - protein, 39 aa, Artificial Sequence; identical to SEQ ID NO: 13399
  GFR-binding peptide
  MOD_RES (1)..(35)..(36): Xaa is C or S
  MOD_RES (13)..(14)..(15)..(16)..(17): Xaa is A or G
  MOD_RES (18)..(19)..(20)..(21): Xaa is A or G or is absent

SEQ ID NO: 38207 - protein, 38 aa, Artificial Sequence; identical to SEQ ID NO: 13400
  GFR-binding peptide
  MOD_RES (2)..(4)..(35)..(36): Xaa is C or S

SEQ ID NO: 38208 - protein, 42 aa, Artificial Sequence; identical to SEQ ID NO: 5986
  GFR-binding peptide
  MOD_RES (1)..(3)..(36)..(37): Xaa is C or S
  MOD_RES (14)..(15)..(16)..(17)..(18): Xaa is A or G
  MOD_RES (19)..(20)..(21)..(22): Xaa is A or G or is absent

SEQ ID NO: 38209 - protein, 34 aa, Artificial Sequence; identical to SEQ ID NO: 11442
  GFR-binding peptide
  MOD_RES (2)..(33)..(34): Xaa is C or S

SEQ ID NO: 38210 - protein, 38 aa, Artificial Sequence; identical to SEQ ID NO: 13404
  GFR-binding peptide
  MOD_RES (1)..(3)..(36)..(37): Xaa is C or S
  MOD_RES (14)..(15)..(16)..(17)..(18): Xaa is A or G
  MOD_RES (19)..(20)..(21)..(22): Xaa is A or G or is absent

SEQ ID NO: 38211 - protein, 39 aa, Artificial Sequence; identical to SEQ ID NO: 11445
  GFR-binding peptide
  MOD_RES (2)..(4)..(36)..(37): Xaa is C or S

SEQ ID NO: 38212 - protein, 35 aa, Artificial Sequence; identical to SEQ ID NO: 5992
  GFR-binding peptide
  MOD_RES (31)..(32): Xaa is C or S

SEQ ID NO: 38213 - protein, 33 aa, Artificial Sequence
  GFR-binding peptide
  MOD_RES (1)..(3): Xaa is C or S
XKXSKVIMNSLQEIKPTKGIYYLITLPELDQSV

SEQ ID NO: 38214 - protein, 39 aa, Artificial Sequence; identical to SEQ ID NO: 11446
  GFR-binding peptide
  MOD_RES (2)..(36)..(37): Xaa is C or S
  MOD_RES (14)..(15)..(16)..(17)..(18): Xaa is A or G
  MOD_RES (19)..(20)..(21)..(22): Xaa is A or G or is absent

SEQ ID NO: 38215 - protein, 33 aa, Artificial Sequence; identical to SEQ ID NO: 13406
  GFR-binding peptide
  MOD_RES (33)..(33): Xaa is C or S
  MOD_RES (11)..(12)..(13)..(14)..(15): Xaa is A or G
  MOD_RES (16)..(17)..(18)..(19): Xaa is A or G or is absent

SEQ ID NO: 38216 - protein, 35 aa, Artificial Sequence; identical to SEQ ID NO: 11449
  GFR-binding peptide
  MOD_RES (1)..(32)..(33): Xaa is C or S

SEQ ID NO: 38217 - protein, 37 aa, Artificial Sequence; identical to SEQ ID NO: 4024
  GFR-binding peptide
  MOD_RES (1)..(3)..(35)..(36): Xaa is C or S

SEQ ID NO: 38218 - protein, 37 aa, Artificial Sequence; identical to SEQ ID NO: 11451
  GFR-binding peptide
  MOD_RES (33)..(33): Xaa is C or S
  MOD_RES (11)..(12)..(13)..(14)..(15): Xaa is A or G
  MOD_RES (16)..(17)..(18)..(19): Xaa is A or G or is absent

SEQ ID NO: 38219 - protein, 41 aa, Artificial Sequence; identical to SEQ ID NO: 11452
  GFR-binding peptide
  MOD_RES (2)..(36)..(37): Xaa is C or S
  MOD_RES (14)..(15)..(16)..(17)..(18): Xaa is A or G
  MOD_RES (19)..(20)..(21)..(22): Xaa is A or G or is absent

SEQ ID NO: 38220 - protein, 42 aa, Artificial Sequence; identical to SEQ ID NO: 11453
  GFR-binding peptide
  MOD_RES (1)..(3)..(37)..(38): Xaa is C or S
  MOD_RES (15)..(16)..(17)..(18)..(19): Xaa is A or G
  MOD_RES (20)..(21)..(22)..(23): Xaa is A or G or is absent

SEQ ID NO: 38221 - protein, 37 aa, Artificial Sequence; identical to SEQ ID NO: 13407
  GFR-binding peptide
  MOD_RES (1)..(3)..(35)..(36): Xaa is C or S

SEQ ID NO: 38222 - protein, 37 aa, Artificial Sequence; identical to SEQ ID NO: 4025
  GFR-binding peptide
  MOD_RES (2)..(36)..(37): Xaa is C or S
  MOD_RES (14)..(15)..(16)..(17)..(18): Xaa is A or G
  MOD_RES (19)..(20)..(21)..(22): Xaa is A or G or is absent

SEQ ID NO: 38223 - protein, 41 aa, Artificial Sequence; identical to SEQ ID NO: 13408
  GFR-binding peptide
  MOD_RES (2)..(36)..(37): Xaa is C or S
  MOD_RES (14)..(15)..(16)..(17)..(18): Xaa is A or G
  MOD_RES (19)..(20)..(21)..(22): Xaa is A or G or is absent

SEQ ID NO: 38224 - protein, 37 aa, Artificial Sequence; identical to SEQ ID NO: 13409
  GFR-binding peptide
  MOD_RES (1)..(3)..(35)..(36): Xaa is C or S

SEQ ID NO: 38225 - protein, 34 aa, Artificial Sequence; identical to SEQ ID NO: 11456
  GFR-binding peptide
  MOD_RES (2)..(34): Xaa is C or S

SEQ ID NO: 38226 - protein, 33 aa, Artificial Sequence; identical to SEQ ID NO: 13410
  GFR-binding peptide
  MOD_RES (2)..(2): Xaa is C or S

SEQ ID NO: 38227 - protein, 35 aa, Artificial Sequence; identical to SEQ ID NO: 11457
  GFR-binding peptide
  MOD_RES (31)..(32): Xaa is C or S

SEQ ID NO: 38228 - protein, 36 aa, Artificial Sequence; identical to SEQ ID NO: 11458
  GFR-binding peptide
  MOD_RES (1)..(3)..(35)..(36): Xaa is C or S

SEQ ID NO: 38229 - protein, 32 aa, Artificial Sequence; identical to SEQ ID NO: 11459
  GFR-binding peptide
  MOD_RES (11)..(12)..(13)..(14)..(15): Xaa is A or G
  MOD_RES (16)..(17)..(18)..(19): Xaa is A or G or is absent

SEQ ID NO: 38230 - protein, 41 aa, Artificial Sequence; identical to SEQ ID NO: 13411
  GFR-binding peptide
  MOD_RES (2)..(4)..(36)..(37): Xaa is C or S

SEQ ID NO: 38231 - protein, 39 aa, Artificial Sequence; identical to SEQ ID NO: 11460
  GFR-binding peptide
  MOD_RES (2)..(35)..(36): Xaa is C or S
  MOD_RES (13)..(14)..(15)..(16)..(17): Xaa is A or G
  MOD_RES (18)..(19)..(20)..(21): Xaa is A or G or is absent

SEQ ID NO: 38232 - protein, 32 aa, Artificial Sequence; identical to SEQ ID NO: 13412
  GFR-binding peptide
  MOD_RES (11)..(12)..(13)..(14)..(15): Xaa is A or G
  MOD_RES (16)..(17)..(18)..(19): Xaa is A or G or is absent

SEQ ID NO: 38233 - protein, 34 aa, Artificial Sequence; identical to SEQ ID NO: 11461
  GFR-binding peptide
  MOD_RES (31)..(32): Xaa is C or S

SEQ ID NO: 38234 - protein, 41 aa, Artificial Sequence; identical to SEQ ID NO: 4033
  GFR-binding peptide
  MOD_RES (1)..(3)..(37)..(38): Xaa is C or S
  MOD_RES (15)..(16)..(17)..(18)..(19): Xaa is A or G
  MOD_RES (20)..(21)..(22)..(23): Xaa is A or G or is absent

SEQ ID NO: 38235 - protein, 41 aa, Artificial Sequence; identical to SEQ ID NO: 11463
  GFR-binding peptide
  MOD_RES (2)..(36): Xaa is C or S
  MOD_RES (14)..(15)..(16)..(17)..(18): Xaa is A or G
  MOD_RES (19)..(20)..(21)..(22): Xaa is A or G or is absent

SEQ ID NO: 38236 - protein, 38 aa, Artificial Sequence; identical to SEQ ID NO: 11464
  GFR-binding peptide
  MOD_RES (2)..(4)..(36)..(37): Xaa is C or S

SEQ ID NO: 38237 - protein, 42 aa, Artificial Sequence; identical to SEQ ID NO: 11465
  GFR-binding peptide
  MOD_RES (2)..(36)..(37): Xaa is C or S
  MOD_RES (14)..(15)..(16)..(17)..(18): Xaa is A or G
  MOD_RES (19)..(20)..(21)..(22): Xaa is A or G or is absent

SEQ ID NO: 38238 - protein, 33 aa, Artificial Sequence; identical to SEQ ID NO: 11466
  GFR-binding peptide
  MOD_RES (1)..(32)..(33): Xaa is C or S

SEQ ID NO: 38239 - protein, 42 aa, Artificial Sequence; identical to SEQ ID NO: 6005
  GFR-binding peptide
  MOD_RES (2)..(36)..(37): Xaa is C or S
  MOD_RES (14)..(15)..(16)..(17)..(18): Xaa is A or G
  MOD_RES (19)..(20)..(21)..(22): Xaa is A or G or is absent

SEQ ID NO: 38240 - protein, 37 aa, Artificial Sequence; identical to SEQ ID NO: 11467
  GFR-binding peptide
  MOD_RES (33)..(34): Xaa is C or S
  MOD_RES (11)..(12)..(13)..(14)..(15): Xaa is A or G
  MOD_RES (16)..(17)..(18)..(19): Xaa is A or G or is absent

SEQ ID NO: 38241 - protein, 37 aa, Artificial Sequence; identical to SEQ ID NO: 13415
  GFR-binding peptide
  MOD_RES (2)..(34): Xaa is C or S

SEQ ID NO: 38242 - protein, 43 aa, Artificial Sequence; identical to SEQ ID NO: 11468
  GFR-binding peptide
  MOD_RES (2)..(4)..(37)..(38): Xaa is C or S
  MOD_RES (15)..(16)..(17)..(18)..(19): Xaa is A or G
  MOD_RES (20)..(21)..(22)..(23): Xaa is A or G or is absent

SEQ ID NO: 38243 - protein, 36 aa, Artificial Sequence; identical to SEQ ID NO: 13416
  GFR-binding peptide
  MOD_RES (34)..(35): Xaa is C or S
  MOD_RES (12)..(13)..(14)..(15)..(16): Xaa is A or G
  MOD_RES (17)..(18)..(19)..(20): Xaa is A or G or is absent

SEQ ID NO: 38244 - protein, 35 aa, Artificial Sequence; identical to SEQ ID NO: 13417
  GFR-binding peptide
  MOD_RES (34)..(35): Xaa is C or S
  MOD_RES (12)..(13)..(14)..(15)..(16): Xaa is A or G
  MOD_RES (17)..(18)..(19)..(20): Xaa is A or G or is absent

SEQ ID NO: 38245 - protein, 38 aa, Artificial Sequence; identical to SEQ ID NO: 13419
  GFR-binding peptide
  MOD_RES (1)..(33)..(34): Xaa is C or S

SEQ ID NO: 38246 - protein, 37 aa, Artificial Sequence; identical to SEQ ID NO: 11471
  GFR-binding peptide
  MOD_RES (33)..(34): Xaa is C or S
  MOD_RES (11)..(12)..(13)..(14)..(15): Xaa is A or G
  MOD_RES (16)..(17)..(18)..(19): Xaa is A or G or is absent

SEQ ID NO: 38247 - protein, 38 aa, Artificial Sequence; identical to SEQ ID NO: 11472
  GFR-binding peptide
  MOD_RES (1)..(35)..(36): Xaa is C or S
  MOD_RES (13)..(14)..(15)..(16)..(17): Xaa is A or G
  MOD_RES (18)..(19)..(20)..(21): Xaa is A or G or is absent

SEQ ID NO: 38248 - protein, 35 aa, Artificial Sequence; identical to SEQ ID NO: 11473
  GFR-binding peptide
  MOD_RES (2)..(34): Xaa is C or S

SEQ ID NO: 38249 - protein, 40 aa, Artificial Sequence; identical to SEQ ID NO: 6014
  GFR-binding peptide
  MOD_RES (1)..(3)..(36)..(37): Xaa is C or S
  MOD_RES (14)..(15)..(16)..(17)..(18): Xaa is A or G
  MOD_RES (19)..(20)..(21)..(22): Xaa is A or G or is absent

SEQ ID NO: 38250 - protein, 42 aa, Artificial Sequence; identical to SEQ ID NO: 13421
  GFR-binding peptide
  MOD_RES (2)..(4)..(36): Xaa is C or S

SEQ ID NO: 38251 - protein, 39 aa, Artificial Sequence; identical to SEQ ID NO: 13422
  GFR-binding peptide
  MOD_RES (2)..(4)..(38)..(39): Xaa is C or S
  MOD_RES (16)..(17)..(18)..(19)..(20): Xaa is A or G
  MOD_RES (21)..(22)..(23)..(24): Xaa is A or G or is absent

SEQ ID NO: 38252 - protein, 41 aa, Artificial Sequence; identical to SEQ ID NO: 11474
  GFR-binding peptide
  MOD_RES (2)..(4)..(38)..(39): Xaa is C or S
  MOD_RES (16)..(17)..(18)..(19)..(20): Xaa is A or G
  MOD_RES (21)..(22)..(23)..(24): Xaa is A or G or is absent

SEQ ID NO: 38253 - protein, 41 aa, Artificial Sequence; identical to SEQ ID NO: 13423
  GFR-binding peptide
  MOD_RES (1)..(35)..(36): Xaa is C or S
  MOD_RES (13)..(14)..(15)..(16)..(17): Xaa is A or G
  MOD_RES (18)..(19)..(20)..(21): Xaa is A or G or is absent

SEQ ID NO: 38254 - protein, 38 aa, Artificial Sequence; identical to SEQ ID NO: 13425
  GFR-binding peptide
  MOD_RES (33)..(34): Xaa is C or S
  MOD_RES (11)..(12)..(13)..(14)..(15): Xaa is A or G
  MOD_RES (16)..(17)..(18)..(19): Xaa is A or G or is absent

SEQ ID NO: 38255 - protein, 38 aa, Artificial Sequence; identical to SEQ ID NO: 11475
  GFR-binding peptide
  MOD_RES (2)..(4)..(37)..(38): Xaa is C or S
  MOD_RES (15)..(16)..(17)..(18)..(19): Xaa is A or G
  MOD_RES (20)..(21)..(22)..(23): Xaa is A or G or is absent

SEQ ID NO: 38256 - protein, 39 aa, Artificial Sequence; identical to SEQ ID NO: 13426
  GFR-binding peptide
  MOD_RES (1)..(35)..(36): Xaa is C or S
  MOD_RES (13)..(14)..(15)..(16)..(17): Xaa is A or G
  MOD_RES (18)..(19)..(20)..(21): Xaa is A or G or is absent

SEQ ID NO: 38257 - protein, 39 aa, Artificial Sequence; identical to SEQ ID NO: 13427
  GFR-binding peptide
  MOD_RES (1)..(3)..(35)..(36): Xaa is C or S

SEQ ID NO: 38258 - protein, 38 aa, Artificial Sequence; identical to SEQ ID NO: 13429
  GFR-binding peptide
  MOD_RES (1)..(3)..(35)..(36): Xaa is C or S

SEQ ID NO: 38259 - protein, 37 aa, Artificial Sequence; identical to SEQ ID NO: 11478
  GFR-binding peptide
  MOD_RES (33)..(34): Xaa is C or S
  MOD_RES (11)..(12)..(13)..(14)..(15): Xaa is A or G
  MOD_RES (16)..(17)..(18)..(19): Xaa is A or G or is absent

SEQ ID NO: 38260 - protein, 35 aa, Artificial Sequence; identical to SEQ ID NO: 11479
  GFR-binding peptide
  MOD_RES (32)..(33): Xaa is C or S

SEQ ID NO: 38261 - protein, 34 aa, Artificial Sequence; identical to SEQ ID NO: 11480
  GFR-binding peptide
  MOD_RES (33)..(33): Xaa is C or S
  MOD_RES (11)..(12)..(13)..(14)..(15): Xaa is A or G
  MOD_RES (16)..(17)..(18)..(19): Xaa is A or G or is absent

SEQ ID NO: 38262 - protein, 40 aa, Artificial Sequence; identical to SEQ ID NO: 11481
  GFR-binding peptide
  MOD_RES (2)..(4)..(35)..(36): Xaa is C or S

SEQ ID NO: 38263 - protein, 40 aa, Artificial Sequence; identical to SEQ ID NO: 4050
  GFR-binding peptide
  MOD_RES (2)..(35)..(36): Xaa is C or S
  MOD_RES (13)..(14)..(15)..(16)..(17): Xaa is A or G
  MOD_RES (18)..(19)..(20)..(21): Xaa is A or G or is absent

SEQ ID NO: 38264 - protein, 33 aa, Artificial Sequence; identical to SEQ ID NO: 13431
  GFR-binding peptide
  MOD_RES (33)..(33): Xaa is C or S
  MOD_RES (11)..(12)..(13)..(14)..(15): Xaa is A or G
  MOD_RES (16)..(17)..(18)..(19): Xaa is A or G or is absent

SEQ ID NO: 38265 - protein, 37 aa, Artificial Sequence; identical to SEQ ID NO: 13432
  GFR-binding peptide
  MOD_RES (1)..(3)..(35)..(36): Xaa is C or S

SEQ ID NO: 38266 - protein, 41 aa, Artificial Sequence; identical to SEQ ID NO: 11484
  GFR-binding peptide
  MOD_RES (1)..(3)..(37)..(38): Xaa is C or S
  MOD_RES (15)..(16)..(17)..(18)..(19): Xaa is A or G
  MOD_RES (20)..(21)..(22)..(23): Xaa is A or G or is absent

SEQ ID NO: 38267 - protein, 38 aa, Artificial Sequence
  GFR-binding peptide
  MOD_RES (2)..(33)..(34): Xaa is C or S
KXSKVIMNSLQEIKPTKGIYYLITLPELDQSVXXPSAS

SEQ ID NO: 38268 - protein, 36 aa, Artificial Sequence; identical to SEQ ID NO: 11485
  GFR-binding peptide
  MOD_RES (1)..(34)..(35): Xaa is C or S
  MOD_RES (12)..(13)..(14)..(15)..(16): Xaa is A or G
  MOD_RES (17)..(18)..(19)..(20): Xaa is A or G or is absent

SEQ ID NO: 38269 - protein, 41 aa, Artificial Sequence; identical to SEQ ID NO: 13433
  GFR-binding peptide
  MOD_RES (2)..(4)..(38): Xaa is C or S
  MOD_RES (16)..(17)..(18)..(19)..(20): Xaa is A or G
  MOD_RES (21)..(22)..(23)..(24): Xaa is A or G or is absent

SEQ ID NO: 38270 - protein, 36 aa, Artificial Sequence
  GFR-binding peptide
  MOD_RES (2)..(33)..(34): Xaa is C or S
KXSKVIMNSLQEIKPTKGIYYLITLPELDQSVXXPS

SEQ ID NO: 38271 - protein, 38 aa, Artificial Sequence; identical to SEQ ID NO: 4058
  GFR-binding peptide
  MOD_RES (2)..(4)..(36)..(37): Xaa is C or S

SEQ ID NO: 38272 - protein, 39 aa, Artificial Sequence; identical to SEQ ID NO: 11488
  GFR-binding peptide
  MOD_RES (33)..(34): Xaa is C or S
  MOD_RES (11)..(12)..(13)..(14)..(15): Xaa is A or G
  MOD_RES (16)..(17)..(18)..(19): Xaa is A or G or is absent

SEQ ID NO: 38273 - protein, 36 aa, Artificial Sequence; identical to SEQ ID NO: 13435
  GFR-binding peptide
  MOD_RES (1)..(3)..(35)..(36): Xaa is C or S

SEQ ID NO: 38274 - protein, 38 aa, Artificial Sequence; identical to SEQ ID NO: 11491
  GFR-binding peptide
  MOD_RES (2)..(34)..(35): Xaa is C or S

SEQ ID NO: 38275 - protein, 33 aa, Artificial Sequence; identical to SEQ ID NO: 11492
  GFR-binding peptide
  MOD_RES (33)..(33): Xaa is C or S
  MOD_RES (11)..(12)..(13)..(14)..(15): Xaa is A or G
  MOD_RES (16)..(17)..(18)..(19): Xaa is A or G or is absent

SEQ ID NO: 38276 - protein, 38 aa, Artificial Sequence; identical to SEQ ID NO: 11494
  GFR-binding peptide
  MOD_RES (2)..(36): Xaa is C or S
  MOD_RES (14)..(15)..(16)..(17)..(18): Xaa is A or G
  MOD_RES (19)..(20)..(21)..(22): Xaa is A or G or is absent

SEQ ID NO: 38277 - protein, 34 aa, Artificial Sequence; identical to SEQ ID NO: 11495
  GFR-binding peptide
  MOD_RES (33)..(34): Xaa is C or S
  MOD_RES (11)..(12)..(13)..(14)..(15): Xaa is A or G
  MOD_RES (16)..(17)..(18)..(19): Xaa is A or G or is absent

SEQ ID NO: 38278 - protein, 36 aa, Artificial Sequence; identical to SEQ ID NO: 13437
  GFR-binding peptide
  MOD_RES (1)..(33): Xaa is C or S

SEQ ID NO: 38279 - protein, 39 aa, Artificial Sequence; identical to SEQ ID NO: 11496
  GFR-binding peptide
  MOD_RES (2)..(35)..(36): Xaa is C or S
  MOD_RES (13)..(14)..(15)..(16)..(17): Xaa is A or G
  MOD_RES (18)..(19)..(20)..(21): Xaa is A or G or is absent

SEQ ID NO: 38280 - protein, 32 aa, Artificial Sequence; identical to SEQ ID NO: 4064
  GFR-binding peptide
  MOD_RES (2)..(2): Xaa is C or S

SEQ ID NO: 38281 - protein, 39 aa, Artificial Sequence; identical to SEQ ID NO: 13440
  GFR-binding peptide
  MOD_RES (2)..(36)..(37): Xaa is C or S
  MOD_RES (14)..(15)..(16)..(17)..(18): Xaa is A or G
  MOD_RES (19)..(20)..(21)..(22): Xaa is A or G or is absent

SEQ ID NO: 38282 - protein, 36 aa, Artificial Sequence; identical to SEQ ID NO: 13441
  GFR-binding peptide
  MOD_RES (2)..(36): Xaa is C or S
  MOD_RES (14)..(15)..(16)..(17)..(18): Xaa is A or G
  MOD_RES (19)..(20)..(21)..(22): Xaa is A or G or is absent

SEQ ID NO: 38283 - protein, 37 aa, Artificial Sequence; identical to SEQ ID NO: 13442
  GFR-binding peptide
  MOD_RES (31)..(32): Xaa is C or S

SEQ ID NO: 38284 - protein, 41 aa, Artificial Sequence; identical to SEQ ID NO: 11499
  GFR-binding peptide
  MOD_RES (2)..(4)..(36)..(37): Xaa is C or S

SEQ ID NO: 38285 - protein, 39 aa, Artificial Sequence; identical to SEQ ID NO: 6040
  GFR-binding peptide
  MOD_RES (1)..(3)..(37)..(38): Xaa is C or S
  MOD_RES (15)..(16)..(17)..(18)..(19): Xaa is A or G
  MOD_RES (20)..(21)..(22)..(23): Xaa is A or G or is absent

SEQ ID NO: 38286 - protein, 36 aa, Artificial Sequence; identical to SEQ ID NO: 11500
  GFR-binding peptide
  MOD_RES (2)..(35)..(36): Xaa is C or S
  MOD_RES (13)..(14)..(15)..(16)..(17): Xaa is A or G
  MOD_RES (18)..(19)..(20)..(21): Xaa is A or G or is absent

SEQ ID NO: 38287 - protein, 36 aa, Artificial Sequence; identical to SEQ ID NO: 13444
  GFR-binding peptide
  MOD_RES (31)..(32): Xaa is C or S

SEQ ID NO: 38288 - protein, 40 aa, Artificial Sequence; identical to SEQ ID NO: 11502
  GFR-binding peptide
  MOD_RES (1)..(3)..(37)..(38): Xaa is C or S
  MOD_RES (15)..(16)..(17)..(18)..(19): Xaa is A or G
  MOD_RES (20)..(21)..(22)..(23): Xaa is A or G or is absent

SEQ ID NO: 38289 - protein, 32 aa, Artificial Sequence; identical to SEQ ID NO: 6044
  GFR-binding peptide
  MOD_RES (2)..(2): Xaa is C or S

SEQ ID NO: 38290 - protein, 42 aa, Artificial Sequence; identical to SEQ ID NO: 6046
  GFR-binding peptide
  MOD_RES (1)..(3)..(36)..(37): Xaa is C or S
  MOD_RES (14)..(15)..(16)..(17)..(18): Xaa is A or G
  MOD_RES (19)..(20)..(21)..(22): Xaa is A or G or is absent

SEQ ID NO: 38291 - protein, 39 aa, Artificial Sequence; identical to SEQ ID NO: 11503
  GFR-binding peptide
  MOD_RES (2)..(34)..(35): Xaa is C or S

SEQ ID NO: 38292 - protein, 37 aa, Artificial Sequence; identical to SEQ ID NO: 13448
  GFR-binding peptide
  MOD_RES (1)..(33)..(34): Xaa is C or S

SEQ ID NO: 38293 - protein, 39 aa, Artificial Sequence; identical to SEQ ID NO: 4073
  GFR-binding peptide
  MOD_RES (1)..(35)..(36): Xaa is C or S
  MOD_RES (13)..(14)..(15)..(16)..(17): Xaa is A or G
  MOD_RES (18)..(19)..(20)..(21): Xaa is A or G or is absent

SEQ ID NO: 38294 - protein, 41 aa, Artificial Sequence; identical to SEQ ID NO: 13449
  GFR-binding peptide
  MOD_RES (2)..(4)..(37)..(38): Xaa is C or S
  MOD_RES (15)..(16)..(17)..(18)..(19): Xaa is A or G
  MOD_RES (20)..(21)..(22)..(23): Xaa is A or G or is absent

SEQ ID NO: 38295 - protein, 37 aa, Artificial Sequence; identical to SEQ ID NO: 13450
  GFR-binding peptide
  MOD_RES (1)..(3)..(34)..(35): Xaa is C or S

SEQ ID NO: 38296 - protein, 34 aa, Artificial Sequence; identical to SEQ ID NO: 13451
  GFR-binding peptide
  MOD_RES (2)..(4): Xaa is C or S

SEQ ID NO: 38297 - protein, 41 aa, Artificial Sequence; identical to SEQ ID NO: 6049
  GFR-binding peptide
  MOD_RES (1)..(35)..(36): Xaa is C or S
  MOD_RES (13)..(14)..(15)..(16)..(17): Xaa is A or G
  MOD_RES (18)..(19)..(20)..(21): Xaa is A or G or is absent

SEQ ID NO: 38298 - protein, 42 aa, Artificial Sequence; identical to SEQ ID NO: 13454
  GFR-binding peptide
  MOD_RES (1)..(3)..(37)..(38): Xaa is C or S
  MOD_RES (15)..(16)..(17)..(18)..(19): Xaa is A or G
  MOD_RES (20)..(21)..(22)..(23): Xaa is A or G or is absent

SEQ ID NO: 38299 - protein, 37 aa, Artificial Sequence; identical to SEQ ID NO: 13455
  GFR-binding peptide
  MOD_RES (1)..(3)..(37): Xaa is C or S
  MOD_RES (15)..(16)..(17)..(18)..(19): Xaa is A or G
  MOD_RES (20)..(21)..(22)..(23): Xaa is A or G or is absent

SEQ ID NO: 38300 - protein, 43 aa, Artificial Sequence; identical to SEQ ID NO: 11507
  GFR-binding peptide
  MOD_RES (1)..(3)..(37)..(38): Xaa is C or S
  MOD_RES (15)..(16)..(17)..(18)..(19): Xaa is A or G
  MOD_RES (20)..(21)..(22)..(23): Xaa is A or G or is absent

SEQ ID NO: 38301 - protein, 33 aa, Artificial Sequence; identical to SEQ ID NO: 13456
  GFR-binding peptide
  MOD_RES (1)..(1): Xaa is C or S
  MOD_RES (12)..(13)..(14)..(15)..(16): Xaa is A or G
  MOD_RES (17)..(18)..(19)..(20): Xaa is A or G or is absent

SEQ ID NO: 38302 - protein, 32 aa, Artificial Sequence; identical to SEQ ID NO: 11508
  GFR-binding peptide
  MOD_RES (31)..(32): Xaa is C or S

SEQ ID NO: 38303 - protein, 40 aa, Artificial Sequence; identical to SEQ ID NO: 13457
  GFR-binding peptide
  MOD_RES (1)..(3)..(37)..(38): Xaa is C or S
  MOD_RES (15)..(16)..(17)..(18)..(19): Xaa is A or G
  MOD_RES (20)..(21)..(22)..(23): Xaa is A or G or is absent

SEQ ID NO: 38304 - protein, 41 aa, Artificial Sequence; identical to SEQ ID NO: 13458
  GFR-binding peptide
  MOD_RES (2)..(4)..(38)..(39): Xaa is C or S
  MOD_RES (16)..(17)..(18)..(19)..(20): Xaa is A or G
  MOD_RES (21)..(22)..(23)..(24): Xaa is A or G or is absent

SEQ ID NO: 38305 - protein, 35 aa, Artificial Sequence; identical to SEQ ID NO: 13459
  GFR-binding peptide
  MOD_RES (1)..(35): Xaa is C or S
  MOD_RES (13)..(14)..(15)..(16)..(17): Xaa is A or G
  MOD_RES (18)..(19)..(20)..(21): Xaa is A or G or is absent

SEQ ID NO: 38306 - protein, 36 aa, Artificial Sequence; identical to SEQ ID NO: 6055
  GFR-binding peptide
  MOD_RES (1)..(33)..(34): Xaa is C or S

SEQ ID NO: 38307 - protein, 39 aa, Artificial Sequence; identical to SEQ ID NO: 11509
  GFR-binding peptide
  MOD_RES (34)..(34): Xaa is C or S
  MOD_RES (12)..(13)..(14)..(15)..(16): Xaa is A or G
  MOD_RES (17)..(18)..(19)..(20): Xaa is A or G or is absent

SEQ ID NO: 38308 - protein, 38 aa, Artificial Sequence; identical to SEQ ID NO: 11510
  GFR-binding peptide
  MOD_RES (2)..(36)..(37): Xaa is C or S
  MOD_RES (14)..(15)..(16)..(17)..(18): Xaa is A or G
  MOD_RES (19)..(20)..(21)..(22): Xaa is A or G or is absent

SEQ ID NO: 38309 - protein, 44 aa, Artificial Sequence; identical to SEQ ID NO: 11511
  GFR-binding peptide
  MOD_RES (2)..(4)..(38)..(39): Xaa is C or S
  MOD_RES (16)..(17)..(18)..(19)..(20): Xaa is A or G
  MOD_RES (21)..(22)..(23)..(24): Xaa is A or G or is absent

SEQ ID NO: 38310 - protein, 35 aa, Artificial Sequence; identical to SEQ ID NO: 13461
  GFR-binding peptide
  MOD_RES (2)..(34)..(35): Xaa is C or S

SEQ ID NO: 38311 - protein, 35 aa, Artificial Sequence; identical to SEQ ID NO: 13462
  GFR-binding peptide
  MOD_RES (2)..(35): Xaa is C or S
  MOD_RES (13)..(14)..(15)..(16)..(17): Xaa is A or G
  MOD_RES (18)..(19)..(20)..(21): Xaa is A or G or is absent

SEQ ID NO: 38312 - protein, 35 aa, Artificial Sequence; identical to SEQ ID NO: 13463
  GFR-binding peptide
  MOD_RES (1)..(35): Xaa is C or S
  MOD_RES (13)..(14)..(15)..(16)..(17): Xaa is A or G
  MOD_RES (18)..(19)..(20)..(21): Xaa is A or G or is absent

SEQ ID NO: 38313 - protein, 31 aa, Artificial Sequence; identical to SEQ ID NO: 11513
  GFR-binding peptide
  MOD_RES (31)..(31): Xaa is C or S

SEQ ID NO: 38314 - protein, 34 aa, Artificial Sequence; identical to SEQ ID NO: 11515
  GFR-binding peptide
  MOD_RES (32)..(33): Xaa is C or S

SEQ ID NO: 38315 - protein, 37 aa, Artificial Sequence; identical to SEQ ID NO: 11516
  GFR-binding peptide
  MOD_RES (1)..(33)..(34): Xaa is C or S

SEQ ID NO: 38316 - protein, 32 aa, Artificial Sequence; identical to SEQ ID NO: 11520
  GFR-binding peptide
  MOD_RES (11)..(12)..(13)..(14)..(15): Xaa is A or G
  MOD_RES (16)..(17)..(18)..(19): Xaa is A or G or is absent

SEQ ID NO: 38317 - protein, 40 aa, Artificial Sequence; identical to SEQ ID NO: 11521
  GFR-binding peptide
  MOD_RES (1)..(3)..(37): Xaa is C or S
  MOD_RES (15)..(16)..(17)..(18)..(19): Xaa is A or G
  MOD_RES (20)..(21)..(22)..(23): Xaa is A or G or is absent

SEQ ID NO: 38318 - protein, 37 aa, Artificial Sequence; identical to SEQ ID NO: 11523
  GFR-binding peptide
  MOD_RES (33)..(34): Xaa is C or S
  MOD_RES (11)..(12)..(13)..(14)..(15): Xaa is A or G
  MOD_RES (16)..(17)..(18)..(19): Xaa is A or G or is absent

SEQ ID NO: 38319 - protein, 36 aa, Artificial Sequence; identical to SEQ ID NO: 4090
  GFR-binding peptide
  MOD_RES (33)..(34): Xaa is C or S
  MOD_RES (11)..(12)..(13)..(14)..(15): Xaa is A or G
  MOD_RES (16)..(17)..(18)..(19): Xaa is A or G or is absent

SEQ ID NO: 38320 - protein, 34 aa, Artificial Sequence; identical to SEQ ID NO: 11525
  GFR-binding peptide
  MOD_RES (34)..(34): Xaa is C or S
  MOD_RES (12)..(13)..(14)..(15)..(16): Xaa is A or G
  MOD_RES (17)..(18)..(19)..(20): Xaa is A or G or is absent

SEQ ID NO: 38321 - protein, 34 aa, Artificial Sequence; identical to SEQ ID NO: 13466
  GFR-binding peptide
  MOD_RES (32)..(33): Xaa is C or S

SEQ ID NO: 38322 - protein, 42 aa, Artificial Sequence; identical to SEQ ID NO: 13467
  GFR-binding peptide
  MOD_RES (1)..(3)..(37)..(38): Xaa is C or S
  MOD_RES (15)..(16)..(17)..(18)..(19): Xaa is A or G
  MOD_RES (20)..(21)..(22)..(23): Xaa is A or G or is absent

SEQ ID NO: 38323 - protein, 31 aa, Artificial Sequence; identical to SEQ ID NO: 13468
  GFR-binding peptide

SEQ ID NO: 38324 - protein, 38 aa, Artificial Sequence; identical to SEQ ID NO: 11527
  GFR-binding peptide
  MOD_RES (2)..(4)..(38): Xaa is C or S
  MOD_RES (16)..(17)..(18)..(19)..(20): Xaa is A or G
  MOD_RES (21)..(22)..(23)..(24): Xaa is A or G or is absent

SEQ ID NO: 38325 - protein, 40 aa, Artificial Sequence; identical to SEQ ID NO: 4098
  GFR-binding peptide
  MOD_RES (1)..(3)..(34)..(35): Xaa is C or S

SEQ ID NO: 38326 - protein, 34 aa, Artificial Sequence; identical to SEQ ID NO: 4100
  GFR-binding peptide
  MOD_RES (1)..(34): Xaa is C or S
  MOD_RES (12)..(13)..(14)..(15)..(16): Xaa is A or G
  MOD_RES (17)..(18)..(19)..(20): Xaa is A or G or is absent

SEQ ID NO: 38327 - protein, 38 aa, Artificial Sequence; identical to SEQ ID NO: 4101
  GFR-binding peptide
  MOD_RES (1)..(32)..(33): Xaa is C or S

SEQ ID NO: 38328 - protein, 40 aa, Artificial Sequence; identical to SEQ ID NO: 11531
  GFR-binding peptide
  MOD_RES (2)..(4)..(38)..(39): Xaa is C or S
  MOD_RES (16)..(17)..(18)..(19)..(20): Xaa is A or G
  MOD_RES (21)..(22)..(23)..(24): Xaa is A or G or is absent

SEQ ID NO: 38329 - protein, 37 aa, Artificial Sequence; identical to SEQ ID NO: 11532
  GFR-binding peptide
  MOD_RES (2)..(4)..(37): Xaa is C or S
  MOD_RES (15)..(16)..(17)..(18)..(19): Xaa is A or G
  MOD_RES (20)..(21)..(22)..(23): Xaa is A or G or is absent

SEQ ID NO: 38330 - protein, 39 aa, Artificial Sequence; identical to SEQ ID NO: 4104
  GFR-binding peptide
  MOD_RES (1)..(3)..(34)..(35): Xaa is C or S

SEQ ID NO: 38331 - protein, 43 aa, Artificial Sequence; identical to SEQ ID NO: 13471
  GFR-binding peptide
  MOD_RES (1)..(3)..(37): Xaa is C or S
  MOD_RES (15)..(16)..(17)..(18)..(19): Xaa is A or G
  MOD_RES (20)..(21)..(22)..(23): Xaa is A or G or is absent

SEQ ID NO: 38332 - protein, 31 aa, Artificial Sequence; identical to SEQ ID NO: 11534
  GFR-binding peptide

SEQ ID NO: 38333 - protein, 38 aa, Artificial Sequence; identical to SEQ ID NO: 13472
  GFR-binding peptide
  MOD_RES (1)..(3)..(36)..(37): Xaa is C or S
  MOD_RES (14)..(15)..(16)..(17)..(18): Xaa is A or G
  MOD_RES (19)..(20)..(21)..(22): Xaa is A or G or is absent

SEQ ID NO: 38334 - protein, 37 aa, Artificial Sequence; identical to SEQ ID NO: 13474
  GFR-binding peptide
  MOD_RES (33)..(34): Xaa is C or S
  MOD_RES (11)..(12)..(13)..(14)..(15): Xaa is A or G
  MOD_RES (16)..(17)..(18)..(19): Xaa is A or G or is absent

SEQ ID NO: 38335 - protein, 40 aa, Artificial Sequence; identical to SEQ ID NO: 11536
  GFR-binding peptide
  MOD_RES (2)..(34)..(35): Xaa is C or S

SEQ ID NO: 38336 - protein, 40 aa, Artificial Sequence; identical to SEQ ID NO: 13476
  GFR-binding peptide
  MOD_RES (1)..(3)..(37)..(38): Xaa is C or S
  MOD_RES (15)..(16)..(17)..(18)..(19): Xaa is A or G
  MOD_RES (20)..(21)..(22)..(23): Xaa is A or G or is absent

SEQ ID NO: 38337 - protein, 41 aa, Artificial Sequence; identical to SEQ ID NO: 4111
  GFR-binding peptide
  MOD_RES (2)..(36)..(37): Xaa is C or S
  MOD_RES (14)..(15)..(16)..(17)..(18): Xaa is A or G
  MOD_RES (19)..(20)..(21)..(22): Xaa is A or G or is absent

SEQ ID NO: 38338 - protein, 34 aa, Artificial Sequence; identical to SEQ ID NO: 11539
  GFR-binding peptide
  MOD_RES (1)..(34): Xaa is C or S
  MOD_RES (12)..(13)..(14)..(15)..(16): Xaa is A or G
  MOD_RES (17)..(18)..(19)..(20): Xaa is A or G or is absent

SEQ ID NO: 38339 - protein, 33 aa, Artificial Sequence; identical to SEQ ID NO: 13477
  GFR-binding peptide
  MOD_RES (1)..(3): Xaa is C or S

SEQ ID NO: 38340 - protein, 33 aa, Artificial Sequence; identical to SEQ ID NO: 13478
  GFR-binding peptide
  MOD_RES (12)..(13)..(14)..(15)..(16): Xaa is A or G
  MOD_RES (17)..(18)..(19)..(20): Xaa is A or G or is absent

SEQ ID NO: 38341 - protein, 35 aa, Artificial Sequence; identical to SEQ ID NO: 11540
  GFR-binding peptide
  MOD_RES (2)..(4): Xaa is C or S

SEQ ID NO: 38342 - protein, 40 aa, Artificial Sequence; identical to SEQ ID NO: 11541
  GFR-binding peptide
  MOD_RES (1)..(3)..(34)..(35): Xaa is C or S

SEQ ID NO: 38343 - protein, 38 aa, Artificial Sequence; identical to SEQ ID NO: 13479
  GFR-binding peptide
  MOD_RES (32)..(32): Xaa is C or S

SEQ ID NO: 38344 - protein, 35 aa, Artificial Sequence; identical to SEQ ID NO: 13480
  GFR-binding peptide
  MOD_RES (2)..(34)..(35): Xaa is C or S

SEQ ID NO: 38345 - protein, 33 aa, Artificial Sequence; identical to SEQ ID NO: 11542
  GFR-binding peptide
  MOD_RES (2)..(33): Xaa is C or S

SEQ ID NO: 38346 - protein, 32 aa, Artificial Sequence; identical to SEQ ID NO: 13481
  GFR-binding peptide
  MOD_RES (32)..(32): Xaa is C or S

SEQ ID NO: 38347 - protein, 36 aa, Artificial Sequence; identical to SEQ ID NO: 13482
  GFR-binding peptide
  MOD_RES (1)..(3)..(36): Xaa is C or S
  MOD_RES (14)..(15)..(16)..(17)..(18): Xaa is A or G
  MOD_RES (19)..(20)..(21)..(22): Xaa is A or G or is absent

SEQ ID NO: 38348 - protein, 38 aa, Artificial Sequence
  GFR-binding peptide
  MOD_RES (2)..(35)..(36): Xaa is C or S
  MOD_RES (13)..(14)..(15)..(16)..(17): Xaa is A or G
  MOD_RES (18)..(19)..(20)..(21): Xaa is A or G or is absent
KXSKVIMNSLQEXXXXXXXXXYYLITLPELDQSVXXPS

SEQ ID NO: 38349 - protein, 39 aa, Artificial Sequence; identical to SEQ ID NO: 13483
  GFR-binding peptide
  MOD_RES (2)..(35)..(36): Xaa is C or S
  MOD_RES (13)..(14)..(15)..(16)..(17): Xaa is A or G
  MOD_RES (18)..(19)..(20)..(21): Xaa is A or G or is absent

SEQ ID NO: 38350 - protein, 32 aa, Artificial Sequence; identical to SEQ ID NO: 11543
  GFR-binding peptide
  MOD_RES (2)..(2): Xaa is C or S

SEQ ID NO: 38351 - protein, 36 aa, Artificial Sequence; identical to SEQ ID NO: 6078
  GFR-binding peptide
  MOD_RES (31)..(32): Xaa is C or S

SEQ ID NO: 38352 - protein, 39 aa, Artificial Sequence; identical to SEQ ID NO: 13485
  GFR-binding peptide
  MOD_RES (33)..(34): Xaa is C or S
  MOD_RES (11)..(12)..(13)..(14)..(15): Xaa is A or G
  MOD_RES (16)..(17)..(18)..(19): Xaa is A or G or is absent

SEQ ID NO: 38353 - protein, 38 aa, Artificial Sequence; identical to SEQ ID NO: 6079
  GFR-binding peptide
  MOD_RES (2)..(34)..(35): Xaa is C or S

SEQ ID NO: 38354 - protein, 38 aa, Artificial Sequence; identical to SEQ ID NO: 13487
  GFR-binding peptide
  MOD_RES (1)..(3)..(37)..(38): Xaa is C or S
  MOD_RES (15)..(16)..(17)..(18)..(19): Xaa is A or G
  MOD_RES (20)..(21)..(22)..(23): Xaa is A or G or is absent

SEQ ID NO: 38355 - protein, 32 aa, Artificial Sequence; identical to SEQ ID NO: 11544
  GFR-binding peptide
  MOD_RES (32)..(32): Xaa is C or S

SEQ ID NO: 38356 - protein, 36 aa, Artificial Sequence; identical to SEQ ID NO: 4120
  GFR-binding peptide
  MOD_RES (1)..(33)..(34): Xaa is C or S

SEQ ID NO: 38357 - protein, 39 aa, Artificial Sequence; identical to SEQ ID NO: 13489
  GFR-binding peptide
  MOD_RES (1)..(33)..(34): Xaa is C or S

SEQ ID NO: 38358 - protein, 34 aa, Artificial Sequence; identical to SEQ ID NO: 11547
  GFR-binding peptide
  MOD_RES (1)..(32)..(33): Xaa is C or S

SEQ ID NO: 38359 - protein, 37 aa, Artificial Sequence; identical to SEQ ID NO: 11549
  GFR-binding peptide
  MOD_RES (31)..(32): Xaa is C or S

SEQ ID NO: 38360 - protein, 34 aa, Artificial Sequence; identical to SEQ ID NO: 13491
  GFR-binding peptide
  MOD_RES (1)..(1): Xaa is C or S
  MOD_RES (13)..(14)..(15)..(16)..(17): Xaa is A or G
  MOD_RES (18)..(19)..(20)..(21): Xaa is A or G or is absent

SEQ ID NO: 38361 - protein, 42 aa, Artificial Sequence; identical to SEQ ID NO: 13492
  GFR-binding peptide
  MOD_RES (2)..(36)..(37): Xaa is C or S
  MOD_RES (14)..(15)..(16)..(17)..(18): Xaa is A or G
  MOD_RES (19)..(20)..(21)..(22): Xaa is A or G or is absent

SEQ ID NO: 38362 - protein, 37 aa, Artificial Sequence; identical to SEQ ID NO: 11550
  GFR-binding peptide
  MOD_RES (32)..(33): Xaa is C or S

SEQ ID NO: 38363 - protein, 35 aa, Artificial Sequence; identical to SEQ ID NO: 11551
  GFR-binding peptide
  MOD_RES (33)..(34): Xaa is C or S
  MOD_RES (11)..(12)..(13)..(14)..(15): Xaa is A or G
  MOD_RES (16)..(17)..(18)..(19): Xaa is A or G or is absent

SEQ ID NO: 38364 - protein, 40 aa, Artificial Sequence; identical to SEQ ID NO: 13493
  GFR-binding peptide
  MOD_RES (1)..(34)..(35): Xaa is C or S
  MOD_RES (12)..(13)..(14)..(15)..(16): Xaa is A or G
  MOD_RES (17)..(18)..(19)..(20): Xaa is A or G or is absent

SEQ ID NO: 38365 - protein, 34 aa, Artificial Sequence
  GFR-binding peptide
  MOD_RES (1)..(3)..(34): Xaa is C or S
XKXSKVIMNSLQEIKPTKGIYYLITLPELDQSVX

SEQ ID NO: 38366 - protein, 39 aa, Artificial Sequence; identical to SEQ ID NO: 11552
  GFR-binding peptide
  MOD_RES (1)..(35)..(36): Xaa is C or S
  MOD_RES (13)..(14)..(15)..(16)..(17): Xaa is A or G
  MOD_RES (18)..(19)..(20)..(21): Xaa is A or G or is absent

SEQ ID NO: 38367 - protein, 32 aa, Artificial Sequence; identical to SEQ ID NO: 11554
  GFR-binding peptide
  MOD_RES (32)..(32): Xaa is C or S

SEQ ID NO: 38368 - protein, 31 aa, Artificial Sequence; identical to SEQ ID NO: 11555
  GFR-binding peptide

SEQ ID NO: 38369 - protein, 41 aa, Artificial Sequence; identical to SEQ ID NO: 6085
  GFR-binding peptide
  MOD_RES (2)..(35)..(36): Xaa is C or S
  MOD_RES (13)..(14)..(15)..(16)..(17): Xaa is A or G
  MOD_RES (18)..(19)..(20)..(21): Xaa is A or G or is absent

SEQ ID NO: 38370 - protein, 37 aa, Artificial Sequence; identical to SEQ ID NO: 4129
  GFR-binding peptide
  MOD_RES (1)..(32)..(33): Xaa is C or S

SEQ ID NO: 38371 - protein, 36 aa, Artificial Sequence; identical to SEQ ID NO: 11557
  GFR-binding peptide
  MOD_RES (2)..(4)..(35)..(36): Xaa is C or S

SEQ ID NO: 38372 - protein, 34 aa, Artificial Sequence; identical to SEQ ID NO: 13495
  GFR-binding peptide
  MOD_RES (1)..(33)..(34): Xaa is C or S

SEQ ID NO: 38373 - protein, 44 aa, Artificial Sequence; identical to SEQ ID NO: 11558
  GFR-binding peptide
  MOD_RES (2)..(4)..(38)..(39): Xaa is C or S
  MOD_RES (16)..(17)..(18)..(19)..(20): Xaa is A or G
  MOD_RES (21)..(22)..(23)..(24): Xaa is A or G or is absent

SEQ ID NO: 38374 - protein, 37 aa, Artificial Sequence; identical to SEQ ID NO: 4134
  GFR-binding peptide
  MOD_RES (1)..(33)..(34): Xaa is C or S

SEQ ID NO: 38375 - protein, 37 aa, Artificial Sequence; identical to SEQ ID NO: 6086
  GFR-binding peptide
  MOD_RES (33)..(34): Xaa is C or S
  MOD_RES (11)..(12)..(13)..(14)..(15): Xaa is A or G
  MOD_RES (16)..(17)..(18)..(19): Xaa is A or G or is absent

SEQ ID NO: 38376 - protein, 36 aa, Artificial Sequence; identical to SEQ ID NO: 11561
  GFR-binding peptide
  MOD_RES (2)..(36): Xaa is C or S
  MOD_RES (14)..(15)..(16)..(17)..(18): Xaa is A or G
  MOD_RES (19)..(20)..(21)..(22): Xaa is A or G or is absent

SEQ ID NO: 38377 - protein, 38 aa, Artificial Sequence; identical to SEQ ID NO: 13498
  GFR-binding peptide
  MOD_RES (2)..(4)..(35)..(36): Xaa is C or S

SEQ ID NO: 38378 - protein, 40 aa, Artificial Sequence; identical to SEQ ID NO: 13499
  GFR-binding peptide
  MOD_RES (1)..(35)..(36): Xaa is C or S
  MOD_RES (13)..(14)..(15)..(16)..(17): Xaa is A or G
  MOD_RES (18)..(19)..(20)..(21): Xaa is A or G or is absent

SEQ ID NO: 38379 - protein, 37 aa, Artificial Sequence; identical to SEQ ID NO: 13500
  GFR-binding peptide
  MOD_RES (1)..(3)..(36)..(37): Xaa is C or S
  MOD_RES (14)..(15)..(16)..(17)..(18): Xaa is A or G
  MOD_RES (19)..(20)..(21)..(22): Xaa is A or G or is absent

SEQ ID NO: 38380 - protein, 39 aa, Artificial Sequence; identical to SEQ ID NO: 13501
  GFR-binding peptide
  MOD_RES (1)..(33)..(34): Xaa is C or S

SEQ ID NO: 38381 - protein, 38 aa, Artificial Sequence; identical to SEQ ID NO: 11562
  GFR-binding peptide
  MOD_RES (2)..(34)..(35): Xaa is C or S

SEQ ID NO: 38382 - protein, 36 aa, Artificial Sequence; identical to SEQ ID NO: 13502
  GFR-binding peptide
  MOD_RES (1)..(3)..(35)..(36): Xaa is C or S

SEQ ID NO: 38383 - protein, 36 aa, Artificial Sequence; identical to SEQ ID NO: 13503
  GFR-binding peptide
  MOD_RES (33)..(34): Xaa is C or S
  MOD_RES (11)..(12)..(13)..(14)..(15): Xaa is A or G
  MOD_RES (16)..(17)..(18)..(19): Xaa is A or G or is absent

SEQ ID NO: 38384 - protein, 35 aa, Artificial Sequence; identical to SEQ ID NO: 13504
  GFR-binding peptide
  MOD_RES (1)..(33)..(34): Xaa is C or S

SEQ ID NO: 38385 - protein, 42 aa, Artificial Sequence; identical to SEQ ID NO: 13505
  GFR-binding peptide
  MOD_RES (2)..(4)..(37)..(38): Xaa is C or S
  MOD_RES (15)..(16)..(17)..(18)..(19): Xaa is A or G
  MOD_RES (20)..(21)..(22)..(23): Xaa is A or G or is absent

SEQ ID NO: 38386 - protein, 37 aa, Artificial Sequence; identical to SEQ ID NO: 11564
  GFR-binding peptide
  MOD_RES (1)..(3)..(35)..(36): Xaa is C or S

SEQ ID NO: 38387 - protein, 30 aa, Artificial Sequence; identical to SEQ ID NO: 6091
  GFR-binding peptide

SEQ ID NO: 38388 - protein, 32 aa, Artificial Sequence; identical to SEQ ID NO: 11566
  GFR-binding peptide
  MOD_RES (11)..(12)..(13)..(14)..(15): Xaa is A or G
  MOD_RES (16)..(17)..(18)..(19): Xaa is A or G or is absent

SEQ ID NO: 38389 - protein, 37 aa, Artificial Sequence; identical to SEQ ID NO: 11567
  GFR-binding peptide
  MOD_RES (2)..(33)..(34): Xaa is C or S

SEQ ID NO: 38390 - protein, 31 aa, Artificial Sequence; identical to SEQ ID NO: 6093
  GFR-binding peptide
  MOD_RES (31)..(31): Xaa is C or S

SEQ ID NO: 38391 - protein, 39 aa, Artificial Sequence; identical to SEQ ID NO: 13508
  GFR-binding peptide
  MOD_RES (2)..(35)..(36): Xaa is C or S
  MOD_RES (13)..(14)..(15)..(16)..(17): Xaa is A or G
  MOD_RES (18)..(19)..(20)..(21): Xaa is A or G or is absent

SEQ ID NO: 38392 - protein, 37 aa, Artificial Sequence; identical to SEQ ID NO: 13509
  GFR-binding peptide
  MOD_RES (32)..(33): Xaa is C or S

SEQ ID NO: 38393 - protein, 34 aa, Artificial Sequence; identical to SEQ ID NO: 13510
  GFR-binding peptide
  MOD_RES (1)..(3): Xaa is C or S

SEQ ID NO: 38394 - protein, 42 aa, Artificial Sequence; identical to SEQ ID NO: 13511
  GFR-binding peptide
  MOD_RES (2)..(4)..(38)..(39): Xaa is C or S
  MOD_RES (16)..(17)..(18)..(19)..(20): Xaa is A or G
  MOD_RES (21)..(22)..(23)..(24): Xaa is A or G or is absent

SEQ ID NO: 38395 - protein, 33 aa, Artificial Sequence; identical to SEQ ID NO: 11568
  GFR-binding peptide
  MOD_RES (33)..(33): Xaa is C or S
  MOD_RES (11)..(12)..(13)..(14)..(15): Xaa is A or G
  MOD_RES (16)..(17)..(18)..(19): Xaa is A or G or is absent

SEQ ID NO: 38396 - protein, 33 aa, Artificial Sequence
  GFR-binding peptide
  MOD_RES (33)..(33): Xaa is C or S
  MOD_RES (11)..(12)..(13)..(14)..(15): Xaa is A or G
  MOD_RES (16)..(17)..(18)..(19): Xaa is A or G or is absent
SKVIMNSLQEXXXXXXXXXYYLITLPELDQSVX

SEQ ID NO: 38397 - protein, 37 aa, Artificial Sequence; identical to SEQ ID NO: 13512
  GFR-binding peptide
  MOD_RES (2)..(4)..(36): Xaa is C or S

SEQ ID NO: 38398 - protein, 40 aa, Artificial Sequence; identical to SEQ ID NO: 4150
  GFR-binding peptide
  MOD_RES (1)..(34)..(35): Xaa is C or S
  MOD_RES (12)..(13)..(14)..(15)..(16): Xaa is A or G
  MOD_RES (17)..(18)..(19)..(20): Xaa is A or G or is absent

SEQ ID NO: 38399 - protein, 33 aa, Artificial Sequence; identical to SEQ ID NO: 11570
  GFR-binding peptide
  MOD_RES (33)..(33): Xaa is C or S
  MOD_RES (11)..(12)..(13)..(14)..(15): Xaa is A or G
  MOD_RES (16)..(17)..(18)..(19): Xaa is A or G or is absent

SEQ ID NO: 38400 - protein, 38 aa, Artificial Sequence; identical to SEQ ID NO: 11571
  GFR-binding peptide
  MOD_RES (2)..(4)..(35)..(36): Xaa is C or S

SEQ ID NO: 38401 - protein, 40 aa, Artificial Sequence; identical to SEQ ID NO: 13513
  GFR-binding peptide
  MOD_RES (1)..(3)..(37)..(38): Xaa is C or S
  MOD_RES (15)..(16)..(17)..(18)..(19): Xaa is A or G
  MOD_RES (20)..(21)..(22)..(23): Xaa is A or G or is absent

SEQ ID NO: 38402 - protein, 33 aa, Artificial Sequence; identical to SEQ ID NO: 13514
  GFR-binding peptide
  MOD_RES (1)..(32)..(33): Xaa is C or S

SEQ ID NO: 38403 - protein, 37 aa, Artificial Sequence; identical to SEQ ID NO: 13515
  GFR-binding peptide
  MOD_RES (2)..(34): Xaa is C or S

SEQ ID NO: 38404 - protein, 33 aa, Artificial Sequence; identical to SEQ ID NO: 6105
  GFR-binding peptide
  MOD_RES (1)..(3): Xaa is C or S

SEQ ID NO: 38405 - protein, 39 aa, Artificial Sequence; identical to SEQ ID NO: 13517
  GFR-binding peptide
  MOD_RES (2)..(33)..(34): Xaa is C or S

SEQ ID NO: 38406 - protein, 39 aa, Artificial Sequence; identical to SEQ ID NO: 6107
  GFR-binding peptide
  MOD_RES (33)..(34): Xaa is C or S
  MOD_RES (11)..(12)..(13)..(14)..(15): Xaa is A or G
  MOD_RES (16)..(17)..(18)..(19): Xaa is A or G or is absent

SEQ ID NO: 38407 - protein, 39 aa, Artificial Sequence; identical to SEQ ID NO: 11572
  GFR-binding peptide
  MOD_RES (34)..(34): Xaa is C or S
  MOD_RES (12)..(13)..(14)..(15)..(16): Xaa is A or G
  MOD_RES (17)..(18)..(19)..(20): Xaa is A or G or is absent

SEQ ID NO: 38408 - protein, 35 aa, Artificial Sequence; identical to SEQ ID NO: 6108
  GFR-binding peptide
  MOD_RES (1)..(3)..(35): Xaa is C or S

SEQ ID NO: 38409 - protein, 40 aa, Artificial Sequence; identical to SEQ ID NO: 6109
  GFR-binding peptide
  MOD_RES (2)..(35)..(36): Xaa is C or S
  MOD_RES (13)..(14)..(15)..(16)..(17): Xaa is A or G
  MOD_RES (18)..(19)..(20)..(21): Xaa is A or G or is absent

SEQ ID NO: 38410 - protein, 43 aa, Artificial Sequence; identical to SEQ ID NO: 13521
  GFR-binding peptide
  MOD_RES (2)..(4)..(37)..(38): Xaa is C or S
  MOD_RES (15)..(16)..(17)..(18)..(19): Xaa is A or G
  MOD_RES (20)..(21)..(22)..(23): Xaa is A or G or is absent

SEQ ID NO: 38411 - protein, 35 aa, Artificial Sequence; identical to SEQ ID NO: 13522
  GFR-binding peptide
  MOD_RES (2)..(2): Xaa is C or S
  MOD_RES (14)..(15)..(16)..(17)..(18): Xaa is A or G
  MOD_RES (19)..(20)..(21)..(22): Xaa is A or G or is absent

SEQ ID NO: 38412 - protein, 33 aa, Artificial Sequence; identical to SEQ ID NO: 4158
  GFR-binding peptide
  MOD_RES (31)..(32): Xaa is C or S

SEQ ID NO: 38413 - protein, 40 aa, Artificial Sequence; identical to SEQ ID NO: 11576
  GFR-binding peptide
  MOD_RES (2)..(4)..(37)..(38): Xaa is C or S
  MOD_RES (15)..(16)..(17)..(18)..(19): Xaa is A or G
  MOD_RES (20)..(21)..(22)..(23): Xaa is A or G or is absent

SEQ ID NO: 38414 - protein, 35 aa, Artificial Sequence; identical to SEQ ID NO: 13524
  GFR-binding peptide
  MOD_RES (31)..(32): Xaa is C or S

SEQ ID NO: 38415 - protein, 37 aa, Artificial Sequence; identical to SEQ ID NO: 13526
  GFR-binding peptide
  MOD_RES (2)..(4)..(36)..(37): Xaa is C or S

SEQ ID NO: 38416 - protein, 34 aa, Artificial Sequence; identical to SEQ ID NO: 13527
  GFR-binding peptide
  MOD_RES (33)..(34): Xaa is C or S
  MOD_RES (11)..(12)..(13)..(14)..(15): Xaa is A or G
  MOD_RES (16)..(17)..(18)..(19): Xaa is A or G or is absent

SEQ ID NO: 38417 - protein, 39 aa, Artificial Sequence; identical to SEQ ID NO: 11578
  GFR-binding peptide
  MOD_RES (2)..(4)..(37)..(38): Xaa is C or S
  MOD_RES (15)..(16)..(17)..(18)..(19): Xaa is A or G
  MOD_RES (20)..(21)..(22)..(23): Xaa is A or G or is absent

SEQ ID NO: 38418 - protein, 35 aa, Artificial Sequence; identical to SEQ ID NO: 11579
  GFR-binding peptide
  MOD_RES (33)..(34): Xaa is C or S
  MOD_RES (11)..(12)..(13)..(14)..(15): Xaa is A or G
  MOD_RES (16)..(17)..(18)..(19): Xaa is A or G or is absent

SEQ ID NO: 38419 - protein, 34 aa, Artificial Sequence; identical to SEQ ID NO: 6120
  GFR-binding peptide
  MOD_RES (32)..(33): Xaa is C or S

SEQ ID NO: 38420 - protein, 38 aa, Artificial Sequence; identical to SEQ ID NO: 11582
  GFR-binding peptide
  MOD_RES (2)..(4)..(36)..(37): Xaa is C or S

SEQ ID NO: 38421 - protein, 37 aa, Artificial Sequence; identical to SEQ ID NO: 11583
  GFR-binding peptide
  MOD_RES (2)..(33)..(34): Xaa is C or S

SEQ ID NO: 38422 - protein, 35 aa, Artificial Sequence; identical to SEQ ID NO: 13529
  GFR-binding peptide
  MOD_RES (2)..(34)..(35): Xaa is C or S

SEQ ID NO: 38423 - protein, 38 aa, Artificial Sequence; identical to SEQ ID NO: 13530
  GFR-binding peptide
  MOD_RES (1)..(3)..(35)..(36): Xaa is C or S

SEQ ID NO: 38424 - protein, 36 aa, Artificial Sequence; identical to SEQ ID NO: 13532
  GFR-binding peptide
  MOD_RES (33)..(33): Xaa is C or S
  MOD_RES (11)..(12)..(13)..(14)..(15): Xaa is A or G
  MOD_RES (16)..(17)..(18)..(19): Xaa is A or G or is absent

SEQ ID NO: 38425 - protein, 37 aa, Artificial Sequence; identical to SEQ ID NO: 6123
  GFR-binding peptide
  MOD_RES (1)..(33)..(34): Xaa is C or S

SEQ ID NO: 38426 - protein, 39 aa, Artificial Sequence; identical to SEQ ID NO: 11584
  GFR-binding peptide
  MOD_RES (2)..(4)..(36): Xaa is C or S

SEQ ID NO: 38427 - protein, 42 aa, Artificial Sequence; identical to SEQ ID NO: 13534
  GFR-binding peptide
  MOD_RES (2)..(36)..(37): Xaa is C or S
  MOD_RES (14)..(15)..(16)..(17)..(18): Xaa is A or G
  MOD_RES (19)..(20)..(21)..(22): Xaa is A or G or is absent

SEQ ID NO: 38428 - protein, 40 aa, Artificial Sequence; identical to SEQ ID NO: 11585
  GFR-binding peptide
  MOD_RES (1)..(3)..(37)..(38): Xaa is C or S
  MOD_RES (15)..(16)..(17)..(18)..(19): Xaa is A or G
  MOD_RES (20)..(21)..(22)..(23): Xaa is A or G or is absent

SEQ ID NO: 38429 - protein, 34 aa, Artificial Sequence; identical to SEQ ID NO: 6127
  GFR-binding peptide
  MOD_RES (33)..(34): Xaa is C or S
  MOD_RES (11)..(12)..(13)..(14)..(15): Xaa is A or G
  MOD_RES (16)..(17)..(18)..(19): Xaa is A or G or is absent

SEQ ID NO: 38430 - protein, 38 aa, Artificial Sequence; identical to SEQ ID NO: 4174
  GFR-binding peptide
  MOD_RES (2)..(4)..(38): Xaa is C or S
  MOD_RES (16)..(17)..(18)..(19)..(20): Xaa is A or G
  MOD_RES (21)..(22)..(23)..(24): Xaa is A or G or is absent

SEQ ID NO: 38431 - protein, 38 aa, Artificial Sequence; identical to SEQ ID NO: 11588
  GFR-binding peptide
  MOD_RES (1)..(3)..(36)..(37): Xaa is C or S
  MOD_RES (14)..(15)..(16)..(17)..(18): Xaa is A or G
  MOD_RES (19)..(20)..(21)..(22): Xaa is A or G or is absent

SEQ ID NO: 38432 - protein, 34 aa, Artificial Sequence; identical to SEQ ID NO: 11589
  GFR-binding peptide
  MOD_RES (34)..(34): Xaa is C or S
  MOD_RES (12)..(13)..(14)..(15)..(16): Xaa is A or G
  MOD_RES (17)..(18)..(19)..(20): Xaa is A or G or is absent

SEQ ID NO: 38433 - protein, 34 aa, Artificial Sequence; identical to SEQ ID NO: 11591
  GFR-binding peptide
  MOD_RES (1)..(32)..(33): Xaa is C or S

SEQ ID NO: 38434 - protein, 41 aa, Artificial Sequence; identical to SEQ ID NO: 11593
  GFR-binding peptide
  MOD_RES (2)..(4)..(36): Xaa is C or S

SEQ ID NO: 38435 - protein, 36 aa, Artificial Sequence; identical to SEQ ID NO: 11594
  GFR-binding peptide
  MOD_RES (2)..(4)..(35)..(36): Xaa is C or S

SEQ ID NO: 38436 - protein, 34 aa, Artificial Sequence; identical to SEQ ID NO: 11596
  GFR-binding peptide
  MOD_RES (1)..(1): Xaa is C or S
  MOD_RES (13)..(14)..(15)..(16)..(17): Xaa is A or G
  MOD_RES (18)..(19)..(20)..(21): Xaa is A or G or is absent

SEQ ID NO: 38437 - protein, 40 aa, Artificial Sequence; identical to SEQ ID NO: 6134
  GFR-binding peptide
  MOD_RES (2)..(34)..(35): Xaa is C or S

SEQ ID NO: 38438 - protein, 35 aa, Artificial Sequence; identical to SEQ ID NO: 4183
  GFR-binding peptide
  MOD_RES (1)..(33)..(34): Xaa is C or S

SEQ ID NO: 38439 - protein, 36 aa, Artificial Sequence; identical to SEQ ID NO: 13538
  GFR-binding peptide
  MOD_RES (34)..(35): Xaa is C or S
  MOD_RES (12)..(13)..(14)..(15)..(16): Xaa is A or G
  MOD_RES (17)..(18)..(19)..(20): Xaa is A or G or is absent

SEQ ID NO: 38440 - protein, 43 aa, Artificial Sequence; identical to SEQ ID NO: 13539
  GFR-binding peptide
  MOD_RES (2)..(4)..(38)..(39): Xaa is C or S
  MOD_RES (16)..(17)..(18)..(19)..(20): Xaa is A or G
  MOD_RES (21)..(22)..(23)..(24): Xaa is A or G or is absent

SEQ ID NO: 38441 - protein, 37 aa, Artificial Sequence; identical to SEQ ID NO: 13541
  GFR-binding peptide
  MOD_RES (1)..(35): Xaa is C or S
  MOD_RES (13)..(14)..(15)..(16)..(17): Xaa is A or G
  MOD_RES (18)..(19)..(20)..(21): Xaa is A or G or is absent

SEQ ID NO: 38442 - protein, 36 aa, Artificial Sequence; identical to SEQ ID NO: 11599
  GFR-binding peptide
  MOD_RES (32)..(33): Xaa is C or S

SEQ ID NO: 38443 - protein, 41 aa, Artificial Sequence; identical to SEQ ID NO: 13542
  GFR-binding peptide
  MOD_RES (2)..(4)..(37)..(38): Xaa is C or S
  MOD_RES (15)..(16)..(17)..(18)..(19): Xaa is A or G
  MOD_RES (20)..(21)..(22)..(23): Xaa is A or G or is absent

SEQ ID NO: 38444 - protein, 36 aa, Artificial Sequence; identical to SEQ ID NO: 13544
  GFR-binding peptide
  MOD_RES (1)..(35)..(36): Xaa is C or S
  MOD_RES (13)..(14)..(15)..(16)..(17): Xaa is A or G
  MOD_RES (18)..(19)..(20)..(21): Xaa is A or G or is absent

SEQ ID NO: 38445 - protein, 38 aa, Artificial Sequence; identical to SEQ ID NO: 4186
  GFR-binding peptide
  MOD_RES (1)..(32)..(33): Xaa is C or S

SEQ ID NO: 38446 - protein, 37 aa, Artificial Sequence; identical to SEQ ID NO: 13545
  GFR-binding peptide
  MOD_RES (33)..(34): Xaa is C or S
  MOD_RES (11)..(12)..(13)..(14)..(15): Xaa is A or G
  MOD_RES (16)..(17)..(18)..(19): Xaa is A or G or is absent

SEQ ID NO: 38447 - protein, 40 aa, Artificial Sequence; identical to SEQ ID NO: 11601
  GFR-binding peptide
  MOD_RES (1)..(35)..(36): Xaa is C or S
  MOD_RES (13)..(14)..(15)..(16)..(17): Xaa is A or G
  MOD_RES (18)..(19)..(20)..(21): Xaa is A or G or is absent

SEQ ID NO: 38448 - protein, 34 aa, Artificial Sequence; identical to SEQ ID NO: 4189
  GFR-binding peptide
  MOD_RES (32)..(33): Xaa is C or S

SEQ ID NO: 38449 - protein, 36 aa, Artificial Sequence; identical to SEQ ID NO: 13546
  GFR-binding peptide
  MOD_RES (33)..(34): Xaa is C or S
  MOD_RES (11)..(12)..(13)..(14)..(15): Xaa is A or G
  MOD_RES (16)..(17)..(18)..(19): Xaa is A or G or is absent

SEQ ID NO: 38450 - protein, 40 aa, Artificial Sequence; identical to SEQ ID NO: 6144
  GFR-binding peptide
  MOD_RES (1)..(3)..(36)..(37): Xaa is C or S
  MOD_RES (14)..(15)..(16)..(17)..(18): Xaa is A or G
  MOD_RES (19)..(20)..(21)..(22): Xaa is A or G or is absent

SEQ ID NO: 38451 - protein, 39 aa, Artificial Sequence; identical to SEQ ID NO: 13548
  GFR-binding peptide
  MOD_RES (2)..(35)..(36): Xaa is C or S
  MOD_RES (13)..(14)..(15)..(16)..(17): Xaa is A or G
  MOD_RES (18)..(19)..(20)..(21): Xaa is A or G or is absent

SEQ ID NO: 38452 - protein, 39 aa, Artificial Sequence; identical to SEQ ID NO: 13550
  GFR-binding peptide
  MOD_RES (1)..(33)..(34): Xaa is C or S

SEQ ID NO: 38453 - protein, 35 aa, Artificial Sequence; identical to SEQ ID NO: 11604
  GFR-binding peptide
  MOD_RES (2)..(2): Xaa is C or S
  MOD_RES (14)..(15)..(16)..(17)..(18): Xaa is A or G
  MOD_RES (19)..(20)..(21)..(22): Xaa is A or G or is absent

SEQ ID NO: 38454 - protein, 36 aa, Artificial Sequence; identical to SEQ ID NO: 13552
  GFR-binding peptide
  MOD_RES (2)..(4)..(35)..(36): Xaa is C or S

SEQ ID NO: 38455 - protein, 36 aa, Artificial Sequence; identical to SEQ ID NO: 11605
  GFR-binding peptide
  MOD_RES (1)..(3)..(35)..(36): Xaa is C or S

SEQ ID NO: 38456 - protein, 34 aa, Artificial Sequence; identical to SEQ ID NO: 11606
  GFR-binding peptide
  MOD_RES (2)..(34): Xaa is C or S

SEQ ID NO: 38457 - protein, 35 aa, Artificial Sequence; identical to SEQ ID NO: 11608
  GFR-binding peptide
  MOD_RES (34)..(35): Xaa is C or S
  MOD_RES (12)..(13)..(14)..(15)..(16): Xaa is A or G
  MOD_RES (17)..(18)..(19)..(20): Xaa is A or G or is absent

SEQ ID NO: 38458 - protein, 38 aa, Artificial Sequence; identical to SEQ ID NO: 13555
  GFR-binding peptide
  MOD_RES (2)..(36)..(37): Xaa is C or S
  MOD_RES (14)..(15)..(16)..(17)..(18): Xaa is A or G
  MOD_RES (19)..(20)..(21)..(22): Xaa is A or G or is absent

SEQ ID NO: 38459 - protein, 37 aa, Artificial Sequence; identical to SEQ ID NO: 11609
  GFR-binding peptide
  MOD_RES (2)..(4)..(37): Xaa is C or S
  MOD_RES (15)..(16)..(17)..(18)..(19): Xaa is A or G
  MOD_RES (20)..(21)..(22)..(23): Xaa is A or G or is absent

SEQ ID NO: 38460 - protein, 35 aa, Artificial Sequence; identical to SEQ ID NO: 11610
  GFR-binding peptide
  MOD_RES (1)..(35): Xaa is C or S
  MOD_RES (13)..(14)..(15)..(16)..(17): Xaa is A or G
  MOD_RES (18)..(19)..(20)..(21): Xaa is A or G or is absent

SEQ ID NO: 38461 - protein, 38 aa, Artificial Sequence; identical to SEQ ID NO: 6159
  GFR-binding peptide
  MOD_RES (2)..(4)..(38): Xaa is C or S
  MOD_RES (16)..(17)..(18)..(19)..(20): Xaa is A or G
  MOD_RES (21)..(22)..(23)..(24): Xaa is A or G or is absent

SEQ ID NO: 38462 - protein, 41 aa, Artificial Sequence; identical to SEQ ID NO: 4201
  GFR-binding peptide
  MOD_RES (2)..(4)..(35)..(36): Xaa is C or S

SEQ ID NO: 38463 - protein, 32 aa, Artificial Sequence; identical to SEQ ID NO: 4202
  GFR-binding peptide
  MOD_RES (11)..(12)..(13)..(14)..(15): Xaa is A or G
  MOD_RES (16)..(17)..(18)..(19): Xaa is A or G or is absent

SEQ ID NO: 38464 - protein, 32 aa, Artificial Sequence; identical to SEQ ID NO: 13558
  GFR-binding peptide
  MOD_RES (32)..(32): Xaa is C or S

SEQ ID NO: 38465 - protein, 35 aa, Artificial Sequence; identical to SEQ ID NO: 11613
  GFR-binding peptide
  MOD_RES (33)..(34): Xaa is C or S
  MOD_RES (11)..(12)..(13)..(14)..(15): Xaa is A or G
  MOD_RES (16)..(17)..(18)..(19): Xaa is A or G or is absent

SEQ ID NO: 38466 - protein, 39 aa, Artificial Sequence; identical to SEQ ID NO: 11614
  GFR-binding peptide
  MOD_RES (33)..(34): Xaa is C or S
  MOD_RES (11)..(12)..(13)..(14)..(15): Xaa is A or G
  MOD_RES (16)..(17)..(18)..(19): Xaa is A or G or is absent

SEQ ID NO: 38467 - protein, 39 aa, Artificial Sequence; identical to SEQ ID NO: 11615
  GFR-binding peptide
  MOD_RES (33)..(34): Xaa is C or S
  MOD_RES (11)..(12)..(13)..(14)..(15): Xaa is A or G
  MOD_RES (16)..(17)..(18)..(19): Xaa is A or G or is absent

SEQ ID NO: 38468 - protein, 38 aa, Artificial Sequence; identical to SEQ ID NO: 4207
  GFR-binding peptide
  MOD_RES (2)..(36)..(37): Xaa is C or S
  MOD_RES (14)..(15)..(16)..(17)..(18): Xaa is A or G
  MOD_RES (19)..(20)..(21)..(22): Xaa is A or G or is absent

SEQ ID NO: 38469 - protein, 41 aa, Artificial Sequence; identical to SEQ ID NO: 13559
  GFR-binding peptide
  MOD_RES (2)..(4)..(38): Xaa is C or S
  MOD_RES (16)..(17)..(18)..(19)..(20): Xaa is A or G
  MOD_RES (21)..(22)..(23)..(24): Xaa is A or G or is absent

SEQ ID NO: 38470 - protein, 41 aa, Artificial Sequence; identical to SEQ ID NO: 13560
  GFR-binding peptide
  MOD_RES (2)..(36)..(37): Xaa is C or S
  MOD_RES (14)..(15)..(16)..(17)..(18): Xaa is A or G
  MOD_RES (19)..(20)..(21)..(22): Xaa is A or G or is absent

SEQ ID NO: 38471 - protein, 35 aa, Artificial Sequence; identical to SEQ ID NO: 11617
  GFR-binding peptide
  MOD_RES (34)..(35): Xaa is C or S
  MOD_RES (12)..(13)..(14)..(15)..(16): Xaa is A or G
  MOD_RES (17)..(18)..(19)..(20): Xaa is A or G or is absent

SEQ ID NO: 38472 - protein, 39 aa, Artificial Sequence; identical to SEQ ID NO: 11618
  GFR-binding peptide
  MOD_RES (1)..(3)..(37)..(38): Xaa is C or S
  MOD_RES (15)..(16)..(17)..(18)..(19): Xaa is A or G
  MOD_RES (20)..(21)..(22)..(23): Xaa is A or G or is absent

SEQ ID NO: 38473 - protein, 33 aa, Artificial Sequence; identical to SEQ ID NO: 13561
  GFR-binding peptide
  MOD_RES (32)..(33): Xaa is C or S

SEQ ID NO: 38474 - protein, 32 aa, Artificial Sequence; identical to SEQ ID NO: 11619
  GFR-binding peptide
  MOD_RES (31)..(32): Xaa is C or S

SEQ ID NO: 38475 - protein, 38 aa, Artificial Sequence; identical to SEQ ID NO: 11620
  GFR-binding peptide
  MOD_RES (2)..(35)..(36): Xaa is C or S
  MOD_RES (13)..(14)..(15)..(16)..(17): Xaa is A or G
  MOD_RES (18)..(19)..(20)..(21): Xaa is A or G or is absent

SEQ ID NO: 38476 - protein, 35 aa, Artificial Sequence; identical to SEQ ID NO: 11621
  GFR-binding peptide
  MOD_RES (1)..(3)..(35): Xaa is C or S

SEQ ID NO: 38477 - protein, 33 aa, Artificial Sequence; identical to SEQ ID NO: 4211
  GFR-binding peptide
  MOD_RES (33)..(33): Xaa is C or S
  MOD_RES (11)..(12)..(13)..(14)..(15): Xaa is A or G
  MOD_RES (16)..(17)..(18)..(19): Xaa is A or G or is absent

SEQ ID NO: 38478 - protein, 39 aa, Artificial Sequence; identical to SEQ ID NO: 11623
  GFR-binding peptide
  MOD_RES (2)..(36)..(37): Xaa is C or S
  MOD_RES (14)..(15)..(16)..(17)..(18): Xaa is A or G
  MOD_RES (19)..(20)..(21)..(22): Xaa is A or G or is absent

SEQ ID NO: 38479 - protein, 34 aa, Artificial Sequence; identical to SEQ ID NO: 13562
  GFR-binding peptide
  MOD_RES (31)..(32): Xaa is C or S

SEQ ID NO: 38480 - protein, 36 aa, Artificial Sequence; identical to SEQ ID NO: 11624
  GFR-binding peptide
  MOD_RES (1)..(34)..(35): Xaa is C or S
  MOD_RES (12)..(13)..(14)..(15)..(16): Xaa is A or G
  MOD_RES (17)..(18)..(19)..(20): Xaa is A or G or is absent

SEQ ID NO: 38481 - protein, 36 aa, Artificial Sequence; identical to SEQ ID NO: 11625
  GFR-binding peptide
  MOD_RES (1)..(3)..(36): Xaa is C or S
  MOD_RES (14)..(15)..(16)..(17)..(18): Xaa is A or G
  MOD_RES (19)..(20)..(21)..(22): Xaa is A or G or is absent

SEQ ID NO: 38482 - protein, 37 aa, Artificial Sequence; identical to SEQ ID NO: 4215
  GFR-binding peptide
  MOD_RES (1)..(35)..(36): Xaa is C or S
  MOD_RES (13)..(14)..(15)..(16)..(17): Xaa is A or G
  MOD_RES (18)..(19)..(20)..(21): Xaa is A or G or is absent

SEQ ID NO: 38483 - protein, 37 aa, Artificial Sequence; identical to SEQ ID NO: 13563
  GFR-binding peptide
  MOD_RES (2)..(4)..(36)..(37): Xaa is C or S

SEQ ID NO: 38484 - protein, 37 aa, Artificial Sequence; identical to SEQ ID NO: 11628
  GFR-binding peptide
  MOD_RES (2)..(35)..(36): Xaa is C or S
  MOD_RES (13)..(14)..(15)..(16)..(17): Xaa is A or G
  MOD_RES (18)..(19)..(20)..(21): Xaa is A or G or is absent

SEQ ID NO: 38485 - protein, 39 aa, Artificial Sequence; identical to SEQ ID NO: 13567
  GFR-binding peptide
  MOD_RES (2)..(4)..(38)..(39): Xaa is C or S
  MOD_RES (16)..(17)..(18)..(19)..(20): Xaa is A or G
  MOD_RES (21)..(22)..(23)..(24): Xaa is A or G or is absent

SEQ ID NO: 38486 - protein, 31 aa, Artificial Sequence; identical to SEQ ID NO: 11629
  GFR-binding peptide
  MOD_RES (31)..(31): Xaa is C or S

SEQ ID NO: 38487 - protein, 32 aa, Artificial Sequence; identical to SEQ ID NO: 4220
  GFR-binding peptide
  MOD_RES (1)..(32): Xaa is C or S

SEQ ID NO: 38488 - protein, 40 aa, Artificial Sequence; identical to SEQ ID NO: 11631
  GFR-binding peptide
  MOD_RES (2)..(36)..(37): Xaa is C or S
  MOD_RES (14)..(15)..(16)..(17)..(18): Xaa is A or G
  MOD_RES (19)..(20)..(21)..(22): Xaa is A or G or is absent

SEQ ID NO: 38489 - protein, 35 aa, Artificial Sequence; identical to SEQ ID NO: 6174
  GFR-binding peptide
  MOD_RES (2)..(4)..(35): Xaa is C or S

SEQ ID NO: 38490 - protein, 31 aa, Artificial Sequence; identical to SEQ ID NO: 4221
  GFR-binding peptide
  MOD_RES (1)..(1): Xaa is C or S

SEQ ID NO: 38491 - protein, 38 aa, Artificial Sequence; identical to SEQ ID NO: 13569
  GFR-binding peptide
  MOD_RES (34)..(34): Xaa is C or S
  MOD_RES (12)..(13)..(14)..(15)..(16): Xaa is A or G
  MOD_RES (17)..(18)..(19)..(20): Xaa is A or G or is absent

SEQ ID NO: 38492 - protein, 37 aa, Artificial Sequence; identical to SEQ ID NO: 4223
  GFR-binding peptide
  MOD_RES (2)..(36)..(37): Xaa is C or S
  MOD_RES (14)..(15)..(16)..(17)..(18): Xaa is A or G
  MOD_RES (19)..(20)..(21)..(22): Xaa is A or G or is absent

SEQ ID NO: 38493 - protein, 40 aa, Artificial Sequence; identical to SEQ ID NO: 11634
  GFR-binding peptide
  MOD_RES (2)..(4)..(36)..(37): Xaa is C or S

SEQ ID NO: 38494 - protein, 35 aa, Artificial Sequence; identical to SEQ ID NO: 11635
  GFR-binding peptide
  MOD_RES (2)..(34): Xaa is C or S

SEQ ID NO: 38495 - protein, 36 aa, Artificial Sequence; identical to SEQ ID NO: 11636
  GFR-binding peptide
  MOD_RES (2)..(4): Xaa is C or S
  MOD_RES (15)..(16)..(17)..(18)..(19): Xaa is A or G
  MOD_RES (20)..(21)..(22)..(23): Xaa is A or G or is absent

SEQ ID NO: 38496 - protein, 38 aa, Artificial Sequence; identical to SEQ ID NO: 13570
  GFR-binding peptide
  MOD_RES (1)..(3)..(35)..(36): Xaa is C or S

SEQ ID NO: 38497 - protein, 33 aa, Artificial Sequence; identical to SEQ ID NO: 6179
  GFR-binding peptide
  MOD_RES (31)..(32): Xaa is C or S

SEQ ID NO: 38498 - protein, 40 aa, Artificial Sequence; identical to SEQ ID NO: 4226
  GFR-binding peptide
  MOD_RES (1)..(3)..(34)..(35): Xaa is C or S

SEQ ID NO: 38499 - protein, 38 aa, Artificial Sequence; identical to SEQ ID NO: 6181
  GFR-binding peptide
  MOD_RES (6)..(7): Xaa is C or S

SEQ ID NO: 38500 - protein, 42 aa, Artificial Sequence; identical to SEQ ID NO: 15261
  GFR-binding peptide
  MOD_RES (5)..(6)..(39)..(41): Xaa is C or S
  MOD_RES (20)..(21)..(22)..(23)..(24): Xaa is A or G
  MOD_RES (25)..(26)..(27)..(28): Xaa is A or G or is absent

SEQ ID NO: 38501 - protein, 38 aa, Artificial Sequence; identical to SEQ ID NO: 7973
  GFR-binding peptide
  MOD_RES (4)..(5)..(38): Xaa is C or S
  MOD_RES (19)..(20)..(21)..(22)..(23): Xaa is A or G
  MOD_RES (24)..(25)..(26)..(27): Xaa is A or G or is absent

SEQ ID NO: 38502 - protein, 36 aa, Artificial Sequence; identical to SEQ ID NO: 13576
  GFR-binding peptide
  MOD_RES (1)..(33)..(35): Xaa is C or S

SEQ ID NO: 38503 - protein, 42 aa, Artificial Sequence; identical to SEQ ID NO: 15263
  GFR-binding peptide
  MOD_RES (6)..(7)..(41): Xaa is C or S
  MOD_RES (21)..(22)..(23)..(24)..(25): Xaa is A or G
  MOD_RES (26)..(27)..(28)..(29): Xaa is A or G or is absent

SEQ ID NO: 38504 - protein, 40 aa, Artificial Sequence; identical to SEQ ID NO: 15264
  GFR-binding peptide
  MOD_RES (3)..(4)..(37)..(39): Xaa is C or S
  MOD_RES (18)..(19)..(20)..(21)..(22): Xaa is A or G
  MOD_RES (23)..(24)..(25)..(26): Xaa is A or G or is absent

SEQ ID NO: 38505 - protein, 33 aa, Artificial Sequence; identical to SEQ ID NO: 6189
  GFR-binding peptide
  MOD_RES (32)..(32): Xaa is C or S

SEQ ID NO: 38506 - protein, 39 aa, Artificial Sequence; identical to SEQ ID NO: 15265
  GFR-binding peptide
  MOD_RES (6)..(7): Xaa is C or S
  MOD_RES (21)..(22)..(23)..(24)..(25): Xaa is A or G
  MOD_RES (26)..(27)..(28)..(29): Xaa is A or G or is absent

SEQ ID NO: 38507 - protein, 37 aa, Artificial Sequence; identical to SEQ ID NO: 7974
  GFR-binding peptide
  MOD_RES (2)..(3)..(34)..(36): Xaa is C or S

SEQ ID NO: 38508 - protein, 35 aa, Artificial Sequence; identical to SEQ ID NO: 13580
  GFR-binding peptide
  MOD_RES (2)..(3)..(35): Xaa is C or S

SEQ ID NO: 38509 - protein, 34 aa, Artificial Sequence; identical to SEQ ID NO: 13581
  GFR-binding peptide
  MOD_RES (1)..(33): Xaa is C or S

SEQ ID NO: 38510 - protein, 35 aa, Artificial Sequence; identical to SEQ ID NO: 15268
  GFR-binding peptide
  MOD_RES (34)..(34): Xaa is C or S
  MOD_RES (14)..(15)..(16)..(17)..(18): Xaa is A or G
  MOD_RES (19)..(20)..(21)..(22): Xaa is A or G or is absent

SEQ ID NO: 38511 - protein, 34 aa, Artificial Sequence; identical to SEQ ID NO: 15269
  GFR-binding peptide
  MOD_RES (2)..(3)..(34): Xaa is C or S

SEQ ID NO: 38512 - protein, 35 aa, Artificial Sequence; identical to SEQ ID NO: 15270
  GFR-binding peptide
  MOD_RES (33)..(35): Xaa is C or S
  MOD_RES (14)..(15)..(16)..(17)..(18): Xaa is A or G
  MOD_RES (19)..(20)..(21)..(22): Xaa is A or G or is absent

SEQ ID NO: 38513 - protein, 34 aa, Artificial Sequence
  GFR-binding peptide
  MOD_RES (1)..(34): Xaa is C or S
  MOD_RES (15)..(16)..(17)..(18)..(19): Xaa is A or G
  MOD_RES (20)..(21)..(22)..(23): Xaa is A or G or is absent
XVSQDLEPLTILYYXXXXXXXXXEQLSNMIVKSX

SEQ ID NO: 38514 - protein, 40 aa, Artificial Sequence; identical to SEQ ID NO: 13582
  GFR-binding peptide
  MOD_RES (6)..(7)..(39): Xaa is C or S

SEQ ID NO: 38515 - protein, 39 aa, Artificial Sequence; identical to SEQ ID NO: 13584
  GFR-binding peptide
  MOD_RES (2)..(3)..(37)..(39): Xaa is C or S
  MOD_RES (17)..(18)..(19)..(20)..(21): Xaa is A or G
  MOD_RES (22)..(23)..(24)..(25): Xaa is A or G or is absent

SEQ ID NO: 38516 - protein, 39 aa, Artificial Sequence; identical to SEQ ID NO: 15271
  GFR-binding peptide
  MOD_RES (6)..(7)..(38): Xaa is C or S

SEQ ID NO: 38517 - protein, 42 aa, Artificial Sequence; identical to SEQ ID NO: 7977
  GFR-binding peptide
  MOD_RES (5)..(6)..(39)..(41): Xaa is C or S
  MOD_RES (20)..(21)..(22)..(23)..(24): Xaa is A or G
  MOD_RES (25)..(26)..(27)..(28): Xaa is A or G or is absent

SEQ ID NO: 38518 - protein, 36 aa, Artificial Sequence; identical to SEQ ID NO: 15273
  GFR-binding peptide
  MOD_RES (6)..(6): Xaa is C or S

SEQ ID NO: 38519 - protein, 35 aa, Artificial Sequence; identical to SEQ ID NO: 15274
  GFR-binding peptide
  MOD_RES (1)..(34): Xaa is C or S
  MOD_RES (15)..(16)..(17)..(18)..(19): Xaa is A or G
  MOD_RES (20)..(21)..(22)..(23): Xaa is A or G or is absent

SEQ ID NO: 38520 - protein, 35 aa, Artificial Sequence; identical to SEQ ID NO: 13585
  GFR-binding peptide
  MOD_RES (2)..(3)..(35): Xaa is C or S

SEQ ID NO: 38521 - protein, 36 aa, Artificial Sequence; identical to SEQ ID NO: 13586
  GFR-binding peptide
  MOD_RES (1)..(2)..(36): Xaa is C or S
  MOD_RES (16)..(17)..(18)..(19)..(20): Xaa is A or G
  MOD_RES (21)..(22)..(23)..(24): Xaa is A or G or is absent

SEQ ID NO: 38522 - protein, 41 aa, Artificial Sequence; identical to SEQ ID NO: 13587
  GFR-binding peptide
  MOD_RES (4)..(5)..(39)..(41): Xaa is C or S
  MOD_RES (19)..(20)..(21)..(22)..(23): Xaa is A or G
  MOD_RES (24)..(25)..(26)..(27): Xaa is A or G or is absent

SEQ ID NO: 38523 - protein, 41 aa, Artificial Sequence; identical to SEQ ID NO: 15276
  GFR-binding peptide
  MOD_RES (4)..(5)..(38)..(40): Xaa is C or S
  MOD_RES (19)..(20)..(21)..(22)..(23): Xaa is A or G
  MOD_RES (24)..(25)..(26)..(27): Xaa is A or G or is absent

SEQ ID NO: 38524 - protein, 35 aa, Artificial Sequence; identical to SEQ ID NO: 6199
  GFR-binding peptide
  MOD_RES (4)..(5): Xaa is C or S

SEQ ID NO: 38525 - protein, 42 aa, Artificial Sequence; identical to SEQ ID NO: 13589
  GFR-binding peptide
  MOD_RES (6)..(7)..(40)..(42): Xaa is C or S
  MOD_RES (21)..(22)..(23)..(24)..(25): Xaa is A or G
  MOD_RES (26)..(27)..(28)..(29): Xaa is A or G or is absent

SEQ ID NO: 38526 - protein, 35 aa, Artificial Sequence; identical to SEQ ID NO: 15278
  GFR-binding peptide
  MOD_RES (1)..(33)..(35): Xaa is C or S

SEQ ID NO: 38527 - protein, 34 aa, Artificial Sequence; identical to SEQ ID NO: 15279
  GFR-binding peptide
  MOD_RES (2)..(3): Xaa is C or S

SEQ ID NO: 38528 - protein, 35 aa, Artificial Sequence; identical to SEQ ID NO: 13590
  GFR-binding peptide
  MOD_RES (2)..(3)..(35): Xaa is C or S

SEQ ID NO: 38529 - protein, 33 aa, Artificial Sequence; identical to SEQ ID NO: 15280
  GFR-binding peptide
  MOD_RES (2)..(3): Xaa is C or S

SEQ ID NO: 38530 - protein, 35 aa, Artificial Sequence; identical to SEQ ID NO: 13591
  GFR-binding peptide
  MOD_RES (1)..(2)..(34): Xaa is C or S

SEQ ID NO: 38531 - protein, 34 aa, Artificial Sequence; identical to SEQ ID NO: 15281
  GFR-binding peptide
  MOD_RES (2)..(3)..(34): Xaa is C or S

SEQ ID NO: 38532 - protein, 33 aa, Artificial Sequence; identical to SEQ ID NO: 13594
  GFR-binding peptide
  MOD_RES (14)..(15)..(16)..(17)..(18): Xaa is A or G
  MOD_RES (19)..(20)..(21)..(22): Xaa is A or G or is absent

SEQ ID NO: 38533 - protein, 39 aa, Artificial Sequence; identical to SEQ ID NO: 6208
  GFR-binding peptide
  MOD_RES (4)..(5)..(37)..(39): Xaa is C or S

SEQ ID NO: 38534 - protein, 35 aa, Artificial Sequence; identical to SEQ ID NO: 7994
  GFR-binding peptide
  MOD_RES (1)..(32)..(34): Xaa is C or S

SEQ ID NO: 38535 - protein, 39 aa, Artificial Sequence; identical to SEQ ID NO: 13598
  GFR-binding peptide
  MOD_RES (3)..(37)..(39): Xaa is C or S
  MOD_RES (17)..(18)..(19)..(20)..(21): Xaa is A or G
  MOD_RES (22)..(23)..(24)..(25): Xaa is A or G or is absent

SEQ ID NO: 38536 - protein, 40 aa, Artificial Sequence; identical to SEQ ID NO: 15283
  GFR-binding peptide
  MOD_RES (5)..(6)..(40): Xaa is C or S
  MOD_RES (20)..(21)..(22)..(23)..(24): Xaa is A or G
  MOD_RES (25)..(26)..(27)..(28): Xaa is A or G or is absent

SEQ ID NO: 38537 - protein, 32 aa, Artificial Sequence; identical to SEQ ID NO: 15284
  GFR-binding peptide
  MOD_RES (32)..(32): Xaa is C or S

SEQ ID NO: 38538 - protein, 37 aa, Artificial Sequence; identical to SEQ ID NO: 13600
  GFR-binding peptide
  MOD_RES (3)..(4)..(37): Xaa is C or S
  MOD_RES (18)..(19)..(20)..(21)..(22): Xaa is A or G
  MOD_RES (23)..(24)..(25)..(26): Xaa is A or G or is absent

SEQ ID NO: 38539 - protein, 36 aa, Artificial Sequence; identical to SEQ ID NO: 13601
  GFR-binding peptide
  MOD_RES (1)..(35): Xaa is C or S
  MOD_RES (15)..(16)..(17)..(18)..(19): Xaa is A or G
  MOD_RES (20)..(21)..(22)..(23): Xaa is A or G or is absent

SEQ ID NO: 38540 - protein, 39 aa, Artificial Sequence; identical to SEQ ID NO: 15285
  GFR-binding peptide
  MOD_RES (3)..(4)..(36)..(38): Xaa is C or S

SEQ ID NO: 38541 - protein, 37 aa, Artificial Sequence; identical to SEQ ID NO: 13602
  GFR-binding peptide
  MOD_RES (5)..(6): Xaa is C or S

SEQ ID NO: 38542 - protein, 38 aa, Artificial Sequence; identical to SEQ ID NO: 15286
  GFR-binding peptide
  MOD_RES (4)..(5)..(37): Xaa is C or S

SEQ ID NO: 38543 - protein, 33 aa, Artificial Sequence; identical to SEQ ID NO: 15287
  GFR-binding peptide
  MOD_RES (1)..(1): Xaa is C or S
  MOD_RES (15)..(16)..(17)..(18)..(19): Xaa is A or G
  MOD_RES (20)..(21)..(22)..(23): Xaa is A or G or is absent

SEQ ID NO: 38544 - protein, 41 aa, Artificial Sequence; identical to SEQ ID NO: 7999
  GFR-binding peptide
  MOD_RES (5)..(6)..(38)..(40): Xaa is C or S

SEQ ID NO: 38545 - protein, 36 aa, Artificial Sequence; identical to SEQ ID NO: 13605
  GFR-binding peptide
  MOD_RES (3)..(4): Xaa is C or S
  MOD_RES (18)..(19)..(20)..(21)..(22): Xaa is A or G
  MOD_RES (23)..(24)..(25)..(26): Xaa is A or G or is absent

SEQ ID NO: 38546 - protein, 38 aa, Artificial Sequence; identical to SEQ ID NO: 15289
  GFR-binding peptide
  MOD_RES (3)..(4)..(38): Xaa is C or S
  MOD_RES (18)..(19)..(20)..(21)..(22): Xaa is A or G
  MOD_RES (23)..(24)..(25)..(26): Xaa is A or G or is absent

SEQ ID NO: 38547 - protein, 35 aa, Artificial Sequence; identical to SEQ ID NO: 13606
  GFR-binding peptide
  MOD_RES (4)..(5): Xaa is C or S

SEQ ID NO: 38548 - protein, 36 aa, Artificial Sequence; identical to SEQ ID NO: 15290
  GFR-binding peptide
  MOD_RES (2)..(3)..(34)..(36): Xaa is C or S

SEQ ID NO: 38549 - protein, 41 aa, Artificial Sequence; identical to SEQ ID NO: 13607
  GFR-binding peptide
  MOD_RES (5)..(6)..(39)..(41): Xaa is C or S
  MOD_RES (20)..(21)..(22)..(23)..(24): Xaa is A or G
  MOD_RES (25)..(26)..(27)..(28): Xaa is A or G or is absent

SEQ ID NO: 38550 - protein, 43 aa, Artificial Sequence; identical to SEQ ID NO: 15291
  GFR-binding peptide
  MOD_RES (5)..(6)..(40)..(42): Xaa is C or S
  MOD_RES (20)..(21)..(22)..(23)..(24): Xaa is A or G
  MOD_RES (25)..(26)..(27)..(28): Xaa is A or G or is absent

SEQ ID NO: 38551 - protein, 37 aa, Artificial Sequence; identical to SEQ ID NO: 15292
  GFR-binding peptide
  MOD_RES (6)..(6): Xaa is C or S

SEQ ID NO: 38552 - protein, 39 aa, Artificial Sequence; identical to SEQ ID NO: 13609
  GFR-binding peptide
  MOD_RES (3)..(4)..(37)..(39): Xaa is C or S
  MOD_RES (18)..(19)..(20)..(21)..(22): Xaa is A or G
  MOD_RES (23)..(24)..(25)..(26): Xaa is A or G or is absent

SEQ ID NO: 38553 - protein, 33 aa, Artificial Sequence; identical to SEQ ID NO: 13610
  GFR-binding peptide
  MOD_RES (32)..(32): Xaa is C or S

SEQ ID NO: 38554 - protein, 37 aa, Artificial Sequence; identical to SEQ ID NO: 13611
  GFR-binding peptide
  MOD_RES (4)..(5)..(37): Xaa is C or S

SEQ ID NO: 38555 - protein, 36 aa, Artificial Sequence; identical to SEQ ID NO: 15293
  GFR-binding peptide
  MOD_RES (1)..(2)..(34)..(36): Xaa is C or S

SEQ ID NO: 38556 - protein, 33 aa, Artificial Sequence; identical to SEQ ID NO: 15294
  GFR-binding peptide
  MOD_RES (1)..(33): Xaa is C or S

SEQ ID NO: 38557 - protein, 35 aa, Artificial Sequence; identical to SEQ ID NO: 15295
  GFR-binding peptide
  MOD_RES (1)..(2): Xaa is C or S
  MOD_RES (16)..(17)..(18)..(19)..(20): Xaa is A or G
  MOD_RES (21)..(22)..(23)..(24): Xaa is A or G or is absent

SEQ ID NO: 38558 - protein, 35 aa, Artificial Sequence; identical to SEQ ID NO: 15296
  GFR-binding peptide
  MOD_RES (2)..(3)..(35): Xaa is C or S

SEQ ID NO: 38559 - protein, 39 aa, Artificial Sequence; identical to SEQ ID NO: 15298
  GFR-binding peptide
  MOD_RES (2)..(3)..(36)..(38): Xaa is C or S
  MOD_RES (17)..(18)..(19)..(20)..(21): Xaa is A or G
  MOD_RES (22)..(23)..(24)..(25): Xaa is A or G or is absent

SEQ ID NO: 38560 - protein, 37 aa, Artificial Sequence; identical to SEQ ID NO: 15299
  GFR-binding peptide
  MOD_RES (1)..(34)..(36): Xaa is C or S
  MOD_RES (15)..(16)..(17)..(18)..(19): Xaa is A or G
  MOD_RES (20)..(21)..(22)..(23): Xaa is A or G or is absent

SEQ ID NO: 38561 - protein, 40 aa, Artificial Sequence; identical to SEQ ID NO: 15301
  GFR-binding peptide
  MOD_RES (4)..(5)..(37)..(39): Xaa is C or S

SEQ ID NO: 38562 - protein, 37 aa, Artificial Sequence; identical to SEQ ID NO: 15302
  GFR-binding peptide
  MOD_RES (3)..(4)..(37): Xaa is C or S
  MOD_RES (18)..(19)..(20)..(21)..(22): Xaa is A or G
  MOD_RES (23)..(24)..(25)..(26): Xaa is A or G or is absent

SEQ ID NO: 38563 - protein, 36 aa, Artificial Sequence; identical to SEQ ID NO: 15303
  GFR-binding peptide
  MOD_RES (1)..(2)..(34)..(36): Xaa is C or S

SEQ ID NO: 38564 - protein, 36 aa, Artificial Sequence; identical to SEQ ID NO: 15304
  GFR-binding peptide
  MOD_RES (1)..(2)..(35): Xaa is C or S
  MOD_RES (16)..(17)..(18)..(19)..(20): Xaa is A or G
  MOD_RES (21)..(22)..(23)..(24): Xaa is A or G or is absent

SEQ ID NO: 38565 - protein, 35 aa, Artificial Sequence; identical to SEQ ID NO: 15305
  GFR-binding peptide
  MOD_RES (2)..(3): Xaa is C or S
  MOD_RES (17)..(18)..(19)..(20)..(21): Xaa is A or G
  MOD_RES (22)..(23)..(24)..(25): Xaa is A or G or is absent

SEQ ID NO: 38566 - protein, 36 aa, Artificial Sequence; identical to SEQ ID NO: 13614
  GFR-binding peptide
  MOD_RES (34)..(36): Xaa is C or S
  MOD_RES (14)..(15)..(16)..(17)..(18): Xaa is A or G
  MOD_RES (19)..(20)..(21)..(22): Xaa is A or G or is absent

SEQ ID NO: 38567 - protein, 38 aa, Artificial Sequence; identical to SEQ ID NO: 15306
  GFR-binding peptide
  MOD_RES (4)..(5)..(37): Xaa is C or S

SEQ ID NO: 38568 - protein, 39 aa, Artificial Sequence; identical to SEQ ID NO: 15307
  GFR-binding peptide
  MOD_RES (6)..(7)..(38): Xaa is C or S

SEQ ID NO: 38569 - protein, 41 aa, Artificial Sequence; identical to SEQ ID NO: 15308
  GFR-binding peptide
  MOD_RES (3)..(4)..(38)..(40): Xaa is C or S
  MOD_RES (18)..(19)..(20)..(21)..(22): Xaa is A or G
  MOD_RES (23)..(24)..(25)..(26): Xaa is A or G or is absent

SEQ ID NO: 38570 - protein, 38 aa, Artificial Sequence; identical to SEQ ID NO: 13615
  GFR-binding peptide
  MOD_RES (1)..(35)..(37): Xaa is C or S
  MOD_RES (15)..(16)..(17)..(18)..(19): Xaa is A or G
  MOD_RES (20)..(21)..(22)..(23): Xaa is A or G or is absent

SEQ ID NO: 38571 - protein, 40 aa, Artificial Sequence; identical to SEQ ID NO: 13616
  GFR-binding peptide
  MOD_RES (6)..(7)..(38)..(40): Xaa is C or S

SEQ ID NO: 38572 - protein, 36 aa, Artificial Sequence; identical to SEQ ID NO: 15311
  GFR-binding peptide
  MOD_RES (3)..(4)..(35): Xaa is C or S

SEQ ID NO: 38573 - protein, 35 aa, Artificial Sequence; identical to SEQ ID NO: 13618
  GFR-binding peptide
  MOD_RES (32)..(34): Xaa is C or S

SEQ ID NO: 38574 - protein, 36 aa, Artificial Sequence; identical to SEQ ID NO: 15312
  GFR-binding peptide
  MOD_RES (3)..(4)..(36): Xaa is C or S

SEQ ID NO: 38575 - protein, 34 aa, Artificial Sequence; identical to SEQ ID NO: 13620
  GFR-binding peptide
  MOD_RES (34)..(34): Xaa is C or S
  MOD_RES (14)..(15)..(16)..(17)..(18): Xaa is A or G
  MOD_RES (19)..(20)..(21)..(22): Xaa is A or G or is absent

SEQ ID NO: 38576 - protein, 38 aa, Artificial Sequence; identical to SEQ ID NO: 13621
  GFR-binding peptide
  MOD_RES (5)..(6): Xaa is C or S
  MOD_RES (20)..(21)..(22)..(23)..(24): Xaa is A or G
  MOD_RES (25)..(26)..(27)..(28): Xaa is A or G or is absent

SEQ ID NO: 38577 - protein, 34 aa, Artificial Sequence; identical to SEQ ID NO: 8019
  GFR-binding peptide
  MOD_RES (34)..(34): Xaa is C or S
  MOD_RES (14)..(15)..(16)..(17)..(18): Xaa is A or G
  MOD_RES (19)..(20)..(21)..(22): Xaa is A or G or is absent

SEQ ID NO: 38578 - protein, 31 aa, Artificial Sequence; identical to SEQ ID NO: 15316
  GFR-binding peptide
  MOD_RES (1)..(1): Xaa is C or S

SEQ ID NO: 38579 - protein, 31 aa, Artificial Sequence; identical to SEQ ID NO: 13622
  GFR-binding peptide

SEQ ID NO: 38580 - protein, 36 aa, Artificial Sequence; identical to SEQ ID NO: 15317
  GFR-binding peptide
  MOD_RES (3)..(4)..(35): Xaa is C or S

SEQ ID NO: 38581 - protein, 40 aa, Artificial Sequence; identical to SEQ ID NO: 13623
  GFR-binding peptide
  MOD_RES (4)..(5)..(39): Xaa is C or S
  MOD_RES (19)..(20)..(21)..(22)..(23): Xaa is A or G
  MOD_RES (24)..(25)..(26)..(27): Xaa is A or G or is absent

SEQ ID NO: 38582 - protein, 40 aa, Artificial Sequence; identical to SEQ ID NO: 15319
  GFR-binding peptide
  MOD_RES (4)..(5)..(37)..(39): Xaa is C or S

SEQ ID NO: 38583 - protein, 32 aa, Artificial Sequence; identical to SEQ ID NO: 13625
  GFR-binding peptide
  MOD_RES (32)..(32): Xaa is C or S

SEQ ID NO: 38584 - protein, 37 aa, Artificial Sequence; identical to SEQ ID NO: 15320
  GFR-binding peptide
  MOD_RES (2)..(3)..(37): Xaa is C or S
  MOD_RES (17)..(18)..(19)..(20)..(21): Xaa is A or G
  MOD_RES (22)..(23)..(24)..(25): Xaa is A or G or is absent

SEQ ID NO: 38585 - protein, 41 aa, Artificial Sequence; identical to SEQ ID NO: 13626
  GFR-binding peptide
  MOD_RES (3)..(4)..(38)..(40): Xaa is C or S
  MOD_RES (18)..(19)..(20)..(21)..(22): Xaa is A or G
  MOD_RES (23)..(24)..(25)..(26): Xaa is A or G or is absent

SEQ ID NO: 38586 - protein, 39 aa, Artificial Sequence; identical to SEQ ID NO: 15321
  GFR-binding peptide
  MOD_RES (2)..(3)..(37)..(39): Xaa is C or S
  MOD_RES (17)..(18)..(19)..(20)..(21): Xaa is A or G
  MOD_RES (22)..(23)..(24)..(25): Xaa is A or G or is absent

SEQ ID NO: 38587 - protein, 33 aa, Artificial Sequence
  GFR-binding peptide
  MOD_RES (33)..(33): Xaa is C or S
  MOD_RES (14)..(15)..(16)..(17)..(18): Xaa is A or G
  MOD_RES (19)..(20)..(21)..(22): Xaa is A or G or is absent
VSQDLEPLTILYYXXXXXXXXXEQLSNMIVKSX

SEQ ID NO: 38588 - protein, 35 aa, Artificial Sequence; identical to SEQ ID NO: 13627
  GFR-binding peptide
  MOD_RES (4)..(5): Xaa is C or S

SEQ ID NO: 38589 - protein, 42 aa, Artificial Sequence; identical to SEQ ID NO: 13629
  GFR-binding peptide
  MOD_RES (5)..(6)..(39)..(41): Xaa is C or S
  MOD_RES (20)..(21)..(22)..(23)..(24): Xaa is A or G
  MOD_RES (25)..(26)..(27)..(28): Xaa is A or G or is absent

SEQ ID NO: 38590 - protein, 36 aa, Artificial Sequence; identical to SEQ ID NO: 13630
  GFR-binding peptide
  MOD_RES (1)..(34)..(36): Xaa is C or S
  MOD_RES (15)..(16)..(17)..(18)..(19): Xaa is A or G
  MOD_RES (20)..(21)..(22)..(23): Xaa is A or G or is absent

SEQ ID NO: 38591 - protein, 35 aa, Artificial Sequence; identical to SEQ ID NO: 15322
  GFR-binding peptide
  MOD_RES (1)..(33)..(35): Xaa is C or S

SEQ ID NO: 38592 - protein, 37 aa, Artificial Sequence; identical to SEQ ID NO: 13632
  GFR-binding peptide
  MOD_RES (1)..(35)..(37): Xaa is C or S
  MOD_RES (15)..(16)..(17)..(18)..(19): Xaa is A or G
  MOD_RES (20)..(21)..(22)..(23): Xaa is A or G or is absent

SEQ ID NO: 38593 - protein, 37 aa, Artificial Sequence; identical to SEQ ID NO: 15324
  GFR-binding peptide
  MOD_RES (3)..(4)..(36): Xaa is C or S

SEQ ID NO: 38594 - protein, 35 aa, Artificial Sequence; identical to SEQ ID NO: 15325
  GFR-binding peptide
  MOD_RES (1)..(2)..(34): Xaa is C or S

SEQ ID NO: 38595 - protein, 36 aa, Artificial Sequence; identical to SEQ ID NO: 13633
  GFR-binding peptide
  MOD_RES (3)..(4)..(36): Xaa is C or S

SEQ ID NO: 38596 - protein, 37 aa, Artificial Sequence; identical to SEQ ID NO: 13634
  GFR-binding peptide
  MOD_RES (1)..(2)..(36): Xaa is C or S
  MOD_RES (16)..(17)..(18)..(19)..(20): Xaa is A or G
  MOD_RES (21)..(22)..(23)..(24): Xaa is A or G or is absent

SEQ ID NO: 38597 - protein, 42 aa, Artificial Sequence; identical to SEQ ID NO: 15326
  GFR-binding peptide
  MOD_RES (6)..(7)..(39)..(41): Xaa is C or S

SEQ ID NO: 38598 - protein, 39 aa, Artificial Sequence; identical to SEQ ID NO: 13636
  GFR-binding peptide
  MOD_RES (2)..(36)..(38): Xaa is C or S
  MOD_RES (16)..(17)..(18)..(19)..(20): Xaa is A or G
  MOD_RES (21)..(22)..(23)..(24): Xaa is A or G or is absent

SEQ ID NO: 38599 - protein, 34 aa, Artificial Sequence; identical to SEQ ID NO: 15327
  GFR-binding peptide
  MOD_RES (34)..(34): Xaa is C or S
  MOD_RES (14)..(15)..(16)..(17)..(18): Xaa is A or G
  MOD_RES (19)..(20)..(21)..(22): Xaa is A or G or is absent

SEQ ID NO: 38600 - protein, 34 aa, Artificial Sequence; identical to SEQ ID NO: 6259
  GFR-binding peptide
  MOD_RES (1)..(34): Xaa is C or S
  MOD_RES (15)..(16)..(17)..(18)..(19): Xaa is A or G
  MOD_RES (20)..(21)..(22)..(23): Xaa is A or G or is absent

SEQ ID NO: 38601 - protein, 40 aa, Artificial Sequence; identical to SEQ ID NO: 15329
  GFR-binding peptide
  MOD_RES (5)..(6)..(37)..(39): Xaa is C or S

SEQ ID NO: 38602 - protein, 40 aa, Artificial Sequence; identical to SEQ ID NO: 15330
  GFR-binding peptide
  MOD_RES (3)..(4)..(38)..(40): Xaa is C or S
  MOD_RES (18)..(19)..(20)..(21)..(22): Xaa is A or G
  MOD_RES (23)..(24)..(25)..(26): Xaa is A or G or is absent

SEQ ID NO: 38603 - protein, 37 aa, Artificial Sequence; identical to SEQ ID NO: 15331
  GFR-binding peptide
  MOD_RES (3)..(4): Xaa is C or S
  MOD_RES (18)..(19)..(20)..(21)..(22): Xaa is A or G
  MOD_RES (23)..(24)..(25)..(26): Xaa is A or G or is absent

SEQ ID NO: 38604 - protein, 43 aa, Artificial Sequence; identical to SEQ ID NO: 6260
  GFR-binding peptide
  MOD_RES (5)..(6)..(40)..(42): Xaa is C or S
  MOD_RES (20)..(21)..(22)..(23)..(24): Xaa is A or G
  MOD_RES (25)..(26)..(27)..(28): Xaa is A or G or is absent

SEQ ID NO: 38605 - protein, 37 aa, Artificial Sequence; identical to SEQ ID NO: 13639
  GFR-binding peptide
  MOD_RES (34)..(36): Xaa is C or S
  MOD_RES (14)..(15)..(16)..(17)..(18): Xaa is A or G
  MOD_RES (19)..(20)..(21)..(22): Xaa is A or G or is absent

SEQ ID NO: 38606 - protein, 33 aa, Artificial Sequence; identical to SEQ ID NO: 6261
  GFR-binding peptide
  MOD_RES (1)..(1): Xaa is C or S
  MOD_RES (15)..(16)..(17)..(18)..(19): Xaa is A or G
  MOD_RES (20)..(21)..(22)..(23): Xaa is A or G or is absent

SEQ ID NO: 38607 - protein, 38 aa, Artificial Sequence; identical to SEQ ID NO: 6262
  GFR-binding peptide
  MOD_RES (4)..(5)..(38): Xaa is C or S
  MOD_RES (19)..(20)..(21)..(22)..(23): Xaa is A or G
  MOD_RES (24)..(25)..(26)..(27): Xaa is A or G or is absent

SEQ ID NO: 38608 - protein, 41 aa, Artificial Sequence; identical to SEQ ID NO: 13642
  GFR-binding peptide
  MOD_RES (5)..(6)..(38)..(40): Xaa is C or S

SEQ ID NO: 38609 - protein, 39 aa, Artificial Sequence; identical to SEQ ID NO: 15332
  GFR-binding peptide
  MOD_RES (3)..(4)..(36)..(38): Xaa is C or S

SEQ ID NO: 38610 - protein, 37 aa, Artificial Sequence; identical to SEQ ID NO: 6263
  GFR-binding peptide
  MOD_RES (1)..(35)..(37): Xaa is C or S
  MOD_RES (15)..(16)..(17)..(18)..(19): Xaa is A or G
  MOD_RES (20)..(21)..(22)..(23): Xaa is A or G or is absent

SEQ ID NO: 38611 - protein, 35 aa, Artificial Sequence; identical to SEQ ID NO: 15333
  GFR-binding peptide
  MOD_RES (1)..(2): Xaa is C or S
  MOD_RES (16)..(17)..(18)..(19)..(20): Xaa is A or G
  MOD_RES (21)..(22)..(23)..(24): Xaa is A or G or is absent

SEQ ID NO: 38612 - protein, 36 aa, Artificial Sequence; identical to SEQ ID NO: 15334
  GFR-binding peptide
  MOD_RES (1)..(34)..(36): Xaa is C or S
  MOD_RES (15)..(16)..(17)..(18)..(19): Xaa is A or G
  MOD_RES (20)..(21)..(22)..(23): Xaa is A or G or is absent

SEQ ID NO: 38613 - protein, 39 aa, Artificial Sequence; identical to SEQ ID NO: 6266
  GFR-binding peptide
  MOD_RES (6)..(7): Xaa is C or S
  MOD_RES (21)..(22)..(23)..(24)..(25): Xaa is A or G
  MOD_RES (26)..(27)..(28)..(29): Xaa is A or G or is absent

SEQ ID NO: 38614 - protein, 40 aa, Artificial Sequence; identical to SEQ ID NO: 13646
  GFR-binding peptide
  MOD_RES (5)..(6)..(40): Xaa is C or S
  MOD_RES (20)..(21)..(22)..(23)..(24): Xaa is A or G
  MOD_RES (25)..(26)..(27)..(28): Xaa is A or G or is absent

SEQ ID NO: 38615 - protein, 38 aa, Artificial Sequence; identical to SEQ ID NO: 8036
  GFR-binding peptide
  MOD_RES (5)..(6): Xaa is C or S
  MOD_RES (20)..(21)..(22)..(23)..(24): Xaa is A or G
  MOD_RES (25)..(26)..(27)..(28): Xaa is A or G or is absent

SEQ ID NO: 38616 - protein, 33 aa, Artificial Sequence; identical to SEQ ID NO: 8037
  GFR-binding peptide
  MOD_RES (1)..(32): Xaa is C or S

SEQ ID NO: 38617 - protein, 32 aa, Artificial Sequence; identical to SEQ ID NO: 13648
  GFR-binding peptide
  MOD_RES (1)..(2): Xaa is C or S

SEQ ID NO: 38618 - protein, 39 aa, Artificial Sequence; identical to SEQ ID NO: 15337
  GFR-binding peptide
  MOD_RES (3)..(4)..(38): Xaa is C or S
  MOD_RES (18)..(19)..(20)..(21)..(22): Xaa is A or G
  MOD_RES (23)..(24)..(25)..(26): Xaa is A or G or is absent

SEQ ID NO: 38619 - protein, 40 aa, Artificial Sequence; identical to SEQ ID NO: 13650
  GFR-binding peptide
  MOD_RES (5)..(6)..(37)..(39): Xaa is C or S

SEQ ID NO: 38620 - protein, 39 aa, Artificial Sequence; identical to SEQ ID NO: 8038
  GFR-binding peptide
  MOD_RES (1)..(2)..(36)..(38): Xaa is C or S
  MOD_RES (16)..(17)..(18)..(19)..(20): Xaa is A or G
  MOD_RES (21)..(22)..(23)..(24): Xaa is A or G or is absent

SEQ ID NO: 38621 - protein, 41 aa, Artificial Sequence; identical to SEQ ID NO: 15339
  GFR-binding peptide
  MOD_RES (5)..(6)..(39)..(41): Xaa is C or S
  MOD_RES (20)..(21)..(22)..(23)..(24): Xaa is A or G
  MOD_RES (25)..(26)..(27)..(28): Xaa is A or G or is absent

SEQ ID NO: 38622 - protein, 33 aa, Artificial Sequence; identical to SEQ ID NO: 8039
  GFR-binding peptide
  MOD_RES (1)..(32): Xaa is C or S

SEQ ID NO: 38623 - protein, 37 aa, Artificial Sequence; identical to SEQ ID NO: 8040
  GFR-binding peptide
  MOD_RES (1)..(2)..(36): Xaa is C or S
  MOD_RES (16)..(17)..(18)..(19)..(20): Xaa is A or G
  MOD_RES (21)..(22)..(23)..(24): Xaa is A or G or is absent

SEQ ID NO: 38624 - protein, 42 aa, Artificial Sequence; identical to SEQ ID NO: 13651
  GFR-binding peptide
  MOD_RES (5)..(39)..(41): Xaa is C or S
  MOD_RES (19)..(20)..(21)..(22)..(23): Xaa is A or G
  MOD_RES (24)..(25)..(26)..(27): Xaa is A or G or is absent

SEQ ID NO: 38625 - protein, 36 aa, Artificial Sequence; identical to SEQ ID NO: 13652
  GFR-binding peptide
  MOD_RES (2)..(3)..(36): Xaa is C or S
  MOD_RES (17)..(18)..(19)..(20)..(21): Xaa is A or G
  MOD_RES (22)..(23)..(24)..(25): Xaa is A or G or is absent

SEQ ID NO: 38626 - protein, 32 aa, Artificial Sequence; identical to SEQ ID NO: 13653
  GFR-binding peptide
  MOD_RES (1)..(1): Xaa is C or S

SEQ ID NO: 38627 - protein, 39 aa, Artificial Sequence; identical to SEQ ID NO: 13654
  GFR-binding peptide
  MOD_RES (4)..(5)..(37)..(39): Xaa is C or S

SEQ ID NO: 38628 - protein, 39 aa, Artificial Sequence; identical to SEQ ID NO: 15343
  GFR-binding peptide
  MOD_RES (5)..(6)..(38): Xaa is C or S

SEQ ID NO: 38629 - protein, 33 aa, Artificial Sequence; identical to SEQ ID NO: 15344
  GFR-binding peptide
  MOD_RES (14)..(15)..(16)..(17)..(18): Xaa is A or G
  MOD_RES (19)..(20)..(21)..(22): Xaa is A or G or is absent

SEQ ID NO: 38630 - protein, 40 aa, Artificial Sequence; identical to SEQ ID NO: 8045
  GFR-binding peptide
  MOD_RES (4)..(5)..(37)..(39): Xaa is C or S

SEQ ID NO: 38631 - protein, 36 aa, Artificial Sequence; identical to SEQ ID NO: 15347
  GFR-binding peptide
  MOD_RES (1)..(2)..(34)..(36): Xaa is C or S

SEQ ID NO: 38632 - protein, 37 aa, Artificial Sequence; identical to SEQ ID NO: 15348
  GFR-binding peptide
  MOD_RES (1)..(35)..(37): Xaa is C or S
  MOD_RES (15)..(16)..(17)..(18)..(19): Xaa is A or G
  MOD_RES (20)..(21)..(22)..(23): Xaa is A or G or is absent

SEQ ID NO: 38633 - protein, 32 aa, Artificial Sequence; identical to SEQ ID NO: 8048
  GFR-binding peptide
  MOD_RES (1)..(2): Xaa is C or S

SEQ ID NO: 38634 - protein, 38 aa, Artificial Sequence; identical to SEQ ID NO: 13657
  GFR-binding peptide
  MOD_RES (4)..(38): Xaa is C or S
  MOD_RES (18)..(19)..(20)..(21)..(22): Xaa is A or G
  MOD_RES (23)..(24)..(25)..(26): Xaa is A or G or is absent

SEQ ID NO: 38635 - protein, 37 aa, Artificial Sequence; identical to SEQ ID NO: 15351
  GFR-binding peptide
  MOD_RES (4)..(5): Xaa is C or S
  MOD_RES (19)..(20)..(21)..(22)..(23): Xaa is A or G
  MOD_RES (24)..(25)..(26)..(27): Xaa is A or G or is absent

SEQ ID NO: 38636 - protein, 41 aa, Artificial Sequence; identical to SEQ ID NO: 15352
  GFR-binding peptide
  MOD_RES (3)..(4)..(38)..(40): Xaa is C or S
  MOD_RES (18)..(19)..(20)..(21)..(22): Xaa is A or G
  MOD_RES (23)..(24)..(25)..(26): Xaa is A or G or is absent

SEQ ID NO: 38637 - protein, 32 aa, Artificial Sequence; identical to SEQ ID NO: 8053
  GFR-binding peptide
  MOD_RES (32)..(32): Xaa is C or S

SEQ ID NO: 38638 - protein, 43 aa, Artificial Sequence; identical to SEQ ID NO: 13658
  GFR-binding peptide
  MOD_RES (6)..(7)..(40)..(42): Xaa is C or S
  MOD_RES (21)..(22)..(23)..(24)..(25): Xaa is A or G
  MOD_RES (26)..(27)..(28)..(29): Xaa is A or G or is absent

SEQ ID NO: 38639 - protein, 31 aa, Artificial Sequence; identical to SEQ ID NO: 13660
  GFR-binding peptide
  MOD_RES (1)..(1): Xaa is C or S

SEQ ID NO: 38640 - protein, 37 aa, Artificial Sequence; identical to SEQ ID NO: 15354
  GFR-binding peptide
  MOD_RES (3)..(4)..(37): Xaa is C or S
  MOD_RES (18)..(19)..(20)..(21)..(22): Xaa is A or G
  MOD_RES (23)..(24)..(25)..(26): Xaa is A or G or is absent

SEQ ID NO: 38641 - protein, 41 aa, Artificial Sequence; identical to SEQ ID NO: 13661
  GFR-binding peptide
  MOD_RES (4)..(5)..(39)..(41): Xaa is C or S
  MOD_RES (19)..(20)..(21)..(22)..(23): Xaa is A or G
  MOD_RES (24)..(25)..(26)..(27): Xaa is A or G or is absent

SEQ ID NO: 38642 - protein, 36 aa, Artificial Sequence; identical to SEQ ID NO: 15355
  GFR-binding peptide
  MOD_RES (3)..(4)..(35): Xaa is C or S

SEQ ID NO: 38643 - protein, 35 aa, Artificial Sequence; identical to SEQ ID NO: 6290
  GFR-binding peptide
  MOD_RES (3)..(4)..(35): Xaa is C or S

SEQ ID NO: 38644 - protein, 32 aa, Artificial Sequence; identical to SEQ ID NO: 13664
  GFR-binding peptide
  MOD_RES (1)..(2): Xaa is C or S

SEQ ID NO: 38645 - protein, 41 aa, Artificial Sequence; identical to SEQ ID NO: 6294
  GFR-binding peptide
  MOD_RES (5)..(6)..(40): Xaa is C or S
  MOD_RES (20)..(21)..(22)..(23)..(24): Xaa is A or G
  MOD_RES (25)..(26)..(27)..(28): Xaa is A or G or is absent

SEQ ID NO: 38646 - protein, 38 aa, Artificial Sequence; identical to SEQ ID NO: 13666
  GFR-binding peptide
  MOD_RES (1)..(2)..(35)..(37): Xaa is C or S
  MOD_RES (16)..(17)..(18)..(19)..(20): Xaa is A or G
  MOD_RES (21)..(22)..(23)..(24): Xaa is A or G or is absent

SEQ ID NO: 38647 - protein, 39 aa, Artificial Sequence; identical to SEQ ID NO: 13667
  GFR-binding peptide
  MOD_RES (7)..(7): Xaa is C or S
  MOD_RES (21)..(22)..(23)..(24)..(25): Xaa is A or G
  MOD_RES (26)..(27)..(28)..(29): Xaa is A or G or is absent

SEQ ID NO: 38648 - protein, 39 aa, Artificial Sequence; identical to SEQ ID NO: 13668
  GFR-binding peptide
  MOD_RES (3)..(4)..(37)..(39): Xaa is C or S
  MOD_RES (18)..(19)..(20)..(21)..(22): Xaa is A or G
  MOD_RES (23)..(24)..(25)..(26): Xaa is A or G or is absent

SEQ ID NO: 38649 - protein, 35 aa, Artificial Sequence; identical to SEQ ID NO: 13669
  GFR-binding peptide
  MOD_RES (2)..(3): Xaa is C or S
  MOD_RES (17)..(18)..(19)..(20)..(21): Xaa is A or G
  MOD_RES (22)..(23)..(24)..(25): Xaa is A or G or is absent

SEQ ID NO: 38650 - protein, 37 aa, Artificial Sequence; identical to SEQ ID NO: 13670
  GFR-binding peptide
  MOD_RES (3)..(4): Xaa is C or S
  MOD_RES (18)..(19)..(20)..(21)..(22): Xaa is A or G
  MOD_RES (23)..(24)..(25)..(26): Xaa is A or G or is absent

SEQ ID NO: 38651 - protein, 34 aa, Artificial Sequence; identical to SEQ ID NO: 13671
  GFR-binding peptide
  MOD_RES (4)..(4): Xaa is C or S

SEQ ID NO: 38652 - protein, 44 aa, Artificial Sequence; identical to SEQ ID NO: 15356
  GFR-binding peptide
  MOD_RES (6)..(7)..(41)..(43): Xaa is C or S
  MOD_RES (21)..(22)..(23)..(24)..(25): Xaa is A or G
  MOD_RES (26)..(27)..(28)..(29): Xaa is A or G or is absent

SEQ ID NO: 38653 - protein, 44 aa, Artificial Sequence; identical to SEQ ID NO: 13672
  GFR-binding peptide
  MOD_RES (6)..(7)..(41)..(43): Xaa is C or S
  MOD_RES (21)..(22)..(23)..(24)..(25): Xaa is A or G
  MOD_RES (26)..(27)..(28)..(29): Xaa is A or G or is absent

SEQ ID NO: 38654 - protein, 36 aa, Artificial Sequence; identical to SEQ ID NO: 6298
  GFR-binding peptide
  MOD_RES (2)..(3)..(36): Xaa is C or S
  MOD_RES (17)..(18)..(19)..(20)..(21): Xaa is A or G
  MOD_RES (22)..(23)..(24)..(25): Xaa is A or G or is absent

SEQ ID NO: 38655 - protein, 39 aa, Artificial Sequence; identical to SEQ ID NO: 13675
  GFR-binding peptide
  MOD_RES (5)..(6): Xaa is C or S
  MOD_RES (20)..(21)..(22)..(23)..(24): Xaa is A or G
  MOD_RES (25)..(26)..(27)..(28): Xaa is A or G or is absent

SEQ ID NO: 38656 - protein, 42 aa, Artificial Sequence; identical to SEQ ID NO: 13676
  GFR-binding peptide
  MOD_RES (6)..(40)..(42): Xaa is C or S
  MOD_RES (20)..(21)..(22)..(23)..(24): Xaa is A or G
  MOD_RES (25)..(26)..(27)..(28): Xaa is A or G or is absent

SEQ ID NO: 38657 - protein, 33 aa, Artificial Sequence; identical to SEQ ID NO: 15358
  GFR-binding peptide
  MOD_RES (32)..(32): Xaa is C or S

SEQ ID NO: 38658 - protein, 39 aa, Artificial Sequence; identical to SEQ ID NO: 13677
  GFR-binding peptide
  MOD_RES (2)..(3)..(36)..(38): Xaa is C or S
  MOD_RES (17)..(18)..(19)..(20)..(21): Xaa is A or G
  MOD_RES (22)..(23)..(24)..(25): Xaa is A or G or is absent

SEQ ID NO: 38659 - protein, 41 aa, Artificial Sequence; identical to SEQ ID NO: 13678
  GFR-binding peptide
  MOD_RES (4)..(5)..(39)..(41): Xaa is C or S
  MOD_RES (19)..(20)..(21)..(22)..(23): Xaa is A or G
  MOD_RES (24)..(25)..(26)..(27): Xaa is A or G or is absent

SEQ ID NO: 38660 - protein, 37 aa, Artificial Sequence; identical to SEQ ID NO: 13679
  GFR-binding peptide
  MOD_RES (1)..(34)..(36): Xaa is C or S
  MOD_RES (15)..(16)..(17)..(18)..(19): Xaa is A or G
  MOD_RES (20)..(21)..(22)..(23): Xaa is A or G or is absent

SEQ ID NO: 38661 - protein, 38 aa, Artificial Sequence; identical to SEQ ID NO: 15359
  GFR-binding peptide
  MOD_RES (1)..(35)..(37): Xaa is C or S
  MOD_RES (15)..(16)..(17)..(18)..(19): Xaa is A or G
  MOD_RES (20)..(21)..(22)..(23): Xaa is A or G or is absent

SEQ ID NO: 38662 - protein, 39 aa, Artificial Sequence; identical to SEQ ID NO: 13681
  GFR-binding peptide
  MOD_RES (4)..(5)..(39): Xaa is C or S
  MOD_RES (19)..(20)..(21)..(22)..(23): Xaa is A or G
  MOD_RES (24)..(25)..(26)..(27): Xaa is A or G or is absent

SEQ ID NO: 38663 - protein, 38 aa, Artificial Sequence; identical to SEQ ID NO: 15360
  GFR-binding peptide
  MOD_RES (3)..(4)..(38): Xaa is C or S
  MOD_RES (18)..(19)..(20)..(21)..(22): Xaa is A or G
  MOD_RES (23)..(24)..(25)..(26): Xaa is A or G or is absent

SEQ ID NO: 38664 - protein, 35 aa, Artificial Sequence; identical to SEQ ID NO: 8069
  GFR-binding peptide
  MOD_RES (1)..(2): Xaa is C or S
  MOD_RES (16)..(17)..(18)..(19)..(20): Xaa is A or G
  MOD_RES (21)..(22)..(23)..(24): Xaa is A or G or is absent

SEQ ID NO: 38665 - protein, 36 aa, Artificial Sequence; identical to SEQ ID NO: 13682
  GFR-binding peptide
  MOD_RES (3)..(4): Xaa is C or S
  MOD_RES (18)..(19)..(20)..(21)..(22): Xaa is A or G
  MOD_RES (23)..(24)..(25)..(26): Xaa is A or G or is absent

SEQ ID NO: 38666 - protein, 38 aa, Artificial Sequence; identical to SEQ ID NO: 15363
  GFR-binding peptide
  MOD_RES (5)..(6): Xaa is C or S
  MOD_RES (20)..(21)..(22)..(23)..(24): Xaa is A or G
  MOD_RES (25)..(26)..(27)..(28): Xaa is A or G or is absent

SEQ ID NO: 38667 - protein, 38 aa, Artificial Sequence; identical to SEQ ID NO: 13683
  GFR-binding peptide
  MOD_RES (1)..(2)..(36)..(38): Xaa is C or S
  MOD_RES (16)..(17)..(18)..(19)..(20): Xaa is A or G
  MOD_RES (21)..(22)..(23)..(24): Xaa is A or G or is absent

SEQ ID NO: 38668 - protein, 39 aa, Artificial Sequence; identical to SEQ ID NO: 13684
  GFR-binding peptide
  MOD_RES (6)..(38): Xaa is C or S

SEQ ID NO: 38669 - protein, 33 aa, Artificial Sequence; identical to SEQ ID NO: 8073
  GFR-binding peptide
  MOD_RES (33)..(33): Xaa is C or S
  MOD_RES (14)..(15)..(16)..(17)..(18): Xaa is A or G
  MOD_RES (19)..(20)..(21)..(22): Xaa is A or G or is absent

SEQ ID NO: 38670 - protein, 37 aa, Artificial Sequence; identical to SEQ ID NO: 15365
  GFR-binding peptide
  MOD_RES (3)..(4)..(36): Xaa is C or S

SEQ ID NO: 38671 - protein, 39 aa, Artificial Sequence; identical to SEQ ID NO: 6306
  GFR-binding peptide
  MOD_RES (1)..(2)..(36)..(38): Xaa is C or S
  MOD_RES (16)..(17)..(18)..(19)..(20): Xaa is A or G
  MOD_RES (21)..(22)..(23)..(24): Xaa is A or G or is absent

SEQ ID NO: 38672 - protein, 34 aa, Artificial Sequence; identical to SEQ ID NO: 8076
  GFR-binding peptide
  MOD_RES (1)..(34): Xaa is C or S
  MOD_RES (15)..(16)..(17)..(18)..(19): Xaa is A or G
  MOD_RES (20)..(21)..(22)..(23): Xaa is A or G or is absent

SEQ ID NO: 38673 - protein, 40 aa, Artificial Sequence; identical to SEQ ID NO: 15368
  GFR-binding peptide
  MOD_RES (5)..(6)..(39): Xaa is C or S
  MOD_RES (20)..(21)..(22)..(23)..(24): Xaa is A or G
  MOD_RES (25)..(26)..(27)..(28): Xaa is A or G or is absent

SEQ ID NO: 38674 - protein, 37 aa, Artificial Sequence; identical to SEQ ID NO: 13686
  GFR-binding peptide
  MOD_RES (4)..(5): Xaa is C or S
  MOD_RES (19)..(20)..(21)..(22)..(23): Xaa is A or G
  MOD_RES (24)..(25)..(26)..(27): Xaa is A or G or is absent

SEQ ID NO: 38675 - protein, 38 aa, Artificial Sequence; identical to SEQ ID NO: 6307
  GFR-binding peptide
  MOD_RES (5)..(6): Xaa is C or S
  MOD_RES (20)..(21)..(22)..(23)..(24): Xaa is A or G
  MOD_RES (25)..(26)..(27)..(28): Xaa is A or G or is absent

SEQ ID NO: 38676 - protein, 41 aa, Artificial Sequence; identical to SEQ ID NO: 13689
  GFR-binding peptide
  MOD_RES (6)..(7)..(40): Xaa is C or S
  MOD_RES (21)..(22)..(23)..(24)..(25): Xaa is A or G
  MOD_RES (26)..(27)..(28)..(29): Xaa is A or G or is absent

SEQ ID NO: 38677 - protein, 35 aa, Artificial Sequence; identical to SEQ ID NO: 13691
  GFR-binding peptide
  MOD_RES (1)..(2)..(33)..(35): Xaa is C or S

SEQ ID NO: 38678 - protein, 38 aa, Artificial Sequence; identical to SEQ ID NO: 13692
  GFR-binding peptide
  MOD_RES (2)..(3)..(35)..(37): Xaa is C or S

SEQ ID NO: 38679 - protein, 37 aa, Artificial Sequence; identical to SEQ ID NO: 15369
  GFR-binding peptide
  MOD_RES (2)..(3)..(37): Xaa is C or S
  MOD_RES (17)..(18)..(19)..(20)..(21): Xaa is A or G
  MOD_RES (22)..(23)..(24)..(25): Xaa is A or G or is absent

SEQ ID NO: 38680 - protein, 42 aa, Artificial Sequence; identical to SEQ ID NO: 15370
  GFR-binding peptide
  MOD_RES (6)..(7)..(40)..(42): Xaa is C or S
  MOD_RES (21)..(22)..(23)..(24)..(25): Xaa is A or G
  MOD_RES (26)..(27)..(28)..(29): Xaa is A or G or is absent

SEQ ID NO: 38681 - protein, 35 aa, Artificial Sequence; identical to SEQ ID NO: 13693
  GFR-binding peptide
  MOD_RES (33)..(35): Xaa is C or S
  MOD_RES (14)..(15)..(16)..(17)..(18): Xaa is A or G
  MOD_RES (19)..(20)..(21)..(22): Xaa is A or G or is absent

SEQ ID NO: 38682 - protein, 43 aa, Artificial Sequence; identical to SEQ ID NO: 15371
  GFR-binding peptide
  MOD_RES (6)..(7)..(40)..(42): Xaa is C or S
  MOD_RES (21)..(22)..(23)..(24)..(25): Xaa is A or G
  MOD_RES (26)..(27)..(28)..(29): Xaa is A or G or is absent

SEQ ID NO: 38683 - protein, 34 aa, Artificial Sequence; identical to SEQ ID NO: 13694
  GFR-binding peptide
  MOD_RES (2)..(3): Xaa is C or S

SEQ ID NO: 38684 - protein, 40 aa, Artificial Sequence; identical to SEQ ID NO: 13695
  GFR-binding peptide
  MOD_RES (6)..(7)..(39): Xaa is C or S

SEQ ID NO: 38685 - protein, 38 aa, Artificial Sequence; identical to SEQ ID NO: 15373
  GFR-binding peptide
  MOD_RES (2)..(3)..(37): Xaa is C or S
  MOD_RES (17)..(18)..(19)..(20)..(21): Xaa is A or G
  MOD_RES (22)..(23)..(24)..(25): Xaa is A or G or is absent

SEQ ID NO: 38686 - protein, 38 aa, Artificial Sequence; identical to SEQ ID NO: 13696
  GFR-binding peptide
  MOD_RES (1)..(2)..(35)..(37): Xaa is C or S
  MOD_RES (16)..(17)..(18)..(19)..(20): Xaa is A or G
  MOD_RES (21)..(22)..(23)..(24): Xaa is A or G or is absent

SEQ ID NO: 38687 - protein, 36 aa, Artificial Sequence; identical to SEQ ID NO: 6317
  GFR-binding peptide
  MOD_RES (4)..(5)..(36): Xaa is C or S

SEQ ID NO: 38688 - protein, 32 aa, Artificial Sequence; identical to SEQ ID NO: 15374
  GFR-binding peptide
  MOD_RES (1)..(2): Xaa is C or S

SEQ ID NO: 38689 - protein, 33 aa, Artificial Sequence; identical to SEQ ID NO: 8088
  GFR-binding peptide
  MOD_RES (1)..(1): Xaa is C or S
  MOD_RES (15)..(16)..(17)..(18)..(19): Xaa is A or G
  MOD_RES (20)..(21)..(22)..(23): Xaa is A or G or is absent

SEQ ID NO: 38690 - protein, 36 aa, Artificial Sequence; identical to SEQ ID NO: 15377
  GFR-binding peptide
  MOD_RES (2)..(3)..(35): Xaa is C or S

SEQ ID NO: 38691 - protein, 34 aa, Artificial Sequence; identical to SEQ ID NO: 8089
  GFR-binding peptide
  MOD_RES (2)..(3)..(34): Xaa is C or S

SEQ ID NO: 38692 - protein, 34 aa, Artificial Sequence; identical to SEQ ID NO: 13698
  GFR-binding peptide
  MOD_RES (32)..(34): Xaa is C or S

SEQ ID NO: 38693 - protein, 37 aa, Artificial Sequence; identical to SEQ ID NO: 15379
  GFR-binding peptide
  MOD_RES (2)..(3)..(37): Xaa is C or S
  MOD_RES (17)..(18)..(19)..(20)..(21): Xaa is A or G
  MOD_RES (22)..(23)..(24)..(25): Xaa is A or G or is absent

SEQ ID NO: 38694 - protein, 34 aa, Artificial Sequence; identical to SEQ ID NO: 15380
  GFR-binding peptide
  MOD_RES (32)..(34): Xaa is C or S

SEQ ID NO: 38695 - protein, 41 aa, Artificial Sequence; identical to SEQ ID NO: 13700
  GFR-binding peptide
  MOD_RES (7)..(41): Xaa is C or S
  MOD_RES (21)..(22)..(23)..(24)..(25): Xaa is A or G
  MOD_RES (26)..(27)..(28)..(29): Xaa is A or G or is absent

SEQ ID NO: 38696 - protein, 39 aa, Artificial Sequence; identical to SEQ ID NO: 15381
  GFR-binding peptide
  MOD_RES (3)..(4)..(37)..(39): Xaa is C or S
  MOD_RES (18)..(19)..(20)..(21)..(22): Xaa is A or G
  MOD_RES (23)..(24)..(25)..(26): Xaa is A or G or is absent

SEQ ID NO: 38697 - protein, 37 aa, Artificial Sequence; identical to SEQ ID NO: 15382
  GFR-binding peptide
  MOD_RES (6)..(7): Xaa is C or S

SEQ ID NO: 38698 - protein, 36 aa, Artificial Sequence; identical to SEQ ID NO: 15383
  GFR-binding peptide
  MOD_RES (34)..(36): Xaa is C or S
  MOD_RES (14)..(15)..(16)..(17)..(18): Xaa is A or G
  MOD_RES (19)..(20)..(21)..(22): Xaa is A or G or is absent

SEQ ID NO: 38699 - protein, 33 aa, Artificial Sequence; identical to SEQ ID NO: 15384
  GFR-binding peptide
  MOD_RES (2)..(3): Xaa is C or S

SEQ ID NO: 38700 - protein, 41 aa, Artificial Sequence; identical to SEQ ID NO: 15385
  GFR-binding peptide
  MOD_RES (5)..(6)..(40): Xaa is C or S
  MOD_RES (20)..(21)..(22)..(23)..(24): Xaa is A or G
  MOD_RES (25)..(26)..(27)..(28): Xaa is A or G or is absent

SEQ ID NO: 38701 - protein, 35 aa, Artificial Sequence; identical to SEQ ID NO: 6325
  GFR-binding peptide
  MOD_RES (34)..(34): Xaa is C or S
  MOD_RES (14)..(15)..(16)..(17)..(18): Xaa is A or G
  MOD_RES (19)..(20)..(21)..(22): Xaa is A or G or is absent

SEQ ID NO: 38702 - protein, 30 aa, Artificial Sequence; identical to SEQ ID NO: 13703
  GFR-binding peptide

SEQ ID NO: 38703 - protein, 40 aa, Artificial Sequence; identical to SEQ ID NO: 13704
  GFR-binding peptide
  MOD_RES (6)..(7): Xaa is C or S
  MOD_RES (21)..(22)..(23)..(24)..(25): Xaa is A or G
  MOD_RES (26)..(27)..(28)..(29): Xaa is A or G or is absent

SEQ ID NO: 38704 - protein, 37 aa, Artificial Sequence; identical to SEQ ID NO: 8094
  GFR-binding peptide
  MOD_RES (34)..(36): Xaa is C or S
  MOD_RES (14)..(15)..(16)..(17)..(18): Xaa is A or G
  MOD_RES (19)..(20)..(21)..(22): Xaa is A or G or is absent

SEQ ID NO: 38705 - protein, 38 aa, Artificial Sequence; identical to SEQ ID NO: 15388
  GFR-binding peptide
  MOD_RES (3)..(4)..(35)..(37): Xaa is C or S

SEQ ID NO: 38706 - protein, 37 aa, Artificial Sequence; identical to SEQ ID NO: 13705
  GFR-binding peptide
  MOD_RES (3)..(4)..(35)..(37): Xaa is C or S

SEQ ID NO: 38707 - protein, 42 aa, Artificial Sequence; identical to SEQ ID NO: 8096
  GFR-binding peptide
  MOD_RES (4)..(5)..(39)..(41): Xaa is C or S
  MOD_RES (19)..(20)..(21)..(22)..(23): Xaa is A or G
  MOD_RES (24)..(25)..(26)..(27): Xaa is A or G or is absent

SEQ ID NO: 38708 - protein, 42 aa, Artificial Sequence; identical to SEQ ID NO: 8097
  GFR-binding peptide
  MOD_RES (6)..(7)..(41): Xaa is C or S
  MOD_RES (21)..(22)..(23)..(24)..(25): Xaa is A or G
  MOD_RES (26)..(27)..(28)..(29): Xaa is A or G or is absent

SEQ ID NO: 38709 - protein, 40 aa, Artificial Sequence
  GFR-binding peptide
  MOD_RES (3)..(4)..(37)..(39): Xaa is C or S
  MOD_RES (18)..(19)..(20)..(21)..(22): Xaa is A or G
  MOD_RES (23)..(24)..(25)..(26): Xaa is A or G or is absent
SPXXVSQDLEPLTILYYXXXXXXXXXEQLSNMIVKSXKXS

SEQ ID NO: 38710 - protein, 40 aa, Artificial Sequence; identical to SEQ ID NO: 15391
  GFR-binding peptide
  MOD_RES (6)..(7): Xaa is C or S
  MOD_RES (21)..(22)..(23)..(24)..(25): Xaa is A or G
  MOD_RES (26)..(27)..(28)..(29): Xaa is A or G or is absent

SEQ ID NO: 38711 - protein, 32 aa, Artificial Sequence; identical to SEQ ID NO: 13706
  GFR-binding peptide
  MOD_RES (14)..(15)..(16)..(17)..(18): Xaa is A or G
  MOD_RES (19)..(20)..(21)..(22): Xaa is A or G or is absent

SEQ ID NO: 38712 - protein, 38 aa, Artificial Sequence; identical to SEQ ID NO: 13707
  GFR-binding peptide
  MOD_RES (3)..(4)..(38): Xaa is C or S
  MOD_RES (18)..(19)..(20)..(21)..(22): Xaa is A or G
  MOD_RES (23)..(24)..(25)..(26): Xaa is A or G or is absent

SEQ ID NO: 38713 - protein, 39 aa, Artificial Sequence
  GFR-binding peptide
  MOD_RES (4)..(5)..(38): Xaa is C or S
  MOD_RES (19)..(20)..(21)..(22)..(23): Xaa is A or G
  MOD_RES (24)..(25)..(26)..(27): Xaa is A or G or is absent
ASPXXVSQDLEPLTILYYXXXXXXXXXEQLSNMIVKSXK

SEQ ID NO: 38714 - protein, 38 aa, Artificial Sequence; identical to SEQ ID NO: 13708
  GFR-binding peptide
  MOD_RES (2)..(3)..(35)..(37): Xaa is C or S

SEQ ID NO: 38715 - protein, 37 aa, Artificial Sequence; identical to SEQ ID NO: 13709
  GFR-binding peptide
  MOD_RES (1)..(35)..(37): Xaa is C or S
  MOD_RES (15)..(16)..(17)..(18)..(19): Xaa is A or G
  MOD_RES (20)..(21)..(22)..(23): Xaa is A or G or is absent

SEQ ID NO: 38716 - protein, 38 aa, Artificial Sequence; identical to SEQ ID NO: 15393
  GFR-binding peptide
  MOD_RES (4)..(5): Xaa is C or S
  MOD_RES (19)..(20)..(21)..(22)..(23): Xaa is A or G
  MOD_RES (24)..(25)..(26)..(27): Xaa is A or G or is absent

SEQ ID NO: 38717 - protein, 38 aa, Artificial Sequence; identical to SEQ ID NO: 13710
  GFR-binding peptide
  MOD_RES (5)..(6): Xaa is C or S
  MOD_RES (20)..(21)..(22)..(23)..(24): Xaa is A or G
  MOD_RES (25)..(26)..(27)..(28): Xaa is A or G or is absent

SEQ ID NO: 38718 - protein, 36 aa, Artificial Sequence
  GFR-binding peptide
  MOD_RES (2)..(3)..(36): Xaa is C or S
  MOD_RES (17)..(18)..(19)..(20)..(21): Xaa is A or G
  MOD_RES (22)..(23)..(24)..(25): Xaa is A or G or is absent
PXXVSQDLEPLTILYYXXXXXXXXXEQLSNMIVKSX

SEQ ID NO: 38719 - protein, 32 aa, Artificial Sequence; identical to SEQ ID NO: 15394
  GFR-binding peptide
  MOD_RES (14)..(15)..(16)..(17)..(18): Xaa is A or G
  MOD_RES (19)..(20)..(21)..(22): Xaa is A or G or is absent

SEQ ID NO: 38720 - protein, 31 aa, Artificial Sequence; identical to SEQ ID NO: 13711
  GFR-binding peptide
  MOD_RES (1)..(1): Xaa is C or S

SEQ ID NO: 38721 - protein, 34 aa, Artificial Sequence; identical to SEQ ID NO: 15395
  GFR-binding peptide
  MOD_RES (3)..(4): Xaa is C or S

SEQ ID NO: 38722 - protein, 36 aa, Artificial Sequence; identical to SEQ ID NO: 13712
  GFR-binding peptide
  MOD_RES (1)..(35): Xaa is C or S
  MOD_RES (15)..(16)..(17)..(18)..(19): Xaa is A or G
  MOD_RES (20)..(21)..(22)..(23): Xaa is A or G or is absent

SEQ ID NO: 38723 - protein, 39 aa, Artificial Sequence; identical to SEQ ID NO: 13713
  GFR-binding peptide
  MOD_RES (6)..(7): Xaa is C or S
  MOD_RES (21)..(22)..(23)..(24)..(25): Xaa is A or G
  MOD_RES (26)..(27)..(28)..(29): Xaa is A or G or is absent

SEQ ID NO: 38724 - protein, 36 aa, Artificial Sequence; identical to SEQ ID NO: 15397
  GFR-binding peptide
  MOD_RES (1)..(34)..(36): Xaa is C or S
  MOD_RES (15)..(16)..(17)..(18)..(19): Xaa is A or G
  MOD_RES (20)..(21)..(22)..(23): Xaa is A or G or is absent

SEQ ID NO: 38725 - protein, 39 aa, Artificial Sequence; identical to SEQ ID NO: 15398
  GFR-binding peptide
  MOD_RES (4)..(5)..(39): Xaa is C or S
  MOD_RES (19)..(20)..(21)..(22)..(23): Xaa is A or G
  MOD_RES (24)..(25)..(26)..(27): Xaa is A or G or is absent

SEQ ID NO: 38726 - protein, 36 aa, Artificial Sequence; identical to SEQ ID NO: 13715
  GFR-binding peptide
  MOD_RES (1)..(35): Xaa is C or S
  MOD_RES (15)..(16)..(17)..(18)..(19): Xaa is A or G
  MOD_RES (20)..(21)..(22)..(23): Xaa is A or G or is absent

SEQ ID NO: 38727 - protein, 36 aa, Artificial Sequence; identical to SEQ ID NO: 15399
  GFR-binding peptide
  MOD_RES (5)..(6): Xaa is C or S

SEQ ID NO: 38728 - protein, 37 aa, Artificial Sequence; identical to SEQ ID NO: 15400
  GFR-binding peptide
  MOD_RES (3)..(4)..(36): Xaa is C or S

SEQ ID NO: 38729 - protein, 33 aa, Artificial Sequence; identical to SEQ ID NO: 6338
  GFR-binding peptide
  MOD_RES (2)..(3): Xaa is C or S

SEQ ID NO: 38730 - protein, 37 aa, Artificial Sequence; identical to SEQ ID NO: 13718
  GFR-binding peptide
  MOD_RES (6)..(7): Xaa is C or S

SEQ ID NO: 38731 - protein, 34 aa, Artificial Sequence
  GFR-binding peptide
  MOD_RES (33)..(33): Xaa is C or S
  MOD_RES (14)..(15)..(16)..(17)..(18): Xaa is A or G
  MOD_RES (19)..(20)..(21)..(22): Xaa is A or G or is absent
VSQDLEPLTILYYXXXXXXXXXEQLSNMIVKSXK

SEQ ID NO: 38732 - protein, 36 aa, Artificial Sequence; identical to SEQ ID NO: 13719
  GFR-binding peptide
  MOD_RES (4)..(5): Xaa is C or S

SEQ ID NO: 38733 - protein, 41 aa, Artificial Sequence; identical to SEQ ID NO: 15402
  GFR-binding peptide
  MOD_RES (4)..(5)..(39)..(41): Xaa is C or S
  MOD_RES (19)..(20)..(21)..(22)..(23): Xaa is A or G
  MOD_RES (24)..(25)..(26)..(27): Xaa is A or G or is absent

SEQ ID NO: 38734 - protein, 37 aa, Artificial Sequence; identical to SEQ ID NO: 13720
  GFR-binding peptide
  MOD_RES (1)..(35)..(37): Xaa is C or S
  MOD_RES (15)..(16)..(17)..(18)..(19): Xaa is A or G
  MOD_RES (20)..(21)..(22)..(23): Xaa is A or G or is absent

SEQ ID NO: 38735 - protein, 34 aa, Artificial Sequence; identical to SEQ ID NO: 15403
  GFR-binding peptide
  MOD_RES (32)..(34): Xaa is C or S

SEQ ID NO: 38736 - protein, 38 aa, Artificial Sequence; identical to SEQ ID NO: 13721
  GFR-binding peptide
  MOD_RES (5)..(6): Xaa is C or S
  MOD_RES (20)..(21)..(22)..(23)..(24): Xaa is A or G
  MOD_RES (25)..(26)..(27)..(28): Xaa is A or G or is absent

SEQ ID NO: 38737 - protein, 31 aa, Artificial Sequence; identical to SEQ ID NO: 13722
  GFR-binding peptide
  MOD_RES (31)..(31): Xaa is C or S

SEQ ID NO: 38738 - protein, 37 aa, Artificial Sequence; identical to SEQ ID NO: 15405
  GFR-binding peptide
  MOD_RES (1)..(2)..(35)..(37): Xaa is C or S
  MOD_RES (16)..(17)..(18)..(19)..(20): Xaa is A or G
  MOD_RES (21)..(22)..(23)..(24): Xaa is A or G or is absent

SEQ ID NO: 38739 - protein, 32 aa, Artificial Sequence; identical to SEQ ID NO: 13723
  GFR-binding peptide
  MOD_RES (14)..(15)..(16)..(17)..(18): Xaa is A or G
  MOD_RES (19)..(20)..(21)..(22): Xaa is A or G or is absent

SEQ ID NO: 38740 - protein, 34 aa, Artificial Sequence; identical to SEQ ID NO: 13724
  GFR-binding peptide
  MOD_RES (32)..(34): Xaa is C or S

SEQ ID NO: 38741 - protein, 40 aa, Artificial Sequence; identical to SEQ ID NO: 15406
  GFR-binding peptide
  MOD_RES (2)..(3)..(37)..(39): Xaa is C or S
  MOD_RES (17)..(18)..(19)..(20)..(21): Xaa is A or G
  MOD_RES (22)..(23)..(24)..(25): Xaa is A or G or is absent

SEQ ID NO: 38742 - protein, 35 aa, Artificial Sequence; identical to SEQ ID NO: 15407
  GFR-binding peptide
  MOD_RES (5)..(5): Xaa is C or S

SEQ ID NO: 38743 - protein, 41 aa, Artificial Sequence; identical to SEQ ID NO: 13725
  GFR-binding peptide
  MOD_RES (5)..(6)..(40): Xaa is C or S
  MOD_RES (20)..(21)..(22)..(23)..(24): Xaa is A or G
  MOD_RES (25)..(26)..(27)..(28): Xaa is A or G or is absent

SEQ ID NO: 38744 - protein, 40 aa, Artificial Sequence; identical to SEQ ID NO: 13726
  GFR-binding peptide
  MOD_RES (6)..(7): Xaa is C or S
  MOD_RES (21)..(22)..(23)..(24)..(25): Xaa is A or G
  MOD_RES (26)..(27)..(28)..(29): Xaa is A or G or is absent

SEQ ID NO: 38745 - protein, 34 aa, Artificial Sequence; identical to SEQ ID NO: 13727
  GFR-binding peptide
  MOD_RES (33)..(33): Xaa is C or S
  MOD_RES (14)..(15)..(16)..(17)..(18): Xaa is A or G
  MOD_RES (19)..(20)..(21)..(22): Xaa is A or G or is absent

SEQ ID NO: 38746 - protein, 34 aa, Artificial Sequence; identical to SEQ ID NO: 13728
  GFR-binding peptide
  MOD_RES (1)..(1): Xaa is C or S
  MOD_RES (15)..(16)..(17)..(18)..(19): Xaa is A or G
  MOD_RES (20)..(21)..(22)..(23): Xaa is A or G or is absent

SEQ ID NO: 38747 - protein, 35 aa, Artificial Sequence; identical to SEQ ID NO: 15410
  GFR-binding peptide
  MOD_RES (32)..(34): Xaa is C or S

SEQ ID NO: 38748 - protein, 39 aa, Artificial Sequence; identical to SEQ ID NO: 13729
  GFR-binding peptide
  MOD_RES (2)..(3)..(37)..(39): Xaa is C or S
  MOD_RES (17)..(18)..(19)..(20)..(21): Xaa is A or G
  MOD_RES (22)..(23)..(24)..(25): Xaa is A or G or is absent

SEQ ID NO: 38749 - protein, 34 aa, Artificial Sequence; identical to SEQ ID NO: 13730
  GFR-binding peptide
  MOD_RES (34)..(34): Xaa is C or S
  MOD_RES (14)..(15)..(16)..(17)..(18): Xaa is A or G
  MOD_RES (19)..(20)..(21)..(22): Xaa is A or G or is absent

SEQ ID NO: 38750 - protein, 44 aa, Artificial Sequence; identical to SEQ ID NO: 15412
  GFR-binding peptide
  MOD_RES (6)..(7)..(41)..(43): Xaa is C or S
  MOD_RES (21)..(22)..(23)..(24)..(25): Xaa is A or G
  MOD_RES (26)..(27)..(28)..(29): Xaa is A or G or is absent

SEQ ID NO: 38751 - protein, 31 aa, Artificial Sequence; identical to SEQ ID NO: 6347
  GFR-binding peptide
  MOD_RES (1)..(1): Xaa is C or S

SEQ ID NO: 38752 - protein, 34 aa, Artificial Sequence; identical to SEQ ID NO: 13732
  GFR-binding peptide
  MOD_RES (2)..(3): Xaa is C or S

SEQ ID NO: 38753 - protein, 38 aa, Artificial Sequence; identical to SEQ ID NO: 15413
  GFR-binding peptide
  MOD_RES (4)..(5): Xaa is C or S
  MOD_RES (19)..(20)..(21)..(22)..(23): Xaa is A or G
  MOD_RES (24)..(25)..(26)..(27): Xaa is A or G or is absent

SEQ ID NO: 38754 - protein, 39 aa, Artificial Sequence; identical to SEQ ID NO: 13733
  GFR-binding peptide
  MOD_RES (5)..(6): Xaa is C or S
  MOD_RES (20)..(21)..(22)..(23)..(24): Xaa is A or G
  MOD_RES (25)..(26)..(27)..(28): Xaa is A or G or is absent

SEQ ID NO: 38755 - protein, 43 aa, Artificial Sequence; identical to SEQ ID NO: 15414
  GFR-binding peptide
  MOD_RES (5)..(6)..(40)..(42): Xaa is C or S
  MOD_RES (20)..(21)..(22)..(23)..(24): Xaa is A or G
  MOD_RES (25)..(26)..(27)..(28): Xaa is A or G or is absent

SEQ ID NO: 38756 - protein, 37 aa, Artificial Sequence; identical to SEQ ID NO: 15415
  GFR-binding peptide
  MOD_RES (3)..(4): Xaa is C or S
  MOD_RES (18)..(19)..(20)..(21)..(22): Xaa is A or G
  MOD_RES (23)..(24)..(25)..(26): Xaa is A or G or is absent

SEQ ID NO: 38757 - protein, 41 aa, Artificial Sequence; identical to SEQ ID NO: 13734
  GFR-binding peptide
  MOD_RES (5)..(6)..(38)..(40): Xaa is C or S

SEQ ID NO: 38758 - protein, 36 aa, Artificial Sequence; identical to SEQ ID NO: 15417
  GFR-binding peptide
  MOD_RES (1)..(2)..(36): Xaa is C or S
  MOD_RES (16)..(17)..(18)..(19)..(20): Xaa is A or G
  MOD_RES (21)..(22)..(23)..(24): Xaa is A or G or is absent

SEQ ID NO: 38759 - protein, 40 aa, Artificial Sequence; identical to SEQ ID NO: 6352
  GFR-binding peptide
  MOD_RES (4)..(5)..(37)..(39): Xaa is C or S

SEQ ID NO: 38760 - protein, 36 aa, Artificial Sequence; identical to SEQ ID NO: 8121
  GFR-binding peptide
  MOD_RES (33)..(35): Xaa is C or S
  MOD_RES (14)..(15)..(16)..(17)..(18): Xaa is A or G
  MOD_RES (19)..(20)..(21)..(22): Xaa is A or G or is absent

SEQ ID NO: 38761 - protein, 34 aa, Artificial Sequence; identical to SEQ ID NO: 15420
  GFR-binding peptide
  MOD_RES (1)..(34): Xaa is C or S
  MOD_RES (15)..(16)..(17)..(18)..(19): Xaa is A or G
  MOD_RES (20)..(21)..(22)..(23): Xaa is A or G or is absent

SEQ ID NO: 38762 - protein, 42 aa, Artificial Sequence; identical to SEQ ID NO: 13737
  GFR-binding peptide
  MOD_RES (5)..(6)..(39)..(41): Xaa is C or S
  MOD_RES (20)..(21)..(22)..(23)..(24): Xaa is A or G
  MOD_RES (25)..(26)..(27)..(28): Xaa is A or G or is absent

SEQ ID NO: 38763 - protein, 44 aa, Artificial Sequence; identical to SEQ ID NO: 15421
  GFR-binding peptide
  MOD_RES (7)..(41)..(43): Xaa is C or S
  MOD_RES (21)..(22)..(23)..(24)..(25): Xaa is A or G
  MOD_RES (26)..(27)..(28)..(29): Xaa is A or G or is absent

SEQ ID NO: 38764 - protein, 39 aa, Artificial Sequence; identical to SEQ ID NO: 15422
  GFR-binding peptide
  MOD_RES (6)..(7)..(38): Xaa is C or S

SEQ ID NO: 38765 - protein, 33 aa, Artificial Sequence; identical to SEQ ID NO: 13739
  GFR-binding peptide
  MOD_RES (1)..(33): Xaa is C or S

SEQ ID NO: 38766 - protein, 40 aa, Artificial Sequence; identical to SEQ ID NO: 13740
  GFR-binding peptide
  MOD_RES (5)..(6)..(40): Xaa is C or S
  MOD_RES (20)..(21)..(22)..(23)..(24): Xaa is A or G
  MOD_RES (25)..(26)..(27)..(28): Xaa is A or G or is absent

SEQ ID NO: 38767 - protein, 35 aa, Artificial Sequence; identical to SEQ ID NO: 13741
  GFR-binding peptide
  MOD_RES (2)..(3)..(35): Xaa is C or S

SEQ ID NO: 38768 - protein, 37 aa, Artificial Sequence; identical to SEQ ID NO: 13742
  GFR-binding peptide
  MOD_RES (5)..(6): Xaa is C or S

SEQ ID NO: 38769 - protein, 42 aa, Artificial Sequence; identical to SEQ ID NO: 8123
  GFR-binding peptide
  MOD_RES (4)..(5)..(39)..(41): Xaa is C or S
  MOD_RES (19)..(20)..(21)..(22)..(23): Xaa is A or G
  MOD_RES (24)..(25)..(26)..(27): Xaa is A or G or is absent

SEQ ID NO: 38770 - protein, 37 aa, Artificial Sequence; identical to SEQ ID NO: 15424
  GFR-binding peptide
  MOD_RES (4)..(5)..(36): Xaa is C or S

SEQ ID NO: 38771 - protein, 36 aa, Artificial Sequence; identical to SEQ ID NO: 15425
  GFR-binding peptide
  MOD_RES (2)..(3): Xaa is C or S
  MOD_RES (17)..(18)..(19)..(20)..(21): Xaa is A or G
  MOD_RES (22)..(23)..(24)..(25): Xaa is A or G or is absent

SEQ ID NO: 38772 - protein, 33 aa, Artificial Sequence; identical to SEQ ID NO: 6355
  GFR-binding peptide
  MOD_RES (1)..(1): Xaa is C or S
  MOD_RES (15)..(16)..(17)..(18)..(19): Xaa is A or G
  MOD_RES (20)..(21)..(22)..(23): Xaa is A or G or is absent

SEQ ID NO: 38773 - protein, 38 aa, Artificial Sequence; identical to SEQ ID NO: 13744
  GFR-binding peptide
  MOD_RES (1)..(2)..(35)..(37): Xaa is C or S
  MOD_RES (16)..(17)..(18)..(19)..(20): Xaa is A or G
  MOD_RES (21)..(22)..(23)..(24): Xaa is A or G or is absent

SEQ ID NO: 38774 - protein, 38 aa, Artificial Sequence; identical to SEQ ID NO: 13745
  GFR-binding peptide
  MOD_RES (5)..(6)..(38): Xaa is C or S

SEQ ID NO: 38775 - protein, 40 aa, Artificial Sequence; identical to SEQ ID NO: 15429
  GFR-binding peptide
  MOD_RES (4)..(5)..(39): Xaa is C or S
  MOD_RES (19)..(20)..(21)..(22)..(23): Xaa is A or G
  MOD_RES (24)..(25)..(26)..(27): Xaa is A or G or is absent

SEQ ID NO: 38776 - protein, 37 aa, Artificial Sequence; identical to SEQ ID NO: 13747
  GFR-binding peptide
  MOD_RES (3)..(4)..(35)..(37): Xaa is C or S

SEQ ID NO: 38777 - protein, 35 aa, Artificial Sequence; identical to SEQ ID NO: 13748
  GFR-binding peptide
  MOD_RES (3)..(4)..(35): Xaa is C or S

SEQ ID NO: 38778 - protein, 40 aa, Artificial Sequence; identical to SEQ ID NO: 13749
  GFR-binding peptide
  MOD_RES (2)..(3)..(37)..(39): Xaa is C or S
  MOD_RES (17)..(18)..(19)..(20)..(21): Xaa is A or G
  MOD_RES (22)..(23)..(24)..(25): Xaa is A or G or is absent

SEQ ID NO: 38779 - protein, 38 aa, Artificial Sequence; identical to SEQ ID NO: 15430
  GFR-binding peptide
  MOD_RES (3)..(4)..(37): Xaa is C or S
  MOD_RES (18)..(19)..(20)..(21)..(22): Xaa is A or G
  MOD_RES (23)..(24)..(25)..(26): Xaa is A or G or is absent

SEQ ID NO: 38780 - protein, 40 aa, Artificial Sequence; identical to SEQ ID NO: 13751
  GFR-binding peptide
  MOD_RES (2)..(3)..(37)..(39): Xaa is C or S
  MOD_RES (17)..(18)..(19)..(20)..(21): Xaa is A or G
  MOD_RES (22)..(23)..(24)..(25): Xaa is A or G or is absent

SEQ ID NO: 38781 - protein, 34 aa, Artificial Sequence; identical to SEQ ID NO: 13752
  GFR-binding peptide
  MOD_RES (3)..(4): Xaa is C or S

SEQ ID NO: 38782 - protein, 35 aa, Artificial Sequence; identical to SEQ ID NO: 15432
  GFR-binding peptide
  MOD_RES (1)..(2): Xaa is C or S
  MOD_RES (16)..(17)..(18)..(19)..(20): Xaa is A or G
  MOD_RES (21)..(22)..(23)..(24): Xaa is A or G or is absent

SEQ ID NO: 38783 - protein, 35 aa, Artificial Sequence; identical to SEQ ID NO: 15433
  GFR-binding peptide
  MOD_RES (3)..(4): Xaa is C or S

SEQ ID NO: 38784 - protein, 36 aa, Artificial Sequence; identical to SEQ ID NO: 15434
  GFR-binding peptide
  MOD_RES (5)..(6): Xaa is C or S

SEQ ID NO: 38785 - protein, 32 aa, Artificial Sequence; identical to SEQ ID NO: 6367
  GFR-binding peptide
  MOD_RES (14)..(15)..(16)..(17)..(18): Xaa is A or G
  MOD_RES (19)..(20)..(21)..(22): Xaa is A or G or is absent

SEQ ID NO: 38786 - protein, 40 aa, Artificial Sequence; identical to SEQ ID NO: 13755
  GFR-binding peptide
  MOD_RES (5)..(6)..(40): Xaa is C or S
  MOD_RES (20)..(21)..(22)..(23)..(24): Xaa is A or G
  MOD_RES (25)..(26)..(27)..(28): Xaa is A or G or is absent

SEQ ID NO: 38787 - protein, 38 aa, Artificial Sequence; identical to SEQ ID NO: 15435
  GFR-binding peptide
  MOD_RES (6)..(7): Xaa is C or S

SEQ ID NO: 38788 - protein, 39 aa, Artificial Sequence; identical to SEQ ID NO: 6373
  GFR-binding peptide
  MOD_RES (3)..(4)..(38): Xaa is C or S
  MOD_RES (18)..(19)..(20)..(21)..(22): Xaa is A or G
  MOD_RES (23)..(24)..(25)..(26): Xaa is A or G or is absent

SEQ ID NO: 38789 - protein, 35 aa, Artificial Sequence; identical to SEQ ID NO: 13758
  GFR-binding peptide
  MOD_RES (2)..(3): Xaa is C or S
  MOD_RES (17)..(18)..(19)..(20)..(21): Xaa is A or G
  MOD_RES (22)..(23)..(24)..(25): Xaa is A or G or is absent

SEQ ID NO: 38790 - protein, 34 aa, Artificial Sequence; identical to SEQ ID NO: 13759
  GFR-binding peptide
  MOD_RES (1)..(2)..(34): Xaa is C or S

SEQ ID NO: 38791 - protein, 34 aa, Artificial Sequence; identical to SEQ ID NO: 13760
  GFR-binding peptide
  MOD_RES (1)..(34): Xaa is C or S
  MOD_RES (15)..(16)..(17)..(18)..(19): Xaa is A or G
  MOD_RES (20)..(21)..(22)..(23): Xaa is A or G or is absent

SEQ ID NO: 38792 - protein, 34 aa, Artificial Sequence; identical to SEQ ID NO: 8142
  GFR-binding peptide
  MOD_RES (1)..(33): Xaa is C or S

SEQ ID NO: 38793 - protein, 41 aa, Artificial Sequence; identical to SEQ ID NO: 15437
  GFR-binding peptide
  MOD_RES (5)..(6)..(40): Xaa is C or S
  MOD_RES (20)..(21)..(22)..(23)..(24): Xaa is A or G
  MOD_RES (25)..(26)..(27)..(28): Xaa is A or G or is absent

SEQ ID NO: 38794 - protein, 34 aa, Artificial Sequence; identical to SEQ ID NO: 13761
  GFR-binding peptide
  MOD_RES (32)..(34): Xaa is C or S

SEQ ID NO: 38795 - protein, 32 aa, Artificial Sequence; identical to SEQ ID NO: 15438
  GFR-binding peptide
  MOD_RES (32)..(32): Xaa is C or S

SEQ ID NO: 38796 - protein, 35 aa, Artificial Sequence; identical to SEQ ID NO: 8147
  GFR-binding peptide
  MOD_RES (1)..(2)..(33)..(35): Xaa is C or S

SEQ ID NO: 38797 - protein, 32 aa, Artificial Sequence; identical to SEQ ID NO: 15441
  GFR-binding peptide
  MOD_RES (1)..(1): Xaa is C or S

SEQ ID NO: 38798 - protein, 34 aa, Artificial Sequence; identical to SEQ ID NO: 13764
  GFR-binding peptide
  MOD_RES (3)..(3): Xaa is C or S

SEQ ID NO: 38799 - protein, 39 aa, Artificial Sequence; identical to SEQ ID NO: 6381
  GFR-binding peptide
  MOD_RES (4)..(5)..(36)..(38): Xaa is C or S

SEQ ID NO: 38800 - protein, 38 aa, Artificial Sequence; identical to SEQ ID NO: 15442
  GFR-binding peptide
  MOD_RES (5)..(6): Xaa is C or S
  MOD_RES (20)..(21)..(22)..(23)..(24): Xaa is A or G
  MOD_RES (25)..(26)..(27)..(28): Xaa is A or G or is absent

SEQ ID NO: 38801 - protein, 37 aa, Artificial Sequence; identical to SEQ ID NO: 13766
  GFR-binding peptide
  MOD_RES (3)..(4)..(37): Xaa is C or S
  MOD_RES (18)..(19)..(20)..(21)..(22): Xaa is A or G
  MOD_RES (23)..(24)..(25)..(26): Xaa is A or G or is absent

SEQ ID NO: 38802 - protein, 39 aa, Artificial Sequence; identical to SEQ ID NO: 15443
  GFR-binding peptide
  MOD_RES (3)..(4)..(36)..(38): Xaa is C or S

SEQ ID NO: 38803 - protein, 39 aa, Artificial Sequence; identical to SEQ ID NO: 6383
  GFR-binding peptide
  MOD_RES (5)..(6): Xaa is C or S
  MOD_RES (20)..(21)..(22)..(23)..(24): Xaa is A or G
  MOD_RES (25)..(26)..(27)..(28): Xaa is A or G or is absent

SEQ ID NO: 38804 - protein, 33 aa, Artificial Sequence; identical to SEQ ID NO: 8150
  GFR-binding peptide
  MOD_RES (2)..(3): Xaa is C or S

SEQ ID NO: 38805 - protein, 36 aa, Artificial Sequence; identical to SEQ ID NO: 8151
  GFR-binding peptide
  MOD_RES (1)..(2)..(35): Xaa is C or S
  MOD_RES (16)..(17)..(18)..(19)..(20): Xaa is A or G
  MOD_RES (21)..(22)..(23)..(24): Xaa is A or G or is absent

SEQ ID NO: 38806 - protein, 34 aa, Artificial Sequence; identical to SEQ ID NO: 13769
  GFR-binding peptide
  MOD_RES (1)..(2)..(33): Xaa is C or S

SEQ ID NO: 38807 - protein, 38 aa, Artificial Sequence; identical to SEQ ID NO: 15447
  GFR-binding peptide
  MOD_RES (2)..(3)..(35)..(37): Xaa is C or S

SEQ ID NO: 38808 - protein, 40 aa, Artificial Sequence; identical to SEQ ID NO: 13770
  GFR-binding peptide
  MOD_RES (7)..(7): Xaa is C or S
  MOD_RES (21)..(22)..(23)..(24)..(25): Xaa is A or G
  MOD_RES (26)..(27)..(28)..(29): Xaa is A or G or is absent

SEQ ID NO: 38809 - protein, 42 aa, Artificial Sequence; identical to SEQ ID NO: 15450
  GFR-binding peptide
  MOD_RES (6)..(7)..(41): Xaa is C or S
  MOD_RES (21)..(22)..(23)..(24)..(25): Xaa is A or G
  MOD_RES (26)..(27)..(28)..(29): Xaa is A or G or is absent

SEQ ID NO: 38810 - protein, 39 aa, Artificial Sequence; identical to SEQ ID NO: 13772
  GFR-binding peptide
  MOD_RES (5)..(6): Xaa is C or S
  MOD_RES (20)..(21)..(22)..(23)..(24): Xaa is A or G
  MOD_RES (25)..(26)..(27)..(28): Xaa is A or G or is absent

SEQ ID NO: 38811 - protein, 35 aa, Artificial Sequence; identical to SEQ ID NO: 13773
  GFR-binding peptide
  MOD_RES (1)..(35): Xaa is C or S
  MOD_RES (15)..(16)..(17)..(18)..(19): Xaa is A or G
  MOD_RES (20)..(21)..(22)..(23): Xaa is A or G or is absent

SEQ ID NO: 38812 - protein, 43 aa, Artificial Sequence; identical to SEQ ID NO: 15451
  GFR-binding peptide
  MOD_RES (6)..(7)..(41)..(43): Xaa is C or S
  MOD_RES (21)..(22)..(23)..(24)..(25): Xaa is A or G
  MOD_RES (26)..(27)..(28)..(29): Xaa is A or G or is absent

SEQ ID NO: 38813 - protein, 34 aa, Artificial Sequence; identical to SEQ ID NO: 15452
  GFR-binding peptide
  MOD_RES (32)..(34): Xaa is C or S

SEQ ID NO: 38814 - protein, 34 aa, Artificial Sequence; identical to SEQ ID NO: 15453
  GFR-binding peptide
  MOD_RES (2)..(3)..(34): Xaa is C or S

SEQ ID NO: 38815 - protein, 36 aa, Artificial Sequence; identical to SEQ ID NO: 13774
  GFR-binding peptide
  MOD_RES (6)..(6): Xaa is C or S

SEQ ID NO: 38816 - protein, 36 aa, Artificial Sequence; identical to SEQ ID NO: 15456
  GFR-binding peptide
  MOD_RES (2)..(3)..(34)..(36): Xaa is C or S

SEQ ID NO: 38817 - protein, 38 aa, Artificial Sequence; identical to SEQ ID NO: 8161
  GFR-binding peptide
  MOD_RES (5)..(6)..(37): Xaa is C or S

SEQ ID NO: 38818 - protein, 36 aa, Artificial Sequence; identical to SEQ ID NO: 8162
  GFR-binding peptide
  MOD_RES (2)..(3)..(36): Xaa is C or S
  MOD_RES (17)..(18)..(19)..(20)..(21): Xaa is A or G
  MOD_RES (22)..(23)..(24)..(25): Xaa is A or G or is absent

SEQ ID NO: 38819 - protein, 42 aa, Artificial Sequence; identical to SEQ ID NO: 15459
  GFR-binding peptide
  MOD_RES (6)..(7)..(39)..(41): Xaa is C or S

SEQ ID NO: 38820 - protein, 41 aa, Artificial Sequence; identical to SEQ ID NO: 13777
  GFR-binding peptide
  MOD_RES (5)..(6)..(38)..(40): Xaa is C or S

SEQ ID NO: 38821 - protein, 39 aa, Artificial Sequence; identical to SEQ ID NO: 13779
  GFR-binding peptide
  MOD_RES (1)..(2)..(36)..(38): Xaa is C or S
  MOD_RES (16)..(17)..(18)..(19)..(20): Xaa is A or G
  MOD_RES (21)..(22)..(23)..(24): Xaa is A or G or is absent

SEQ ID NO: 38822 - protein, 33 aa, Artificial Sequence; identical to SEQ ID NO: 15460
  GFR-binding peptide
  MOD_RES (1)..(1): Xaa is C or S
  MOD_RES (15)..(16)..(17)..(18)..(19): Xaa is A or G
  MOD_RES (20)..(21)..(22)..(23): Xaa is A or G or is absent

SEQ ID NO: 38823 - protein, 37 aa, Artificial Sequence; identical to SEQ ID NO: 13780
  GFR-binding peptide
  MOD_RES (2)..(3)..(36): Xaa is C or S
  MOD_RES (17)..(18)..(19)..(20)..(21): Xaa is A or G
  MOD_RES (22)..(23)..(24)..(25): Xaa is A or G or is absent

SEQ ID NO: 38824 - protein, 36 aa, Artificial Sequence; identical to SEQ ID NO: 15461
  GFR-binding peptide
  MOD_RES (1)..(2)..(36): Xaa is C or S
  MOD_RES (16)..(17)..(18)..(19)..(20): Xaa is A or G
  MOD_RES (21)..(22)..(23)..(24): Xaa is A or G or is absent

SEQ ID NO: 38825 - protein, 36 aa, Artificial Sequence; identical to SEQ ID NO: 8163
  GFR-binding peptide
  MOD_RES (3)..(4): Xaa is C or S
  MOD_RES (18)..(19)..(20)..(21)..(22): Xaa is A or G
  MOD_RES (23)..(24)..(25)..(26): Xaa is A or G or is absent

SEQ ID NO: 38826 - protein, 34 aa, Artificial Sequence; identical to SEQ ID NO: 8165
  GFR-binding peptide
  MOD_RES (33)..(33): Xaa is C or S
  MOD_RES (14)..(15)..(16)..(17)..(18): Xaa is A or G
  MOD_RES (19)..(20)..(21)..(22): Xaa is A or G or is absent

SEQ ID NO: 38827 - protein, 37 aa, Artificial Sequence; identical to SEQ ID NO: 15464
  GFR-binding peptide
  MOD_RES (7)..(7): Xaa is C or S

SEQ ID NO: 38828 - protein, 34 aa, Artificial Sequence; identical to SEQ ID NO: 13781
  GFR-binding peptide
  MOD_RES (1)..(2)..(34): Xaa is C or S

SEQ ID NO: 38829 - protein, 38 aa, Artificial Sequence; identical to SEQ ID NO: 15465
  GFR-binding peptide
  MOD_RES (2)..(3)..(35)..(37): Xaa is C or S

SEQ ID NO: 38830 - protein, 30 aa, Artificial Sequence; identical to SEQ ID NO: 13783
  GFR-binding peptide

SEQ ID NO: 38831 - protein, 38 aa, Artificial Sequence; identical to SEQ ID NO: 15466
  GFR-binding peptide
  MOD_RES (6)..(7): Xaa is C or S

SEQ ID NO: 38832 - protein, 33 aa, Artificial Sequence; identical to SEQ ID NO: 8168
  GFR-binding peptide
  MOD_RES (1)..(2)..(33): Xaa is C or S

SEQ ID NO: 38833 - protein, 31 aa, Artificial Sequence; identical to SEQ ID NO: 15468
  GFR-binding peptide

SEQ ID NO: 38834 - protein, 35 aa, Artificial Sequence; identical to SEQ ID NO: 15469
  GFR-binding peptide
  MOD_RES (2)..(3): Xaa is C or S
  MOD_RES (17)..(18)..(19)..(20)..(21): Xaa is A or G
  MOD_RES (22)..(23)..(24)..(25): Xaa is A or G or is absent

SEQ ID NO: 38835 - protein, 37 aa, Artificial Sequence; identical to SEQ ID NO: 13784
  GFR-binding peptide
  MOD_RES (1)..(2)..(35)..(37): Xaa is C or S
  MOD_RES (16)..(17)..(18)..(19)..(20): Xaa is A or G
  MOD_RES (21)..(22)..(23)..(24): Xaa is A or G or is absent

SEQ ID NO: 38836 - protein, 36 aa, Artificial Sequence; identical to SEQ ID NO: 15470
  GFR-binding peptide
  MOD_RES (3)..(4)..(36): Xaa is C or S

SEQ ID NO: 38837 - protein, 40 aa, Artificial Sequence; identical to SEQ ID NO: 15471
  GFR-binding peptide
  MOD_RES (2)..(3)..(37)..(39): Xaa is C or S
  MOD_RES (17)..(18)..(19)..(20)..(21): Xaa is A or G
  MOD_RES (22)..(23)..(24)..(25): Xaa is A or G or is absent

SEQ ID NO: 38838 - protein, 35 aa, Artificial Sequence; identical to SEQ ID NO: 15472
  GFR-binding peptide
  MOD_RES (2)..(3): Xaa is C or S
  MOD_RES (17)..(18)..(19)..(20)..(21): Xaa is A or G
  MOD_RES (22)..(23)..(24)..(25): Xaa is A or G or is absent

SEQ ID NO: 38839 - protein, 34 aa, Artificial Sequence; identical to SEQ ID NO: 15473
  GFR-binding peptide
  MOD_RES (1)..(1): Xaa is C or S
  MOD_RES (15)..(16)..(17)..(18)..(19): Xaa is A or G
  MOD_RES (20)..(21)..(22)..(23): Xaa is A or G or is absent

SEQ ID NO: 38840 - protein, 35 aa, Artificial Sequence; identical to SEQ ID NO: 15474
  GFR-binding peptide
  MOD_RES (2)..(3): Xaa is C or S
  MOD_RES (17)..(18)..(19)..(20)..(21): Xaa is A or G
  MOD_RES (22)..(23)..(24)..(25): Xaa is A or G or is absent

SEQ ID NO: 38841 - protein, 36 aa, Artificial Sequence; identical to SEQ ID NO: 13787
  GFR-binding peptide
  MOD_RES (3)..(3): Xaa is C or S
  MOD_RES (17)..(18)..(19)..(20)..(21): Xaa is A or G
  MOD_RES (22)..(23)..(24)..(25): Xaa is A or G or is absent

SEQ ID NO: 38842 - protein, 39 aa, Artificial Sequence; identical to SEQ ID NO: 13788
  GFR-binding peptide
  MOD_RES (5)..(6)..(38): Xaa is C or S

SEQ ID NO: 38843 - protein, 42 aa, Artificial Sequence
  GFR-binding peptide
  MOD_RES (6)..(7)..(40)..(42): Xaa is C or S
  MOD_RES (21)..(22)..(23)..(24)..(25): Xaa is A or G
  MOD_RES (26)..(27)..(28)..(29): Xaa is A or G or is absent
ASASPXXVSQDLEPLTILYYXXXXXXXXXEQLSNMIVKSXKX

SEQ ID NO: 38844 - protein, 35 aa, Artificial Sequence; identical to SEQ ID NO: 13790
  GFR-binding peptide
  MOD_RES (1)..(2): Xaa is C or S
  MOD_RES (16)..(17)..(18)..(19)..(20): Xaa is A or G
  MOD_RES (21)..(22)..(23)..(24): Xaa is A or G or is absent

SEQ ID NO: 38845 - protein, 41 aa, Artificial Sequence; identical to SEQ ID NO: 15477
  GFR-binding peptide
  MOD_RES (5)..(6)..(39)..(41): Xaa is C or S
  MOD_RES (20)..(21)..(22)..(23)..(24): Xaa is A or G
  MOD_RES (25)..(26)..(27)..(28): Xaa is A or G or is absent

SEQ ID NO: 38846 - protein, 35 aa, Artificial Sequence; identical to SEQ ID NO: 13791
  GFR-binding peptide
  MOD_RES (4)..(5): Xaa is C or S

SEQ ID NO: 38847 - protein, 36 aa, Artificial Sequence; identical to SEQ ID NO: 15479
  GFR-binding peptide
  MOD_RES (2)..(34)..(36): Xaa is C or S

SEQ ID NO: 38848 - protein, 35 aa, Artificial Sequence; identical to SEQ ID NO: 13792
  GFR-binding peptide
  MOD_RES (2)..(3)..(35): Xaa is C or S

SEQ ID NO: 38849 - protein, 33 aa, Artificial Sequence; identical to SEQ ID NO: 15481
  GFR-binding peptide
  MOD_RES (33)..(33): Xaa is C or S
  MOD_RES (14)..(15)..(16)..(17)..(18): Xaa is A or G
  MOD_RES (19)..(20)..(21)..(22): Xaa is A or G or is absent

SEQ ID NO: 38850 - protein, 36 aa, Artificial Sequence; identical to SEQ ID NO: 13793
  GFR-binding peptide
  MOD_RES (2)..(3)..(35): Xaa is C or S

SEQ ID NO: 38851 - protein, 36 aa, Artificial Sequence; identical to SEQ ID NO: 13794
  GFR-binding peptide
  MOD_RES (2)..(3)..(35): Xaa is C or S

SEQ ID NO: 38852 - protein, 36 aa, Artificial Sequence; identical to SEQ ID NO: 15482
  GFR-binding peptide
  MOD_RES (2)..(3): Xaa is C or S
  MOD_RES (17)..(18)..(19)..(20)..(21): Xaa is A or G
  MOD_RES (22)..(23)..(24)..(25): Xaa is A or G or is absent

SEQ ID NO: 38853 - protein, 34 aa, Artificial Sequence; identical to SEQ ID NO: 13795
  GFR-binding peptide
  MOD_RES (32)..(34): Xaa is C or S

SEQ ID NO: 38854 - protein, 32 aa, Artificial Sequence; identical to SEQ ID NO: 13796
  GFR-binding peptide
  MOD_RES (14)..(15)..(16)..(17)..(18): Xaa is A or G
  MOD_RES (19)..(20)..(21)..(22): Xaa is A or G or is absent

SEQ ID NO: 38855 - protein, 32 aa, Artificial Sequence; identical to SEQ ID NO: 8185
  GFR-binding peptide
  MOD_RES (14)..(15)..(16)..(17)..(18): Xaa is A or G
  MOD_RES (19)..(20)..(21)..(22): Xaa is A or G or is absent

SEQ ID NO: 38856 - protein, 43 aa, Artificial Sequence; identical to SEQ ID NO: 8186
  GFR-binding peptide
  MOD_RES (6)..(7)..(40)..(42): Xaa is C or S
  MOD_RES (21)..(22)..(23)..(24)..(25): Xaa is A or G
  MOD_RES (26)..(27)..(28)..(29): Xaa is A or G or is absent

SEQ ID NO: 38857 - protein, 31 aa, Artificial Sequence; identical to SEQ ID NO: 15486
  GFR-binding peptide
  MOD_RES (1)..(1): Xaa is C or S

SEQ ID NO: 38858 - protein, 39 aa, Artificial Sequence; identical to SEQ ID NO: 13799
  GFR-binding peptide
  MOD_RES (4)..(5)..(37)..(39): Xaa is C or S

SEQ ID NO: 38859 - protein, 38 aa, Artificial Sequence; identical to SEQ ID NO: 15487
  GFR-binding peptide
  MOD_RES (4)..(5): Xaa is C or S
  MOD_RES (19)..(20)..(21)..(22)..(23): Xaa is A or G
  MOD_RES (24)..(25)..(26)..(27): Xaa is A or G or is absent

SEQ ID NO: 38860 - protein, 36 aa, Artificial Sequence; identical to SEQ ID NO: 8191
  GFR-binding peptide
  MOD_RES (33)..(35): Xaa is C or S
  MOD_RES (14)..(15)..(16)..(17)..(18): Xaa is A or G
  MOD_RES (19)..(20)..(21)..(22): Xaa is A or G or is absent

SEQ ID NO: 38861 - protein, 37 aa, Artificial Sequence; identical to SEQ ID NO: 15491
  GFR-binding peptide
  MOD_RES (2)..(3)..(34)..(36): Xaa is C or S

SEQ ID NO: 38862 - protein, 37 aa, Artificial Sequence; identical to SEQ ID NO: 15492
  GFR-binding peptide
  MOD_RES (3)..(4)..(36): Xaa is C or S

SEQ ID NO: 38863 - protein, 35 aa, Artificial Sequence; identical to SEQ ID NO: 13800
  GFR-binding peptide
  MOD_RES (2)..(3)..(35): Xaa is C or S

SEQ ID NO: 38864 - protein, 35 aa, Artificial Sequence; identical to SEQ ID NO: 13801
  GFR-binding peptide
  MOD_RES (2)..(3)..(35): Xaa is C or S

SEQ ID NO: 38865 - protein, 34 aa, Artificial Sequence; identical to SEQ ID NO: 13803
  GFR-binding peptide
  MOD_RES (1)..(33): Xaa is C or S

SEQ ID NO: 38866 - protein, 32 aa, Artificial Sequence; identical to SEQ ID NO: 13804
  GFR-binding peptide
  MOD_RES (32)..(32): Xaa is C or S

SEQ ID NO: 38867 - protein, 37 aa, Artificial Sequence; identical to SEQ ID NO: 15494
  GFR-binding peptide
  MOD_RES (4)..(5): Xaa is C or S
  MOD_RES (19)..(20)..(21)..(22)..(23): Xaa is A or G
  MOD_RES (24)..(25)..(26)..(27): Xaa is A or G or is absent

SEQ ID NO: 38868 - protein, 33 aa, Artificial Sequence; identical to SEQ ID NO: 13805
  GFR-binding peptide
  MOD_RES (33)..(33): Xaa is C or S
  MOD_RES (14)..(15)..(16)..(17)..(18): Xaa is A or G
  MOD_RES (19)..(20)..(21)..(22): Xaa is A or G or is absent

SEQ ID NO: 38869 - protein, 36 aa, Artificial Sequence; identical to SEQ ID NO: 15495
  GFR-binding peptide
  MOD_RES (1)..(2)..(34)..(36): Xaa is C or S

SEQ ID NO: 38870 - protein, 36 aa, Artificial Sequence; identical to SEQ ID NO: 15496
  GFR-binding peptide
  MOD_RES (3)..(3): Xaa is C or S
  MOD_RES (17)..(18)..(19)..(20)..(21): Xaa is A or G
  MOD_RES (22)..(23)..(24)..(25): Xaa is A or G or is absent

SEQ ID NO: 38871 - protein, 37 aa, Artificial Sequence; identical to SEQ ID NO: 15497
  GFR-binding peptide
  MOD_RES (3)..(4)..(36): Xaa is C or S

SEQ ID NO: 38872 - protein, 34 aa, Artificial Sequence; identical to SEQ ID NO: 8193
  GFR-binding peptide
  MOD_RES (1)..(32)..(34): Xaa is C or S

SEQ ID NO: 38873 - protein, 32 aa, Artificial Sequence; identical to SEQ ID NO: 13807
  GFR-binding peptide
  MOD_RES (31)..(31): Xaa is C or S

SEQ ID NO: 38874 - protein, 38 aa, Artificial Sequence; identical to SEQ ID NO: 15499
  GFR-binding peptide
  MOD_RES (2)..(3)..(36)..(38): Xaa is C or S
  MOD_RES (17)..(18)..(19)..(20)..(21): Xaa is A or G
  MOD_RES (22)..(23)..(24)..(25): Xaa is A or G or is absent

SEQ ID NO: 38875 - protein, 36 aa, Artificial Sequence; identical to SEQ ID NO: 13808
  GFR-binding peptide
  MOD_RES (1)..(33)..(35): Xaa is C or S

SEQ ID NO: 38876 - protein, 37 aa, Artificial Sequence; identical to SEQ ID NO: 15500
  GFR-binding peptide
  MOD_RES (34)..(36): Xaa is C or S
  MOD_RES (14)..(15)..(16)..(17)..(18): Xaa is A or G
  MOD_RES (19)..(20)..(21)..(22): Xaa is A or G or is absent

SEQ ID NO: 38877 - protein, 38 aa, Artificial Sequence; identical to SEQ ID NO: 15502
  GFR-binding peptide
  MOD_RES (6)..(7)..(38): Xaa is C or S

SEQ ID NO: 38878 - protein, 42 aa, Artificial Sequence; identical to SEQ ID NO: 13809
  GFR-binding peptide
  MOD_RES (6)..(7)..(41): Xaa is C or S
  MOD_RES (21)..(22)..(23)..(24)..(25): Xaa is A or G
  MOD_RES (26)..(27)..(28)..(29): Xaa is A or G or is absent

SEQ ID NO: 38879 - protein, 41 aa, Artificial Sequence; identical to SEQ ID NO: 15503
  GFR-binding peptide
  MOD_RES (4)..(5)..(38)..(40): Xaa is C or S
  MOD_RES (19)..(20)..(21)..(22)..(23): Xaa is A or G
  MOD_RES (24)..(25)..(26)..(27): Xaa is A or G or is absent

SEQ ID NO: 38880 - protein, 40 aa, Artificial Sequence; identical to SEQ ID NO: 13810
  GFR-binding peptide
  MOD_RES (4)..(38)..(40): Xaa is C or S
  MOD_RES (18)..(19)..(20)..(21)..(22): Xaa is A or G
  MOD_RES (23)..(24)..(25)..(26): Xaa is A or G or is absent

SEQ ID NO: 38881 - protein, 43 aa, Artificial Sequence; identical to SEQ ID NO: 13811
  GFR-binding peptide
  MOD_RES (6)..(7)..(40)..(42): Xaa is C or S
  MOD_RES (21)..(22)..(23)..(24)..(25): Xaa is A or G
  MOD_RES (26)..(27)..(28)..(29): Xaa is A or G or is absent

SEQ ID NO: 38882 - protein, 37 aa, Artificial Sequence; identical to SEQ ID NO: 6432
  GFR-binding peptide
  MOD_RES (4)..(5)..(36): Xaa is C or S

SEQ ID NO: 38883 - protein, 32 aa, Artificial Sequence; identical to SEQ ID NO: 13813
  GFR-binding peptide
  MOD_RES (1)..(2): Xaa is C or S

SEQ ID NO: 38884 - protein, 31 aa, Artificial Sequence; identical to SEQ ID NO: 15504
  GFR-binding peptide
  MOD_RES (1)..(1): Xaa is C or S

SEQ ID NO: 38885 - protein, 38 aa, Artificial Sequence; identical to SEQ ID NO: 15506
  GFR-binding peptide
  MOD_RES (6)..(7): Xaa is C or S

SEQ ID NO: 38886 - protein, 41 aa, Artificial Sequence; identical to SEQ ID NO: 6436
  GFR-binding peptide
  MOD_RES (5)..(6)..(38)..(40): Xaa is C or S

SEQ ID NO: 38887 - protein, 36 aa, Artificial Sequence; identical to SEQ ID NO: 13816
  GFR-binding peptide
  MOD_RES (33)..(35): Xaa is C or S
  MOD_RES (14)..(15)..(16)..(17)..(18): Xaa is A or G
  MOD_RES (19)..(20)..(21)..(22): Xaa is A or G or is absent

SEQ ID NO: 38888 - protein, 38 aa, Artificial Sequence; identical to SEQ ID NO: 8199
  GFR-binding peptide
  MOD_RES (3)..(4)..(37): Xaa is C or S
  MOD_RES (18)..(19)..(20)..(21)..(22): Xaa is A or G
  MOD_RES (23)..(24)..(25)..(26): Xaa is A or G or is absent

SEQ ID NO: 38889 - protein, 43 aa, Artificial Sequence; identical to SEQ ID NO: 15509
  GFR-binding peptide
  MOD_RES (6)..(7)..(41)..(43): Xaa is C or S
  MOD_RES (21)..(22)..(23)..(24)..(25): Xaa is A or G
  MOD_RES (26)..(27)..(28)..(29): Xaa is A or G or is absent

SEQ ID NO: 38890 - protein, 31 aa, Artificial Sequence; identical to SEQ ID NO: 13818
  GFR-binding peptide
  MOD_RES (1)..(1): Xaa is C or S

SEQ ID NO: 38891 - protein, 36 aa, Artificial Sequence; identical to SEQ ID NO: 15510
  GFR-binding peptide
  MOD_RES (3)..(4)..(36): Xaa is C or S

SEQ ID NO: 38892 - protein, 38 aa, Artificial Sequence; identical to SEQ ID NO: 13820
  GFR-binding peptide
  MOD_RES (1)..(2)..(36)..(38): Xaa is C or S
  MOD_RES (16)..(17)..(18)..(19)..(20): Xaa is A or G
  MOD_RES (21)..(22)..(23)..(24): Xaa is A or G or is absent

SEQ ID NO: 38893 - protein, 35 aa, Artificial Sequence; identical to SEQ ID NO: 13821
  GFR-binding peptide
  MOD_RES (2)..(3)..(35): Xaa is C or S

SEQ ID NO: 38894 - protein, 39 aa, Artificial Sequence; identical to SEQ ID NO: 13822
  GFR-binding peptide
  MOD_RES (5)..(37)..(39): Xaa is C or S

SEQ ID NO: 38895 - protein, 41 aa, Artificial Sequence; identical to SEQ ID NO: 13823
  GFR-binding peptide
  MOD_RES (6)..(38)..(40): Xaa is C or S

SEQ ID NO: 38896 - protein, 36 aa, Artificial Sequence; identical to SEQ ID NO: 13824
  GFR-binding peptide
  MOD_RES (2)..(3)..(35): Xaa is C or S

SEQ ID NO: 38897 - protein, 41 aa, Artificial Sequence; identical to SEQ ID NO: 6443
  GFR-binding peptide
  MOD_RES (3)..(4)..(38)..(40): Xaa is C or S
  MOD_RES (18)..(19)..(20)..(21)..(22): Xaa is A or G
  MOD_RES (23)..(24)..(25)..(26): Xaa is A or G or is absent

SEQ ID NO: 38898 - protein, 41 aa, Artificial Sequence; identical to SEQ ID NO: 15511
  GFR-binding peptide
  MOD_RES (6)..(7)..(40): Xaa is C or S
  MOD_RES (21)..(22)..(23)..(24)..(25): Xaa is A or G
  MOD_RES (26)..(27)..(28)..(29): Xaa is A or G or is absent

SEQ ID NO: 38899 - protein, 36 aa, Artificial Sequence; identical to SEQ ID NO: 13826
  GFR-binding peptide
  MOD_RES (5)..(6): Xaa is C or S

SEQ ID NO: 38900 - protein, 37 aa, Artificial Sequence; identical to SEQ ID NO: 15512
  GFR-binding peptide
  MOD_RES (4)..(5): Xaa is C or S
  MOD_RES (19)..(20)..(21)..(22)..(23): Xaa is A or G
  MOD_RES (24)..(25)..(26)..(27): Xaa is A or G or is absent

SEQ ID NO: 38901 - protein, 37 aa, Artificial Sequence; identical to SEQ ID NO: 13827
  GFR-binding peptide
  MOD_RES (1)..(35)..(37): Xaa is C or S
  MOD_RES (15)..(16)..(17)..(18)..(19): Xaa is A or G
  MOD_RES (20)..(21)..(22)..(23): Xaa is A or G or is absent

SEQ ID NO: 38902 - protein, 36 aa, Artificial Sequence; identical to SEQ ID NO: 6445
  GFR-binding peptide
  MOD_RES (4)..(5): Xaa is C or S

SEQ ID NO: 38903 - protein, 39 aa, Artificial Sequence; identical to SEQ ID NO: 15514
  GFR-binding peptide
  MOD_RES (5)..(6): Xaa is C or S
  MOD_RES (20)..(21)..(22)..(23)..(24): Xaa is A or G
  MOD_RES (25)..(26)..(27)..(28): Xaa is A or G or is absent

SEQ ID NO: 38904 - protein, 38 aa, Artificial Sequence; identical to SEQ ID NO: 15515
  GFR-binding peptide
  MOD_RES (3)..(4)..(36)..(38): Xaa is C or S

SEQ ID NO: 38905 - protein, 35 aa, Artificial Sequence; identical to SEQ ID NO: 15516
  GFR-binding peptide
  MOD_RES (2)..(3)..(34): Xaa is C or S

SEQ ID NO: 38906 - protein, 34 aa, Artificial Sequence; identical to SEQ ID NO: 6449
  GFR-binding peptide
  MOD_RES (31)..(33): Xaa is C or S

SEQ ID NO: 38907 - protein, 39 aa, Artificial Sequence; identical to SEQ ID NO: 8212
  GFR-binding peptide
  MOD_RES (5)..(6)..(39): Xaa is C or S
  MOD_RES (20)..(21)..(22)..(23)..(24): Xaa is A or G
  MOD_RES (25)..(26)..(27)..(28): Xaa is A or G or is absent

SEQ ID NO: 38908 - protein, 36 aa, Artificial Sequence; identical to SEQ ID NO: 15518
  GFR-binding peptide
  MOD_RES (1)..(33)..(35): Xaa is C or S

SEQ ID NO: 38909 - protein, 35 aa, Artificial Sequence; identical to SEQ ID NO: 15520
  GFR-binding peptide
  MOD_RES (2)..(3)..(35): Xaa is C or S

SEQ ID NO: 38910 - protein, 36 aa, Artificial Sequence; identical to SEQ ID NO: 15521
  GFR-binding peptide
  MOD_RES (33)..(35): Xaa is C or S
  MOD_RES (14)..(15)..(16)..(17)..(18): Xaa is A or G
  MOD_RES (19)..(20)..(21)..(22): Xaa is A or G or is absent

SEQ ID NO: 38911 - protein, 33 aa, Artificial Sequence; identical to SEQ ID NO: 15522
  GFR-binding peptide
  MOD_RES (14)..(15)..(16)..(17)..(18): Xaa is A or G
  MOD_RES (19)..(20)..(21)..(22): Xaa is A or G or is absent

SEQ ID NO: 38912 - protein, 38 aa, Artificial Sequence
  GFR-binding peptide
  MOD_RES (2)..(3)..(36)..(38): Xaa is C or S
  MOD_RES (17)..(18)..(19)..(20)..(21): Xaa is A or G
  MOD_RES (22)..(23)..(24)..(25): Xaa is A or G or is absent
PXXVSQDLEPLTILYYXXXXXXXXXEQLSNMIVKSXKX

SEQ ID NO: 38913 - protein, 39 aa, Artificial Sequence; identical to SEQ ID NO: 15523
  GFR-binding peptide
  MOD_RES (2)..(36)..(38): Xaa is C or S
  MOD_RES (16)..(17)..(18)..(19)..(20): Xaa is A or G
  MOD_RES (21)..(22)..(23)..(24): Xaa is A or G or is absent

SEQ ID NO: 38914 - protein, 34 aa, Artificial Sequence; identical to SEQ ID NO: 15525
  GFR-binding peptide
  MOD_RES (1)..(1): Xaa is C or S
  MOD_RES (15)..(16)..(17)..(18)..(19): Xaa is A or G
  MOD_RES (20)..(21)..(22)..(23): Xaa is A or G or is absent

SEQ ID NO: 38915 - protein, 37 aa, Artificial Sequence; identical to SEQ ID NO: 13831
  GFR-binding peptide
  MOD_RES (3)..(4): Xaa is C or S
  MOD_RES (18)..(19)..(20)..(21)..(22): Xaa is A or G
  MOD_RES (23)..(24)..(25)..(26): Xaa is A or G or is absent

SEQ ID NO: 38916 - protein, 36 aa, Artificial Sequence; identical to SEQ ID NO: 13832
  GFR-binding peptide
  MOD_RES (34)..(36): Xaa is C or S
  MOD_RES (14)..(15)..(16)..(17)..(18): Xaa is A or G
  MOD_RES (19)..(20)..(21)..(22): Xaa is A or G or is absent

SEQ ID NO: 38917 - protein, 33 aa, Artificial Sequence; identical to SEQ ID NO: 15527
  GFR-binding peptide
  MOD_RES (1)..(2): Xaa is C or S

SEQ ID NO: 38918 - protein, 35 aa, Artificial Sequence; identical to SEQ ID NO: 6458
  GFR-binding peptide
  MOD_RES (2)..(3)..(35): Xaa is C or S

SEQ ID NO: 38919 - protein, 35 aa, Artificial Sequence; identical to SEQ ID NO: 15528
  GFR-binding peptide
  MOD_RES (1)..(2)..(35): Xaa is C or S
  MOD_RES (16)..(17)..(18)..(19)..(20): Xaa is A or G
  MOD_RES (21)..(22)..(23)..(24): Xaa is A or G or is absent

SEQ ID NO: 38920 - protein, 39 aa, Artificial Sequence; identical to SEQ ID NO: 13834
  GFR-binding peptide
  MOD_RES (1)..(2)..(36)..(38): Xaa is C or S
  MOD_RES (16)..(17)..(18)..(19)..(20): Xaa is A or G
  MOD_RES (21)..(22)..(23)..(24): Xaa is A or G or is absent

SEQ ID NO: 38921 - protein, 40 aa, Artificial Sequence; identical to SEQ ID NO: 13836
  GFR-binding peptide
  MOD_RES (6)..(38)..(40): Xaa is C or S

SEQ ID NO: 38922 - protein, 37 aa, Artificial Sequence; identical to SEQ ID NO: 15530
  GFR-binding peptide
  MOD_RES (4)..(5): Xaa is C or S
  MOD_RES (19)..(20)..(21)..(22)..(23): Xaa is A or G
  MOD_RES (24)..(25)..(26)..(27): Xaa is A or G or is absent

SEQ ID NO: 38923 - protein, 35 aa, Artificial Sequence; identical to SEQ ID NO: 15531
  GFR-binding peptide
  MOD_RES (33)..(35): Xaa is C or S
  MOD_RES (14)..(15)..(16)..(17)..(18): Xaa is A or G
  MOD_RES (19)..(20)..(21)..(22): Xaa is A or G or is absent

SEQ ID NO: 38924 - protein, 31 aa, Artificial Sequence; identical to SEQ ID NO: 13837
  GFR-binding peptide
  MOD_RES (31)..(31): Xaa is C or S

SEQ ID NO: 38925 - protein, 36 aa, Artificial Sequence; identical to SEQ ID NO: 15533
  GFR-binding peptide
  MOD_RES (3)..(4)..(35): Xaa is C or S

SEQ ID NO: 38926 - protein, 36 aa, Artificial Sequence; identical to SEQ ID NO: 15535
  GFR-binding peptide
  MOD_RES (4)..(5): Xaa is C or S

SEQ ID NO: 38927 - protein, 42 aa, Artificial Sequence; identical to SEQ ID NO: 13838
  GFR-binding peptide
  MOD_RES (6)..(7)..(39)..(41): Xaa is C or S

SEQ ID NO: 38928 - protein, 37 aa, Artificial Sequence; identical to SEQ ID NO: 13839
  GFR-binding peptide
  MOD_RES (1)..(2)..(36): Xaa is C or S
  MOD_RES (16)..(17)..(18)..(19)..(20): Xaa is A or G
  MOD_RES (21)..(22)..(23)..(24): Xaa is A or G or is absent

SEQ ID NO: 38929 - protein, 42 aa, Artificial Sequence; identical to SEQ ID NO: 13840
  GFR-binding peptide
  MOD_RES (6)..(7)..(40)..(42): Xaa is C or S
  MOD_RES (21)..(22)..(23)..(24)..(25): Xaa is A or G
  MOD_RES (26)..(27)..(28)..(29): Xaa is A or G or is absent

SEQ ID NO: 38930 - protein, 38 aa, Artificial Sequence; identical to SEQ ID NO: 15537
  GFR-binding peptide
  MOD_RES (2)..(3)..(37): Xaa is C or S
  MOD_RES (17)..(18)..(19)..(20)..(21): Xaa is A or G
  MOD_RES (22)..(23)..(24)..(25): Xaa is A or G or is absent

SEQ ID NO: 38931 - protein, 36 aa, Artificial Sequence; identical to SEQ ID NO: 13841
  GFR-binding peptide
  MOD_RES (1)..(2)..(33)..(35): Xaa is C or S

SEQ ID NO: 38932 - protein, 37 aa, Artificial Sequence; identical to SEQ ID NO: 8227
  GFR-binding peptide
  MOD_RES (3)..(4)..(36): Xaa is C or S

SEQ ID NO: 38933 - protein, 39 aa, Artificial Sequence
  GFR-binding peptide
  MOD_RES (5)..(6)..(39): Xaa is C or S
  MOD_RES (20)..(21)..(22)..(23)..(24): Xaa is A or G
  MOD_RES (25)..(26)..(27)..(28): Xaa is A or G or is absent
SASPXXVSQDLEPLTILYYXXXXXXXXXEQLSNMIVKSX

SEQ ID NO: 38934 - protein, 38 aa, Artificial Sequence; identical to SEQ ID NO: 6467
  GFR-binding peptide
  MOD_RES (2)..(3)..(36)..(38): Xaa is C or S
  MOD_RES (17)..(18)..(19)..(20)..(21): Xaa is A or G
  MOD_RES (22)..(23)..(24)..(25): Xaa is A or G or is absent

SEQ ID NO: 38935 - protein, 33 aa, Artificial Sequence; identical to SEQ ID NO: 13843
  GFR-binding peptide
  MOD_RES (31)..(33): Xaa is C or S

SEQ ID NO: 38936 - protein, 38 aa, Artificial Sequence; identical to SEQ ID NO: 13844
  GFR-binding peptide
  MOD_RES (4)..(5): Xaa is C or S
  MOD_RES (19)..(20)..(21)..(22)..(23): Xaa is A or G
  MOD_RES (24)..(25)..(26)..(27): Xaa is A or G or is absent

SEQ ID NO: 38937 - protein, 34 aa, Artificial Sequence; identical to SEQ ID NO: 8229
  GFR-binding peptide
  MOD_RES (33)..(33): Xaa is C or S
  MOD_RES (14)..(15)..(16)..(17)..(18): Xaa is A or G
  MOD_RES (19)..(20)..(21)..(22): Xaa is A or G or is absent

SEQ ID NO: 38938 - protein, 39 aa, Artificial Sequence; identical to SEQ ID NO: 13845
  GFR-binding peptide
  MOD_RES (1)..(2)..(36)..(38): Xaa is C or S
  MOD_RES (16)..(17)..(18)..(19)..(20): Xaa is A or G
  MOD_RES (21)..(22)..(23)..(24): Xaa is A or G or is absent

SEQ ID NO: 38939 - protein, 34 aa, Artificial Sequence; identical to SEQ ID NO: 15541
  GFR-binding peptide
  MOD_RES (1)..(2): Xaa is C or S
  MOD_RES (16)..(17)..(18)..(19)..(20): Xaa is A or G
  MOD_RES (21)..(22)..(23)..(24): Xaa is A or G or is absent

SEQ ID NO: 38940 - protein, 36 aa, Artificial Sequence; identical to SEQ ID NO: 13846
  GFR-binding peptide
  MOD_RES (5)..(6): Xaa is C or S

SEQ ID NO: 38941 - protein, 32 aa, Artificial Sequence; identical to SEQ ID NO: 15542
  GFR-binding peptide
  MOD_RES (14)..(15)..(16)..(17)..(18): Xaa is A or G
  MOD_RES (19)..(20)..(21)..(22): Xaa is A or G or is absent

SEQ ID NO: 38942 - protein, 34 aa, Artificial Sequence; identical to SEQ ID NO: 15543
  GFR-binding peptide
  MOD_RES (1)..(2)..(34): Xaa is C or S

SEQ ID NO: 38943 - protein, 35 aa, Artificial Sequence; identical to SEQ ID NO: 13848
  GFR-binding peptide
  MOD_RES (3)..(4): Xaa is C or S

SEQ ID NO: 38944 - protein, 41 aa, Artificial Sequence; identical to SEQ ID NO: 15544
  GFR-binding peptide
  MOD_RES (5)..(6)..(38)..(40): Xaa is C or S

SEQ ID NO: 38945 - protein, 33 aa, Artificial Sequence; identical to SEQ ID NO: 13851
  GFR-binding peptide
  MOD_RES (2)..(3): Xaa is C or S

SEQ ID NO: 38946 - protein, 42 aa, Artificial Sequence; identical to SEQ ID NO: 15546
  GFR-binding peptide
  MOD_RES (6)..(7)..(40)..(42): Xaa is C or S
  MOD_RES (21)..(22)..(23)..(24)..(25): Xaa is A or G
  MOD_RES (26)..(27)..(28)..(29): Xaa is A or G or is absent

SEQ ID NO: 38947 - protein, 37 aa, Artificial Sequence; identical to SEQ ID NO: 15547
  GFR-binding peptide
  MOD_RES (1)..(2)..(34)..(36): Xaa is C or S

SEQ ID NO: 38948 - protein, 34 aa, Artificial Sequence; identical to SEQ ID NO: 13854
  GFR-binding peptide
  MOD_RES (3)..(4): Xaa is C or S

SEQ ID NO: 38949 - protein, 38 aa, Artificial Sequence; identical to SEQ ID NO: 13855
  GFR-binding peptide
  MOD_RES (6)..(7)..(38): Xaa is C or S

SEQ ID NO: 38950 - protein, 36 aa, Artificial Sequence; identical to SEQ ID NO: 15549
  GFR-binding peptide
  MOD_RES (4)..(5): Xaa is C or S

SEQ ID NO: 38951 - protein, 42 aa, Artificial Sequence; identical to SEQ ID NO: 15550
  GFR-binding peptide
  MOD_RES (5)..(6)..(39)..(41): Xaa is C or S
  MOD_RES (20)..(21)..(22)..(23)..(24): Xaa is A or G
  MOD_RES (25)..(26)..(27)..(28): Xaa is A or G or is absent

SEQ ID NO: 38952 - protein, 37 aa, Artificial Sequence; identical to SEQ ID NO: 13858
  GFR-binding peptide
  MOD_RES (6)..(7): Xaa is C or S

SEQ ID NO: 38953 - protein, 41 aa, Artificial Sequence; identical to SEQ ID NO: 15551
  GFR-binding peptide
  MOD_RES (4)..(5)..(39)..(41): Xaa is C or S
  MOD_RES (19)..(20)..(21)..(22)..(23): Xaa is A or G
  MOD_RES (24)..(25)..(26)..(27): Xaa is A or G or is absent

SEQ ID NO: 38954 - protein, 35 aa, Artificial Sequence; identical to SEQ ID NO: 8240
  GFR-binding peptide
  MOD_RES (1)..(2): Xaa is C or S
  MOD_RES (16)..(17)..(18)..(19)..(20): Xaa is A or G
  MOD_RES (21)..(22)..(23)..(24): Xaa is A or G or is absent

SEQ ID NO: 38955 - protein, 38 aa, Artificial Sequence; identical to SEQ ID NO: 15553
  GFR-binding peptide
  MOD_RES (6)..(7): Xaa is C or S

SEQ ID NO: 38956 - protein, 39 aa, Artificial Sequence; identical to SEQ ID NO: 8241
  GFR-binding peptide
  MOD_RES (3)..(4)..(38): Xaa is C or S
  MOD_RES (18)..(19)..(20)..(21)..(22): Xaa is A or G
  MOD_RES (23)..(24)..(25)..(26): Xaa is A or G or is absent

SEQ ID NO: 38957 - protein, 32 aa, Artificial Sequence; identical to SEQ ID NO: 15555
  GFR-binding peptide
  MOD_RES (1)..(1): Xaa is C or S

SEQ ID NO: 38958 - protein, 39 aa, Artificial Sequence; identical to SEQ ID NO: 15556
  GFR-binding peptide
  MOD_RES (4)..(5)..(39): Xaa is C or S
  MOD_RES (19)..(20)..(21)..(22)..(23): Xaa is A or G
  MOD_RES (24)..(25)..(26)..(27): Xaa is A or G or is absent

SEQ ID NO: 38959 - protein, 38 aa, Artificial Sequence; identical to SEQ ID NO: 15557
  GFR-binding peptide
  MOD_RES (3)..(35)..(37): Xaa is C or S

SEQ ID NO: 38960 - protein, 41 aa, Artificial Sequence; identical to SEQ ID NO: 15558
  GFR-binding peptide
  MOD_RES (6)..(7)..(41): Xaa is C or S
  MOD_RES (21)..(22)..(23)..(24)..(25): Xaa is A or G
  MOD_RES (26)..(27)..(28)..(29): Xaa is A or G or is absent

SEQ ID NO: 38961 - protein, 42 aa, Artificial Sequence; identical to SEQ ID NO: 15559
  GFR-binding peptide
  MOD_RES (5)..(39)..(41): Xaa is C or S
  MOD_RES (19)..(20)..(21)..(22)..(23): Xaa is A or G
  MOD_RES (24)..(25)..(26)..(27): Xaa is A or G or is absent

SEQ ID NO: 38962 - protein, 40 aa, Artificial Sequence; identical to SEQ ID NO: 15560
  GFR-binding peptide
  MOD_RES (6)..(7)..(40): Xaa is C or S
  MOD_RES (21)..(22)..(23)..(24)..(25): Xaa is A or G
  MOD_RES (26)..(27)..(28)..(29): Xaa is A or G or is absent

SEQ ID NO: 38963 - protein, 39 aa, Artificial Sequence; identical to SEQ ID NO: 15561
  GFR-binding peptide
  MOD_RES (3)..(37)..(39): Xaa is C or S
  MOD_RES (17)..(18)..(19)..(20)..(21): Xaa is A or G
  MOD_RES (22)..(23)..(24)..(25): Xaa is A or G or is absent

SEQ ID NO: 38964 - protein, 42 aa, Artificial Sequence; identical to SEQ ID NO: 15565
  GFR-binding peptide
  MOD_RES (6)..(7)..(40)..(42): Xaa is C or S
  MOD_RES (21)..(22)..(23)..(24)..(25): Xaa is A or G
  MOD_RES (26)..(27)..(28)..(29): Xaa is A or G or is absent

SEQ ID NO: 38965 - protein, 35 aa, Artificial Sequence; identical to SEQ ID NO: 8249
  GFR-binding peptide
  MOD_RES (2)..(3): Xaa is C or S
  MOD_RES (17)..(18)..(19)..(20)..(21): Xaa is A or G
  MOD_RES (22)..(23)..(24)..(25): Xaa is A or G or is absent

SEQ ID NO: 38966 - protein, 37 aa, Artificial Sequence; identical to SEQ ID NO: 13861
  GFR-binding peptide
  MOD_RES (1)..(2)..(34)..(36): Xaa is C or S

SEQ ID NO: 38967 - protein, 38 aa, Artificial Sequence; identical to SEQ ID NO: 13862
  GFR-binding peptide
  MOD_RES (3)..(4)..(37): Xaa is C or S
  MOD_RES (18)..(19)..(20)..(21)..(22): Xaa is A or G
  MOD_RES (23)..(24)..(25)..(26): Xaa is A or G or is absent

SEQ ID NO: 38968 - protein, 38 aa, Artificial Sequence; identical to SEQ ID NO: 15567
  GFR-binding peptide
  MOD_RES (3)..(4)..(38): Xaa is C or S
  MOD_RES (18)..(19)..(20)..(21)..(22): Xaa is A or G
  MOD_RES (23)..(24)..(25)..(26): Xaa is A or G or is absent

SEQ ID NO: 38969 - protein, 38 aa, Artificial Sequence; identical to SEQ ID NO: 13863
  GFR-binding peptide
  MOD_RES (5)..(6)..(38): Xaa is C or S

SEQ ID NO: 38970 - protein, 33 aa, Artificial Sequence; identical to SEQ ID NO: 13865
  GFR-binding peptide
  MOD_RES (2)..(3): Xaa is C or S

SEQ ID NO: 38971 - protein, 40 aa, Artificial Sequence; identical to SEQ ID NO: 15568
  GFR-binding peptide
  MOD_RES (6)..(7)..(38)..(40): Xaa is C or S

SEQ ID NO: 38972 - protein, 38 aa, Artificial Sequence; identical to SEQ ID NO: 13866
  GFR-binding peptide
  MOD_RES (4)..(5)..(38): Xaa is C or S
  MOD_RES (19)..(20)..(21)..(22)..(23): Xaa is A or G
  MOD_RES (24)..(25)..(26)..(27): Xaa is A or G or is absent

SEQ ID NO: 38973 - protein, 38 aa, Artificial Sequence; identical to SEQ ID NO: 13867
  GFR-binding peptide
  MOD_RES (4)..(5)..(36)..(38): Xaa is C or S

SEQ ID NO: 38974 - protein, 36 aa, Artificial Sequence; identical to SEQ ID NO: 13868
  GFR-binding peptide
  MOD_RES (3)..(4): Xaa is C or S
  MOD_RES (18)..(19)..(20)..(21)..(22): Xaa is A or G
  MOD_RES (23)..(24)..(25)..(26): Xaa is A or G or is absent

SEQ ID NO: 38975 - protein, 33 aa, Artificial Sequence; identical to SEQ ID NO: 6498
  GFR-binding peptide
  MOD_RES (33)..(33): Xaa is C or S
  MOD_RES (14)..(15)..(16)..(17)..(18): Xaa is A or G
  MOD_RES (19)..(20)..(21)..(22): Xaa is A or G or is absent

SEQ ID NO: 38976 - protein, 35 aa, Artificial Sequence; identical to SEQ ID NO: 6500
  GFR-binding peptide
  MOD_RES (2)..(3): Xaa is C or S
  MOD_RES (17)..(18)..(19)..(20)..(21): Xaa is A or G
  MOD_RES (22)..(23)..(24)..(25): Xaa is A or G or is absent

SEQ ID NO: 38977 - protein, 33 aa, Artificial Sequence; identical to SEQ ID NO: 15571
  GFR-binding peptide
  MOD_RES (1)..(32): Xaa is C or S

SEQ ID NO: 38978 - protein, 34 aa, Artificial Sequence; identical to SEQ ID NO: 13871
  GFR-binding peptide
  MOD_RES (32)..(34): Xaa is C or S

SEQ ID NO: 38979 - protein, 37 aa, Artificial Sequence; identical to SEQ ID NO: 15573
  GFR-binding peptide
  MOD_RES (3)..(4): Xaa is C or S
  MOD_RES (18)..(19)..(20)..(21)..(22): Xaa is A or G
  MOD_RES (23)..(24)..(25)..(26): Xaa is A or G or is absent

SEQ ID NO: 38980 - protein, 36 aa, Artificial Sequence; identical to SEQ ID NO: 15574
  GFR-binding peptide
  MOD_RES (2)..(34)..(36): Xaa is C or S

SEQ ID NO: 38981 - protein, 35 aa, Artificial Sequence; identical to SEQ ID NO: 13873
  GFR-binding peptide
  MOD_RES (1)..(32)..(34): Xaa is C or S

SEQ ID NO: 38982 - protein, 39 aa, Artificial Sequence; identical to SEQ ID NO: 15575
  GFR-binding peptide
  MOD_RES (3)..(4)..(38): Xaa is C or S
  MOD_RES (18)..(19)..(20)..(21)..(22): Xaa is A or G
  MOD_RES (23)..(24)..(25)..(26): Xaa is A or G or is absent

SEQ ID NO: 38983 - protein, 39 aa, Artificial Sequence; identical to SEQ ID NO: 13874
  GFR-binding peptide
  MOD_RES (2)..(3)..(36)..(38): Xaa is C or S
  MOD_RES (17)..(18)..(19)..(20)..(21): Xaa is A or G
  MOD_RES (22)..(23)..(24)..(25): Xaa is A or G or is absent

SEQ ID NO: 38984 - protein, 38 aa, Artificial Sequence
  GFR-binding peptide
  MOD_RES (5)..(6): Xaa is C or S
  MOD_RES (20)..(21)..(22)..(23)..(24): Xaa is A or G
  MOD_RES (25)..(26)..(27)..(28): Xaa is A or G or is absent
SASPXXVSQDLEPLTILYYXXXXXXXXXEQLSNMIVKS

SEQ ID NO: 38985 - protein, 38 aa, Artificial Sequence; identical to SEQ ID NO: 15576
  GFR-binding peptide
  MOD_RES (3)..(4)..(36)..(38): Xaa is C or S

SEQ ID NO: 38986 - protein, 34 aa, Artificial Sequence; identical to SEQ ID NO: 8262
  GFR-binding peptide
  MOD_RES (1)..(2)..(33): Xaa is C or S

SEQ ID NO: 38987 - protein, 40 aa, Artificial Sequence; identical to SEQ ID NO: 13875
  GFR-binding peptide
  MOD_RES (4)..(5)..(38)..(40): Xaa is C or S
  MOD_RES (19)..(20)..(21)..(22)..(23): Xaa is A or G
  MOD_RES (24)..(25)..(26)..(27): Xaa is A or G or is absent

SEQ ID NO: 38988 - protein, 36 aa, Artificial Sequence; identical to SEQ ID NO: 13876
  GFR-binding peptide
  MOD_RES (4)..(5)..(36): Xaa is C or S

SEQ ID NO: 38989 - protein, 32 aa, Artificial Sequence; identical to SEQ ID NO: 15579
  GFR-binding peptide
  MOD_RES (1)..(2): Xaa is C or S

SEQ ID NO: 38990 - protein, 40 aa, Artificial Sequence; identical to SEQ ID NO: 13878
  GFR-binding peptide
  MOD_RES (5)..(6)..(38)..(40): Xaa is C or S

SEQ ID NO: 38991 - protein, 40 aa, Artificial Sequence; identical to SEQ ID NO: 13881
  GFR-binding peptide
  MOD_RES (4)..(5)..(37)..(39): Xaa is C or S

SEQ ID NO: 38992 - protein, 36 aa, Artificial Sequence; identical to SEQ ID NO: 13882
  GFR-binding peptide
  MOD_RES (2)..(3): Xaa is C or S
  MOD_RES (17)..(18)..(19)..(20)..(21): Xaa is A or G
  MOD_RES (22)..(23)..(24)..(25): Xaa is A or G or is absent

SEQ ID NO: 38993 - protein, 38 aa, Artificial Sequence; identical to SEQ ID NO: 15581
  GFR-binding peptide
  MOD_RES (3)..(4)..(35)..(37): Xaa is C or S

SEQ ID NO: 38994 - protein, 38 aa, Artificial Sequence; identical to SEQ ID NO: 15582
  GFR-binding peptide
  MOD_RES (6)..(7): Xaa is C or S

SEQ ID NO: 38995 - protein, 35 aa, Artificial Sequence; identical to SEQ ID NO: 15583
  GFR-binding peptide
  MOD_RES (2)..(3)..(34): Xaa is C or S

SEQ ID NO: 38996 - protein, 31 aa, Artificial Sequence; identical to SEQ ID NO: 6513
  GFR-binding peptide
  MOD_RES (1)..(1): Xaa is C or S

SEQ ID NO: 38997 - protein, 40 aa, Artificial Sequence; identical to SEQ ID NO: 8275
  GFR-binding peptide
  MOD_RES (6)..(7): Xaa is C or S
  MOD_RES (21)..(22)..(23)..(24)..(25): Xaa is A or G
  MOD_RES (26)..(27)..(28)..(29): Xaa is A or G or is absent

SEQ ID NO: 38998 - protein, 39 aa, Artificial Sequence; identical to SEQ ID NO: 15586
  GFR-binding peptide
  MOD_RES (3)..(4)..(37)..(39): Xaa is C or S
  MOD_RES (18)..(19)..(20)..(21)..(22): Xaa is A or G
  MOD_RES (23)..(24)..(25)..(26): Xaa is A or G or is absent

SEQ ID NO: 38999 - protein, 37 aa, Artificial Sequence; identical to SEQ ID NO: 15588
  GFR-binding peptide
  MOD_RES (6)..(6): Xaa is C or S

SEQ ID NO: 39000 - protein, 35 aa, Artificial Sequence; identical to SEQ ID NO: 13886
  GFR-binding peptide
  MOD_RES (2)..(3): Xaa is C or S
  MOD_RES (17)..(18)..(19)..(20)..(21): Xaa is A or G
  MOD_RES (22)..(23)..(24)..(25): Xaa is A or G or is absent

SEQ ID NO: 39001 - protein, 35 aa, Artificial Sequence; identical to SEQ ID NO: 8278
  GFR-binding peptide
  MOD_RES (34)..(34): Xaa is C or S
  MOD_RES (14)..(15)..(16)..(17)..(18): Xaa is A or G
  MOD_RES (19)..(20)..(21)..(22): Xaa is A or G or is absent

SEQ ID NO: 39002 - protein, 35 aa, Artificial Sequence; identical to SEQ ID NO: 15590
  GFR-binding peptide
  MOD_RES (4)..(5): Xaa is C or S

SEQ ID NO: 39003 - protein, 39 aa, Artificial Sequence; identical to SEQ ID NO: 6521
  GFR-binding peptide
  MOD_RES (2)..(3)..(36)..(38): Xaa is C or S
  MOD_RES (17)..(18)..(19)..(20)..(21): Xaa is A or G
  MOD_RES (22)..(23)..(24)..(25): Xaa is A or G or is absent

SEQ ID NO: 39004 - protein, 35 aa, Artificial Sequence; identical to SEQ ID NO: 13891
  GFR-binding peptide
  MOD_RES (1)..(33)..(35): Xaa is C or S

SEQ ID NO: 39005 - protein, 41 aa, Artificial Sequence; identical to SEQ ID NO: 15591
  GFR-binding peptide
  MOD_RES (5)..(6)..(38)..(40): Xaa is C or S

SEQ ID NO: 39006 - protein, 37 aa, Artificial Sequence; identical to SEQ ID NO: 15592
  GFR-binding peptide
  MOD_RES (3)..(4): Xaa is C or S
  MOD_RES (18)..(19)..(20)..(21)..(22): Xaa is A or G
  MOD_RES (23)..(24)..(25)..(26): Xaa is A or G or is absent

SEQ ID NO: 39007 - protein, 38 aa, Artificial Sequence; identical to SEQ ID NO: 13892
  GFR-binding peptide
  MOD_RES (1)..(35)..(37): Xaa is C or S
  MOD_RES (15)..(16)..(17)..(18)..(19): Xaa is A or G
  MOD_RES (20)..(21)..(22)..(23): Xaa is A or G or is absent

SEQ ID NO: 39008 - protein, 37 aa, Artificial Sequence; identical to SEQ ID NO: 13893
  GFR-binding peptide
  MOD_RES (34)..(36): Xaa is C or S
  MOD_RES (14)..(15)..(16)..(17)..(18): Xaa is A or G
  MOD_RES (19)..(20)..(21)..(22): Xaa is A or G or is absent

SEQ ID NO: 39009 - protein, 37 aa, Artificial Sequence; identical to SEQ ID NO: 6526
  GFR-binding peptide
  MOD_RES (6)..(7): Xaa is C or S

SEQ ID NO: 39010 - protein, 38 aa, Artificial Sequence; identical to SEQ ID NO: 8286
  GFR-binding peptide
  MOD_RES (2)..(3)..(36)..(38): Xaa is C or S
  MOD_RES (17)..(18)..(19)..(20)..(21): Xaa is A or G
  MOD_RES (22)..(23)..(24)..(25): Xaa is A or G or is absent

SEQ ID NO: 39011 - protein, 36 aa, Artificial Sequence; identical to SEQ ID NO: 13895
  GFR-binding peptide
  MOD_RES (2)..(34)..(36): Xaa is C or S

SEQ ID NO: 39012 - protein, 40 aa, Artificial Sequence; identical to SEQ ID NO: 15594
  GFR-binding peptide
  MOD_RES (6)..(7)..(39): Xaa is C or S

SEQ ID NO: 39013 - protein, 35 aa, Artificial Sequence; identical to SEQ ID NO: 15595
  GFR-binding peptide
  MOD_RES (34)..(34): Xaa is C or S
  MOD_RES (14)..(15)..(16)..(17)..(18): Xaa is A or G
  MOD_RES (19)..(20)..(21)..(22): Xaa is A or G or is absent

SEQ ID NO: 39014 - protein, 32 aa, Artificial Sequence; identical to SEQ ID NO: 15596
  GFR-binding peptide
  MOD_RES (14)..(15)..(16)..(17)..(18): Xaa is A or G
  MOD_RES (19)..(20)..(21)..(22): Xaa is A or G or is absent

SEQ ID NO: 39015 - protein, 39 aa, Artificial Sequence; identical to SEQ ID NO: 13898
  GFR-binding peptide
  MOD_RES (6)..(7): Xaa is C or S
  MOD_RES (21)..(22)..(23)..(24)..(25): Xaa is A or G
  MOD_RES (26)..(27)..(28)..(29): Xaa is A or G or is absent

SEQ ID NO: 39016 - protein, 39 aa, Artificial Sequence; identical to SEQ ID NO: 8290
  GFR-binding peptide
  MOD_RES (4)..(5)..(37)..(39): Xaa is C or S

SEQ ID NO: 39017 - protein, 40 aa, Artificial Sequence; identical to SEQ ID NO: 15598
  GFR-binding peptide
  MOD_RES (6)..(7)..(39): Xaa is C or S

SEQ ID NO: 39018 - protein, 33 aa, Artificial Sequence; identical to SEQ ID NO: 15599
  GFR-binding peptide
  MOD_RES (1)..(2): Xaa is C or S

SEQ ID NO: 39019 - protein, 38 aa, Artificial Sequence; identical to SEQ ID NO: 13900
  GFR-binding peptide
  MOD_RES (5)..(6): Xaa is C or S
  MOD_RES (20)..(21)..(22)..(23)..(24): Xaa is A or G
  MOD_RES (25)..(26)..(27)..(28): Xaa is A or G or is absent

SEQ ID NO: 39020 - protein, 41 aa, Artificial Sequence
  GFR-binding peptide
  MOD_RES (4)..(5)..(38)..(40): Xaa is C or S
  MOD_RES (19)..(20)..(21)..(22)..(23): Xaa is A or G
  MOD_RES (24)..(25)..(26)..(27): Xaa is A or G or is absent
ASPXXVSQDLEPLTILYYXXXXXXXXXEQLSNMIVKSXKXS

SEQ ID NO: 39021 - protein, 33 aa, Artificial Sequence; identical to SEQ ID NO: 13901
  GFR-binding peptide
  MOD_RES (1)..(1): Xaa is C or S
  MOD_RES (15)..(16)..(17)..(18)..(19): Xaa is A or G
  MOD_RES (20)..(21)..(22)..(23): Xaa is A or G or is absent

SEQ ID NO: 39022 - protein, 36 aa, Artificial Sequence; identical to SEQ ID NO: 13902
  GFR-binding peptide
  MOD_RES (2)..(3)..(35): Xaa is C or S

SEQ ID NO: 39023 - protein, 37 aa, Artificial Sequence; identical to SEQ ID NO: 13903
  GFR-binding peptide
  MOD_RES (34)..(36): Xaa is C or S
  MOD_RES (14)..(15)..(16)..(17)..(18): Xaa is A or G
  MOD_RES (19)..(20)..(21)..(22): Xaa is A or G or is absent

SEQ ID NO: 39024 - protein, 38 aa, Artificial Sequence; identical to SEQ ID NO: 6541
  GFR-binding peptide
  MOD_RES (1)..(2)..(36)..(38): Xaa is C or S
  MOD_RES (16)..(17)..(18)..(19)..(20): Xaa is A or G
  MOD_RES (21)..(22)..(23)..(24): Xaa is A or G or is absent

SEQ ID NO: 39025 - protein, 38 aa, Artificial Sequence; identical to SEQ ID NO: 13906
  GFR-binding peptide
  MOD_RES (2)..(3)..(37): Xaa is C or S
  MOD_RES (17)..(18)..(19)..(20)..(21): Xaa is A or G
  MOD_RES (22)..(23)..(24)..(25): Xaa is A or G or is absent

SEQ ID NO: 39026 - protein, 40 aa, Artificial Sequence; identical to SEQ ID NO: 13907
  GFR-binding peptide
  MOD_RES (4)..(5)..(38)..(40): Xaa is C or S
  MOD_RES (19)..(20)..(21)..(22)..(23): Xaa is A or G
  MOD_RES (24)..(25)..(26)..(27): Xaa is A or G or is absent

SEQ ID NO: 39027 - protein, 35 aa, Artificial Sequence; identical to SEQ ID NO: 6542
  GFR-binding peptide
  MOD_RES (1)..(32)..(34): Xaa is C or S

SEQ ID NO: 39028 - protein, 35 aa, Artificial Sequence; identical to SEQ ID NO: 15602
  GFR-binding peptide
  MOD_RES (1)..(35): Xaa is C or S
  MOD_RES (15)..(16)..(17)..(18)..(19): Xaa is A or G
  MOD_RES (20)..(21)..(22)..(23): Xaa is A or G or is absent

SEQ ID NO: 39029 - protein, 39 aa, Artificial Sequence; identical to SEQ ID NO: 15603
  GFR-binding peptide
  MOD_RES (6)..(7)..(38): Xaa is C or S

SEQ ID NO: 39030 - protein, 41 aa, Artificial Sequence; identical to SEQ ID NO: 15604
  GFR-binding peptide
  MOD_RES (5)..(6)..(40): Xaa is C or S
  MOD_RES (20)..(21)..(22)..(23)..(24): Xaa is A or G
  MOD_RES (25)..(26)..(27)..(28): Xaa is A or G or is absent

SEQ ID NO: 39031 - protein, 37 aa, Artificial Sequence; identical to SEQ ID NO: 6546
  GFR-binding peptide
  MOD_RES (4)..(5): Xaa is C or S
  MOD_RES (19)..(20)..(21)..(22)..(23): Xaa is A or G
  MOD_RES (24)..(25)..(26)..(27): Xaa is A or G or is absent

SEQ ID NO: 39032 - protein, 37 aa, Artificial Sequence; identical to SEQ ID NO: 13912
  GFR-binding peptide
  MOD_RES (6)..(7): Xaa is C or S

SEQ ID NO: 39033 - protein, 36 aa, Artificial Sequence; identical to SEQ ID NO: 6547
  GFR-binding peptide
  MOD_RES (1)..(35): Xaa is C or S
  MOD_RES (15)..(16)..(17)..(18)..(19): Xaa is A or G
  MOD_RES (20)..(21)..(22)..(23): Xaa is A or G or is absent

SEQ ID NO: 39034 - protein, 35 aa, Artificial Sequence; identical to SEQ ID NO: 15606
  GFR-binding peptide
  MOD_RES (1)..(35): Xaa is C or S
  MOD_RES (15)..(16)..(17)..(18)..(19): Xaa is A or G
  MOD_RES (20)..(21)..(22)..(23): Xaa is A or G or is absent

SEQ ID NO: 39035 - protein, 35 aa, Artificial Sequence; identical to SEQ ID NO: 13914
  GFR-binding peptide
  MOD_RES (1)..(32)..(34): Xaa is C or S

SEQ ID NO: 39036 - protein, 35 aa, Artificial Sequence; identical to SEQ ID NO: 13915
  GFR-binding peptide
  MOD_RES (4)..(5): Xaa is C or S

SEQ ID NO: 39037 - protein, 40 aa, Artificial Sequence; identical to SEQ ID NO: 13916
  GFR-binding peptide
  MOD_RES (4)..(5)..(39): Xaa is C or S
  MOD_RES (19)..(20)..(21)..(22)..(23): Xaa is A or G
  MOD_RES (24)..(25)..(26)..(27): Xaa is A or G or is absent

SEQ ID NO: 39038 - protein, 35 aa, Artificial Sequence; identical to SEQ ID NO: 13917
  GFR-binding peptide
  MOD_RES (1)..(35): Xaa is C or S
  MOD_RES (15)..(16)..(17)..(18)..(19): Xaa is A or G
  MOD_RES (20)..(21)..(22)..(23): Xaa is A or G or is absent

SEQ ID NO: 39039 - protein, 35 aa, Artificial Sequence; identical to SEQ ID NO: 8308
  GFR-binding peptide
  MOD_RES (1)..(34): Xaa is C or S
  MOD_RES (15)..(16)..(17)..(18)..(19): Xaa is A or G
  MOD_RES (20)..(21)..(22)..(23): Xaa is A or G or is absent

SEQ ID NO: 39040 - protein, 42 aa, Artificial Sequence; identical to SEQ ID NO: 13919
  GFR-binding peptide
  MOD_RES (4)..(5)..(39)..(41): Xaa is C or S
  MOD_RES (19)..(20)..(21)..(22)..(23): Xaa is A or G
  MOD_RES (24)..(25)..(26)..(27): Xaa is A or G or is absent

SEQ ID NO: 39041 - protein, 41 aa, Artificial Sequence; identical to SEQ ID NO: 13920
  GFR-binding peptide
  MOD_RES (6)..(7)..(41): Xaa is C or S
  MOD_RES (21)..(22)..(23)..(24)..(25): Xaa is A or G
  MOD_RES (26)..(27)..(28)..(29): Xaa is A or G or is absent

SEQ ID NO: 39042 - protein, 39 aa, Artificial Sequence; identical to SEQ ID NO: 15609
  GFR-binding peptide
  MOD_RES (2)..(3)..(37)..(39): Xaa is C or S
  MOD_RES (17)..(18)..(19)..(20)..(21): Xaa is A or G
  MOD_RES (22)..(23)..(24)..(25): Xaa is A or G or is absent

SEQ ID NO: 39043 - protein, 39 aa, Artificial Sequence; identical to SEQ ID NO: 15610
  GFR-binding peptide
  MOD_RES (6)..(7): Xaa is C or S
  MOD_RES (21)..(22)..(23)..(24)..(25): Xaa is A or G
  MOD_RES (26)..(27)..(28)..(29): Xaa is A or G or is absent

SEQ ID NO: 39044 - protein, 35 aa, Artificial Sequence; identical to SEQ ID NO: 15611
  GFR-binding peptide
  MOD_RES (3)..(4): Xaa is C or S

SEQ ID NO: 39045 - protein, 35 aa, Artificial Sequence; identical to SEQ ID NO: 13921
  GFR-binding peptide
  MOD_RES (1)..(35): Xaa is C or S
  MOD_RES (15)..(16)..(17)..(18)..(19): Xaa is A or G
  MOD_RES (20)..(21)..(22)..(23): Xaa is A or G or is absent

SEQ ID NO: 39046 - protein, 36 aa, Artificial Sequence; identical to SEQ ID NO: 13923
  GFR-binding peptide
  MOD_RES (4)..(4): Xaa is C or S
  MOD_RES (18)..(19)..(20)..(21)..(22): Xaa is A or G
  MOD_RES (23)..(24)..(25)..(26): Xaa is A or G or is absent

SEQ ID NO: 39047 - protein, 42 aa, Artificial Sequence; identical to SEQ ID NO: 15612
  GFR-binding peptide
  MOD_RES (6)..(7)..(41): Xaa is C or S
  MOD_RES (21)..(22)..(23)..(24)..(25): Xaa is A or G
  MOD_RES (26)..(27)..(28)..(29): Xaa is A or G or is absent

SEQ ID NO: 39048 - protein, 36 aa, Artificial Sequence; identical to SEQ ID NO: 15613
  GFR-binding peptide
  MOD_RES (1)..(33)..(35): Xaa is C or S

SEQ ID NO: 39049 - protein, 37 aa, Artificial Sequence; identical to SEQ ID NO: 8309
  GFR-binding peptide
  MOD_RES (2)..(3)..(37): Xaa is C or S
  MOD_RES (17)..(18)..(19)..(20)..(21): Xaa is A or G
  MOD_RES (22)..(23)..(24)..(25): Xaa is A or G or is absent

SEQ ID NO: 39050 - protein, 38 aa, Artificial Sequence; identical to SEQ ID NO: 13924
  GFR-binding peptide
  MOD_RES (4)..(5)..(36)..(38): Xaa is C or S

SEQ ID NO: 39051 - protein, 33 aa, Artificial Sequence; identical to SEQ ID NO: 13926
  GFR-binding peptide
  MOD_RES (2)..(3): Xaa is C or S

SEQ ID NO: 39052 - protein, 38 aa, Artificial Sequence; identical to SEQ ID NO: 13927
  GFR-binding peptide
  MOD_RES (4)..(5): Xaa is C or S
  MOD_RES (19)..(20)..(21)..(22)..(23): Xaa is A or G
  MOD_RES (24)..(25)..(26)..(27): Xaa is A or G or is absent

SEQ ID NO: 39053 - protein, 34 aa, Artificial Sequence; identical to SEQ ID NO: 13929
  GFR-binding peptide
  MOD_RES (1)..(32)..(34): Xaa is C or S

SEQ ID NO: 39054 - protein, 39 aa, Artificial Sequence; identical to SEQ ID NO: 13930
  GFR-binding peptide
  MOD_RES (3)..(4)..(36)..(38): Xaa is C or S

SEQ ID NO: 39055 - protein, 39 aa, Artificial Sequence; identical to SEQ ID NO: 13931
  GFR-binding peptide
  MOD_RES (3)..(4)..(38): Xaa is C or S
  MOD_RES (18)..(19)..(20)..(21)..(22): Xaa is A or G
  MOD_RES (23)..(24)..(25)..(26): Xaa is A or G or is absent

SEQ ID NO: 39056 - protein, 38 aa, Artificial Sequence; identical to SEQ ID NO: 13932
  GFR-binding peptide
  MOD_RES (6)..(7): Xaa is C or S

SEQ ID NO: 39057 - protein, 34 aa, Artificial Sequence; identical to SEQ ID NO: 8320
  GFR-binding peptide
  MOD_RES (1)..(32)..(34): Xaa is C or S

SEQ ID NO: 39058 - protein, 35 aa, Artificial Sequence; identical to SEQ ID NO: 15622
  GFR-binding peptide
  MOD_RES (4)..(4): Xaa is C or S

SEQ ID NO: 39059 - protein, 39 aa, Artificial Sequence; identical to SEQ ID NO: 15623
  GFR-binding peptide
  MOD_RES (3)..(4)..(37)..(39): Xaa is C or S
  MOD_RES (18)..(19)..(20)..(21)..(22): Xaa is A or G
  MOD_RES (23)..(24)..(25)..(26): Xaa is A or G or is absent

SEQ ID NO: 39060 - protein, 31 aa, Artificial Sequence; identical to SEQ ID NO: 13933
  GFR-binding peptide

SEQ ID NO: 39061 - protein, 41 aa, Artificial Sequence; identical to SEQ ID NO: 13934
  GFR-binding peptide
  MOD_RES (5)..(6)..(38)..(40): Xaa is C or S

SEQ ID NO: 39062 - protein, 35 aa, Artificial Sequence; identical to SEQ ID NO: 13935
  GFR-binding peptide
  MOD_RES (3)..(4): Xaa is C or S

SEQ ID NO: 39063 - protein, 41 aa, Artificial Sequence; identical to SEQ ID NO: 15625
  GFR-binding peptide
  MOD_RES (6)..(7)..(40): Xaa is C or S
  MOD_RES (21)..(22)..(23)..(24)..(25): Xaa is A or G
  MOD_RES (26)..(27)..(28)..(29): Xaa is A or G or is absent

SEQ ID NO: 39064 - protein, 31 aa, Artificial Sequence; identical to SEQ ID NO: 13937
  GFR-binding peptide
  MOD_RES (1)..(1): Xaa is C or S

SEQ ID NO: 39065 - protein, 37 aa, Artificial Sequence; identical to SEQ ID NO: 15626
  GFR-binding peptide
  MOD_RES (1)..(34)..(36): Xaa is C or S
  MOD_RES (15)..(16)..(17)..(18)..(19): Xaa is A or G
  MOD_RES (20)..(21)..(22)..(23): Xaa is A or G or is absent

SEQ ID NO: 39066 - protein, 38 aa, Artificial Sequence; identical to SEQ ID NO: 13938
  GFR-binding peptide
  MOD_RES (5)..(6): Xaa is C or S
  MOD_RES (20)..(21)..(22)..(23)..(24): Xaa is A or G
  MOD_RES (25)..(26)..(27)..(28): Xaa is A or G or is absent

SEQ ID NO: 39067 - protein, 39 aa, Artificial Sequence; identical to SEQ ID NO: 13939
  GFR-binding peptide
  MOD_RES (6)..(7): Xaa is C or S
  MOD_RES (21)..(22)..(23)..(24)..(25): Xaa is A or G
  MOD_RES (26)..(27)..(28)..(29): Xaa is A or G or is absent

SEQ ID NO: 39068 - protein, 42 aa, Artificial Sequence; identical to SEQ ID NO: 13940
  GFR-binding peptide
  MOD_RES (5)..(6)..(40)..(42): Xaa is C or S
  MOD_RES (20)..(21)..(22)..(23)..(24): Xaa is A or G
  MOD_RES (25)..(26)..(27)..(28): Xaa is A or G or is absent

SEQ ID NO: 39069 - protein, 34 aa, Artificial Sequence; identical to SEQ ID NO: 13941
  GFR-binding peptide
  MOD_RES (1)..(32)..(34): Xaa is C or S

SEQ ID NO: 39070 - protein, 36 aa, Artificial Sequence; identical to SEQ ID NO: 13942
  GFR-binding peptide
  MOD_RES (3)..(4): Xaa is C or S
  MOD_RES (18)..(19)..(20)..(21)..(22): Xaa is A or G
  MOD_RES (23)..(24)..(25)..(26): Xaa is A or G or is absent

SEQ ID NO: 39071 - protein, 33 aa, Artificial Sequence; identical to SEQ ID NO: 15627
  GFR-binding peptide
  MOD_RES (1)..(1): Xaa is C or S
  MOD_RES (15)..(16)..(17)..(18)..(19): Xaa is A or G
  MOD_RES (20)..(21)..(22)..(23): Xaa is A or G or is absent

SEQ ID NO: 39072 - protein, 38 aa, Artificial Sequence; identical to SEQ ID NO: 13943
  GFR-binding peptide
  MOD_RES (4)..(5): Xaa is C or S
  MOD_RES (19)..(20)..(21)..(22)..(23): Xaa is A or G
  MOD_RES (24)..(25)..(26)..(27): Xaa is A or G or is absent

SEQ ID NO: 39073 - protein, 36 aa, Artificial Sequence; identical to SEQ ID NO: 15629
  GFR-binding peptide
  MOD_RES (3)..(35): Xaa is C or S

SEQ ID NO: 39074 - protein, 40 aa, Artificial Sequence; identical to SEQ ID NO: 13944
  GFR-binding peptide
  MOD_RES (2)..(3)..(37)..(39): Xaa is C or S
  MOD_RES (17)..(18)..(19)..(20)..(21): Xaa is A or G
  MOD_RES (22)..(23)..(24)..(25): Xaa is A or G or is absent

SEQ ID NO: 39075 - protein, 39 aa, Artificial Sequence; identical to SEQ ID NO: 15630
  GFR-binding peptide
  MOD_RES (5)..(37)..(39): Xaa is C or S

SEQ ID NO: 39076 - protein, 39 aa, Artificial Sequence; identical to SEQ ID NO: 13947
  GFR-binding peptide
  MOD_RES (4)..(5)..(39): Xaa is C or S
  MOD_RES (19)..(20)..(21)..(22)..(23): Xaa is A or G
  MOD_RES (24)..(25)..(26)..(27): Xaa is A or G or is absent

SEQ ID NO: 39077 - protein, 34 aa, Artificial Sequence; identical to SEQ ID NO: 15631
  GFR-binding peptide
  MOD_RES (3)..(4): Xaa is C or S

SEQ ID NO: 39078 - protein, 41 aa, Artificial Sequence; identical to SEQ ID NO: 13948
  GFR-binding peptide
  MOD_RES (5)..(6)..(38)..(40): Xaa is C or S

SEQ ID NO: 39079 - protein, 35 aa, Artificial Sequence; identical to SEQ ID NO: 13949
  GFR-binding peptide
  MOD_RES (3)..(4)..(35): Xaa is C or S

SEQ ID NO: 39080 - protein, 32 aa, Artificial Sequence; identical to SEQ ID NO: 15632
  GFR-binding peptide
  MOD_RES (14)..(15)..(16)..(17)..(18): Xaa is A or G
  MOD_RES (19)..(20)..(21)..(22): Xaa is A or G or is absent

SEQ ID NO: 39081 - protein, 30 aa, Artificial Sequence; identical to SEQ ID NO: 6580
  GFR-binding peptide

SEQ ID NO: 39082 - protein, 39 aa, Artificial Sequence; identical to SEQ ID NO: 13951
  GFR-binding peptide
  MOD_RES (5)..(6): Xaa is C or S
  MOD_RES (20)..(21)..(22)..(23)..(24): Xaa is A or G
  MOD_RES (25)..(26)..(27)..(28): Xaa is A or G or is absent

SEQ ID NO: 39083 - protein, 33 aa, Artificial Sequence; identical to SEQ ID NO: 8344
  GFR-binding peptide
  MOD_RES (31)..(33): Xaa is C or S

SEQ ID NO: 39084 - protein, 37 aa, Artificial Sequence; identical to SEQ ID NO: 15636
  GFR-binding peptide
  MOD_RES (4)..(5): Xaa is C or S
  MOD_RES (19)..(20)..(21)..(22)..(23): Xaa is A or G
  MOD_RES (24)..(25)..(26)..(27): Xaa is A or G or is absent

SEQ ID NO: 39085 - protein, 41 aa, Artificial Sequence; identical to SEQ ID NO: 13952
  GFR-binding peptide
  MOD_RES (6)..(7)..(41): Xaa is C or S
  MOD_RES (21)..(22)..(23)..(24)..(25): Xaa is A or G
  MOD_RES (26)..(27)..(28)..(29): Xaa is A or G or is absent

SEQ ID NO: 39086 - protein, 38 aa, Artificial Sequence
  GFR-binding peptide
  MOD_RES (4)..(5)..(38): Xaa is C or S
  MOD_RES (19)..(20)..(21)..(22)..(23): Xaa is A or G
  MOD_RES (24)..(25)..(26)..(27): Xaa is A or G or is absent
ASPXXVSQDLEPLTILYYXXXXXXXXXEQLSNMIVKSX

SEQ ID NO: 39087 - protein, 42 aa, Artificial Sequence; identical to SEQ ID NO: 15637
  GFR-binding peptide
  MOD_RES (6)..(7)..(41): Xaa is C or S
  MOD_RES (21)..(22)..(23)..(24)..(25): Xaa is A or G
  MOD_RES (26)..(27)..(28)..(29): Xaa is A or G or is absent

SEQ ID NO: 39088 - protein, 39 aa, Artificial Sequence; identical to SEQ ID NO: 8347
  GFR-binding peptide
  MOD_RES (5)..(6)..(39): Xaa is C or S
  MOD_RES (20)..(21)..(22)..(23)..(24): Xaa is A or G
  MOD_RES (25)..(26)..(27)..(28): Xaa is A or G or is absent

SEQ ID NO: 39089 - protein, 33 aa, Artificial Sequence; identical to SEQ ID NO: 15640
  GFR-binding peptide
  MOD_RES (1)..(2)..(33): Xaa is C or S

SEQ ID NO: 39090 - protein, 37 aa, Artificial Sequence; identical to SEQ ID NO: 13954
  GFR-binding peptide
  MOD_RES (3)..(4): Xaa is C or S
  MOD_RES (18)..(19)..(20)..(21)..(22): Xaa is A or G
  MOD_RES (23)..(24)..(25)..(26): Xaa is A or G or is absent

SEQ ID NO: 39091 - protein, 33 aa, Artificial Sequence; identical to SEQ ID NO: 15641
  GFR-binding peptide
  MOD_RES (2)..(3): Xaa is C or S

SEQ ID NO: 39092 - protein, 42 aa, Artificial Sequence; identical to SEQ ID NO: 8349
  GFR-binding peptide
  MOD_RES (5)..(6)..(40)..(42): Xaa is C or S
  MOD_RES (20)..(21)..(22)..(23)..(24): Xaa is A or G
  MOD_RES (25)..(26)..(27)..(28): Xaa is A or G or is absent

SEQ ID NO: 39093 - protein, 42 aa, Artificial Sequence; identical to SEQ ID NO: 15643
  GFR-binding peptide
  MOD_RES (6)..(7)..(41): Xaa is C or S
  MOD_RES (21)..(22)..(23)..(24)..(25): Xaa is A or G
  MOD_RES (26)..(27)..(28)..(29): Xaa is A or G or is absent

SEQ ID NO: 39094 - protein, 38 aa, Artificial Sequence; identical to SEQ ID NO: 15645
  GFR-binding peptide
  MOD_RES (3)..(4)..(37): Xaa is C or S
  MOD_RES (18)..(19)..(20)..(21)..(22): Xaa is A or G
  MOD_RES (23)..(24)..(25)..(26): Xaa is A or G or is absent

SEQ ID NO: 39095 - protein, 40 aa, Artificial Sequence; identical to SEQ ID NO: 15646
  GFR-binding peptide
  MOD_RES (6)..(38)..(40): Xaa is C or S

SEQ ID NO: 39096 - protein, 38 aa, Artificial Sequence; identical to SEQ ID NO: 15647
  GFR-binding peptide
  MOD_RES (5)..(6)..(38): Xaa is C or S

SEQ ID NO: 39097 - protein, 34 aa, Artificial Sequence; identical to SEQ ID NO: 13957
  GFR-binding peptide
  MOD_RES (4)..(4): Xaa is C or S

SEQ ID NO: 39098 - protein, 35 aa, Artificial Sequence; identical to SEQ ID NO: 13958
  GFR-binding peptide
  MOD_RES (1)..(2): Xaa is C or S
  MOD_RES (16)..(17)..(18)..(19)..(20): Xaa is A or G
  MOD_RES (21)..(22)..(23)..(24): Xaa is A or G or is absent

SEQ ID NO: 39099 - protein, 37 aa, Artificial Sequence; identical to SEQ ID NO: 13959
  GFR-binding peptide
  MOD_RES (4)..(4): Xaa is C or S
  MOD_RES (18)..(19)..(20)..(21)..(22): Xaa is A or G
  MOD_RES (23)..(24)..(25)..(26): Xaa is A or G or is absent

SEQ ID NO: 39100 - protein, 37 aa, Artificial Sequence; identical to SEQ ID NO: 15648
  GFR-binding peptide
  MOD_RES (1)..(2)..(35)..(37): Xaa is C or S
  MOD_RES (16)..(17)..(18)..(19)..(20): Xaa is A or G
  MOD_RES (21)..(22)..(23)..(24): Xaa is A or G or is absent

SEQ ID NO: 39101 - protein, 36 aa, Artificial Sequence; identical to SEQ ID NO: 15649
  GFR-binding peptide
  MOD_RES (4)..(5): Xaa is C or S

SEQ ID NO: 39102 - protein, 37 aa, Artificial Sequence; identical to SEQ ID NO: 13960
  GFR-binding peptide
  MOD_RES (7)..(7): Xaa is C or S

SEQ ID NO: 39103 - protein, 32 aa, Artificial Sequence; identical to SEQ ID NO: 13962
  GFR-binding peptide
  MOD_RES (1)..(1): Xaa is C or S

SEQ ID NO: 39104 - protein, 38 aa, Artificial Sequence; identical to SEQ ID NO: 15650
  GFR-binding peptide
  MOD_RES (4)..(5): Xaa is C or S
  MOD_RES (19)..(20)..(21)..(22)..(23): Xaa is A or G
  MOD_RES (24)..(25)..(26)..(27): Xaa is A or G or is absent

SEQ ID NO: 39105 - protein, 40 aa, Artificial Sequence; identical to SEQ ID NO: 15651
  GFR-binding peptide
  MOD_RES (7)..(7): Xaa is C or S
  MOD_RES (21)..(22)..(23)..(24)..(25): Xaa is A or G
  MOD_RES (26)..(27)..(28)..(29): Xaa is A or G or is absent

SEQ ID NO: 39106 - protein, 38 aa, Artificial Sequence; identical to SEQ ID NO: 15652
  GFR-binding peptide
  MOD_RES (4)..(5)..(37): Xaa is C or S

SEQ ID NO: 39107 - protein, 38 aa, Artificial Sequence; identical to SEQ ID NO: 8357
  GFR-binding peptide
  MOD_RES (4)..(5)..(36)..(38): Xaa is C or S

SEQ ID NO: 39108 - protein, 41 aa, Artificial Sequence; identical to SEQ ID NO: 13963
  GFR-binding peptide
  MOD_RES (6)..(7)..(40): Xaa is C or S
  MOD_RES (21)..(22)..(23)..(24)..(25): Xaa is A or G
  MOD_RES (26)..(27)..(28)..(29): Xaa is A or G or is absent

SEQ ID NO: 39109 - protein, 34 aa, Artificial Sequence; identical to SEQ ID NO: 15654
  GFR-binding peptide
  MOD_RES (33)..(33): Xaa is C or S
  MOD_RES (14)..(15)..(16)..(17)..(18): Xaa is A or G
  MOD_RES (19)..(20)..(21)..(22): Xaa is A or G or is absent

SEQ ID NO: 39110 - protein, 39 aa, Artificial Sequence; identical to SEQ ID NO: 15655
  GFR-binding peptide
  MOD_RES (5)..(6)..(39): Xaa is C or S
  MOD_RES (20)..(21)..(22)..(23)..(24): Xaa is A or G
  MOD_RES (25)..(26)..(27)..(28): Xaa is A or G or is absent

SEQ ID NO: 39111 - protein, 39 aa, Artificial Sequence; identical to SEQ ID NO: 8359
  GFR-binding peptide
  MOD_RES (4)..(5)..(38): Xaa is C or S
  MOD_RES (19)..(20)..(21)..(22)..(23): Xaa is A or G
  MOD_RES (24)..(25)..(26)..(27): Xaa is A or G or is absent

SEQ ID NO: 39112 - protein, 33 aa, Artificial Sequence; identical to SEQ ID NO: 15657
  GFR-binding peptide
  MOD_RES (1)..(32): Xaa is C or S

SEQ ID NO: 39113 - protein, 38 aa, Artificial Sequence; identical to SEQ ID NO: 15658
  GFR-binding peptide
  MOD_RES (2)..(3)..(37): Xaa is C or S
  MOD_RES (17)..(18)..(19)..(20)..(21): Xaa is A or G
  MOD_RES (22)..(23)..(24)..(25): Xaa is A or G or is absent

SEQ ID NO: 39114 - protein, 34 aa, Artificial Sequence; identical to SEQ ID NO: 13964
  GFR-binding peptide
  MOD_RES (1)..(2): Xaa is C or S
  MOD_RES (16)..(17)..(18)..(19)..(20): Xaa is A or G
  MOD_RES (21)..(22)..(23)..(24): Xaa is A or G or is absent

SEQ ID NO: 39115 - protein, 30 aa, Artificial Sequence; identical to SEQ ID NO: 15660
  GFR-binding peptide

SEQ ID NO: 39116 - protein, 39 aa, Artificial Sequence; identical to SEQ ID NO: 15661
  GFR-binding peptide
  MOD_RES (5)..(6)..(37)..(39): Xaa is C or S

SEQ ID NO: 39117 - protein, 34 aa, Artificial Sequence; identical to SEQ ID NO: 13966
  GFR-binding peptide
  MOD_RES (2)..(34): Xaa is C or S

SEQ ID NO: 39118 - protein, 34 aa, Artificial Sequence; identical to SEQ ID NO: 15662
  GFR-binding peptide
  MOD_RES (34)..(34): Xaa is C or S
  MOD_RES (14)..(15)..(16)..(17)..(18): Xaa is A or G
  MOD_RES (19)..(20)..(21)..(22): Xaa is A or G or is absent

SEQ ID NO: 39119 - protein, 41 aa, Artificial Sequence; identical to SEQ ID NO: 15663
  GFR-binding peptide
  MOD_RES (5)..(6)..(38)..(40): Xaa is C or S

SEQ ID NO: 39120 - protein, 42 aa, Artificial Sequence; identical to SEQ ID NO: 13967
  GFR-binding peptide
  MOD_RES (6)..(7)..(41): Xaa is C or S
  MOD_RES (21)..(22)..(23)..(24)..(25): Xaa is A or G
  MOD_RES (26)..(27)..(28)..(29): Xaa is A or G or is absent

SEQ ID NO: 39121 - protein, 40 aa, Artificial Sequence; identical to SEQ ID NO: 15665
  GFR-binding peptide
  MOD_RES (6)..(7): Xaa is C or S
  MOD_RES (21)..(22)..(23)..(24)..(25): Xaa is A or G
  MOD_RES (26)..(27)..(28)..(29): Xaa is A or G or is absent

SEQ ID NO: 39122 - protein, 42 aa, Artificial Sequence; identical to SEQ ID NO: 13968
  GFR-binding peptide
  MOD_RES (6)..(7)..(41): Xaa is C or S
  MOD_RES (21)..(22)..(23)..(24)..(25): Xaa is A or G
  MOD_RES (26)..(27)..(28)..(29): Xaa is A or G or is absent

SEQ ID NO: 39123 - protein, 36 aa, Artificial Sequence; identical to SEQ ID NO: 13969
  GFR-binding peptide
  MOD_RES (3)..(4)..(36): Xaa is C or S

SEQ ID NO: 39124 - protein, 33 aa, Artificial Sequence; identical to SEQ ID NO: 13970
  GFR-binding peptide
  MOD_RES (2)..(3): Xaa is C or S

SEQ ID NO: 39125 - protein, 36 aa, Artificial Sequence; identical to SEQ ID NO: 15666
  GFR-binding peptide
  MOD_RES (2)..(3): Xaa is C or S
  MOD_RES (17)..(18)..(19)..(20)..(21): Xaa is A or G
  MOD_RES (22)..(23)..(24)..(25): Xaa is A or G or is absent

SEQ ID NO: 39126 - protein, 38 aa, Artificial Sequence; identical to SEQ ID NO: 8365
  GFR-binding peptide
  MOD_RES (4)..(5)..(36)..(38): Xaa is C or S

SEQ ID NO: 39127 - protein, 36 aa, Artificial Sequence; identical to SEQ ID NO: 15668
  GFR-binding peptide
  MOD_RES (1)..(2)..(34)..(36): Xaa is C or S

SEQ ID NO: 39128 - protein, 36 aa, Artificial Sequence; identical to SEQ ID NO: 15669
  GFR-binding peptide
  MOD_RES (5)..(6): Xaa is C or S

SEQ ID NO: 39129 - protein, 35 aa, Artificial Sequence; identical to SEQ ID NO: 8368
  GFR-binding peptide
  MOD_RES (2)..(3): Xaa is C or S
  MOD_RES (17)..(18)..(19)..(20)..(21): Xaa is A or G
  MOD_RES (22)..(23)..(24)..(25): Xaa is A or G or is absent

SEQ ID NO: 39130 - protein, 37 aa, Artificial Sequence; identical to SEQ ID NO: 13971
  GFR-binding peptide
  MOD_RES (5)..(6)..(37): Xaa is C or S

SEQ ID NO: 39131 - protein, 36 aa, Artificial Sequence; identical to SEQ ID NO: 15671
  GFR-binding peptide
  MOD_RES (5)..(6): Xaa is C or S

SEQ ID NO: 39132 - protein, 37 aa, Artificial Sequence; identical to SEQ ID NO: 15672
  GFR-binding peptide
  MOD_RES (34)..(36): Xaa is C or S
  MOD_RES (14)..(15)..(16)..(17)..(18): Xaa is A or G
  MOD_RES (19)..(20)..(21)..(22): Xaa is A or G or is absent

SEQ ID NO: 39133 - protein, 38 aa, Artificial Sequence; identical to SEQ ID NO: 13976
  GFR-binding peptide
  MOD_RES (1)..(2)..(36)..(38): Xaa is C or S
  MOD_RES (16)..(17)..(18)..(19)..(20): Xaa is A or G
  MOD_RES (21)..(22)..(23)..(24): Xaa is A or G or is absent

SEQ ID NO: 39134 - protein, 34 aa, Artificial Sequence; identical to SEQ ID NO: 15673
  GFR-binding peptide
  MOD_RES (1)..(33): Xaa is C or S

SEQ ID NO: 39135 - protein, 34 aa, Artificial Sequence; identical to SEQ ID NO: 8374
  GFR-binding peptide
  MOD_RES (1)..(1): Xaa is C or S
  MOD_RES (15)..(16)..(17)..(18)..(19): Xaa is A or G
  MOD_RES (20)..(21)..(22)..(23): Xaa is A or G or is absent

SEQ ID NO: 39136 - protein, 32 aa, Artificial Sequence; identical to SEQ ID NO: 13978
  GFR-binding peptide
  MOD_RES (14)..(15)..(16)..(17)..(18): Xaa is A or G
  MOD_RES (19)..(20)..(21)..(22): Xaa is A or G or is absent

SEQ ID NO: 39137 - protein, 34 aa, Artificial Sequence; identical to SEQ ID NO: 15675
  GFR-binding peptide
  MOD_RES (1)..(33): Xaa is C or S

SEQ ID NO: 39138 - protein, 36 aa, Artificial Sequence; identical to SEQ ID NO: 15676
  GFR-binding peptide
  MOD_RES (4)..(5)..(36): Xaa is C or S

SEQ ID NO: 39139 - protein, 31 aa, Artificial Sequence; identical to SEQ ID NO: 8378
  GFR-binding peptide

SEQ ID NO: 39140 - protein, 41 aa, Artificial Sequence; identical to SEQ ID NO: 15678
  GFR-binding peptide
  MOD_RES (6)..(7)..(41): Xaa is C or S
  MOD_RES (21)..(22)..(23)..(24)..(25): Xaa is A or G
  MOD_RES (26)..(27)..(28)..(29): Xaa is A or G or is absent

SEQ ID NO: 39141 - protein, 40 aa, Artificial Sequence; identical to SEQ ID NO: 15680
  GFR-binding peptide
  MOD_RES (2)..(3)..(37)..(39): Xaa is C or S
  MOD_RES (17)..(18)..(19)..(20)..(21): Xaa is A or G
  MOD_RES (22)..(23)..(24)..(25): Xaa is A or G or is absent

SEQ ID NO: 39142 - protein, 35 aa, Artificial Sequence; identical to SEQ ID NO: 15681
  GFR-binding peptide
  MOD_RES (1)..(32)..(34): Xaa is C or S

SEQ ID NO: 39143 - protein, 39 aa, Artificial Sequence; identical to SEQ ID NO: 15683
  GFR-binding peptide
  MOD_RES (3)..(4)..(37)..(39): Xaa is C or S
  MOD_RES (18)..(19)..(20)..(21)..(22): Xaa is A or G
  MOD_RES (23)..(24)..(25)..(26): Xaa is A or G or is absent

SEQ ID NO: 39144 - protein, 34 aa, Artificial Sequence; identical to SEQ ID NO: 13979
  GFR-binding peptide
  MOD_RES (1)..(1): Xaa is C or S
  MOD_RES (15)..(16)..(17)..(18)..(19): Xaa is A or G
  MOD_RES (20)..(21)..(22)..(23): Xaa is A or G or is absent

SEQ ID NO: 39145 - protein, 31 aa, Artificial Sequence; identical to SEQ ID NO: 6616
  GFR-binding peptide
  MOD_RES (31)..(31): Xaa is C or S

SEQ ID NO: 39146 - protein, 38 aa, Artificial Sequence; identical to SEQ ID NO: 8383
  GFR-binding peptide
  MOD_RES (5)..(6): Xaa is C or S
  MOD_RES (20)..(21)..(22)..(23)..(24): Xaa is A or G
  MOD_RES (25)..(26)..(27)..(28): Xaa is A or G or is absent

SEQ ID NO: 39147 - protein, 40 aa, Artificial Sequence; identical to SEQ ID NO: 13981
  GFR-binding peptide
  MOD_RES (7)..(39): Xaa is C or S

SEQ ID NO: 39148 - protein, 40 aa, Artificial Sequence; identical to SEQ ID NO: 13983
  GFR-binding peptide
  MOD_RES (5)..(6)..(40): Xaa is C or S
  MOD_RES (20)..(21)..(22)..(23)..(24): Xaa is A or G
  MOD_RES (25)..(26)..(27)..(28): Xaa is A or G or is absent

SEQ ID NO: 39149 - protein, 31 aa, Artificial Sequence; identical to SEQ ID NO: 13984
  GFR-binding peptide

SEQ ID NO: 39150 - protein, 35 aa, Artificial Sequence; identical to SEQ ID NO: 13985
  GFR-binding peptide
  MOD_RES (34)..(34): Xaa is C or S
  MOD_RES (14)..(15)..(16)..(17)..(18): Xaa is A or G
  MOD_RES (19)..(20)..(21)..(22): Xaa is A or G or is absent

SEQ ID NO: 39151 - protein, 37 aa, Artificial Sequence; identical to SEQ ID NO: 13986
  GFR-binding peptide
  MOD_RES (3)..(4): Xaa is C or S
  MOD_RES (18)..(19)..(20)..(21)..(22): Xaa is A or G
  MOD_RES (23)..(24)..(25)..(26): Xaa is A or G or is absent

SEQ ID NO: 39152 - protein, 37 aa, Artificial Sequence; identical to SEQ ID NO: 13987
  GFR-binding peptide
  MOD_RES (3)..(4): Xaa is C or S
  MOD_RES (18)..(19)..(20)..(21)..(22): Xaa is A or G
  MOD_RES (23)..(24)..(25)..(26): Xaa is A or G or is absent

SEQ ID NO: 39153 - protein, 34 aa, Artificial Sequence; identical to SEQ ID NO: 15685
  GFR-binding peptide
  MOD_RES (3)..(4): Xaa is C or S

SEQ ID NO: 39154 - protein, 38 aa, Artificial Sequence; identical to SEQ ID NO: 13988
  GFR-binding peptide
  MOD_RES (1)..(35)..(37): Xaa is C or S
  MOD_RES (15)..(16)..(17)..(18)..(19): Xaa is A or G
  MOD_RES (20)..(21)..(22)..(23): Xaa is A or G or is absent

SEQ ID NO: 39155 - protein, 37 aa, Artificial Sequence; identical to SEQ ID NO: 15686
  GFR-binding peptide
  MOD_RES (4)..(5): Xaa is C or S
  MOD_RES (19)..(20)..(21)..(22)..(23): Xaa is A or G
  MOD_RES (24)..(25)..(26)..(27): Xaa is A or G or is absent

SEQ ID NO: 39156 - protein, 41 aa, Artificial Sequence; identical to SEQ ID NO: 6621
  GFR-binding peptide
  MOD_RES (4)..(5)..(38)..(40): Xaa is C or S
  MOD_RES (19)..(20)..(21)..(22)..(23): Xaa is A or G
  MOD_RES (24)..(25)..(26)..(27): Xaa is A or G or is absent

SEQ ID NO: 39157 - protein, 38 aa, Artificial Sequence; identical to SEQ ID NO: 15688
  GFR-binding peptide
  MOD_RES (3)..(4)..(37): Xaa is C or S
  MOD_RES (18)..(19)..(20)..(21)..(22): Xaa is A or G
  MOD_RES (23)..(24)..(25)..(26): Xaa is A or G or is absent

SEQ ID NO: 39158 - protein, 36 aa, Artificial Sequence; identical to SEQ ID NO: 13991
  GFR-binding peptide
  MOD_RES (1)..(2)..(34)..(36): Xaa is C or S

SEQ ID NO: 39159 - protein, 39 aa, Artificial Sequence; identical to SEQ ID NO: 13992
  GFR-binding peptide
  MOD_RES (5)..(6): Xaa is C or S
  MOD_RES (20)..(21)..(22)..(23)..(24): Xaa is A or G
  MOD_RES (25)..(26)..(27)..(28): Xaa is A or G or is absent

SEQ ID NO: 39160 - protein, 34 aa, Artificial Sequence; identical to SEQ ID NO: 13993
  GFR-binding peptide
  MOD_RES (1)..(2): Xaa is C or S
  MOD_RES (16)..(17)..(18)..(19)..(20): Xaa is A or G
  MOD_RES (21)..(22)..(23)..(24): Xaa is A or G or is absent

SEQ ID NO: 39161 - protein, 39 aa, Artificial Sequence; identical to SEQ ID NO: 15690
  GFR-binding peptide
  MOD_RES (5)..(6)..(38): Xaa is C or S

SEQ ID NO: 39162 - protein, 38 aa, Artificial Sequence; identical to SEQ ID NO: 13994
  GFR-binding peptide
  MOD_RES (4)..(5)..(38): Xaa is C or S
  MOD_RES (19)..(20)..(21)..(22)..(23): Xaa is A or G
  MOD_RES (24)..(25)..(26)..(27): Xaa is A or G or is absent

SEQ ID NO: 39163 - protein, 40 aa, Artificial Sequence; identical to SEQ ID NO: 15692
  GFR-binding peptide
  MOD_RES (6)..(40): Xaa is C or S
  MOD_RES (20)..(21)..(22)..(23)..(24): Xaa is A or G
  MOD_RES (25)..(26)..(27)..(28): Xaa is A or G or is absent

SEQ ID NO: 39164 - protein, 42 aa, Artificial Sequence; identical to SEQ ID NO: 13995
  GFR-binding peptide
  MOD_RES (5)..(6)..(40)..(42): Xaa is C or S
  MOD_RES (20)..(21)..(22)..(23)..(24): Xaa is A or G
  MOD_RES (25)..(26)..(27)..(28): Xaa is A or G or is absent

SEQ ID NO: 39165 - protein, 30 aa, Artificial Sequence; identical to SEQ ID NO: 13996
  GFR-binding peptide

SEQ ID NO: 39166 - protein, 34 aa, Artificial Sequence; identical to SEQ ID NO: 15693
  GFR-binding peptide
  MOD_RES (1)..(2)..(33): Xaa is C or S

SEQ ID NO: 39167 - protein, 36 aa, Artificial Sequence; identical to SEQ ID NO: 8397
  GFR-binding peptide
  MOD_RES (3)..(4)..(35): Xaa is C or S

SEQ ID NO: 39168 - protein, 32 aa, Artificial Sequence; identical to SEQ ID NO: 8400
  GFR-binding peptide
  MOD_RES (1)..(32): Xaa is C or S

SEQ ID NO: 39169 - protein, 39 aa, Artificial Sequence; identical to SEQ ID NO: 15696
  GFR-binding peptide
  MOD_RES (5)..(6): Xaa is C or S
  MOD_RES (20)..(21)..(22)..(23)..(24): Xaa is A or G
  MOD_RES (25)..(26)..(27)..(28): Xaa is A or G or is absent

SEQ ID NO: 39170 - protein, 36 aa, Artificial Sequence; identical to SEQ ID NO: 8401
  GFR-binding peptide
  MOD_RES (1)..(2)..(35): Xaa is C or S
  MOD_RES (16)..(17)..(18)..(19)..(20): Xaa is A or G
  MOD_RES (21)..(22)..(23)..(24): Xaa is A or G or is absent

SEQ ID NO: 39171 - protein, 37 aa, Artificial Sequence; identical to SEQ ID NO: 13997
  GFR-binding peptide
  MOD_RES (6)..(7): Xaa is C or S

SEQ ID NO: 39172 - protein, 34 aa, Artificial Sequence; identical to SEQ ID NO: 15698
  GFR-binding peptide
  MOD_RES (3)..(4): Xaa is C or S

SEQ ID NO: 39173 - protein, 33 aa, Artificial Sequence; identical to SEQ ID NO: 15699
  GFR-binding peptide
  MOD_RES (1)..(2): Xaa is C or S

SEQ ID NO: 39174 - protein, 39 aa, Artificial Sequence; identical to SEQ ID NO: 15700
  GFR-binding peptide
  MOD_RES (4)..(5)..(38): Xaa is C or S
  MOD_RES (19)..(20)..(21)..(22)..(23): Xaa is A or G
  MOD_RES (24)..(25)..(26)..(27): Xaa is A or G or is absent

SEQ ID NO: 39175 - protein, 37 aa, Artificial Sequence; identical to SEQ ID NO: 15701
  GFR-binding peptide
  MOD_RES (1)..(35)..(37): Xaa is C or S
  MOD_RES (15)..(16)..(17)..(18)..(19): Xaa is A or G
  MOD_RES (20)..(21)..(22)..(23): Xaa is A or G or is absent

SEQ ID NO: 39176 - protein, 36 aa, Artificial Sequence; identical to SEQ ID NO: 13998
  GFR-binding peptide
  MOD_RES (1)..(33)..(35): Xaa is C or S

SEQ ID NO: 39177 - protein, 40 aa, Artificial Sequence; identical to SEQ ID NO: 13999
  GFR-binding peptide
  MOD_RES (6)..(7)..(39): Xaa is C or S

SEQ ID NO: 39178 - protein, 43 aa, Artificial Sequence; identical to SEQ ID NO: 14000
  GFR-binding peptide
  MOD_RES (6)..(7)..(40)..(42): Xaa is C or S
  MOD_RES (21)..(22)..(23)..(24)..(25): Xaa is A or G
  MOD_RES (26)..(27)..(28)..(29): Xaa is A or G or is absent

SEQ ID NO: 39179 - protein, 37 aa, Artificial Sequence; identical to SEQ ID NO: 15702
  GFR-binding peptide
  MOD_RES (1)..(35)..(37): Xaa is C or S
  MOD_RES (15)..(16)..(17)..(18)..(19): Xaa is A or G
  MOD_RES (20)..(21)..(22)..(23): Xaa is A or G or is absent

SEQ ID NO: 39180 - protein, 35 aa, Artificial Sequence; identical to SEQ ID NO: 14002
  GFR-binding peptide
  MOD_RES (1)..(2)..(33)..(35): Xaa is C or S

SEQ ID NO: 39181 - protein, 37 aa, Artificial Sequence; identical to SEQ ID NO: 6632
  GFR-binding peptide
  MOD_RES (2)..(3)..(37): Xaa is C or S
  MOD_RES (17)..(18)..(19)..(20)..(21): Xaa is A or G
  MOD_RES (22)..(23)..(24)..(25): Xaa is A or G or is absent

SEQ ID NO: 39182 - protein, 33 aa, Artificial Sequence; identical to SEQ ID NO: 15704
  GFR-binding peptide
  MOD_RES (1)..(32): Xaa is C or S

SEQ ID NO: 39183 - protein, 36 aa, Artificial Sequence; identical to SEQ ID NO: 15705
  GFR-binding peptide
  MOD_RES (34)..(36): Xaa is C or S
  MOD_RES (14)..(15)..(16)..(17)..(18): Xaa is A or G
  MOD_RES (19)..(20)..(21)..(22): Xaa is A or G or is absent

SEQ ID NO: 39184 - protein, 38 aa, Artificial Sequence; identical to SEQ ID NO: 15706
  GFR-binding peptide
  MOD_RES (3)..(35)..(37): Xaa is C or S

SEQ ID NO: 39185 - protein, 35 aa, Artificial Sequence; identical to SEQ ID NO: 15707
  GFR-binding peptide
  MOD_RES (4)..(4): Xaa is C or S

SEQ ID NO: 39186 - protein, 41 aa, Artificial Sequence; identical to SEQ ID NO: 14004
  GFR-binding peptide
  MOD_RES (5)..(6)..(39)..(41): Xaa is C or S
  MOD_RES (20)..(21)..(22)..(23)..(24): Xaa is A or G
  MOD_RES (25)..(26)..(27)..(28): Xaa is A or G or is absent

SEQ ID NO: 39187 - protein, 36 aa, Artificial Sequence; identical to SEQ ID NO: 14005
  GFR-binding peptide
  MOD_RES (5)..(5): Xaa is C or S

SEQ ID NO: 39188 - protein, 35 aa, Artificial Sequence; identical to SEQ ID NO: 15709
  GFR-binding peptide
  MOD_RES (1)..(33)..(35): Xaa is C or S

SEQ ID NO: 39189 - protein, 40 aa, Artificial Sequence; identical to SEQ ID NO: 6635
  GFR-binding peptide
  MOD_RES (6)..(7)..(40): Xaa is C or S
  MOD_RES (21)..(22)..(23)..(24)..(25): Xaa is A or G
  MOD_RES (26)..(27)..(28)..(29): Xaa is A or G or is absent

SEQ ID NO: 39190 - protein, 35 aa, Artificial Sequence; identical to SEQ ID NO: 14007
  GFR-binding peptide
  MOD_RES (1)..(2)..(33)..(35): Xaa is C or S

SEQ ID NO: 39191 - protein, 36 aa, Artificial Sequence; identical to SEQ ID NO: 14008
  GFR-binding peptide
  MOD_RES (3)..(4): Xaa is C or S
  MOD_RES (18)..(19)..(20)..(21)..(22): Xaa is A or G
  MOD_RES (23)..(24)..(25)..(26): Xaa is A or G or is absent

SEQ ID NO: 39192 - protein, 34 aa, Artificial Sequence; identical to SEQ ID NO: 8411
  GFR-binding peptide
  MOD_RES (1)..(2)..(33): Xaa is C or S

SEQ ID NO: 39193 - protein, 38 aa, Artificial Sequence; identical to SEQ ID NO: 15713
  GFR-binding peptide
  MOD_RES (5)..(6)..(37): Xaa is C or S

SEQ ID NO: 39194 - protein, 37 aa, Artificial Sequence; identical to SEQ ID NO: 15715
  GFR-binding peptide
  MOD_RES (2)..(3)..(36): Xaa is C or S
  MOD_RES (17)..(18)..(19)..(20)..(21): Xaa is A or G
  MOD_RES (22)..(23)..(24)..(25): Xaa is A or G or is absent

SEQ ID NO: 39195 - protein, 34 aa, Artificial Sequence; identical to SEQ ID NO: 15717
  GFR-binding peptide
  MOD_RES (1)..(2): Xaa is C or S
  MOD_RES (16)..(17)..(18)..(19)..(20): Xaa is A or G
  MOD_RES (21)..(22)..(23)..(24): Xaa is A or G or is absent

SEQ ID NO: 39196 - protein, 37 aa, Artificial Sequence; identical to SEQ ID NO: 6645
  GFR-binding peptide
  MOD_RES (3)..(4)..(37): Xaa is C or S
  MOD_RES (18)..(19)..(20)..(21)..(22): Xaa is A or G
  MOD_RES (23)..(24)..(25)..(26): Xaa is A or G or is absent

SEQ ID NO: 39197 - protein, 39 aa, Artificial Sequence; identical to SEQ ID NO: 14011
  GFR-binding peptide
  MOD_RES (1)..(2)..(36)..(38): Xaa is C or S
  MOD_RES (16)..(17)..(18)..(19)..(20): Xaa is A or G
  MOD_RES (21)..(22)..(23)..(24): Xaa is A or G or is absent

SEQ ID NO: 39198 - protein, 36 aa, Artificial Sequence; identical to SEQ ID NO: 8417
  GFR-binding peptide
  MOD_RES (1)..(2)..(36): Xaa is C or S
  MOD_RES (16)..(17)..(18)..(19)..(20): Xaa is A or G
  MOD_RES (21)..(22)..(23)..(24): Xaa is A or G or is absent

SEQ ID NO: 39199 - protein, 38 aa, Artificial Sequence; identical to SEQ ID NO: 8420
  GFR-binding peptide
  MOD_RES (3)..(4)..(35)..(37): Xaa is C or S

SEQ ID NO: 39200 - protein, 41 aa, Artificial Sequence; identical to SEQ ID NO: 14012
  GFR-binding peptide
  MOD_RES (5)..(6)..(39)..(41): Xaa is C or S
  MOD_RES (20)..(21)..(22)..(23)..(24): Xaa is A or G
  MOD_RES (25)..(26)..(27)..(28): Xaa is A or G or is absent

SEQ ID NO: 39201 - protein, 37 aa, Artificial Sequence; identical to SEQ ID NO: 15721
  GFR-binding peptide
  MOD_RES (2)..(3)..(35)..(37): Xaa is C or S

SEQ ID NO: 39202 - protein, 40 aa, Artificial Sequence; identical to SEQ ID NO: 14013
  GFR-binding peptide
  MOD_RES (4)..(5)..(39): Xaa is C or S
  MOD_RES (19)..(20)..(21)..(22)..(23): Xaa is A or G
  MOD_RES (24)..(25)..(26)..(27): Xaa is A or G or is absent

SEQ ID NO: 39203 - protein, 43 aa, Artificial Sequence; identical to SEQ ID NO: 15722
  GFR-binding peptide
  MOD_RES (7)..(41)..(43): Xaa is C or S
  MOD_RES (21)..(22)..(23)..(24)..(25): Xaa is A or G
  MOD_RES (26)..(27)..(28)..(29): Xaa is A or G or is absent

SEQ ID NO: 39204 - protein, 36 aa, Artificial Sequence; identical to SEQ ID NO: 15724
  GFR-binding peptide
  MOD_RES (3)..(4): Xaa is C or S
  MOD_RES (18)..(19)..(20)..(21)..(22): Xaa is A or G
  MOD_RES (23)..(24)..(25)..(26): Xaa is A or G or is absent

SEQ ID NO: 39205 - protein, 35 aa, Artificial Sequence; identical to SEQ ID NO: 6652
  GFR-binding peptide
  MOD_RES (2)..(3): Xaa is C or S
  MOD_RES (17)..(18)..(19)..(20)..(21): Xaa is A or G
  MOD_RES (22)..(23)..(24)..(25): Xaa is A or G or is absent

SEQ ID NO: 39206 - protein, 41 aa, Artificial Sequence; identical to SEQ ID NO: 15725
  GFR-binding peptide
  MOD_RES (5)..(6)..(40): Xaa is C or S
  MOD_RES (20)..(21)..(22)..(23)..(24): Xaa is A or G
  MOD_RES (25)..(26)..(27)..(28): Xaa is A or G or is absent

SEQ ID NO: 39207 - protein, 36 aa, Artificial Sequence; identical to SEQ ID NO: 8428
  GFR-binding peptide
  MOD_RES (1)..(2)..(34)..(36): Xaa is C or S

SEQ ID NO: 39208 - protein, 38 aa, Artificial Sequence; identical to SEQ ID NO: 15727
  GFR-binding peptide
  MOD_RES (2)..(3)..(37): Xaa is C or S
  MOD_RES (17)..(18)..(19)..(20)..(21): Xaa is A or G
  MOD_RES (22)..(23)..(24)..(25): Xaa is A or G or is absent

SEQ ID NO: 39209 - protein, 35 aa, Artificial Sequence; identical to SEQ ID NO: 15728
  GFR-binding peptide
  MOD_RES (1)..(35): Xaa is C or S
  MOD_RES (15)..(16)..(17)..(18)..(19): Xaa is A or G
  MOD_RES (20)..(21)..(22)..(23): Xaa is A or G or is absent

SEQ ID NO: 39210 - protein, 36 aa, Artificial Sequence; identical to SEQ ID NO: 6655
  GFR-binding peptide
  MOD_RES (4)..(5): Xaa is C or S

SEQ ID NO: 39211 - protein, 41 aa, Artificial Sequence; identical to SEQ ID NO: 8429
  GFR-binding peptide
  MOD_RES (4)..(5)..(39)..(41): Xaa is C or S
  MOD_RES (19)..(20)..(21)..(22)..(23): Xaa is A or G
  MOD_RES (24)..(25)..(26)..(27): Xaa is A or G or is absent

SEQ ID NO: 39212 - protein, 37 aa, Artificial Sequence; identical to SEQ ID NO: 8432
  GFR-binding peptide
  MOD_RES (5)..(6)..(37): Xaa is C or S

SEQ ID NO: 39213 - protein, 37 aa, Artificial Sequence; identical to SEQ ID NO: 15732
  GFR-binding peptide
  MOD_RES (5)..(6)..(37): Xaa is C or S

SEQ ID NO: 39214 - protein, 37 aa, Artificial Sequence; identical to SEQ ID NO: 15733
  GFR-binding peptide
  MOD_RES (6)..(7): Xaa is C or S

SEQ ID NO: 39215 - protein, 41 aa, Artificial Sequence; identical to SEQ ID NO: 14019
  GFR-binding peptide
  MOD_RES (4)..(38)..(40): Xaa is C or S
  MOD_RES (18)..(19)..(20)..(21)..(22): Xaa is A or G
  MOD_RES (23)..(24)..(25)..(26): Xaa is A or G or is absent

SEQ ID NO: 39216 - protein, 35 aa, Artificial Sequence; identical to SEQ ID NO: 14020
  GFR-binding peptide
  MOD_RES (1)..(2)..(33)..(35): Xaa is C or S

SEQ ID NO: 39217 - protein, 37 aa, Artificial Sequence; identical to SEQ ID NO: 15735
  GFR-binding peptide
  MOD_RES (4)..(5): Xaa is C or S
  MOD_RES (19)..(20)..(21)..(22)..(23): Xaa is A or G
  MOD_RES (24)..(25)..(26)..(27): Xaa is A or G or is absent

SEQ ID NO: 39218 - protein, 38 aa, Artificial Sequence; identical to SEQ ID NO: 15736
  GFR-binding peptide
  MOD_RES (3)..(4)..(36)..(38): Xaa is C or S

SEQ ID NO: 39219 - protein, 37 aa, Artificial Sequence; identical to SEQ ID NO: 14021
  GFR-binding peptide
  MOD_RES (2)..(3)..(35)..(37): Xaa is C or S

SEQ ID NO: 39220 - protein, 36 aa, Artificial Sequence; identical to SEQ ID NO: 14022
  GFR-binding peptide
  MOD_RES (2)..(3): Xaa is C or S
  MOD_RES (17)..(18)..(19)..(20)..(21): Xaa is A or G
  MOD_RES (22)..(23)..(24)..(25): Xaa is A or G or is absent

SEQ ID NO: 39221 - protein, 38 aa, Artificial Sequence; identical to SEQ ID NO: 14023
  GFR-binding peptide
  MOD_RES (1)..(2)..(36)..(38): Xaa is C or S
  MOD_RES (16)..(17)..(18)..(19)..(20): Xaa is A or G
  MOD_RES (21)..(22)..(23)..(24): Xaa is A or G or is absent

SEQ ID NO: 39222 - protein, 38 aa, Artificial Sequence; identical to SEQ ID NO: 14024
  GFR-binding peptide
  MOD_RES (4)..(5): Xaa is C or S
  MOD_RES (19)..(20)..(21)..(22)..(23): Xaa is A or G
  MOD_RES (24)..(25)..(26)..(27): Xaa is A or G or is absent

SEQ ID NO: 39223 - protein, 38 aa, Artificial Sequence; identical to SEQ ID NO: 8442
  GFR-binding peptide
  MOD_RES (1)..(2)..(35)..(37): Xaa is C or S
  MOD_RES (16)..(17)..(18)..(19)..(20): Xaa is A or G
  MOD_RES (21)..(22)..(23)..(24): Xaa is A or G or is absent

SEQ ID NO: 39224 - protein, 35 aa, Artificial Sequence; identical to SEQ ID NO: 15739
  GFR-binding peptide
  MOD_RES (2)..(2): Xaa is C or S
  MOD_RES (16)..(17)..(18)..(19)..(20): Xaa is A or G
  MOD_RES (21)..(22)..(23)..(24): Xaa is A or G or is absent

SEQ ID NO: 39225 - protein, 40 aa, Artificial Sequence; identical to SEQ ID NO: 15740
  GFR-binding peptide
  MOD_RES (6)..(7): Xaa is C or S
  MOD_RES (21)..(22)..(23)..(24)..(25): Xaa is A or G
  MOD_RES (26)..(27)..(28)..(29): Xaa is A or G or is absent

SEQ ID NO: 39226 - protein, 41 aa, Artificial Sequence; identical to SEQ ID NO: 15741
  GFR-binding peptide
  MOD_RES (4)..(5)..(39)..(41): Xaa is C or S
  MOD_RES (19)..(20)..(21)..(22)..(23): Xaa is A or G
  MOD_RES (24)..(25)..(26)..(27): Xaa is A or G or is absent

SEQ ID NO: 39227 - protein, 38 aa, Artificial Sequence; identical to SEQ ID NO: 14025
  GFR-binding peptide
  MOD_RES (3)..(37): Xaa is C or S
  MOD_RES (17)..(18)..(19)..(20)..(21): Xaa is A or G
  MOD_RES (22)..(23)..(24)..(25): Xaa is A or G or is absent

SEQ ID NO: 39228 - protein, 31 aa, Artificial Sequence; identical to SEQ ID NO: 14026
  GFR-binding peptide

SEQ ID NO: 39229 - protein, 39 aa, Artificial Sequence; identical to SEQ ID NO: 14027
  GFR-binding peptide
  MOD_RES (5)..(37)..(39): Xaa is C or S

SEQ ID NO: 39230 - protein, 32 aa, Artificial Sequence; identical to SEQ ID NO: 8444
  GFR-binding peptide
  MOD_RES (1)..(2): Xaa is C or S

SEQ ID NO: 39231 - protein, 37 aa, Artificial Sequence; identical to SEQ ID NO: 14028
  GFR-binding peptide
  MOD_RES (5)..(37): Xaa is C or S

SEQ ID NO: 39232 - protein, 40 aa, Artificial Sequence; identical to SEQ ID NO: 6669
  GFR-binding peptide
  MOD_RES (5)..(6)..(40): Xaa is C or S
  MOD_RES (20)..(21)..(22)..(23)..(24): Xaa is A or G
  MOD_RES (25)..(26)..(27)..(28): Xaa is A or G or is absent

SEQ ID NO: 39233 - protein, 36 aa, Artificial Sequence; identical to SEQ ID NO: 15743
  GFR-binding peptide
  MOD_RES (4)..(5): Xaa is C or S

SEQ ID NO: 39234 - protein, 33 aa, Artificial Sequence; identical to SEQ ID NO: 14030
  GFR-binding peptide
  MOD_RES (2)..(3): Xaa is C or S

SEQ ID NO: 39235 - protein, 34 aa, Artificial Sequence; identical to SEQ ID NO: 8446
  GFR-binding peptide
  MOD_RES (1)..(1): Xaa is C or S
  MOD_RES (15)..(16)..(17)..(18)..(19): Xaa is A or G
  MOD_RES (20)..(21)..(22)..(23): Xaa is A or G or is absent

SEQ ID NO: 39236 - protein, 35 aa, Artificial Sequence; identical to SEQ ID NO: 6670
  GFR-binding peptide
  MOD_RES (3)..(4): Xaa is C or S

SEQ ID NO: 39237 - protein, 38 aa, Artificial Sequence; identical to SEQ ID NO: 15745
  GFR-binding peptide
  MOD_RES (3)..(4)..(38): Xaa is C or S
  MOD_RES (18)..(19)..(20)..(21)..(22): Xaa is A or G
  MOD_RES (23)..(24)..(25)..(26): Xaa is A or G or is absent

SEQ ID NO: 39238 - protein, 36 aa, Artificial Sequence; identical to SEQ ID NO: 6671
  GFR-binding peptide
  MOD_RES (1)..(35): Xaa is C or S
  MOD_RES (15)..(16)..(17)..(18)..(19): Xaa is A or G
  MOD_RES (20)..(21)..(22)..(23): Xaa is A or G or is absent

SEQ ID NO: 39239 - protein, 33 aa, Artificial Sequence; identical to SEQ ID NO: 6672
  GFR-binding peptide
  MOD_RES (33)..(33): Xaa is C or S
  MOD_RES (14)..(15)..(16)..(17)..(18): Xaa is A or G
  MOD_RES (19)..(20)..(21)..(22): Xaa is A or G or is absent

SEQ ID NO: 39240 - protein, 36 aa, Artificial Sequence; identical to SEQ ID NO: 15746
  GFR-binding peptide
  MOD_RES (3)..(4)..(36): Xaa is C or S

SEQ ID NO: 39241 - protein, 38 aa, Artificial Sequence; identical to SEQ ID NO: 15747
  GFR-binding peptide
  MOD_RES (2)..(3)..(37): Xaa is C or S
  MOD_RES (17)..(18)..(19)..(20)..(21): Xaa is A or G
  MOD_RES (22)..(23)..(24)..(25): Xaa is A or G or is absent

SEQ ID NO: 39242 - protein, 38 aa, Artificial Sequence; identical to SEQ ID NO: 15748
  GFR-binding peptide
  MOD_RES (5)..(6)..(38): Xaa is C or S

SEQ ID NO: 39243 - protein, 32 aa, Artificial Sequence; identical to SEQ ID NO: 14036
  GFR-binding peptide
  MOD_RES (1)..(32): Xaa is C or S

SEQ ID NO: 39244 - protein, 34 aa, Artificial Sequence; identical to SEQ ID NO: 14037
  GFR-binding peptide
  MOD_RES (1)..(32)..(34): Xaa is C or S

SEQ ID NO: 39245 - protein, 39 aa, Artificial Sequence; identical to SEQ ID NO: 15749
  GFR-binding peptide
  MOD_RES (3)..(4)..(38): Xaa is C or S
  MOD_RES (18)..(19)..(20)..(21)..(22): Xaa is A or G
  MOD_RES (23)..(24)..(25)..(26): Xaa is A or G or is absent

SEQ ID NO: 39246 - protein, 39 aa, Artificial Sequence; identical to SEQ ID NO: 15750
  GFR-binding peptide
  MOD_RES (5)..(6): Xaa is C or S
  MOD_RES (20)..(21)..(22)..(23)..(24): Xaa is A or G
  MOD_RES (25)..(26)..(27)..(28): Xaa is A or G or is absent

SEQ ID NO: 39247 - protein, 41 aa, Artificial Sequence; identical to SEQ ID NO: 15751
  GFR-binding peptide
  MOD_RES (6)..(7)..(40): Xaa is C or S
  MOD_RES (21)..(22)..(23)..(24)..(25): Xaa is A or G
  MOD_RES (26)..(27)..(28)..(29): Xaa is A or G or is absent

SEQ ID NO: 39248 - protein, 35 aa, Artificial Sequence; identical to SEQ ID NO: 15752
  GFR-binding peptide
  MOD_RES (1)..(2)..(35): Xaa is C or S
  MOD_RES (16)..(17)..(18)..(19)..(20): Xaa is A or G
  MOD_RES (21)..(22)..(23)..(24): Xaa is A or G or is absent

SEQ ID NO: 39249 - protein, 32 aa, Artificial Sequence; identical to SEQ ID NO: 14038
  GFR-binding peptide
  MOD_RES (2)..(2): Xaa is C or S

SEQ ID NO: 39250 - protein, 37 aa, Artificial Sequence; identical to SEQ ID NO: 14039
  GFR-binding peptide
  MOD_RES (1)..(2)..(36): Xaa is C or S
  MOD_RES (16)..(17)..(18)..(19)..(20): Xaa is A or G
  MOD_RES (21)..(22)..(23)..(24): Xaa is A or G or is absent

SEQ ID NO: 39251 - protein, 34 aa, Artificial Sequence; identical to SEQ ID NO: 14040
  GFR-binding peptide
  MOD_RES (1)..(32)..(34): Xaa is C or S

SEQ ID NO: 39252 - protein, 32 aa, Artificial Sequence; identical to SEQ ID NO: 15754
  GFR-binding peptide
  MOD_RES (32)..(32): Xaa is C or S

SEQ ID NO: 39253 - protein, 35 aa, Artificial Sequence; identical to SEQ ID NO: 14042
  GFR-binding peptide
  MOD_RES (1)..(2)..(35): Xaa is C or S
  MOD_RES (16)..(17)..(18)..(19)..(20): Xaa is A or G
  MOD_RES (21)..(22)..(23)..(24): Xaa is A or G or is absent

SEQ ID NO: 39254 - protein, 33 aa, Artificial Sequence; identical to SEQ ID NO: 6679
  GFR-binding peptide
  MOD_RES (1)..(2): Xaa is C or S

SEQ ID NO: 39255 - protein, 38 aa, Artificial Sequence; identical to SEQ ID NO: 14044
  GFR-binding peptide
  MOD_RES (3)..(4)..(38): Xaa is C or S
  MOD_RES (18)..(19)..(20)..(21)..(22): Xaa is A or G
  MOD_RES (23)..(24)..(25)..(26): Xaa is A or G or is absent

SEQ ID NO: 39256 - protein, 35 aa, Artificial Sequence; identical to SEQ ID NO: 14045
  GFR-binding peptide
  MOD_RES (34)..(34): Xaa is C or S
  MOD_RES (14)..(15)..(16)..(17)..(18): Xaa is A or G
  MOD_RES (19)..(20)..(21)..(22): Xaa is A or G or is absent

SEQ ID NO: 39257 - protein, 40 aa, Artificial Sequence; identical to SEQ ID NO: 15755
  GFR-binding peptide
  MOD_RES (2)..(3)..(37)..(39): Xaa is C or S
  MOD_RES (17)..(18)..(19)..(20)..(21): Xaa is A or G
  MOD_RES (22)..(23)..(24)..(25): Xaa is A or G or is absent

SEQ ID NO: 39258 - protein, 41 aa, Artificial Sequence; identical to SEQ ID NO: 15756
  GFR-binding peptide
  MOD_RES (6)..(7)..(41): Xaa is C or S
  MOD_RES (21)..(22)..(23)..(24)..(25): Xaa is A or G
  MOD_RES (26)..(27)..(28)..(29): Xaa is A or G or is absent

SEQ ID NO: 39259 - protein, 33 aa, Artificial Sequence; identical to SEQ ID NO: 15757
  GFR-binding peptide
  MOD_RES (2)..(3): Xaa is C or S

SEQ ID NO: 39260 - protein, 39 aa, Artificial Sequence; identical to SEQ ID NO: 15758
  GFR-binding peptide
  MOD_RES (6)..(7): Xaa is C or S
  MOD_RES (21)..(22)..(23)..(24)..(25): Xaa is A or G
  MOD_RES (26)..(27)..(28)..(29): Xaa is A or G or is absent

SEQ ID NO: 39261 - protein, 39 aa, Artificial Sequence; identical to SEQ ID NO: 15759
  GFR-binding peptide
  MOD_RES (3)..(4)..(36)..(38): Xaa is C or S

SEQ ID NO: 39262 - protein, 34 aa, Artificial Sequence; identical to SEQ ID NO: 14046
  GFR-binding peptide
  MOD_RES (1)..(2): Xaa is C or S
  MOD_RES (16)..(17)..(18)..(19)..(20): Xaa is A or G
  MOD_RES (21)..(22)..(23)..(24): Xaa is A or G or is absent

SEQ ID NO: 39263 - protein, 34 aa, Artificial Sequence; identical to SEQ ID NO: 15760
  GFR-binding peptide
  MOD_RES (3)..(4): Xaa is C or S

SEQ ID NO: 39264 - protein, 44 aa, Artificial Sequence; identical to SEQ ID NO: 14048
  GFR-binding peptide
  MOD_RES (6)..(7)..(41)..(43): Xaa is C or S
  MOD_RES (21)..(22)..(23)..(24)..(25): Xaa is A or G
  MOD_RES (26)..(27)..(28)..(29): Xaa is A or G or is absent

SEQ ID NO: 39265 - protein, 38 aa, Artificial Sequence; identical to SEQ ID NO: 14049
  GFR-binding peptide
  MOD_RES (6)..(7): Xaa is C or S

SEQ ID NO: 39266 - protein, 36 aa, Artificial Sequence; identical to SEQ ID NO: 15761
  GFR-binding peptide
  MOD_RES (3)..(4)..(36): Xaa is C or S

SEQ ID NO: 39267 - protein, 35 aa, Artificial Sequence; identical to SEQ ID NO: 15762
  GFR-binding peptide
  MOD_RES (32)..(34): Xaa is C or S

SEQ ID NO: 39268 - protein, 32 aa, Artificial Sequence; identical to SEQ ID NO: 15763
  GFR-binding peptide
  MOD_RES (1)..(2): Xaa is C or S

SEQ ID NO: 39269 - protein, 39 aa, Artificial Sequence; identical to SEQ ID NO: 8457
  GFR-binding peptide
  MOD_RES (2)..(3)..(37)..(39): Xaa is C or S
  MOD_RES (17)..(18)..(19)..(20)..(21): Xaa is A or G
  MOD_RES (22)..(23)..(24)..(25): Xaa is A or G or is absent

SEQ ID NO: 39270 - protein, 37 aa, Artificial Sequence; identical to SEQ ID NO: 14050
  GFR-binding peptide
  MOD_RES (4)..(5)..(37): Xaa is C or S

SEQ ID NO: 39271 - protein, 37 aa, Artificial Sequence; identical to SEQ ID NO: 8458
  GFR-binding peptide
  MOD_RES (6)..(7): Xaa is C or S

SEQ ID NO: 39272 - protein, 34 aa, Artificial Sequence; identical to SEQ ID NO: 15766
  GFR-binding peptide
  MOD_RES (1)..(2)..(34): Xaa is C or S

SEQ ID NO: 39273 - protein, 31 aa, Artificial Sequence; identical to SEQ ID NO: 15767
  GFR-binding peptide
  MOD_RES (1)..(1): Xaa is C or S

SEQ ID NO: 39274 - protein, 37 aa, Artificial Sequence; identical to SEQ ID NO: 14051
  GFR-binding peptide
  MOD_RES (2)..(3)..(35)..(37): Xaa is C or S

SEQ ID NO: 39275 - protein, 35 aa, Artificial Sequence; identical to SEQ ID NO: 14052
  GFR-binding peptide
  MOD_RES (1)..(33)..(35): Xaa is C or S

SEQ ID NO: 39276 - protein, 33 aa, Artificial Sequence; identical to SEQ ID NO: 8460
  GFR-binding peptide
  MOD_RES (2)..(3): Xaa is C or S

SEQ ID NO: 39277 - protein, 34 aa, Artificial Sequence; identical to SEQ ID NO: 15769
  GFR-binding peptide
  MOD_RES (4)..(4): Xaa is C or S

SEQ ID NO: 39278 - protein, 35 aa, Artificial Sequence; identical to SEQ ID NO: 15770
  GFR-binding peptide
  MOD_RES (2)..(3)..(35): Xaa is C or S

SEQ ID NO: 39279 - protein, 38 aa, Artificial Sequence; identical to SEQ ID NO: 15771
  GFR-binding peptide
  MOD_RES (2)..(3)..(37): Xaa is C or S
  MOD_RES (17)..(18)..(19)..(20)..(21): Xaa is A or G
  MOD_RES (22)..(23)..(24)..(25): Xaa is A or G or is absent

SEQ ID NO: 39280 - protein, 37 aa, Artificial Sequence; identical to SEQ ID NO: 8462
  GFR-binding peptide
  MOD_RES (2)..(3)..(35)..(37): Xaa is C or S

SEQ ID NO: 39281 - protein, 39 aa, Artificial Sequence; identical to SEQ ID NO: 15773
  GFR-binding peptide
  MOD_RES (4)..(5)..(37)..(39): Xaa is C or S

SEQ ID NO: 39282 - protein, 37 aa, Artificial Sequence; identical to SEQ ID NO: 14054
  GFR-binding peptide
  MOD_RES (2)..(3)..(35)..(37): Xaa is C or S

SEQ ID NO: 39283 - protein, 37 aa, Artificial Sequence; identical to SEQ ID NO: 15774
  GFR-binding peptide
  MOD_RES (4)..(5): Xaa is C or S
  MOD_RES (19)..(20)..(21)..(22)..(23): Xaa is A or G
  MOD_RES (24)..(25)..(26)..(27): Xaa is A or G or is absent

SEQ ID NO: 39284 - protein, 34 aa, Artificial Sequence; identical to SEQ ID NO: 14055
  GFR-binding peptide
  MOD_RES (3)..(3): Xaa is C or S

SEQ ID NO: 39285 - protein, 34 aa, Artificial Sequence; identical to SEQ ID NO: 8464
  GFR-binding peptide
  MOD_RES (3)..(4): Xaa is C or S

SEQ ID NO: 39286 - protein, 33 aa, Artificial Sequence; identical to SEQ ID NO: 14056
  GFR-binding peptide
  MOD_RES (2)..(3): Xaa is C or S

SEQ ID NO: 39287 - protein, 33 aa, Artificial Sequence; identical to SEQ ID NO: 14058
  GFR-binding peptide
  MOD_RES (32)..(32): Xaa is C or S

SEQ ID NO: 39288 - protein, 40 aa, Artificial Sequence; identical to SEQ ID NO: 15776
  GFR-binding peptide
  MOD_RES (2)..(3)..(37)..(39): Xaa is C or S
  MOD_RES (17)..(18)..(19)..(20)..(21): Xaa is A or G
  MOD_RES (22)..(23)..(24)..(25): Xaa is A or G or is absent

SEQ ID NO: 39289 - protein, 40 aa, Artificial Sequence; identical to SEQ ID NO: 15777
  GFR-binding peptide
  MOD_RES (6)..(7): Xaa is C or S
  MOD_RES (21)..(22)..(23)..(24)..(25): Xaa is A or G
  MOD_RES (26)..(27)..(28)..(29): Xaa is A or G or is absent

SEQ ID NO: 39290 - protein, 40 aa, Artificial Sequence; identical to SEQ ID NO: 6708
  GFR-binding peptide
  MOD_RES (3)..(4)..(38)..(40): Xaa is C or S
  MOD_RES (18)..(19)..(20)..(21)..(22): Xaa is A or G
  MOD_RES (23)..(24)..(25)..(26): Xaa is A or G or is absent

SEQ ID NO: 39291 - protein, 38 aa, Artificial Sequence; identical to SEQ ID NO: 14060
  GFR-binding peptide
  MOD_RES (6)..(6): Xaa is C or S
  MOD_RES (20)..(21)..(22)..(23)..(24): Xaa is A or G
  MOD_RES (25)..(26)..(27)..(28): Xaa is A or G or is absent

SEQ ID NO: 39292 - protein, 35 aa, Artificial Sequence; identical to SEQ ID NO: 14061
  GFR-binding peptide
  MOD_RES (4)..(5): Xaa is C or S

SEQ ID NO: 39293 - protein, 38 aa, Artificial Sequence; identical to SEQ ID NO: 15778
  GFR-binding peptide
  MOD_RES (2)..(36)..(38): Xaa is C or S
  MOD_RES (16)..(17)..(18)..(19)..(20): Xaa is A or G
  MOD_RES (21)..(22)..(23)..(24): Xaa is A or G or is absent

SEQ ID NO: 39294 - protein, 36 aa, Artificial Sequence; identical to SEQ ID NO: 14062
  GFR-binding peptide
  MOD_RES (33)..(35): Xaa is C or S
  MOD_RES (14)..(15)..(16)..(17)..(18): Xaa is A or G
  MOD_RES (19)..(20)..(21)..(22): Xaa is A or G or is absent

SEQ ID NO: 39295 - protein, 43 aa, Artificial Sequence; identical to SEQ ID NO: 6711
  GFR-binding peptide
  MOD_RES (6)..(7)..(41)..(43): Xaa is C or S
  MOD_RES (21)..(22)..(23)..(24)..(25): Xaa is A or G
  MOD_RES (26)..(27)..(28)..(29): Xaa is A or G or is absent

SEQ ID NO: 39296 - protein, 34 aa, Artificial Sequence; identical to SEQ ID NO: 14064
  GFR-binding peptide
  MOD_RES (1)..(2): Xaa is C or S
  MOD_RES (16)..(17)..(18)..(19)..(20): Xaa is A or G
  MOD_RES (21)..(22)..(23)..(24): Xaa is A or G or is absent

SEQ ID NO: 39297 - protein, 36 aa, Artificial Sequence; identical to SEQ ID NO: 14065
  GFR-binding peptide
  MOD_RES (2)..(36): Xaa is C or S
  MOD_RES (16)..(17)..(18)..(19)..(20): Xaa is A or G
  MOD_RES (21)..(22)..(23)..(24): Xaa is A or G or is absent

SEQ ID NO: 39298 - protein, 37 aa, Artificial Sequence; identical to SEQ ID NO: 15781
  GFR-binding peptide
  MOD_RES (1)..(2)..(34)..(36): Xaa is C or S

SEQ ID NO: 39299 - protein, 38 aa, Artificial Sequence; identical to SEQ ID NO: 14066
  GFR-binding peptide
  MOD_RES (1)..(35)..(37): Xaa is C or S
  MOD_RES (15)..(16)..(17)..(18)..(19): Xaa is A or G
  MOD_RES (20)..(21)..(22)..(23): Xaa is A or G or is absent

SEQ ID NO: 39300 - protein, 38 aa, Artificial Sequence; identical to SEQ ID NO: 6713
  GFR-binding peptide
  MOD_RES (2)..(3)..(35)..(37): Xaa is C or S

SEQ ID NO: 39301 - protein, 37 aa, Artificial Sequence; identical to SEQ ID NO: 15783
  GFR-binding peptide
  MOD_RES (3)..(4)..(36): Xaa is C or S

SEQ ID NO: 39302 - protein, 40 aa, Artificial Sequence; identical to SEQ ID NO: 8480
  GFR-binding peptide
  MOD_RES (5)..(6)..(37)..(39): Xaa is C or S

SEQ ID NO: 39303 - protein, 36 aa, Artificial Sequence; identical to SEQ ID NO: 15785
  GFR-binding peptide
  MOD_RES (4)..(5)..(36): Xaa is C or S

SEQ ID NO: 39304 - protein, 38 aa, Artificial Sequence; identical to SEQ ID NO: 14068
  GFR-binding peptide
  MOD_RES (5)..(6)..(38): Xaa is C or S

SEQ ID NO: 39305 - protein, 36 aa, Artificial Sequence
  GFR-binding peptide
  MOD_RES (1)..(34)..(36): Xaa is C or S
  MOD_RES (15)..(16)..(17)..(18)..(19): Xaa is A or G
  MOD_RES (20)..(21)..(22)..(23): Xaa is A or G or is absent
XVSQDLEPLTILYYXXXXXXXXXEQLSNMIVKSXKX

SEQ ID NO: 39306 - protein, 35 aa, Artificial Sequence; identical to SEQ ID NO: 14070
  GFR-binding peptide
  MOD_RES (4)..(5): Xaa is C or S

SEQ ID NO: 39307 - protein, 44 aa, Artificial Sequence; identical to SEQ ID NO: 6720
  GFR-binding peptide
  MOD_RES (7)..(41)..(43): Xaa is C or S
  MOD_RES (21)..(22)..(23)..(24)..(25): Xaa is A or G
  MOD_RES (26)..(27)..(28)..(29): Xaa is A or G or is absent

SEQ ID NO: 39308 - protein, 36 aa, Artificial Sequence; identical to SEQ ID NO: 15786
  GFR-binding peptide
  MOD_RES (1)..(2)..(35): Xaa is C or S
  MOD_RES (16)..(17)..(18)..(19)..(20): Xaa is A or G
  MOD_RES (21)..(22)..(23)..(24): Xaa is A or G or is absent

SEQ ID NO: 39309 - protein, 34 aa, Artificial Sequence; identical to SEQ ID NO: 15787
  GFR-binding peptide
  MOD_RES (33)..(33): Xaa is C or S
  MOD_RES (14)..(15)..(16)..(17)..(18): Xaa is A or G
  MOD_RES (19)..(20)..(21)..(22): Xaa is A or G or is absent

SEQ ID NO: 39310 - protein, 36 aa, Artificial Sequence; identical to SEQ ID NO: 15788
  GFR-binding peptide
  MOD_RES (4)..(5): Xaa is C or S

SEQ ID NO: 39311 - protein, 34 aa, Artificial Sequence; identical to SEQ ID NO: 15789
  GFR-binding peptide
  MOD_RES (3)..(4): Xaa is C or S

SEQ ID NO: 39312 - protein, 35 aa, Artificial Sequence; identical to SEQ ID NO: 15790
  GFR-binding peptide
  MOD_RES (1)..(34): Xaa is C or S
  MOD_RES (15)..(16)..(17)..(18)..(19): Xaa is A or G
  MOD_RES (20)..(21)..(22)..(23): Xaa is A or G or is absent

SEQ ID NO: 39313 - protein, 35 aa, Artificial Sequence; identical to SEQ ID NO: 8490
  GFR-binding peptide
  MOD_RES (1)..(35): Xaa is C or S
  MOD_RES (15)..(16)..(17)..(18)..(19): Xaa is A or G
  MOD_RES (20)..(21)..(22)..(23): Xaa is A or G or is absent

SEQ ID NO: 39314 - protein, 34 aa, Artificial Sequence; identical to SEQ ID NO: 15792
  GFR-binding peptide
  MOD_RES (3)..(4): Xaa is C or S

SEQ ID NO: 39315 - protein, 39 aa, Artificial Sequence; identical to SEQ ID NO: 15793
  GFR-binding peptide
  MOD_RES (1)..(2)..(36)..(38): Xaa is C or S
  MOD_RES (16)..(17)..(18)..(19)..(20): Xaa is A or G
  MOD_RES (21)..(22)..(23)..(24): Xaa is A or G or is absent

SEQ ID NO: 39316 - protein, 39 aa, Artificial Sequence; identical to SEQ ID NO: 6726
  GFR-binding peptide
  MOD_RES (5)..(6)..(39): Xaa is C or S
  MOD_RES (20)..(21)..(22)..(23)..(24): Xaa is A or G
  MOD_RES (25)..(26)..(27)..(28): Xaa is A or G or is absent

SEQ ID NO: 39317 - protein, 35 aa, Artificial Sequence; identical to SEQ ID NO: 6727
  GFR-binding peptide
  MOD_RES (1)..(2)..(35): Xaa is C or S
  MOD_RES (16)..(17)..(18)..(19)..(20): Xaa is A or G
  MOD_RES (21)..(22)..(23)..(24): Xaa is A or G or is absent

SEQ ID NO: 39318 - protein, 40 aa, Artificial Sequence; identical to SEQ ID NO: 14076
  GFR-binding peptide
  MOD_RES (3)..(4)..(38)..(40): Xaa is C or S
  MOD_RES (18)..(19)..(20)..(21)..(22): Xaa is A or G
  MOD_RES (23)..(24)..(25)..(26): Xaa is A or G or is absent

SEQ ID NO: 39319 - protein, 36 aa, Artificial Sequence; identical to SEQ ID NO: 14077
  GFR-binding peptide
  MOD_RES (33)..(35): Xaa is C or S
  MOD_RES (14)..(15)..(16)..(17)..(18): Xaa is A or G
  MOD_RES (19)..(20)..(21)..(22): Xaa is A or G or is absent

SEQ ID NO: 39320 - protein, 34 aa, Artificial Sequence; identical to SEQ ID NO: 14078
  GFR-binding peptide
  MOD_RES (1)..(32)..(34): Xaa is C or S

SEQ ID NO: 39321 - protein, 33 aa, Artificial Sequence; identical to SEQ ID NO: 15796
  GFR-binding peptide
  MOD_RES (1)..(33): Xaa is C or S

SEQ ID NO: 39322 - protein, 43 aa, Artificial Sequence; identical to SEQ ID NO: 15797
  GFR-binding peptide
  MOD_RES (6)..(7)..(40)..(42): Xaa is C or S
  MOD_RES (21)..(22)..(23)..(24)..(25): Xaa is A or G
  MOD_RES (26)..(27)..(28)..(29): Xaa is A or G or is absent

SEQ ID NO: 39323 - protein, 36 aa, Artificial Sequence; identical to SEQ ID NO: 15798
  GFR-binding peptide
  MOD_RES (3)..(4)..(36): Xaa is C or S

SEQ ID NO: 39324 - protein, 34 aa, Artificial Sequence; identical to SEQ ID NO: 15799
  GFR-binding peptide
  MOD_RES (3)..(4): Xaa is C or S

SEQ ID NO: 39325 - protein, 38 aa, Artificial Sequence; identical to SEQ ID NO: 14079
  GFR-binding peptide
  MOD_RES (2)..(3)..(35)..(37): Xaa is C or S

SEQ ID NO: 39326 - protein, 40 aa, Artificial Sequence; identical to SEQ ID NO: 14080
  GFR-binding peptide
  MOD_RES (2)..(3)..(37)..(39): Xaa is C or S
  MOD_RES (17)..(18)..(19)..(20)..(21): Xaa is A or G
  MOD_RES (22)..(23)..(24)..(25): Xaa is A or G or is absent

SEQ ID NO: 39327 - protein, 38 aa, Artificial Sequence; identical to SEQ ID NO: 14081
  GFR-binding peptide
  MOD_RES (4)..(38): Xaa is C or S
  MOD_RES (18)..(19)..(20)..(21)..(22): Xaa is A or G
  MOD_RES (23)..(24)..(25)..(26): Xaa is A or G or is absent

SEQ ID NO: 39328 - protein, 36 aa, Artificial Sequence; identical to SEQ ID NO: 15801
  GFR-binding peptide
  MOD_RES (5)..(6): Xaa is C or S

SEQ ID NO: 39329 - protein, 39 aa, Artificial Sequence; identical to SEQ ID NO: 15802
  GFR-binding peptide
  MOD_RES (1)..(2)..(36)..(38): Xaa is C or S
  MOD_RES (16)..(17)..(18)..(19)..(20): Xaa is A or G
  MOD_RES (21)..(22)..(23)..(24): Xaa is A or G or is absent

SEQ ID NO: 39330 - protein, 36 aa, Artificial Sequence; identical to SEQ ID NO: 15804
  GFR-binding peptide
  MOD_RES (2)..(3)..(35): Xaa is C or S

SEQ ID NO: 39331 - protein, 40 aa, Artificial Sequence; identical to SEQ ID NO: 15805
  GFR-binding peptide
  MOD_RES (5)..(6)..(40): Xaa is C or S
  MOD_RES (20)..(21)..(22)..(23)..(24): Xaa is A or G
  MOD_RES (25)..(26)..(27)..(28): Xaa is A or G or is absent

SEQ ID NO: 39332 - protein, 40 aa, Artificial Sequence; identical to SEQ ID NO: 15806
  GFR-binding peptide
  MOD_RES (4)..(5)..(39): Xaa is C or S
  MOD_RES (19)..(20)..(21)..(22)..(23): Xaa is A or G
  MOD_RES (24)..(25)..(26)..(27): Xaa is A or G or is absent

SEQ ID NO: 39333 - protein, 38 aa, Artificial Sequence; identical to SEQ ID NO: 15807
  GFR-binding peptide
  MOD_RES (2)..(3)..(36)..(38): Xaa is C or S
  MOD_RES (17)..(18)..(19)..(20)..(21): Xaa is A or G
  MOD_RES (22)..(23)..(24)..(25): Xaa is A or G or is absent

SEQ ID NO: 39334 - protein, 39 aa, Artificial Sequence; identical to SEQ ID NO: 15808
  GFR-binding peptide
  MOD_RES (6)..(7)..(39): Xaa is C or S

SEQ ID NO: 39335 - protein, 35 aa, Artificial Sequence; identical to SEQ ID NO: 15809
  GFR-binding peptide
  MOD_RES (1)..(2): Xaa is C or S
  MOD_RES (16)..(17)..(18)..(19)..(20): Xaa is A or G
  MOD_RES (21)..(22)..(23)..(24): Xaa is A or G or is absent

SEQ ID NO: 39336 - protein, 33 aa, Artificial Sequence; identical to SEQ ID NO: 14085
  GFR-binding peptide
  MOD_RES (14)..(15)..(16)..(17)..(18): Xaa is A or G
  MOD_RES (19)..(20)..(21)..(22): Xaa is A or G or is absent

SEQ ID NO: 39337 - protein, 41 aa, Artificial Sequence; identical to SEQ ID NO: 14086
  GFR-binding peptide
  MOD_RES (5)..(6)..(38)..(40): Xaa is C or S

SEQ ID NO: 39338 - protein, 39 aa, Artificial Sequence; identical to SEQ ID NO: 15810
  GFR-binding peptide
  MOD_RES (4)..(5)..(36)..(38): Xaa is C or S

SEQ ID NO: 39339 - protein, 39 aa, Artificial Sequence; identical to SEQ ID NO: 15811
  GFR-binding peptide
  MOD_RES (6)..(7)..(39): Xaa is C or S

SEQ ID NO: 39340 - protein, 44 aa, Artificial Sequence; identical to SEQ ID NO: 15812
  GFR-binding peptide
  MOD_RES (6)..(7)..(41)..(43): Xaa is C or S
  MOD_RES (21)..(22)..(23)..(24)..(25): Xaa is A or G
  MOD_RES (26)..(27)..(28)..(29): Xaa is A or G or is absent

SEQ ID NO: 39341 - protein, 37 aa, Artificial Sequence; identical to SEQ ID NO: 15813
  GFR-binding peptide
  MOD_RES (1)..(2)..(35)..(37): Xaa is C or S
  MOD_RES (16)..(17)..(18)..(19)..(20): Xaa is A or G
  MOD_RES (21)..(22)..(23)..(24): Xaa is A or G or is absent

SEQ ID NO: 39342 - protein, 37 aa, Artificial Sequence; identical to SEQ ID NO: 14089
  GFR-binding peptide
  MOD_RES (2)..(3)..(34)..(36): Xaa is C or S

SEQ ID NO: 39343 - protein, 37 aa, Artificial Sequence; identical to SEQ ID NO: 14091
  GFR-binding peptide
  MOD_RES (5)..(6): Xaa is C or S

SEQ ID NO: 39344 - protein, 37 aa, Artificial Sequence; identical to SEQ ID NO: 15814
  GFR-binding peptide
  MOD_RES (3)..(4)..(36): Xaa is C or S

SEQ ID NO: 39345 - protein, 37 aa, Artificial Sequence; identical to SEQ ID NO: 15815
  GFR-binding peptide
  MOD_RES (6)..(7): Xaa is C or S

SEQ ID NO: 39346 - protein, 38 aa, Artificial Sequence; identical to SEQ ID NO: 15816
  GFR-binding peptide
  MOD_RES (4)..(5): Xaa is C or S
  MOD_RES (19)..(20)..(21)..(22)..(23): Xaa is A or G
  MOD_RES (24)..(25)..(26)..(27): Xaa is A or G or is absent

SEQ ID NO: 39347 - protein, 32 aa, Artificial Sequence; identical to SEQ ID NO: 15817
  GFR-binding peptide
  MOD_RES (1)..(1): Xaa is C or S

SEQ ID NO: 39348 - protein, 39 aa, Artificial Sequence; identical to SEQ ID NO: 15818
  GFR-binding peptide
  MOD_RES (4)..(5)..(37)..(39): Xaa is C or S

SEQ ID NO: 39349 - protein, 41 aa, Artificial Sequence; identical to SEQ ID NO: 14092
  GFR-binding peptide
  MOD_RES (3)..(4)..(38)..(40): Xaa is C or S
  MOD_RES (18)..(19)..(20)..(21)..(22): Xaa is A or G
  MOD_RES (23)..(24)..(25)..(26): Xaa is A or G or is absent

SEQ ID NO: 39350 - protein, 39 aa, Artificial Sequence; identical to SEQ ID NO: 14093
  GFR-binding peptide
  MOD_RES (4)..(5)..(37)..(39): Xaa is C or S

SEQ ID NO: 39351 - protein, 32 aa, Artificial Sequence; identical to SEQ ID NO: 14095
  GFR-binding peptide
  MOD_RES (1)..(2): Xaa is C or S

SEQ ID NO: 39352 - protein, 41 aa, Artificial Sequence; identical to SEQ ID NO: 15821
  GFR-binding peptide
  MOD_RES (5)..(6)..(40): Xaa is C or S
  MOD_RES (20)..(21)..(22)..(23)..(24): Xaa is A or G
  MOD_RES (25)..(26)..(27)..(28): Xaa is A or G or is absent

SEQ ID NO: 39353 - protein, 37 aa, Artificial Sequence; identical to SEQ ID NO: 8524
  GFR-binding peptide
  MOD_RES (5)..(6): Xaa is C or S

SEQ ID NO: 39354 - protein, 35 aa, Artificial Sequence; identical to SEQ ID NO: 14096
  GFR-binding peptide
  MOD_RES (33)..(35): Xaa is C or S
  MOD_RES (14)..(15)..(16)..(17)..(18): Xaa is A or G
  MOD_RES (19)..(20)..(21)..(22): Xaa is A or G or is absent

SEQ ID NO: 39355 - protein, 33 aa, Artificial Sequence; identical to SEQ ID NO: 8526
  GFR-binding peptide
  MOD_RES (1)..(2)..(33): Xaa is C or S

SEQ ID NO: 39356 - protein, 37 aa, Artificial Sequence; identical to SEQ ID NO: 6748
  GFR-binding peptide
  MOD_RES (2)..(3)..(36): Xaa is C or S
  MOD_RES (17)..(18)..(19)..(20)..(21): Xaa is A or G
  MOD_RES (22)..(23)..(24)..(25): Xaa is A or G or is absent

SEQ ID NO: 39357 - protein, 39 aa, Artificial Sequence; identical to SEQ ID NO: 14098
  GFR-binding peptide
  MOD_RES (4)..(5)..(39): Xaa is C or S
  MOD_RES (19)..(20)..(21)..(22)..(23): Xaa is A or G
  MOD_RES (24)..(25)..(26)..(27): Xaa is A or G or is absent

SEQ ID NO: 39358 - protein, 32 aa, Artificial Sequence; identical to SEQ ID NO: 15827
  GFR-binding peptide
  MOD_RES (32)..(32): Xaa is C or S

SEQ ID NO: 39359 - protein, 39 aa, Artificial Sequence; identical to SEQ ID NO: 15829
  GFR-binding peptide
  MOD_RES (1)..(2)..(36)..(38): Xaa is C or S
  MOD_RES (16)..(17)..(18)..(19)..(20): Xaa is A or G
  MOD_RES (21)..(22)..(23)..(24): Xaa is A or G or is absent

SEQ ID NO: 39360 - protein, 41 aa, Artificial Sequence; identical to SEQ ID NO: 15830
  GFR-binding peptide
  MOD_RES (4)..(5)..(39)..(41): Xaa is C or S
  MOD_RES (19)..(20)..(21)..(22)..(23): Xaa is A or G
  MOD_RES (24)..(25)..(26)..(27): Xaa is A or G or is absent

SEQ ID NO: 39361 - protein, 37 aa, Artificial Sequence; identical to SEQ ID NO: 14099
  GFR-binding peptide
  MOD_RES (2)..(3)..(37): Xaa is C or S
  MOD_RES (17)..(18)..(19)..(20)..(21): Xaa is A or G
  MOD_RES (22)..(23)..(24)..(25): Xaa is A or G or is absent

SEQ ID NO: 39362 - protein, 34 aa, Artificial Sequence; identical to SEQ ID NO: 14100
  GFR-binding peptide
  MOD_RES (2)..(2): Xaa is C or S
  MOD_RES (16)..(17)..(18)..(19)..(20): Xaa is A or G
  MOD_RES (21)..(22)..(23)..(24): Xaa is A or G or is absent

SEQ ID NO: 39363 - protein, 37 aa, Artificial Sequence; identical to SEQ ID NO: 6750
  GFR-binding peptide
  MOD_RES (2)..(3)..(34)..(36): Xaa is C or S

SEQ ID NO: 39364 - protein, 38 aa, Artificial Sequence; identical to SEQ ID NO: 8534
  GFR-binding peptide
  MOD_RES (1)..(2)..(35)..(37): Xaa is C or S
  MOD_RES (16)..(17)..(18)..(19)..(20): Xaa is A or G
  MOD_RES (21)..(22)..(23)..(24): Xaa is A or G or is absent

SEQ ID NO: 39365 - protein, 38 aa, Artificial Sequence; identical to SEQ ID NO: 14102
  GFR-binding peptide
  MOD_RES (6)..(7): Xaa is C or S

SEQ ID NO: 39366 - protein, 43 aa, Artificial Sequence; identical to SEQ ID NO: 15834
  GFR-binding peptide
  MOD_RES (6)..(7)..(41)..(43): Xaa is C or S
  MOD_RES (21)..(22)..(23)..(24)..(25): Xaa is A or G
  MOD_RES (26)..(27)..(28)..(29): Xaa is A or G or is absent

SEQ ID NO: 39367 - protein, 34 aa, Artificial Sequence; identical to SEQ ID NO: 15835
  GFR-binding peptide
  MOD_RES (1)..(2): Xaa is C or S
  MOD_RES (16)..(17)..(18)..(19)..(20): Xaa is A or G
  MOD_RES (21)..(22)..(23)..(24): Xaa is A or G or is absent

SEQ ID NO: 39368 - protein, 36 aa, Artificial Sequence; identical to SEQ ID NO: 14103
  GFR-binding peptide
  MOD_RES (2)..(3)..(35): Xaa is C or S

SEQ ID NO: 39369 - protein, 34 aa, Artificial Sequence; identical to SEQ ID NO: 14105
  GFR-binding peptide
  MOD_RES (1)..(33): Xaa is C or S

SEQ ID NO: 39370 - protein, 36 aa, Artificial Sequence; identical to SEQ ID NO: 14106
  GFR-binding peptide
  MOD_RES (1)..(2)..(36): Xaa is C or S
  MOD_RES (16)..(17)..(18)..(19)..(20): Xaa is A or G
  MOD_RES (21)..(22)..(23)..(24): Xaa is A or G or is absent

SEQ ID NO: 39371 - protein, 35 aa, Artificial Sequence; identical to SEQ ID NO: 15837
  GFR-binding peptide
  MOD_RES (1)..(2)..(34): Xaa is C or S

SEQ ID NO: 39372 - protein, 44 aa, Artificial Sequence; identical to SEQ ID NO: 14107
  GFR-binding peptide
  MOD_RES (6)..(7)..(41)..(43): Xaa is C or S
  MOD_RES (21)..(22)..(23)..(24)..(25): Xaa is A or G
  MOD_RES (26)..(27)..(28)..(29): Xaa is A or G or is absent

SEQ ID NO: 39373 - protein, 41 aa, Artificial Sequence; identical to SEQ ID NO: 14109
  GFR-binding peptide
  MOD_RES (5)..(6)..(40): Xaa is C or S
  MOD_RES (20)..(21)..(22)..(23)..(24): Xaa is A or G
  MOD_RES (25)..(26)..(27)..(28): Xaa is A or G or is absent

SEQ ID NO: 39374 - protein, 33 aa, Artificial Sequence; identical to SEQ ID NO: 15840
  GFR-binding peptide
  MOD_RES (2)..(2): Xaa is C or S

SEQ ID NO: 39375 - protein, 37 aa, Artificial Sequence; identical to SEQ ID NO: 15841
  GFR-binding peptide
  MOD_RES (1)..(2)..(35)..(37): Xaa is C or S
  MOD_RES (16)..(17)..(18)..(19)..(20): Xaa is A or G
  MOD_RES (21)..(22)..(23)..(24): Xaa is A or G or is absent

SEQ ID NO: 39376 - protein, 33 aa, Artificial Sequence; identical to SEQ ID NO: 14110
  GFR-binding peptide
  MOD_RES (1)..(2)..(33): Xaa is C or S

SEQ ID NO: 39377 - protein, 39 aa, Artificial Sequence; identical to SEQ ID NO: 15843
  GFR-binding peptide
  MOD_RES (6)..(7)..(38): Xaa is C or S

SEQ ID NO: 39378 - protein, 34 aa, Artificial Sequence; identical to SEQ ID NO: 15844
  GFR-binding peptide
  MOD_RES (31)..(33): Xaa is C or S

SEQ ID NO: 39379 - protein, 38 aa, Artificial Sequence; identical to SEQ ID NO: 14112
  GFR-binding peptide
  MOD_RES (4)..(5)..(36)..(38): Xaa is C or S

SEQ ID NO: 39380 - protein, 41 aa, Artificial Sequence
  GFR-binding peptide
  MOD_RES (5)..(6)..(39)..(41): Xaa is C or S
  MOD_RES (20)..(21)..(22)..(23)..(24): Xaa is A or G
  MOD_RES (25)..(26)..(27)..(28): Xaa is A or G or is absent
SASPXXVSQDLEPLTILYYXXXXXXXXXEQLSNMIVKSXKX

SEQ ID NO: 39381 - protein, 37 aa, Artificial Sequence; identical to SEQ ID NO: 14113
  GFR-binding peptide
  MOD_RES (4)..(5)..(37): Xaa is C or S

SEQ ID NO: 39382 - protein, 32 aa, Artificial Sequence; identical to SEQ ID NO: 8549
  GFR-binding peptide
  MOD_RES (1)..(1): Xaa is C or S

SEQ ID NO: 39383 - protein, 36 aa, Artificial Sequence; identical to SEQ ID NO: 14116
  GFR-binding peptide
  MOD_RES (5)..(6): Xaa is C or S

SEQ ID NO: 39384 - protein, 38 aa, Artificial Sequence; identical to SEQ ID NO: 14117
  GFR-binding peptide
  MOD_RES (4)..(36)..(38): Xaa is C or S

SEQ ID NO: 39385 - protein, 39 aa, Artificial Sequence; identical to SEQ ID NO: 14118
  GFR-binding peptide
  MOD_RES (3)..(4)..(36)..(38): Xaa is C or S

SEQ ID NO: 39386 - protein, 39 aa, Artificial Sequence; identical to SEQ ID NO: 15848
  GFR-binding peptide
  MOD_RES (2)..(3)..(37)..(39): Xaa is C or S
  MOD_RES (17)..(18)..(19)..(20)..(21): Xaa is A or G
  MOD_RES (22)..(23)..(24)..(25): Xaa is A or G or is absent

SEQ ID NO: 39387 - protein, 42 aa, Artificial Sequence; identical to SEQ ID NO: 6765
  GFR-binding peptide
  MOD_RES (5)..(6)..(39)..(41): Xaa is C or S
  MOD_RES (20)..(21)..(22)..(23)..(24): Xaa is A or G
  MOD_RES (25)..(26)..(27)..(28): Xaa is A or G or is absent

SEQ ID NO: 39388 - protein, 42 aa, Artificial Sequence; identical to SEQ ID NO: 14120
  GFR-binding peptide
  MOD_RES (6)..(7)..(39)..(41): Xaa is C or S

SEQ ID NO: 39389 - protein, 38 aa, Artificial Sequence; identical to SEQ ID NO: 14121
  GFR-binding peptide
  MOD_RES (3)..(4)..(36)..(38): Xaa is C or S

SEQ ID NO: 39390 - protein, 41 aa, Artificial Sequence; identical to SEQ ID NO: 8556
  GFR-binding peptide
  MOD_RES (6)..(7)..(41): Xaa is C or S
  MOD_RES (21)..(22)..(23)..(24)..(25): Xaa is A or G
  MOD_RES (26)..(27)..(28)..(29): Xaa is A or G or is absent

SEQ ID NO: 39391 - protein, 36 aa, Artificial Sequence; identical to SEQ ID NO: 15851
  GFR-binding peptide
  MOD_RES (2)..(3)..(34)..(36): Xaa is C or S

SEQ ID NO: 39392 - protein, 35 aa, Artificial Sequence; identical to SEQ ID NO: 14123
  GFR-binding peptide
  MOD_RES (34)..(34): Xaa is C or S
  MOD_RES (14)..(15)..(16)..(17)..(18): Xaa is A or G
  MOD_RES (19)..(20)..(21)..(22): Xaa is A or G or is absent

SEQ ID NO: 39393 - protein, 32 aa, Artificial Sequence; identical to SEQ ID NO: 8558
  GFR-binding peptide
  MOD_RES (1)..(1): Xaa is C or S

SEQ ID NO: 39394 - protein, 35 aa, Artificial Sequence; identical to SEQ ID NO: 6770
  GFR-binding peptide
  MOD_RES (2)..(3): Xaa is C or S
  MOD_RES (17)..(18)..(19)..(20)..(21): Xaa is A or G
  MOD_RES (22)..(23)..(24)..(25): Xaa is A or G or is absent

SEQ ID NO: 39395 - protein, 42 aa, Artificial Sequence; identical to SEQ ID NO: 14126
  GFR-binding peptide
  MOD_RES (7)..(39)..(41): Xaa is C or S

SEQ ID NO: 39396 - protein, 37 aa, Artificial Sequence; identical to SEQ ID NO: 8563
  GFR-binding peptide
  MOD_RES (34)..(36): Xaa is C or S
  MOD_RES (14)..(15)..(16)..(17)..(18): Xaa is A or G
  MOD_RES (19)..(20)..(21)..(22): Xaa is A or G or is absent

SEQ ID NO: 39397 - protein, 40 aa, Artificial Sequence; identical to SEQ ID NO: 14127
  GFR-binding peptide
  MOD_RES (6)..(7)..(39): Xaa is C or S

SEQ ID NO: 39398 - protein, 40 aa, Artificial Sequence; identical to SEQ ID NO: 8566
  GFR-binding peptide
  MOD_RES (6)..(7)..(39): Xaa is C or S

SEQ ID NO: 39399 - protein, 34 aa, Artificial Sequence; identical to SEQ ID NO: 15859
  GFR-binding peptide
  MOD_RES (33)..(33): Xaa is C or S
  MOD_RES (14)..(15)..(16)..(17)..(18): Xaa is A or G
  MOD_RES (19)..(20)..(21)..(22): Xaa is A or G or is absent

SEQ ID NO: 39400 - protein, 38 aa, Artificial Sequence; identical to SEQ ID NO: 15860
  GFR-binding peptide
  MOD_RES (5)..(6)..(38): Xaa is C or S

SEQ ID NO: 39401 - protein, 38 aa, Artificial Sequence; identical to SEQ ID NO: 15861
  GFR-binding peptide
  MOD_RES (1)..(2)..(35)..(37): Xaa is C or S
  MOD_RES (16)..(17)..(18)..(19)..(20): Xaa is A or G
  MOD_RES (21)..(22)..(23)..(24): Xaa is A or G or is absent

SEQ ID NO: 39402 - protein, 40 aa, Artificial Sequence; identical to SEQ ID NO: 6775
  GFR-binding peptide
  MOD_RES (3)..(4)..(37)..(39): Xaa is C or S
  MOD_RES (18)..(19)..(20)..(21)..(22): Xaa is A or G
  MOD_RES (23)..(24)..(25)..(26): Xaa is A or G or is absent

SEQ ID NO: 39403 - protein, 37 aa, Artificial Sequence; identical to SEQ ID NO: 15862
  GFR-binding peptide
  MOD_RES (4)..(5)..(37): Xaa is C or S

SEQ ID NO: 39404 - protein, 35 aa, Artificial Sequence; identical to SEQ ID NO: 15863
  GFR-binding peptide
  MOD_RES (3)..(4)..(35): Xaa is C or S

SEQ ID NO: 39405 - protein, 35 aa, Artificial Sequence; identical to SEQ ID NO: 15864
  GFR-binding peptide
  MOD_RES (4)..(5): Xaa is C or S

SEQ ID NO: 39406 - protein, 33 aa, Artificial Sequence; identical to SEQ ID NO: 14131
  GFR-binding peptide
  MOD_RES (32)..(32): Xaa is C or S

SEQ ID NO: 39407 - protein, 32 aa, Artificial Sequence; identical to SEQ ID NO: 15865
  GFR-binding peptide
  MOD_RES (1)..(32): Xaa is C or S

SEQ ID NO: 39408 - protein, 37 aa, Artificial Sequence; identical to SEQ ID NO: 6782
  GFR-binding peptide
  MOD_RES (34)..(36): Xaa is C or S
  MOD_RES (14)..(15)..(16)..(17)..(18): Xaa is A or G
  MOD_RES (19)..(20)..(21)..(22): Xaa is A or G or is absent

SEQ ID NO: 39409 - protein, 39 aa, Artificial Sequence; identical to SEQ ID NO: 14133
  GFR-binding peptide
  MOD_RES (2)..(36)..(38): Xaa is C or S
  MOD_RES (16)..(17)..(18)..(19)..(20): Xaa is A or G
  MOD_RES (21)..(22)..(23)..(24): Xaa is A or G or is absent

SEQ ID NO: 39410 - protein, 38 aa, Artificial Sequence; identical to SEQ ID NO: 14134
  GFR-binding peptide
  MOD_RES (1)..(2)..(36)..(38): Xaa is C or S
  MOD_RES (16)..(17)..(18)..(19)..(20): Xaa is A or G
  MOD_RES (21)..(22)..(23)..(24): Xaa is A or G or is absent

SEQ ID NO: 39411 - protein, 39 aa, Artificial Sequence; identical to SEQ ID NO: 14135
  GFR-binding peptide
  MOD_RES (5)..(6)..(37)..(39): Xaa is C or S

SEQ ID NO: 39412 - protein, 35 aa, Artificial Sequence
  GFR-binding peptide
  MOD_RES (33)..(35): Xaa is C or S
  MOD_RES (14)..(15)..(16)..(17)..(18): Xaa is A or G
  MOD_RES (19)..(20)..(21)..(22): Xaa is A or G or is absent
VSQDLEPLTILYYXXXXXXXXXEQLSNMIVKSXKX

SEQ ID NO: 39413 - protein, 36 aa, Artificial Sequence; identical to SEQ ID NO: 15866
  GFR-binding peptide
  MOD_RES (2)..(3)..(34)..(36): Xaa is C or S

SEQ ID NO: 39414 - protein, 38 aa, Artificial Sequence; identical to SEQ ID NO: 14136
  GFR-binding peptide
  MOD_RES (3)..(4)..(36)..(38): Xaa is C or S

SEQ ID NO: 39415 - protein, 35 aa, Artificial Sequence; identical to SEQ ID NO: 14138
  GFR-binding peptide
  MOD_RES (4)..(5): Xaa is C or S

SEQ ID NO: 39416 - protein, 35 aa, Artificial Sequence; identical to SEQ ID NO: 8570
  GFR-binding peptide
  MOD_RES (33)..(35): Xaa is C or S
  MOD_RES (14)..(15)..(16)..(17)..(18): Xaa is A or G
  MOD_RES (19)..(20)..(21)..(22): Xaa is A or G or is absent

SEQ ID NO: 39417 - protein, 31 aa, Artificial Sequence; identical to SEQ ID NO: 15868
  GFR-binding peptide
  MOD_RES (31)..(31): Xaa is C or S

SEQ ID NO: 39418 - protein, 37 aa, Artificial Sequence; identical to SEQ ID NO: 15869
  GFR-binding peptide
  MOD_RES (2)..(3)..(35)..(37): Xaa is C or S

SEQ ID NO: 39419 - protein, 40 aa, Artificial Sequence; identical to SEQ ID NO: 15870
  GFR-binding peptide
  MOD_RES (4)..(5)..(37)..(39): Xaa is C or S

SEQ ID NO: 39420 - protein, 34 aa, Artificial Sequence; identical to SEQ ID NO: 14139
  GFR-binding peptide
  MOD_RES (1)..(33): Xaa is C or S

SEQ ID NO: 39421 - protein, 38 aa, Artificial Sequence; identical to SEQ ID NO: 14141
  GFR-binding peptide
  MOD_RES (2)..(36)..(38): Xaa is C or S
  MOD_RES (16)..(17)..(18)..(19)..(20): Xaa is A or G
  MOD_RES (21)..(22)..(23)..(24): Xaa is A or G or is absent

SEQ ID NO: 39422 - protein, 38 aa, Artificial Sequence; identical to SEQ ID NO: 14142
  GFR-binding peptide
  MOD_RES (5)..(6)..(38): Xaa is C or S

SEQ ID NO: 39423 - protein, 41 aa, Artificial Sequence; identical to SEQ ID NO: 15871
  GFR-binding peptide
  MOD_RES (5)..(6)..(38)..(40): Xaa is C or S

SEQ ID NO: 39424 - protein, 38 aa, Artificial Sequence; identical to SEQ ID NO: 14143
  GFR-binding peptide
  MOD_RES (3)..(4)..(38): Xaa is C or S
  MOD_RES (18)..(19)..(20)..(21)..(22): Xaa is A or G
  MOD_RES (23)..(24)..(25)..(26): Xaa is A or G or is absent

SEQ ID NO: 39425 - protein, 41 aa, Artificial Sequence; identical to SEQ ID NO: 8571
  GFR-binding peptide
  MOD_RES (6)..(7)..(39)..(41): Xaa is C or S

SEQ ID NO: 39426 - protein, 40 aa, Artificial Sequence
  GFR-binding peptide
  MOD_RES (5)..(6)..(39): Xaa is C or S
  MOD_RES (20)..(21)..(22)..(23)..(24): Xaa is A or G
  MOD_RES (25)..(26)..(27)..(28): Xaa is A or G or is absent
SASPXXVSQDLEPLTILYYXXXXXXXXXEQLSNMIVKSXK

SEQ ID NO: 39427 - protein, 34 aa, Artificial Sequence; identical to SEQ ID NO: 6797
  GFR-binding peptide
  MOD_RES (34)..(34): Xaa is C or S
  MOD_RES (14)..(15)..(16)..(17)..(18): Xaa is A or G
  MOD_RES (19)..(20)..(21)..(22): Xaa is A or G or is absent

SEQ ID NO: 39428 - protein, 41 aa, Artificial Sequence; identical to SEQ ID NO: 15876
  GFR-binding peptide
  MOD_RES (3)..(4)..(38)..(40): Xaa is C or S
  MOD_RES (18)..(19)..(20)..(21)..(22): Xaa is A or G
  MOD_RES (23)..(24)..(25)..(26): Xaa is A or G or is absent

SEQ ID NO: 39429 - protein, 41 aa, Artificial Sequence; identical to SEQ ID NO: 15877
  GFR-binding peptide
  MOD_RES (5)..(6)..(39)..(41): Xaa is C or S
  MOD_RES (20)..(21)..(22)..(23)..(24): Xaa is A or G
  MOD_RES (25)..(26)..(27)..(28): Xaa is A or G or is absent

SEQ ID NO: 39430 - protein, 35 aa, Artificial Sequence; identical to SEQ ID NO: 15878
  GFR-binding peptide
  MOD_RES (3)..(4): Xaa is C or S

SEQ ID NO: 39431 - protein, 37 aa, Artificial Sequence; identical to SEQ ID NO: 15879
  GFR-binding peptide
  MOD_RES (1)..(2)..(36): Xaa is C or S
  MOD_RES (16)..(17)..(18)..(19)..(20): Xaa is A or G
  MOD_RES (21)..(22)..(23)..(24): Xaa is A or G or is absent

SEQ ID NO: 39432 - protein, 38 aa, Artificial Sequence; identical to SEQ ID NO: 14146
  GFR-binding peptide
  MOD_RES (3)..(4)..(36)..(38): Xaa is C or S

SEQ ID NO: 39433 - protein, 39 aa, Artificial Sequence; identical to SEQ ID NO: 8580
  GFR-binding peptide
  MOD_RES (3)..(4)..(36)..(38): Xaa is C or S

SEQ ID NO: 39434 - protein, 40 aa, Artificial Sequence; identical to SEQ ID NO: 15881
  GFR-binding peptide
  MOD_RES (4)..(5)..(37)..(39): Xaa is C or S

SEQ ID NO: 39435 - protein, 38 aa, Artificial Sequence; identical to SEQ ID NO: 6801
  GFR-binding peptide
  MOD_RES (4)..(5)..(38): Xaa is C or S
  MOD_RES (19)..(20)..(21)..(22)..(23): Xaa is A or G
  MOD_RES (24)..(25)..(26)..(27): Xaa is A or G or is absent

SEQ ID NO: 39436 - protein, 33 aa, Artificial Sequence; identical to SEQ ID NO: 14149
  GFR-binding peptide
  MOD_RES (1)..(1): Xaa is C or S
  MOD_RES (15)..(16)..(17)..(18)..(19): Xaa is A or G
  MOD_RES (20)..(21)..(22)..(23): Xaa is A or G or is absent

SEQ ID NO: 39437 - protein, 36 aa, Artificial Sequence; identical to SEQ ID NO: 14150
  GFR-binding peptide
  MOD_RES (1)..(2)..(36): Xaa is C or S
  MOD_RES (16)..(17)..(18)..(19)..(20): Xaa is A or G
  MOD_RES (21)..(22)..(23)..(24): Xaa is A or G or is absent

SEQ ID NO: 39438 - protein, 38 aa, Artificial Sequence; identical to SEQ ID NO: 15884
  GFR-binding peptide
  MOD_RES (2)..(3)..(35)..(37): Xaa is C or S

SEQ ID NO: 39439 - protein, 40 aa, Artificial Sequence; identical to SEQ ID NO: 15885
  GFR-binding peptide
  MOD_RES (6)..(7)..(40): Xaa is C or S
  MOD_RES (21)..(22)..(23)..(24)..(25): Xaa is A or G
  MOD_RES (26)..(27)..(28)..(29): Xaa is A or G or is absent

SEQ ID NO: 39440 - protein, 39 aa, Artificial Sequence; identical to SEQ ID NO: 15886
  GFR-binding peptide
  MOD_RES (6)..(7): Xaa is C or S
  MOD_RES (21)..(22)..(23)..(24)..(25): Xaa is A or G
  MOD_RES (26)..(27)..(28)..(29): Xaa is A or G or is absent

SEQ ID NO: 39441 - protein, 37 aa, Artificial Sequence; identical to SEQ ID NO: 15889
  GFR-binding peptide
  MOD_RES (2)..(3)..(37): Xaa is C or S
  MOD_RES (17)..(18)..(19)..(20)..(21): Xaa is A or G
  MOD_RES (22)..(23)..(24)..(25): Xaa is A or G or is absent

SEQ ID NO: 39442 - protein, 32 aa, Artificial Sequence; identical to SEQ ID NO: 14152
  GFR-binding peptide
  MOD_RES (14)..(15)..(16)..(17)..(18): Xaa is A or G
  MOD_RES (19)..(20)..(21)..(22): Xaa is A or G or is absent

SEQ ID NO: 39443 - protein, 36 aa, Artificial Sequence; identical to SEQ ID NO: 15891
  GFR-binding peptide
  MOD_RES (3)..(4)..(36): Xaa is C or S

SEQ ID NO: 39444 - protein, 37 aa, Artificial Sequence; identical to SEQ ID NO: 15892
  GFR-binding peptide
  MOD_RES (4)..(4): Xaa is C or S
  MOD_RES (18)..(19)..(20)..(21)..(22): Xaa is A or G
  MOD_RES (23)..(24)..(25)..(26): Xaa is A or G or is absent

SEQ ID NO: 39445 - protein, 37 aa, Artificial Sequence; identical to SEQ ID NO: 8590
  GFR-binding peptide
  MOD_RES (3)..(4)..(35)..(37): Xaa is C or S

SEQ ID NO: 39446 - protein, 33 aa, Artificial Sequence; identical to SEQ ID NO: 14154
  GFR-binding peptide
  MOD_RES (1)..(33): Xaa is C or S

SEQ ID NO: 39447 - protein, 40 aa, Artificial Sequence; identical to SEQ ID NO: 15894
  GFR-binding peptide
  MOD_RES (4)..(5)..(37)..(39): Xaa is C or S

SEQ ID NO: 39448 - protein, 40 aa, Artificial Sequence; identical to SEQ ID NO: 14156
  GFR-binding peptide
  MOD_RES (3)..(4)..(37)..(39): Xaa is C or S
  MOD_RES (18)..(19)..(20)..(21)..(22): Xaa is A or G
  MOD_RES (23)..(24)..(25)..(26): Xaa is A or G or is absent

SEQ ID NO: 39449 - protein, 38 aa, Artificial Sequence; identical to SEQ ID NO: 14157
  GFR-binding peptide
  MOD_RES (6)..(6): Xaa is C or S
  MOD_RES (20)..(21)..(22)..(23)..(24): Xaa is A or G
  MOD_RES (25)..(26)..(27)..(28): Xaa is A or G or is absent

SEQ ID NO: 39450 - protein, 39 aa, Artificial Sequence; identical to SEQ ID NO: 14158
  GFR-binding peptide
  MOD_RES (6)..(7)..(39): Xaa is C or S

SEQ ID NO: 39451 - protein, 36 aa, Artificial Sequence; identical to SEQ ID NO: 14159
  GFR-binding peptide
  MOD_RES (4)..(5): Xaa is C or S

SEQ ID NO: 39452 - protein, 35 aa, Artificial Sequence; identical to SEQ ID NO: 15895
  GFR-binding peptide
  MOD_RES (1)..(2)..(34): Xaa is C or S

SEQ ID NO: 39453 - protein, 42 aa, Artificial Sequence; identical to SEQ ID NO: 14160
  GFR-binding peptide
  MOD_RES (4)..(5)..(39)..(41): Xaa is C or S
  MOD_RES (19)..(20)..(21)..(22)..(23): Xaa is A or G
  MOD_RES (24)..(25)..(26)..(27): Xaa is A or G or is absent

SEQ ID NO: 39454 - protein, 39 aa, Artificial Sequence; identical to SEQ ID NO: 8592
  GFR-binding peptide
  MOD_RES (2)..(3)..(36)..(38): Xaa is C or S
  MOD_RES (17)..(18)..(19)..(20)..(21): Xaa is A or G
  MOD_RES (22)..(23)..(24)..(25): Xaa is A or G or is absent

SEQ ID NO: 39455 - protein, 35 aa, Artificial Sequence; identical to SEQ ID NO: 8594
  GFR-binding peptide
  MOD_RES (1)..(34): Xaa is C or S
  MOD_RES (15)..(16)..(17)..(18)..(19): Xaa is A or G
  MOD_RES (20)..(21)..(22)..(23): Xaa is A or G or is absent

SEQ ID NO: 39456 - protein, 39 aa, Artificial Sequence; identical to SEQ ID NO: 15898
  GFR-binding peptide
  MOD_RES (4)..(5)..(37)..(39): Xaa is C or S

SEQ ID NO: 39457 - protein, 32 aa, Artificial Sequence; identical to SEQ ID NO: 14161
  GFR-binding peptide
  MOD_RES (14)..(15)..(16)..(17)..(18): Xaa is A or G
  MOD_RES (19)..(20)..(21)..(22): Xaa is A or G or is absent

SEQ ID NO: 39458 - protein, 37 aa, Artificial Sequence; identical to SEQ ID NO: 15900
  GFR-binding peptide
  MOD_RES (5)..(6): Xaa is C or S

SEQ ID NO: 39459 - protein, 35 aa, Artificial Sequence; identical to SEQ ID NO: 15901
  GFR-binding peptide
  MOD_RES (1)..(2): Xaa is C or S
  MOD_RES (16)..(17)..(18)..(19)..(20): Xaa is A or G
  MOD_RES (21)..(22)..(23)..(24): Xaa is A or G or is absent

SEQ ID NO: 39460 - protein, 40 aa, Artificial Sequence; identical to SEQ ID NO: 14162
  GFR-binding peptide
  MOD_RES (4)..(5)..(37)..(39): Xaa is C or S

SEQ ID NO: 39461 - protein, 39 aa, Artificial Sequence; identical to SEQ ID NO: 14163
  GFR-binding peptide
  MOD_RES (2)..(3)..(36)..(38): Xaa is C or S
  MOD_RES (17)..(18)..(19)..(20)..(21): Xaa is A or G
  MOD_RES (22)..(23)..(24)..(25): Xaa is A or G or is absent

SEQ ID NO: 39462 - protein, 41 aa, Artificial Sequence; identical to SEQ ID NO: 15902
  GFR-binding peptide
  MOD_RES (5)..(6)..(40): Xaa is C or S
  MOD_RES (20)..(21)..(22)..(23)..(24): Xaa is A or G
  MOD_RES (25)..(26)..(27)..(28): Xaa is A or G or is absent

SEQ ID NO: 39463 - protein, 35 aa, Artificial Sequence; identical to SEQ ID NO: 14164
  GFR-binding peptide
  MOD_RES (1)..(32)..(34): Xaa is C or S

SEQ ID NO: 39464 - protein, 37 aa, Artificial Sequence; identical to SEQ ID NO: 15903
  GFR-binding peptide
  MOD_RES (1)..(2)..(36): Xaa is C or S
  MOD_RES (16)..(17)..(18)..(19)..(20): Xaa is A or G
  MOD_RES (21)..(22)..(23)..(24): Xaa is A or G or is absent

SEQ ID NO: 39465 - protein, 38 aa, Artificial Sequence; identical to SEQ ID NO: 14165
  GFR-binding peptide
  MOD_RES (5)..(6): Xaa is C or S
  MOD_RES (20)..(21)..(22)..(23)..(24): Xaa is A or G
  MOD_RES (25)..(26)..(27)..(28): Xaa is A or G or is absent

SEQ ID NO: 39466 - protein, 34 aa, Artificial Sequence; identical to SEQ ID NO: 15905
  GFR-binding peptide
  MOD_RES (1)..(1): Xaa is C or S
  MOD_RES (15)..(16)..(17)..(18)..(19): Xaa is A or G
  MOD_RES (20)..(21)..(22)..(23): Xaa is A or G or is absent

SEQ ID NO: 39467 - protein, 36 aa, Artificial Sequence; identical to SEQ ID NO: 14167
  GFR-binding peptide
  MOD_RES (4)..(5): Xaa is C or S

SEQ ID NO: 39468 - protein, 32 aa, Artificial Sequence; identical to SEQ ID NO: 15906
  GFR-binding peptide
  MOD_RES (1)..(2): Xaa is C or S

SEQ ID NO: 39469 - protein, 32 aa, Artificial Sequence; identical to SEQ ID NO: 15907
  GFR-binding peptide
  MOD_RES (31)..(31): Xaa is C or S

SEQ ID NO: 39470 - protein, 34 aa, Artificial Sequence; identical to SEQ ID NO: 14168
  GFR-binding peptide
  MOD_RES (31)..(33): Xaa is C or S

SEQ ID NO: 39471 - protein, 40 aa, Artificial Sequence; identical to SEQ ID NO: 6831
  GFR-binding peptide
  MOD_RES (6)..(7)..(38)..(40): Xaa is C or S

SEQ ID NO: 39472 - protein, 36 aa, Artificial Sequence; identical to SEQ ID NO: 15908
  GFR-binding peptide
  MOD_RES (2)..(3)..(34)..(36): Xaa is C or S

SEQ ID NO: 39473 - protein, 37 aa, Artificial Sequence; identical to SEQ ID NO: 14170
  GFR-binding peptide
  MOD_RES (1)..(34)..(36): Xaa is C or S
  MOD_RES (15)..(16)..(17)..(18)..(19): Xaa is A or G
  MOD_RES (20)..(21)..(22)..(23): Xaa is A or G or is absent

SEQ ID NO: 39474 - protein, 39 aa, Artificial Sequence; identical to SEQ ID NO: 15910
  GFR-binding peptide
  MOD_RES (6)..(7)..(39): Xaa is C or S

SEQ ID NO: 39475 - protein, 36 aa, Artificial Sequence; identical to SEQ ID NO: 15911
  GFR-binding peptide
  MOD_RES (1)..(35): Xaa is C or S
  MOD_RES (15)..(16)..(17)..(18)..(19): Xaa is A or G
  MOD_RES (20)..(21)..(22)..(23): Xaa is A or G or is absent

SEQ ID NO: 39476 - protein, 40 aa, Artificial Sequence; identical to SEQ ID NO: 15912
  GFR-binding peptide
  MOD_RES (5)..(6)..(37)..(39): Xaa is C or S

SEQ ID NO: 39477 - protein, 37 aa, Artificial Sequence; identical to SEQ ID NO: 14171
  GFR-binding peptide
  MOD_RES (34)..(36): Xaa is C or S
  MOD_RES (14)..(15)..(16)..(17)..(18): Xaa is A or G
  MOD_RES (19)..(20)..(21)..(22): Xaa is A or G or is absent

SEQ ID NO: 39478 - protein, 39 aa, Artificial Sequence; identical to SEQ ID NO: 15914
  GFR-binding peptide
  MOD_RES (4)..(5)..(36)..(38): Xaa is C or S

SEQ ID NO: 39479 - protein, 39 aa, Artificial Sequence; identical to SEQ ID NO: 8610
  GFR-binding peptide
  MOD_RES (6)..(7)..(38): Xaa is C or S

SEQ ID NO: 39480 - protein, 40 aa, Artificial Sequence; identical to SEQ ID NO: 6834
  GFR-binding peptide
  MOD_RES (5)..(6)..(40): Xaa is C or S
  MOD_RES (20)..(21)..(22)..(23)..(24): Xaa is A or G
  MOD_RES (25)..(26)..(27)..(28): Xaa is A or G or is absent

SEQ ID NO: 39481 - protein, 33 aa, Artificial Sequence; identical to SEQ ID NO: 14174
  GFR-binding peptide
  MOD_RES (32)..(32): Xaa is C or S

SEQ ID NO: 39482 - protein, 38 aa, Artificial Sequence; identical to SEQ ID NO: 8613
  GFR-binding peptide
  MOD_RES (3)..(4)..(37): Xaa is C or S
  MOD_RES (18)..(19)..(20)..(21)..(22): Xaa is A or G
  MOD_RES (23)..(24)..(25)..(26): Xaa is A or G or is absent

SEQ ID NO: 39483 - protein, 35 aa, Artificial Sequence; identical to SEQ ID NO: 14175
  GFR-binding peptide
  MOD_RES (2)..(3)..(35): Xaa is C or S

SEQ ID NO: 39484 - protein, 36 aa, Artificial Sequence; identical to SEQ ID NO: 15917
  GFR-binding peptide
  MOD_RES (3)..(4): Xaa is C or S
  MOD_RES (18)..(19)..(20)..(21)..(22): Xaa is A or G
  MOD_RES (23)..(24)..(25)..(26): Xaa is A or G or is absent

SEQ ID NO: 39485 - protein, 40 aa, Artificial Sequence; identical to SEQ ID NO: 14176
  GFR-binding peptide
  MOD_RES (4)..(5)..(37)..(39): Xaa is C or S

SEQ ID NO: 39486 - protein, 38 aa, Artificial Sequence; identical to SEQ ID NO: 15918
  GFR-binding peptide
  MOD_RES (1)..(35)..(37): Xaa is C or S
  MOD_RES (15)..(16)..(17)..(18)..(19): Xaa is A or G
  MOD_RES (20)..(21)..(22)..(23): Xaa is A or G or is absent

SEQ ID NO: 39487 - protein, 35 aa, Artificial Sequence; identical to SEQ ID NO: 15919
  GFR-binding peptide
  MOD_RES (33)..(35): Xaa is C or S
  MOD_RES (14)..(15)..(16)..(17)..(18): Xaa is A or G
  MOD_RES (19)..(20)..(21)..(22): Xaa is A or G or is absent

SEQ ID NO: 39488 - protein, 32 aa, Artificial Sequence; identical to SEQ ID NO: 14177
  GFR-binding peptide
  MOD_RES (31)..(31): Xaa is C or S

SEQ ID NO: 39489 - protein, 36 aa, Artificial Sequence; identical to SEQ ID NO: 14178
  GFR-binding peptide
  MOD_RES (1)..(2)..(35): Xaa is C or S
  MOD_RES (16)..(17)..(18)..(19)..(20): Xaa is A or G
  MOD_RES (21)..(22)..(23)..(24): Xaa is A or G or is absent

SEQ ID NO: 39490 - protein, 38 aa, Artificial Sequence; identical to SEQ ID NO: 15920
  GFR-binding peptide
  MOD_RES (3)..(4)..(38): Xaa is C or S
  MOD_RES (18)..(19)..(20)..(21)..(22): Xaa is A or G
  MOD_RES (23)..(24)..(25)..(26): Xaa is A or G or is absent

SEQ ID NO: 39491 - protein, 39 aa, Artificial Sequence; identical to SEQ ID NO: 8615
  GFR-binding peptide
  MOD_RES (1)..(2)..(36)..(38): Xaa is C or S
  MOD_RES (16)..(17)..(18)..(19)..(20): Xaa is A or G
  MOD_RES (21)..(22)..(23)..(24): Xaa is A or G or is absent

SEQ ID NO: 39492 - protein, 36 aa, Artificial Sequence; identical to SEQ ID NO: 14179
  GFR-binding peptide
  MOD_RES (1)..(2)..(36): Xaa is C or S
  MOD_RES (16)..(17)..(18)..(19)..(20): Xaa is A or G
  MOD_RES (21)..(22)..(23)..(24): Xaa is A or G or is absent

SEQ ID NO: 39493 - protein, 34 aa, Artificial Sequence; identical to SEQ ID NO: 14180
  GFR-binding peptide
  MOD_RES (1)..(2): Xaa is C or S
  MOD_RES (16)..(17)..(18)..(19)..(20): Xaa is A or G
  MOD_RES (21)..(22)..(23)..(24): Xaa is A or G or is absent

SEQ ID NO: 39494 - protein, 36 aa, Artificial Sequence; identical to SEQ ID NO: 15922
  GFR-binding peptide
  MOD_RES (1)..(2)..(35): Xaa is C or S
  MOD_RES (16)..(17)..(18)..(19)..(20): Xaa is A or G
  MOD_RES (21)..(22)..(23)..(24): Xaa is A or G or is absent

SEQ ID NO: 39495 - protein, 44 aa, Artificial Sequence; identical to SEQ ID NO: 15923
  GFR-binding peptide
  MOD_RES (6)..(7)..(41)..(43): Xaa is C or S
  MOD_RES (21)..(22)..(23)..(24)..(25): Xaa is A or G
  MOD_RES (26)..(27)..(28)..(29): Xaa is A or G or is absent

SEQ ID NO: 39496 - protein, 33 aa, Artificial Sequence; identical to SEQ ID NO: 6840
  GFR-binding peptide
  MOD_RES (1)..(2)..(33): Xaa is C or S

SEQ ID NO: 39497 - protein, 39 aa, Artificial Sequence; identical to SEQ ID NO: 14182
  GFR-binding peptide
  MOD_RES (5)..(6)..(39): Xaa is C or S
  MOD_RES (20)..(21)..(22)..(23)..(24): Xaa is A or G
  MOD_RES (25)..(26)..(27)..(28): Xaa is A or G or is absent

SEQ ID NO: 39498 - protein, 36 aa, Artificial Sequence; identical to SEQ ID NO: 15924
  GFR-binding peptide
  MOD_RES (1)..(2)..(36): Xaa is C or S
  MOD_RES (16)..(17)..(18)..(19)..(20): Xaa is A or G
  MOD_RES (21)..(22)..(23)..(24): Xaa is A or G or is absent

SEQ ID NO: 39499 - protein, 35 aa, Artificial Sequence
  GFR-binding peptide
  MOD_RES (2)..(3): Xaa is C or S
  MOD_RES (17)..(18)..(19)..(20)..(21): Xaa is A or G
  MOD_RES (22)..(23)..(24)..(25): Xaa is A or G or is absent
PXXVSQDLEPLTILYYXXXXXXXXXEQLSNMIVKS

SEQ ID NO: 39500 - protein, 37 aa, Artificial Sequence; identical to SEQ ID NO: 15925
  GFR-binding peptide
  MOD_RES (6)..(7): Xaa is C or S

SEQ ID NO: 39501 - protein, 35 aa, Artificial Sequence; identical to SEQ ID NO: 6849
  GFR-binding peptide
  MOD_RES (1)..(2)..(35): Xaa is C or S
  MOD_RES (16)..(17)..(18)..(19)..(20): Xaa is A or G
  MOD_RES (21)..(22)..(23)..(24): Xaa is A or G or is absent

SEQ ID NO: 39502 - protein, 36 aa, Artificial Sequence; identical to SEQ ID NO: 14186
  GFR-binding peptide
  MOD_RES (2)..(3): Xaa is C or S
  MOD_RES (17)..(18)..(19)..(20)..(21): Xaa is A or G
  MOD_RES (22)..(23)..(24)..(25): Xaa is A or G or is absent

SEQ ID NO: 39503 - protein, 36 aa, Artificial Sequence; identical to SEQ ID NO: 8629
  GFR-binding peptide
  MOD_RES (34)..(36): Xaa is C or S
  MOD_RES (14)..(15)..(16)..(17)..(18): Xaa is A or G
  MOD_RES (19)..(20)..(21)..(22): Xaa is A or G or is absent

SEQ ID NO: 39504 - protein, 37 aa, Artificial Sequence; identical to SEQ ID NO: 8631
  GFR-binding peptide
  MOD_RES (1)..(34)..(36): Xaa is C or S
  MOD_RES (15)..(16)..(17)..(18)..(19): Xaa is A or G
  MOD_RES (20)..(21)..(22)..(23): Xaa is A or G or is absent

SEQ ID NO: 39505 - protein, 33 aa, Artificial Sequence; identical to SEQ ID NO: 14189
  GFR-binding peptide
  MOD_RES (1)..(32): Xaa is C or S

SEQ ID NO: 39506 - protein, 35 aa, Artificial Sequence
  GFR-binding peptide
  MOD_RES (1)..(34): Xaa is C or S
  MOD_RES (15)..(16)..(17)..(18)..(19): Xaa is A or G
  MOD_RES (20)..(21)..(22)..(23): Xaa is A or G or is absent
XVSQDLEPLTILYYXXXXXXXXXEQLSNMIVKSXK

SEQ ID NO: 39507 - protein, 37 aa, Artificial Sequence; identical to SEQ ID NO: 15929
  GFR-binding peptide
  MOD_RES (1)..(2)..(36): Xaa is C or S
  MOD_RES (16)..(17)..(18)..(19)..(20): Xaa is A or G
  MOD_RES (21)..(22)..(23)..(24): Xaa is A or G or is absent

SEQ ID NO: 39508 - protein, 36 aa, Artificial Sequence; identical to SEQ ID NO: 14190
  GFR-binding peptide
  MOD_RES (4)..(5): Xaa is C or S

SEQ ID NO: 39509 - protein, 35 aa, Artificial Sequence; identical to SEQ ID NO: 15930
  GFR-binding peptide
  MOD_RES (2)..(3): Xaa is C or S
  MOD_RES (17)..(18)..(19)..(20)..(21): Xaa is A or G
  MOD_RES (22)..(23)..(24)..(25): Xaa is A or G or is absent

SEQ ID NO: 39510 - protein, 38 aa, Artificial Sequence; identical to SEQ ID NO: 15931
  GFR-binding peptide
  MOD_RES (2)..(3)..(35)..(37): Xaa is C or S

SEQ ID NO: 39511 - protein, 36 aa, Artificial Sequence; identical to SEQ ID NO: 14191
  GFR-binding peptide
  MOD_RES (2)..(3)..(35): Xaa is C or S

SEQ ID NO: 39512 - protein, 35 aa, Artificial Sequence; identical to SEQ ID NO: 14192
  GFR-binding peptide
  MOD_RES (2)..(3): Xaa is C or S
  MOD_RES (17)..(18)..(19)..(20)..(21): Xaa is A or G
  MOD_RES (22)..(23)..(24)..(25): Xaa is A or G or is absent

SEQ ID NO: 39513 - protein, 38 aa, Artificial Sequence; identical to SEQ ID NO: 15932
  GFR-binding peptide
  MOD_RES (1)..(2)..(36)..(38): Xaa is C or S
  MOD_RES (16)..(17)..(18)..(19)..(20): Xaa is A or G
  MOD_RES (21)..(22)..(23)..(24): Xaa is A or G or is absent

SEQ ID NO: 39514 - protein, 35 aa, Artificial Sequence; identical to SEQ ID NO: 15933
  GFR-binding peptide
  MOD_RES (2)..(3)..(35): Xaa is C or S

SEQ ID NO: 39515 - protein, 33 aa, Artificial Sequence; identical to SEQ ID NO: 6857
  GFR-binding peptide
  MOD_RES (32)..(32): Xaa is C or S

SEQ ID NO: 39516 - protein, 42 aa, Artificial Sequence; identical to SEQ ID NO: 14194
  GFR-binding peptide
  MOD_RES (6)..(7)..(39)..(41): Xaa is C or S

SEQ ID NO: 39517 - protein, 34 aa, Artificial Sequence; identical to SEQ ID NO: 14196
  GFR-binding peptide
  MOD_RES (3)..(3): Xaa is C or S

SEQ ID NO: 39518 - protein, 41 aa, Artificial Sequence; identical to SEQ ID NO: 15935
  GFR-binding peptide
  MOD_RES (6)..(7)..(41): Xaa is C or S
  MOD_RES (21)..(22)..(23)..(24)..(25): Xaa is A or G
  MOD_RES (26)..(27)..(28)..(29): Xaa is A or G or is absent

SEQ ID NO: 39519 - protein, 34 aa, Artificial Sequence; identical to SEQ ID NO: 15936
  GFR-binding peptide
  MOD_RES (2)..(3): Xaa is C or S

SEQ ID NO: 39520 - protein, 40 aa, Artificial Sequence; identical to SEQ ID NO: 15937
  GFR-binding peptide
  MOD_RES (4)..(5)..(38)..(40): Xaa is C or S
  MOD_RES (19)..(20)..(21)..(22)..(23): Xaa is A or G
  MOD_RES (24)..(25)..(26)..(27): Xaa is A or G or is absent

SEQ ID NO: 39521 - protein, 39 aa, Artificial Sequence; identical to SEQ ID NO: 14197
  GFR-binding peptide
  MOD_RES (6)..(38): Xaa is C or S

SEQ ID NO: 39522 - protein, 37 aa, Artificial Sequence; identical to SEQ ID NO: 15938
  GFR-binding peptide
  MOD_RES (1)..(2)..(34)..(36): Xaa is C or S

SEQ ID NO: 39523 - protein, 34 aa, Artificial Sequence; identical to SEQ ID NO: 14198
  GFR-binding peptide
  MOD_RES (1)..(2): Xaa is C or S
  MOD_RES (16)..(17)..(18)..(19)..(20): Xaa is A or G
  MOD_RES (21)..(22)..(23)..(24): Xaa is A or G or is absent

SEQ ID NO: 39524 - protein, 35 aa, Artificial Sequence; identical to SEQ ID NO: 14200
  GFR-binding peptide
  MOD_RES (32)..(34): Xaa is C or S

SEQ ID NO: 39525 - protein, 36 aa, Artificial Sequence; identical to SEQ ID NO: 15939
  GFR-binding peptide
  MOD_RES (1)..(2)..(36): Xaa is C or S
  MOD_RES (16)..(17)..(18)..(19)..(20): Xaa is A or G
  MOD_RES (21)..(22)..(23)..(24): Xaa is A or G or is absent

SEQ ID NO: 39526 - protein, 36 aa, Artificial Sequence; identical to SEQ ID NO: 14201
  GFR-binding peptide
  MOD_RES (3)..(4): Xaa is C or S
  MOD_RES (18)..(19)..(20)..(21)..(22): Xaa is A or G
  MOD_RES (23)..(24)..(25)..(26): Xaa is A or G or is absent

SEQ ID NO: 39527 - protein, 36 aa, Artificial Sequence; identical to SEQ ID NO: 14202
  GFR-binding peptide
  MOD_RES (1)..(33)..(35): Xaa is C or S

SEQ ID NO: 39528 - protein, 36 aa, Artificial Sequence; identical to SEQ ID NO: 14204
  GFR-binding peptide
  MOD_RES (2)..(3): Xaa is C or S
  MOD_RES (17)..(18)..(19)..(20)..(21): Xaa is A or G
  MOD_RES (22)..(23)..(24)..(25): Xaa is A or G or is absent

SEQ ID NO: 39529 - protein, 37 aa, Artificial Sequence; identical to SEQ ID NO: 14205
  GFR-binding peptide
  MOD_RES (6)..(7): Xaa is C or S

SEQ ID NO: 39530 - protein, 37 aa, Artificial Sequence; identical to SEQ ID NO: 15941
  GFR-binding peptide
  MOD_RES (2)..(3)..(37): Xaa is C or S
  MOD_RES (17)..(18)..(19)..(20)..(21): Xaa is A or G
  MOD_RES (22)..(23)..(24)..(25): Xaa is A or G or is absent

SEQ ID NO: 39531 - protein, 40 aa, Artificial Sequence; identical to SEQ ID NO: 15943
  GFR-binding peptide
  MOD_RES (4)..(5)..(39): Xaa is C or S
  MOD_RES (19)..(20)..(21)..(22)..(23): Xaa is A or G
  MOD_RES (24)..(25)..(26)..(27): Xaa is A or G or is absent

SEQ ID NO: 39532 - protein, 30 aa, Artificial Sequence; identical to SEQ ID NO: 15944
  GFR-binding peptide

SEQ ID NO: 39533 - protein, 31 aa, Artificial Sequence; identical to SEQ ID NO: 15945
  GFR-binding peptide
  MOD_RES (31)..(31): Xaa is C or S

SEQ ID NO: 39534 - protein, 36 aa, Artificial Sequence; identical to SEQ ID NO: 14206
  GFR-binding peptide
  MOD_RES (4)..(5): Xaa is C or S

SEQ ID NO: 39535 - protein, 40 aa, Artificial Sequence; identical to SEQ ID NO: 6869
  GFR-binding peptide
  MOD_RES (3)..(4)..(37)..(39): Xaa is C or S
  MOD_RES (18)..(19)..(20)..(21)..(22): Xaa is A or G
  MOD_RES (23)..(24)..(25)..(26): Xaa is A or G or is absent

SEQ ID NO: 39536 - protein, 36 aa, Artificial Sequence; identical to SEQ ID NO: 14209
  GFR-binding peptide
  MOD_RES (5)..(6): Xaa is C or S

SEQ ID NO: 39537 - protein, 35 aa, Artificial Sequence; identical to SEQ ID NO: 15949
  GFR-binding peptide
  MOD_RES (1)..(2)..(34): Xaa is C or S

SEQ ID NO: 39538 - protein, 35 aa, Artificial Sequence; identical to SEQ ID NO: 15950
  GFR-binding peptide
  MOD_RES (1)..(2)..(34): Xaa is C or S

SEQ ID NO: 39539 - protein, 39 aa, Artificial Sequence; identical to SEQ ID NO: 15951
  GFR-binding peptide
  MOD_RES (7)..(39): Xaa is C or S

SEQ ID NO: 39540 - protein, 38 aa, Artificial Sequence; identical to SEQ ID NO: 8656
  GFR-binding peptide
  MOD_RES (4)..(5): Xaa is C or S
  MOD_RES (19)..(20)..(21)..(22)..(23): Xaa is A or G
  MOD_RES (24)..(25)..(26)..(27): Xaa is A or G or is absent

SEQ ID NO: 39541 - protein, 33 aa, Artificial Sequence; identical to SEQ ID NO: 14211
  GFR-binding peptide
  MOD_RES (32)..(32): Xaa is C or S

SEQ ID NO: 39542 - protein, 34 aa, Artificial Sequence; identical to SEQ ID NO: 15954
  GFR-binding peptide
  MOD_RES (1)..(2)..(33): Xaa is C or S

SEQ ID NO: 39543 - protein, 33 aa, Artificial Sequence; identical to SEQ ID NO: 15955
  GFR-binding peptide
  MOD_RES (1)..(1): Xaa is C or S
  MOD_RES (15)..(16)..(17)..(18)..(19): Xaa is A or G
  MOD_RES (20)..(21)..(22)..(23): Xaa is A or G or is absent

SEQ ID NO: 39544 - protein, 32 aa, Artificial Sequence; identical to SEQ ID NO: 15956
  GFR-binding peptide
  MOD_RES (32)..(32): Xaa is C or S

SEQ ID NO: 39545 - protein, 34 aa, Artificial Sequence; identical to SEQ ID NO: 14213
  GFR-binding peptide
  MOD_RES (1)..(2)..(34): Xaa is C or S

SEQ ID NO: 39546 - protein, 39 aa, Artificial Sequence
  GFR-binding peptide
  MOD_RES (3)..(4)..(37)..(39): Xaa is C or S
  MOD_RES (18)..(19)..(20)..(21)..(22): Xaa is A or G
  MOD_RES (23)..(24)..(25)..(26): Xaa is A or G or is absent
SPXXVSQDLEPLTILYYXXXXXXXXXEQLSNMIVKSXKX

SEQ ID NO: 39547 - protein, 32 aa, Artificial Sequence; identical to SEQ ID NO: 14215
  GFR-binding peptide
  MOD_RES (14)..(15)..(16)..(17)..(18): Xaa is A or G
  MOD_RES (19)..(20)..(21)..(22): Xaa is A or G or is absent

SEQ ID NO: 39548 - protein, 37 aa, Artificial Sequence; identical to SEQ ID NO: 14216
  GFR-binding peptide
  MOD_RES (4)..(36): Xaa is C or S

SEQ ID NO: 39549 - protein, 38 aa, Artificial Sequence; identical to SEQ ID NO: 15959
  GFR-binding peptide
  MOD_RES (4)..(5)..(38): Xaa is C or S
  MOD_RES (19)..(20)..(21)..(22)..(23): Xaa is A or G
  MOD_RES (24)..(25)..(26)..(27): Xaa is A or G or is absent

SEQ ID NO: 39550 - protein, 34 aa, Artificial Sequence; identical to SEQ ID NO: 15960
  GFR-binding peptide
  MOD_RES (1)..(2)..(34): Xaa is C or S

SEQ ID NO: 39551 - protein, 41 aa, Artificial Sequence; identical to SEQ ID NO: 15961
  GFR-binding peptide
  MOD_RES (6)..(40): Xaa is C or S
  MOD_RES (20)..(21)..(22)..(23)..(24): Xaa is A or G
  MOD_RES (25)..(26)..(27)..(28): Xaa is A or G or is absent

SEQ ID NO: 39552 - protein, 33 aa, Artificial Sequence; identical to SEQ ID NO: 15962
  GFR-binding peptide
  MOD_RES (33)..(33): Xaa is C or S
  MOD_RES (14)..(15)..(16)..(17)..(18): Xaa is A or G
  MOD_RES (19)..(20)..(21)..(22): Xaa is A or G or is absent

SEQ ID NO: 39553 - protein, 36 aa, Artificial Sequence; identical to SEQ ID NO: 15964
  GFR-binding peptide
  MOD_RES (2)..(3): Xaa is C or S
  MOD_RES (17)..(18)..(19)..(20)..(21): Xaa is A or G
  MOD_RES (22)..(23)..(24)..(25): Xaa is A or G or is absent

SEQ ID NO: 39554 - protein, 37 aa, Artificial Sequence; identical to SEQ ID NO: 14217
  GFR-binding peptide
  MOD_RES (1)..(35)..(37): Xaa is C or S
  MOD_RES (15)..(16)..(17)..(18)..(19): Xaa is A or G
  MOD_RES (20)..(21)..(22)..(23): Xaa is A or G or is absent

SEQ ID NO: 39555 - protein, 37 aa, Artificial Sequence; identical to SEQ ID NO: 14218
  GFR-binding peptide
  MOD_RES (5)..(6): Xaa is C or S

SEQ ID NO: 39556 - protein, 36 aa, Artificial Sequence; identical to SEQ ID NO: 14219
  GFR-binding peptide
  MOD_RES (1)..(34)..(36): Xaa is C or S
  MOD_RES (15)..(16)..(17)..(18)..(19): Xaa is A or G
  MOD_RES (20)..(21)..(22)..(23): Xaa is A or G or is absent

SEQ ID NO: 39557 - protein, 37 aa, Artificial Sequence; identical to SEQ ID NO: 15965
  GFR-binding peptide
  MOD_RES (2)..(3)..(35)..(37): Xaa is C or S

SEQ ID NO: 39558 - protein, 34 aa, Artificial Sequence; identical to SEQ ID NO: 15966
  GFR-binding peptide
  MOD_RES (1)..(34): Xaa is C or S
  MOD_RES (15)..(16)..(17)..(18)..(19): Xaa is A or G
  MOD_RES (20)..(21)..(22)..(23): Xaa is A or G or is absent

SEQ ID NO: 39559 - protein, 38 aa, Artificial Sequence; identical to SEQ ID NO: 14220
  GFR-binding peptide
  MOD_RES (6)..(6): Xaa is C or S
  MOD_RES (20)..(21)..(22)..(23)..(24): Xaa is A or G
  MOD_RES (25)..(26)..(27)..(28): Xaa is A or G or is absent

SEQ ID NO: 39560 - protein, 36 aa, Artificial Sequence; identical to SEQ ID NO: 14221
  GFR-binding peptide
  MOD_RES (1)..(2)..(36): Xaa is C or S
  MOD_RES (16)..(17)..(18)..(19)..(20): Xaa is A or G
  MOD_RES (21)..(22)..(23)..(24): Xaa is A or G or is absent

SEQ ID NO: 39561 - protein, 34 aa, Artificial Sequence; identical to SEQ ID NO: 15967
  GFR-binding peptide
  MOD_RES (1)..(2): Xaa is C or S
  MOD_RES (16)..(17)..(18)..(19)..(20): Xaa is A or G
  MOD_RES (21)..(22)..(23)..(24): Xaa is A or G or is absent

SEQ ID NO: 39562 - protein, 35 aa, Artificial Sequence; identical to SEQ ID NO: 6886
  GFR-binding peptide
  MOD_RES (3)..(4): Xaa is C or S

SEQ ID NO: 39563 - protein, 34 aa, Artificial Sequence; identical to SEQ ID NO: 15969
  GFR-binding peptide
  MOD_RES (2)..(34): Xaa is C or S

SEQ ID NO: 39564 - protein, 36 aa, Artificial Sequence; identical to SEQ ID NO: 15970
  GFR-binding peptide
  MOD_RES (1)..(35): Xaa is C or S
  MOD_RES (15)..(16)..(17)..(18)..(19): Xaa is A or G
  MOD_RES (20)..(21)..(22)..(23): Xaa is A or G or is absent

SEQ ID NO: 39565 - protein, 37 aa, Artificial Sequence; identical to SEQ ID NO: 15971
  GFR-binding peptide
  MOD_RES (2)..(3)..(37): Xaa is C or S
  MOD_RES (17)..(18)..(19)..(20)..(21): Xaa is A or G
  MOD_RES (22)..(23)..(24)..(25): Xaa is A or G or is absent

SEQ ID NO: 39566 - protein, 44 aa, Artificial Sequence; identical to SEQ ID NO: 14225
  GFR-binding peptide
  MOD_RES (6)..(7)..(41)..(43): Xaa is C or S
  MOD_RES (21)..(22)..(23)..(24)..(25): Xaa is A or G
  MOD_RES (26)..(27)..(28)..(29): Xaa is A or G or is absent

SEQ ID NO: 39567 - protein, 35 aa, Artificial Sequence; identical to SEQ ID NO: 14226
  GFR-binding peptide
  MOD_RES (1)..(33)..(35): Xaa is C or S

SEQ ID NO: 39568 - protein, 39 aa, Artificial Sequence; identical to SEQ ID NO: 14227
  GFR-binding peptide
  MOD_RES (3)..(4)..(37)..(39): Xaa is C or S
  MOD_RES (18)..(19)..(20)..(21)..(22): Xaa is A or G
  MOD_RES (23)..(24)..(25)..(26): Xaa is A or G or is absent

SEQ ID NO: 39569 - protein, 38 aa, Artificial Sequence; identical to SEQ ID NO: 8674
  GFR-binding peptide
  MOD_RES (3)..(4)..(35)..(37): Xaa is C or S

SEQ ID NO: 39570 - protein, 37 aa, Artificial Sequence; identical to SEQ ID NO: 15974
  GFR-binding peptide
  MOD_RES (3)..(4): Xaa is C or S
  MOD_RES (18)..(19)..(20)..(21)..(22): Xaa is A or G
  MOD_RES (23)..(24)..(25)..(26): Xaa is A or G or is absent

SEQ ID NO: 39571 - protein, 35 aa, Artificial Sequence; identical to SEQ ID NO: 14228
  GFR-binding peptide
  MOD_RES (32)..(34): Xaa is C or S

SEQ ID NO: 39572 - protein, 37 aa, Artificial Sequence; identical to SEQ ID NO: 14230
  GFR-binding peptide
  MOD_RES (4)..(5): Xaa is C or S
  MOD_RES (19)..(20)..(21)..(22)..(23): Xaa is A or G
  MOD_RES (24)..(25)..(26)..(27): Xaa is A or G or is absent

SEQ ID NO: 39573 - protein, 39 aa, Artificial Sequence; identical to SEQ ID NO: 14231
  GFR-binding peptide
  MOD_RES (3)..(4)..(37)..(39): Xaa is C or S
  MOD_RES (18)..(19)..(20)..(21)..(22): Xaa is A or G
  MOD_RES (23)..(24)..(25)..(26): Xaa is A or G or is absent

SEQ ID NO: 39574 - protein, 38 aa, Artificial Sequence; identical to SEQ ID NO: 15975
  GFR-binding peptide
  MOD_RES (1)..(2)..(36)..(38): Xaa is C or S
  MOD_RES (16)..(17)..(18)..(19)..(20): Xaa is A or G
  MOD_RES (21)..(22)..(23)..(24): Xaa is A or G or is absent

SEQ ID NO: 39575 - protein, 39 aa, Artificial Sequence; identical to SEQ ID NO: 14232
  GFR-binding peptide
  MOD_RES (2)..(3)..(37)..(39): Xaa is C or S
  MOD_RES (17)..(18)..(19)..(20)..(21): Xaa is A or G
  MOD_RES (22)..(23)..(24)..(25): Xaa is A or G or is absent

SEQ ID NO: 39576 - protein, 36 aa, Artificial Sequence; identical to SEQ ID NO: 15977
  GFR-binding peptide
  MOD_RES (34)..(36): Xaa is C or S
  MOD_RES (14)..(15)..(16)..(17)..(18): Xaa is A or G
  MOD_RES (19)..(20)..(21)..(22): Xaa is A or G or is absent

SEQ ID NO: 39577 - protein, 33 aa, Artificial Sequence; identical to SEQ ID NO: 14234
  GFR-binding peptide
  MOD_RES (1)..(1): Xaa is C or S
  MOD_RES (15)..(16)..(17)..(18)..(19): Xaa is A or G
  MOD_RES (20)..(21)..(22)..(23): Xaa is A or G or is absent

SEQ ID NO: 39578 - protein, 38 aa, Artificial Sequence; identical to SEQ ID NO: 14235
  GFR-binding peptide
  MOD_RES (2)..(3)..(37): Xaa is C or S
  MOD_RES (17)..(18)..(19)..(20)..(21): Xaa is A or G
  MOD_RES (22)..(23)..(24)..(25): Xaa is A or G or is absent

SEQ ID NO: 39579 - protein, 32 aa, Artificial Sequence; identical to SEQ ID NO: 15978
  GFR-binding peptide
  MOD_RES (1)..(2): Xaa is C or S

SEQ ID NO: 39580 - protein, 39 aa, Artificial Sequence; identical to SEQ ID NO: 14237
  GFR-binding peptide
  MOD_RES (3)..(4)..(38): Xaa is C or S
  MOD_RES (18)..(19)..(20)..(21)..(22): Xaa is A or G
  MOD_RES (23)..(24)..(25)..(26): Xaa is A or G or is absent

SEQ ID NO: 39581 - protein, 36 aa, Artificial Sequence; identical to SEQ ID NO: 15980
  GFR-binding peptide
  MOD_RES (2)..(3)..(36): Xaa is C or S
  MOD_RES (17)..(18)..(19)..(20)..(21): Xaa is A or G
  MOD_RES (22)..(23)..(24)..(25): Xaa is A or G or is absent

SEQ ID NO: 39582 - protein, 39 aa, Artificial Sequence; identical to SEQ ID NO: 14239
  GFR-binding peptide
  MOD_RES (5)..(6)..(37)..(39): Xaa is C or S

SEQ ID NO: 39583 - protein, 38 aa, Artificial Sequence; identical to SEQ ID NO: 6898
  GFR-binding peptide
  MOD_RES (2)..(3)..(36)..(38): Xaa is C or S
  MOD_RES (17)..(18)..(19)..(20)..(21): Xaa is A or G
  MOD_RES (22)..(23)..(24)..(25): Xaa is A or G or is absent

SEQ ID NO: 39584 - protein, 41 aa, Artificial Sequence; identical to SEQ ID NO: 15981
  GFR-binding peptide
  MOD_RES (5)..(6)..(40): Xaa is C or S
  MOD_RES (20)..(21)..(22)..(23)..(24): Xaa is A or G
  MOD_RES (25)..(26)..(27)..(28): Xaa is A or G or is absent

SEQ ID NO: 39585 - protein, 34 aa, Artificial Sequence; identical to SEQ ID NO: 14241
  GFR-binding peptide
  MOD_RES (1)..(2): Xaa is C or S
  MOD_RES (16)..(17)..(18)..(19)..(20): Xaa is A or G
  MOD_RES (21)..(22)..(23)..(24): Xaa is A or G or is absent

SEQ ID NO: 39586 - protein, 39 aa, Artificial Sequence; identical to SEQ ID NO: 15982
  GFR-binding peptide
  MOD_RES (3)..(4)..(38): Xaa is C or S
  MOD_RES (18)..(19)..(20)..(21)..(22): Xaa is A or G
  MOD_RES (23)..(24)..(25)..(26): Xaa is A or G or is absent

SEQ ID NO: 39587 - protein, 37 aa, Artificial Sequence; identical to SEQ ID NO: 6901
  GFR-binding peptide
  MOD_RES (3)..(4): Xaa is C or S
  MOD_RES (18)..(19)..(20)..(21)..(22): Xaa is A or G
  MOD_RES (23)..(24)..(25)..(26): Xaa is A or G or is absent

SEQ ID NO: 39588 - protein, 38 aa, Artificial Sequence; identical to SEQ ID NO: 15983
  GFR-binding peptide
  MOD_RES (1)..(35)..(37): Xaa is C or S
  MOD_RES (15)..(16)..(17)..(18)..(19): Xaa is A or G
  MOD_RES (20)..(21)..(22)..(23): Xaa is A or G or is absent

SEQ ID NO: 39589 - protein, 38 aa, Artificial Sequence; identical to SEQ ID NO: 15984
  GFR-binding peptide
  MOD_RES (3)..(4)..(36)..(38): Xaa is C or S

SEQ ID NO: 39590 - protein, 33 aa, Artificial Sequence; identical to SEQ ID NO: 14243
  GFR-binding peptide
  MOD_RES (2)..(3): Xaa is C or S

SEQ ID NO: 39591 - protein, 40 aa, Artificial Sequence; identical to SEQ ID NO: 14244
  GFR-binding peptide
  MOD_RES (6)..(7)..(40): Xaa is C or S
  MOD_RES (21)..(22)..(23)..(24)..(25): Xaa is A or G
  MOD_RES (26)..(27)..(28)..(29): Xaa is A or G or is absent

SEQ ID NO: 39592 - protein, 39 aa, Artificial Sequence; identical to SEQ ID NO: 15985
  GFR-binding peptide
  MOD_RES (4)..(5)..(37)..(39): Xaa is C or S

SEQ ID NO: 39593 - protein, 38 aa, Artificial Sequence; identical to SEQ ID NO: 8680
  GFR-binding peptide
  MOD_RES (5)..(6)..(37): Xaa is C or S

SEQ ID NO: 39594 - protein, 44 aa, Artificial Sequence; identical to SEQ ID NO: 14245
  GFR-binding peptide
  MOD_RES (6)..(7)..(41)..(43): Xaa is C or S
  MOD_RES (21)..(22)..(23)..(24)..(25): Xaa is A or G
  MOD_RES (26)..(27)..(28)..(29): Xaa is A or G or is absent

SEQ ID NO: 39595 - protein, 40 aa, Artificial Sequence; identical to SEQ ID NO: 14246
  GFR-binding peptide
  MOD_RES (5)..(39): Xaa is C or S
  MOD_RES (19)..(20)..(21)..(22)..(23): Xaa is A or G
  MOD_RES (24)..(25)..(26)..(27): Xaa is A or G or is absent

SEQ ID NO: 39596 - protein, 32 aa, Artificial Sequence; identical to SEQ ID NO: 6905
  GFR-binding peptide
  MOD_RES (14)..(15)..(16)..(17)..(18): Xaa is A or G
  MOD_RES (19)..(20)..(21)..(22): Xaa is A or G or is absent

SEQ ID NO: 39597 - protein, 34 aa, Artificial Sequence; identical to SEQ ID NO: 14249
  GFR-binding peptide
  MOD_RES (1)..(1): Xaa is C or S
  MOD_RES (15)..(16)..(17)..(18)..(19): Xaa is A or G
  MOD_RES (20)..(21)..(22)..(23): Xaa is A or G or is absent

SEQ ID NO: 39598 - protein, 36 aa, Artificial Sequence; identical to SEQ ID NO: 15987
  GFR-binding peptide
  MOD_RES (2)..(3): Xaa is C or S
  MOD_RES (17)..(18)..(19)..(20)..(21): Xaa is A or G
  MOD_RES (22)..(23)..(24)..(25): Xaa is A or G or is absent

SEQ ID NO: 39599 - protein, 38 aa, Artificial Sequence; identical to SEQ ID NO: 14250
  GFR-binding peptide
  MOD_RES (2)..(3)..(37): Xaa is C or S
  MOD_RES (17)..(18)..(19)..(20)..(21): Xaa is A or G
  MOD_RES (22)..(23)..(24)..(25): Xaa is A or G or is absent

SEQ ID NO: 39600 - protein, 32 aa, Artificial Sequence; identical to SEQ ID NO: 15988
  GFR-binding peptide
  MOD_RES (1)..(1): Xaa is C or S

SEQ ID NO: 39601 - protein, 40 aa, Artificial Sequence; identical to SEQ ID NO: 15989
  GFR-binding peptide
  MOD_RES (6)..(7)..(39): Xaa is C or S

SEQ ID NO: 39602 - protein, 41 aa, Artificial Sequence; identical to SEQ ID NO: 15990
  GFR-binding peptide
  MOD_RES (3)..(4)..(38)..(40): Xaa is C or S
  MOD_RES (18)..(19)..(20)..(21)..(22): Xaa is A or G
  MOD_RES (23)..(24)..(25)..(26): Xaa is A or G or is absent

SEQ ID NO: 39603 - protein, 38 aa, Artificial Sequence; identical to SEQ ID NO: 14251
  GFR-binding peptide
  MOD_RES (1)..(2)..(36)..(38): Xaa is C or S
  MOD_RES (16)..(17)..(18)..(19)..(20): Xaa is A or G
  MOD_RES (21)..(22)..(23)..(24): Xaa is A or G or is absent

SEQ ID NO: 39604 - protein, 36 aa, Artificial Sequence; identical to SEQ ID NO: 15991
  GFR-binding peptide
  MOD_RES (2)..(3)..(36): Xaa is C or S
  MOD_RES (17)..(18)..(19)..(20)..(21): Xaa is A or G
  MOD_RES (22)..(23)..(24)..(25): Xaa is A or G or is absent

SEQ ID NO: 39605 - protein, 35 aa, Artificial Sequence; identical to SEQ ID NO: 8688
  GFR-binding peptide
  MOD_RES (1)..(2)..(34): Xaa is C or S

SEQ ID NO: 39606 - protein, 40 aa, Artificial Sequence; identical to SEQ ID NO: 14252
  GFR-binding peptide
  MOD_RES (3)..(4)..(37)..(39): Xaa is C or S
  MOD_RES (18)..(19)..(20)..(21)..(22): Xaa is A or G
  MOD_RES (23)..(24)..(25)..(26): Xaa is A or G or is absent

SEQ ID NO: 39607 - protein, 34 aa, Artificial Sequence; identical to SEQ ID NO: 15993
  GFR-binding peptide
  MOD_RES (34)..(34): Xaa is C or S
  MOD_RES (14)..(15)..(16)..(17)..(18): Xaa is A or G
  MOD_RES (19)..(20)..(21)..(22): Xaa is A or G or is absent

SEQ ID NO: 39608 - protein, 32 aa, Artificial Sequence; identical to SEQ ID NO: 14253
  GFR-binding peptide
  MOD_RES (1)..(2): Xaa is C or S

SEQ ID NO: 39609 - protein, 37 aa, Artificial Sequence; identical to SEQ ID NO: 14254
  GFR-binding peptide
  MOD_RES (1)..(35)..(37): Xaa is C or S
  MOD_RES (15)..(16)..(17)..(18)..(19): Xaa is A or G
  MOD_RES (20)..(21)..(22)..(23): Xaa is A or G or is absent

SEQ ID NO: 39610 - protein, 37 aa, Artificial Sequence; identical to SEQ ID NO: 8693
  GFR-binding peptide
  MOD_RES (3)..(4)..(35)..(37): Xaa is C or S

SEQ ID NO: 39611 - protein, 35 aa, Artificial Sequence; identical to SEQ ID NO: 14255
  GFR-binding peptide
  MOD_RES (1)..(2)..(35): Xaa is C or S
  MOD_RES (16)..(17)..(18)..(19)..(20): Xaa is A or G
  MOD_RES (21)..(22)..(23)..(24): Xaa is A or G or is absent

SEQ ID NO: 39612 - protein, 31 aa, Artificial Sequence; identical to SEQ ID NO: 6916
  GFR-binding peptide
  MOD_RES (1)..(1): Xaa is C or S

SEQ ID NO: 39613 - protein, 39 aa, Artificial Sequence; identical to SEQ ID NO: 14257
  GFR-binding peptide
  MOD_RES (2)..(3)..(37)..(39): Xaa is C or S
  MOD_RES (17)..(18)..(19)..(20)..(21): Xaa is A or G
  MOD_RES (22)..(23)..(24)..(25): Xaa is A or G or is absent

SEQ ID NO: 39614 - protein, 37 aa, Artificial Sequence; identical to SEQ ID NO: 14258
  GFR-binding peptide
  MOD_RES (3)..(4): Xaa is C or S
  MOD_RES (18)..(19)..(20)..(21)..(22): Xaa is A or G
  MOD_RES (23)..(24)..(25)..(26): Xaa is A or G or is absent

SEQ ID NO: 39615 - protein, 34 aa, Artificial Sequence; identical to SEQ ID NO: 14259
  GFR-binding peptide
  MOD_RES (3)..(4): Xaa is C or S

SEQ ID NO: 39616 - protein, 34 aa, Artificial Sequence; identical to SEQ ID NO: 15995
  GFR-binding peptide
  MOD_RES (1)..(2): Xaa is C or S
  MOD_RES (16)..(17)..(18)..(19)..(20): Xaa is A or G
  MOD_RES (21)..(22)..(23)..(24): Xaa is A or G or is absent

SEQ ID NO: 39617 - protein, 33 aa, Artificial Sequence; identical to SEQ ID NO: 15996
  GFR-binding peptide
  MOD_RES (2)..(3): Xaa is C or S

SEQ ID NO: 39618 - protein, 37 aa, Artificial Sequence; identical to SEQ ID NO: 15998
  GFR-binding peptide
  MOD_RES (2)..(3)..(37): Xaa is C or S
  MOD_RES (17)..(18)..(19)..(20)..(21): Xaa is A or G
  MOD_RES (22)..(23)..(24)..(25): Xaa is A or G or is absent

SEQ ID NO: 39619 - protein, 41 aa, Artificial Sequence; identical to SEQ ID NO: 14260
  GFR-binding peptide
  MOD_RES (6)..(7)..(41): Xaa is C or S
  MOD_RES (21)..(22)..(23)..(24)..(25): Xaa is A or G
  MOD_RES (26)..(27)..(28)..(29): Xaa is A or G or is absent

SEQ ID NO: 39620 - protein, 36 aa, Artificial Sequence; identical to SEQ ID NO: 14261
  GFR-binding peptide
  MOD_RES (5)..(6): Xaa is C or S

SEQ ID NO: 39621 - protein, 38 aa, Artificial Sequence; identical to SEQ ID NO: 14262
  GFR-binding peptide
  MOD_RES (1)..(35)..(37): Xaa is C or S
  MOD_RES (15)..(16)..(17)..(18)..(19): Xaa is A or G
  MOD_RES (20)..(21)..(22)..(23): Xaa is A or G or is absent

SEQ ID NO: 39622 - protein, 34 aa, Artificial Sequence; identical to SEQ ID NO: 6920
  GFR-binding peptide
  MOD_RES (1)..(2): Xaa is C or S
  MOD_RES (16)..(17)..(18)..(19)..(20): Xaa is A or G
  MOD_RES (21)..(22)..(23)..(24): Xaa is A or G or is absent

SEQ ID NO: 39623 - protein, 37 aa, Artificial Sequence; identical to SEQ ID NO: 16000
  GFR-binding peptide
  MOD_RES (2)..(3)..(35)..(37): Xaa is C or S

SEQ ID NO: 39624 - protein, 39 aa, Artificial Sequence; identical to SEQ ID NO: 16001
  GFR-binding peptide
  MOD_RES (5)..(6)..(38): Xaa is C or S

SEQ ID NO: 39625 - protein, 32 aa, Artificial Sequence; identical to SEQ ID NO: 14264
  GFR-binding peptide
  MOD_RES (1)..(32): Xaa is C or S

SEQ ID NO: 39626 - protein, 37 aa, Artificial Sequence
  GFR-binding peptide
  MOD_RES (2)..(3)..(36): Xaa is C or S
  MOD_RES (17)..(18)..(19)..(20)..(21): Xaa is A or G
  MOD_RES (22)..(23)..(24)..(25): Xaa is A or G or is absent
PXXVSQDLEPLTILYYXXXXXXXXXEQLSNMIVKSXK

SEQ ID NO: 39627 - protein, 42 aa, Artificial Sequence; identical to SEQ ID NO: 14265
  GFR-binding peptide
  MOD_RES (4)..(5)..(39)..(41): Xaa is C or S
  MOD_RES (19)..(20)..(21)..(22)..(23): Xaa is A or G
  MOD_RES (24)..(25)..(26)..(27): Xaa is A or G or is absent

SEQ ID NO: 39628 - protein, 37 aa, Artificial Sequence; identical to SEQ ID NO: 14267
  GFR-binding peptide
  MOD_RES (6)..(7): Xaa is C or S

SEQ ID NO: 39629 - protein, 33 aa, Artificial Sequence; identical to SEQ ID NO: 14268
  GFR-binding peptide
  MOD_RES (2)..(2): Xaa is C or S

SEQ ID NO: 39630 - protein, 32 aa, Artificial Sequence; identical to SEQ ID NO: 14269
  GFR-binding peptide
  MOD_RES (32)..(32): Xaa is C or S

SEQ ID NO: 39631 - protein, 37 aa, Artificial Sequence; identical to SEQ ID NO: 16002
  GFR-binding peptide
  MOD_RES (2)..(3)..(36): Xaa is C or S
  MOD_RES (17)..(18)..(19)..(20)..(21): Xaa is A or G
  MOD_RES (22)..(23)..(24)..(25): Xaa is A or G or is absent

SEQ ID NO: 39632 - protein, 34 aa, Artificial Sequence; identical to SEQ ID NO: 6929
  GFR-binding peptide
  MOD_RES (2)..(3)..(34): Xaa is C or S

SEQ ID NO: 39633 - protein, 35 aa, Artificial Sequence; identical to SEQ ID NO: 14271
  GFR-binding peptide
  MOD_RES (2)..(34): Xaa is C or S

SEQ ID NO: 39634 - protein, 38 aa, Artificial Sequence; identical to SEQ ID NO: 6930
  GFR-binding peptide
  MOD_RES (6)..(7)..(38): Xaa is C or S

SEQ ID NO: 39635 - protein, 38 aa, Artificial Sequence; identical to SEQ ID NO: 16004
  GFR-binding peptide
  MOD_RES (2)..(3)..(35)..(37): Xaa is C or S

SEQ ID NO: 39636 - protein, 40 aa, Artificial Sequence; identical to SEQ ID NO: 14273
  GFR-binding peptide
  MOD_RES (6)..(7): Xaa is C or S
  MOD_RES (21)..(22)..(23)..(24)..(25): Xaa is A or G
  MOD_RES (26)..(27)..(28)..(29): Xaa is A or G or is absent

SEQ ID NO: 39637 - protein, 35 aa, Artificial Sequence; identical to SEQ ID NO: 16005
  GFR-binding peptide
  MOD_RES (34)..(34): Xaa is C or S
  MOD_RES (14)..(15)..(16)..(17)..(18): Xaa is A or G
  MOD_RES (19)..(20)..(21)..(22): Xaa is A or G or is absent

SEQ ID NO: 39638 - protein, 35 aa, Artificial Sequence; identical to SEQ ID NO: 14274
  GFR-binding peptide
  MOD_RES (32)..(34): Xaa is C or S

SEQ ID NO: 39639 - protein, 37 aa, Artificial Sequence; identical to SEQ ID NO: 14275
  GFR-binding peptide
  MOD_RES (3)..(4): Xaa is C or S
  MOD_RES (18)..(19)..(20)..(21)..(22): Xaa is A or G
  MOD_RES (23)..(24)..(25)..(26): Xaa is A or G or is absent

SEQ ID NO: 39640 - protein, 34 aa, Artificial Sequence; identical to SEQ ID NO: 16006
  GFR-binding peptide
  MOD_RES (34)..(34): Xaa is C or S
  MOD_RES (14)..(15)..(16)..(17)..(18): Xaa is A or G
  MOD_RES (19)..(20)..(21)..(22): Xaa is A or G or is absent

SEQ ID NO: 39641 - protein, 41 aa, Artificial Sequence; identical to SEQ ID NO: 14276
  GFR-binding peptide
  MOD_RES (5)..(6)..(40): Xaa is C or S
  MOD_RES (20)..(21)..(22)..(23)..(24): Xaa is A or G
  MOD_RES (25)..(26)..(27)..(28): Xaa is A or G or is absent

SEQ ID NO: 39642 - protein, 40 aa, Artificial Sequence; identical to SEQ ID NO: 14277
  GFR-binding peptide
  MOD_RES (4)..(5)..(39): Xaa is C or S
  MOD_RES (19)..(20)..(21)..(22)..(23): Xaa is A or G
  MOD_RES (24)..(25)..(26)..(27): Xaa is A or G or is absent

SEQ ID NO: 39643 - protein, 36 aa, Artificial Sequence; identical to SEQ ID NO: 8711
  GFR-binding peptide
  MOD_RES (1)..(2)..(35): Xaa is C or S
  MOD_RES (16)..(17)..(18)..(19)..(20): Xaa is A or G
  MOD_RES (21)..(22)..(23)..(24): Xaa is A or G or is absent

SEQ ID NO: 39644 - protein, 39 aa, Artificial Sequence; identical to SEQ ID NO: 16008
  GFR-binding peptide
  MOD_RES (5)..(6)..(39): Xaa is C or S
  MOD_RES (20)..(21)..(22)..(23)..(24): Xaa is A or G
  MOD_RES (25)..(26)..(27)..(28): Xaa is A or G or is absent

SEQ ID NO: 39645 - protein, 40 aa, Artificial Sequence; identical to SEQ ID NO: 16009
  GFR-binding peptide
  MOD_RES (2)..(3)..(37)..(39): Xaa is C or S
  MOD_RES (17)..(18)..(19)..(20)..(21): Xaa is A or G
  MOD_RES (22)..(23)..(24)..(25): Xaa is A or G or is absent

SEQ ID NO: 39646 - protein, 37 aa, Artificial Sequence; identical to SEQ ID NO: 14280
  GFR-binding peptide
  MOD_RES (3)..(4)..(37): Xaa is C or S
  MOD_RES (18)..(19)..(20)..(21)..(22): Xaa is A or G
  MOD_RES (23)..(24)..(25)..(26): Xaa is A or G or is absent

SEQ ID NO: 39647 - protein, 40 aa, Artificial Sequence; identical to SEQ ID NO: 14281
  GFR-binding peptide
  MOD_RES (4)..(5)..(38)..(40): Xaa is C or S
  MOD_RES (19)..(20)..(21)..(22)..(23): Xaa is A or G
  MOD_RES (24)..(25)..(26)..(27): Xaa is A or G or is absent

SEQ ID NO: 39648 - protein, 37 aa, Artificial Sequence; identical to SEQ ID NO: 16010
  GFR-binding peptide
  MOD_RES (1)..(35)..(37): Xaa is C or S
  MOD_RES (15)..(16)..(17)..(18)..(19): Xaa is A or G
  MOD_RES (20)..(21)..(22)..(23): Xaa is A or G or is absent

SEQ ID NO: 39649 - protein, 35 aa, Artificial Sequence; identical to SEQ ID NO: 14282
  GFR-binding peptide
  MOD_RES (33)..(35): Xaa is C or S
  MOD_RES (14)..(15)..(16)..(17)..(18): Xaa is A or G
  MOD_RES (19)..(20)..(21)..(22): Xaa is A or G or is absent

SEQ ID NO: 39650 - protein, 37 aa, Artificial Sequence; identical to SEQ ID NO: 14283
  GFR-binding peptide
  MOD_RES (5)..(6)..(37): Xaa is C or S

SEQ ID NO: 39651 - protein, 35 aa, Artificial Sequence; identical to SEQ ID NO: 14284
  GFR-binding peptide
  MOD_RES (1)..(2)..(33)..(35): Xaa is C or S

SEQ ID NO: 39652 - protein, 35 aa, Artificial Sequence; identical to SEQ ID NO: 14285
  GFR-binding peptide
  MOD_RES (1)..(2): Xaa is C or S
  MOD_RES (16)..(17)..(18)..(19)..(20): Xaa is A or G
  MOD_RES (21)..(22)..(23)..(24): Xaa is A or G or is absent

SEQ ID NO: 39653 - protein, 38 aa, Artificial Sequence; identical to SEQ ID NO: 16013
  GFR-binding peptide
  MOD_RES (5)..(37): Xaa is C or S

SEQ ID NO: 39654 - protein, 36 aa, Artificial Sequence; identical to SEQ ID NO: 14286
  GFR-binding peptide
  MOD_RES (1)..(33)..(35): Xaa is C or S

SEQ ID NO: 39655 - protein, 42 aa, Artificial Sequence; identical to SEQ ID NO: 14287
  GFR-binding peptide
  MOD_RES (6)..(7)..(41): Xaa is C or S
  MOD_RES (21)..(22)..(23)..(24)..(25): Xaa is A or G
  MOD_RES (26)..(27)..(28)..(29): Xaa is A or G or is absent

SEQ ID NO: 39656 - protein, 37 aa, Artificial Sequence; identical to SEQ ID NO: 6941
  GFR-binding peptide
  MOD_RES (2)..(3)..(35)..(37): Xaa is C or S

SEQ ID NO: 39657 - protein, 41 aa, Artificial Sequence; identical to SEQ ID NO: 8719
  GFR-binding peptide
  MOD_RES (3)..(4)..(38)..(40): Xaa is C or S
  MOD_RES (18)..(19)..(20)..(21)..(22): Xaa is A or G
  MOD_RES (23)..(24)..(25)..(26): Xaa is A or G or is absent

SEQ ID NO: 39658 - protein, 34 aa, Artificial Sequence; identical to SEQ ID NO: 14290
  GFR-binding peptide
  MOD_RES (1)..(2): Xaa is C or S
  MOD_RES (16)..(17)..(18)..(19)..(20): Xaa is A or G
  MOD_RES (21)..(22)..(23)..(24): Xaa is A or G or is absent

SEQ ID NO: 39659 - protein, 33 aa, Artificial Sequence; identical to SEQ ID NO: 16015
  GFR-binding peptide
  MOD_RES (1)..(1): Xaa is C or S
  MOD_RES (15)..(16)..(17)..(18)..(19): Xaa is A or G
  MOD_RES (20)..(21)..(22)..(23): Xaa is A or G or is absent

SEQ ID NO: 39660 - protein, 33 aa, Artificial Sequence; identical to SEQ ID NO: 16016
  GFR-binding peptide
  MOD_RES (32)..(32): Xaa is C or S

SEQ ID NO: 39661 - protein, 35 aa, Artificial Sequence; identical to SEQ ID NO: 14291
  GFR-binding peptide
  MOD_RES (1)..(2)..(34): Xaa is C or S

SEQ ID NO: 39662 - protein, 39 aa, Artificial Sequence; identical to SEQ ID NO: 14292
  GFR-binding peptide
  MOD_RES (5)..(39): Xaa is C or S
  MOD_RES (19)..(20)..(21)..(22)..(23): Xaa is A or G
  MOD_RES (24)..(25)..(26)..(27): Xaa is A or G or is absent

SEQ ID NO: 39663 - protein, 39 aa, Artificial Sequence; identical to SEQ ID NO: 14293
  GFR-binding peptide
  MOD_RES (5)..(6)..(37)..(39): Xaa is C or S

SEQ ID NO: 39664 - protein, 32 aa, Artificial Sequence; identical to SEQ ID NO: 16017
  GFR-binding peptide
  MOD_RES (32)..(32): Xaa is C or S

SEQ ID NO: 39665 - protein, 38 aa, Artificial Sequence; identical to SEQ ID NO: 16018
  GFR-binding peptide
  MOD_RES (5)..(6): Xaa is C or S
  MOD_RES (20)..(21)..(22)..(23)..(24): Xaa is A or G
  MOD_RES (25)..(26)..(27)..(28): Xaa is A or G or is absent

SEQ ID NO: 39666 - protein, 38 aa, Artificial Sequence; identical to SEQ ID NO: 16019
  GFR-binding peptide
  MOD_RES (4)..(5)..(37): Xaa is C or S

SEQ ID NO: 39667 - protein, 35 aa, Artificial Sequence
  GFR-binding peptide
  MOD_RES (1)..(2)..(35): Xaa is C or S
  MOD_RES (16)..(17)..(18)..(19)..(20): Xaa is A or G
  MOD_RES (21)..(22)..(23)..(24): Xaa is A or G or is absent
XXVSQDLEPLTILYYXXXXXXXXXEQLSNMIVKSX

SEQ ID NO: 39668 - protein, 38 aa, Artificial Sequence; identical to SEQ ID NO: 16020
  GFR-binding peptide
  MOD_RES (3)..(37): Xaa is C or S
  MOD_RES (17)..(18)..(19)..(20)..(21): Xaa is A or G
  MOD_RES (22)..(23)..(24)..(25): Xaa is A or G or is absent

SEQ ID NO: 39669 - protein, 35 aa, Artificial Sequence; identical to SEQ ID NO: 16021
  GFR-binding peptide
  MOD_RES (3)..(35): Xaa is C or S

SEQ ID NO: 39670 - protein, 33 aa, Artificial Sequence; identical to SEQ ID NO: 16022
  GFR-binding peptide
  MOD_RES (2)..(3): Xaa is C or S

SEQ ID NO: 39671 - protein, 37 aa, Artificial Sequence; identical to SEQ ID NO: 8728
  GFR-binding peptide
  MOD_RES (5)..(6): Xaa is C or S

SEQ ID NO: 39672 - protein, 32 aa, Artificial Sequence; identical to SEQ ID NO: 16024
  GFR-binding peptide
  MOD_RES (14)..(15)..(16)..(17)..(18): Xaa is A or G
  MOD_RES (19)..(20)..(21)..(22): Xaa is A or G or is absent

SEQ ID NO: 39673 - protein, 36 aa, Artificial Sequence; identical to SEQ ID NO: 14299
  GFR-binding peptide
  MOD_RES (3)..(3): Xaa is C or S
  MOD_RES (17)..(18)..(19)..(20)..(21): Xaa is A or G
  MOD_RES (22)..(23)..(24)..(25): Xaa is A or G or is absent

SEQ ID NO: 39674 - protein, 37 aa, Artificial Sequence; identical to SEQ ID NO: 6961
  GFR-binding peptide
  MOD_RES (1)..(34)..(36): Xaa is C or S
  MOD_RES (15)..(16)..(17)..(18)..(19): Xaa is A or G
  MOD_RES (20)..(21)..(22)..(23): Xaa is A or G or is absent

SEQ ID NO: 39675 - protein, 38 aa, Artificial Sequence; identical to SEQ ID NO: 16025
  GFR-binding peptide
  MOD_RES (7)..(7): Xaa is C or S

SEQ ID NO: 39676 - protein, 40 aa, Artificial Sequence; identical to SEQ ID NO: 16026
  GFR-binding peptide
  MOD_RES (5)..(6)..(38)..(40): Xaa is C or S

SEQ ID NO: 39677 - protein, 35 aa, Artificial Sequence; identical to SEQ ID NO: 16027
  GFR-binding peptide
  MOD_RES (3)..(4): Xaa is C or S

SEQ ID NO: 39678 - protein, 39 aa, Artificial Sequence; identical to SEQ ID NO: 14302
  GFR-binding peptide
  MOD_RES (7)..(7): Xaa is C or S
  MOD_RES (21)..(22)..(23)..(24)..(25): Xaa is A or G
  MOD_RES (26)..(27)..(28)..(29): Xaa is A or G or is absent

SEQ ID NO: 39679 - protein, 35 aa, Artificial Sequence; identical to SEQ ID NO: 16028
  GFR-binding peptide
  MOD_RES (1)..(34): Xaa is C or S
  MOD_RES (15)..(16)..(17)..(18)..(19): Xaa is A or G
  MOD_RES (20)..(21)..(22)..(23): Xaa is A or G or is absent

SEQ ID NO: 39680 - protein, 32 aa, Artificial Sequence; identical to SEQ ID NO: 14303
  GFR-binding peptide
  MOD_RES (1)..(1): Xaa is C or S

SEQ ID NO: 39681 - protein, 43 aa, Artificial Sequence; identical to SEQ ID NO: 14304
  GFR-binding peptide
  MOD_RES (6)..(7)..(41)..(43): Xaa is C or S
  MOD_RES (21)..(22)..(23)..(24)..(25): Xaa is A or G
  MOD_RES (26)..(27)..(28)..(29): Xaa is A or G or is absent

SEQ ID NO: 39682 - protein, 41 aa, Artificial Sequence; identical to SEQ ID NO: 14306
  GFR-binding peptide
  MOD_RES (5)..(6)..(38)..(40): Xaa is C or S

SEQ ID NO: 39683 - protein, 39 aa, Artificial Sequence; identical to SEQ ID NO: 14307
  GFR-binding peptide
  MOD_RES (1)..(2)..(36)..(38): Xaa is C or S
  MOD_RES (16)..(17)..(18)..(19)..(20): Xaa is A or G
  MOD_RES (21)..(22)..(23)..(24): Xaa is A or G or is absent

SEQ ID NO: 39684 - protein, 35 aa, Artificial Sequence; identical to SEQ ID NO: 16029
  GFR-binding peptide
  MOD_RES (1)..(35): Xaa is C or S
  MOD_RES (15)..(16)..(17)..(18)..(19): Xaa is A or G
  MOD_RES (20)..(21)..(22)..(23): Xaa is A or G or is absent

SEQ ID NO: 39685 - protein, 35 aa, Artificial Sequence; identical to SEQ ID NO: 16030
  GFR-binding peptide
  MOD_RES (4)..(5): Xaa is C or S

SEQ ID NO: 39686 - protein, 42 aa, Artificial Sequence; identical to SEQ ID NO: 14308
  GFR-binding peptide
  MOD_RES (4)..(5)..(39)..(41): Xaa is C or S
  MOD_RES (19)..(20)..(21)..(22)..(23): Xaa is A or G
  MOD_RES (24)..(25)..(26)..(27): Xaa is A or G or is absent

SEQ ID NO: 39687 - protein, 35 aa, Artificial Sequence; identical to SEQ ID NO: 16032
  GFR-binding peptide
  MOD_RES (2)..(3)..(34): Xaa is C or S

SEQ ID NO: 39688 - protein, 44 aa, Artificial Sequence; identical to SEQ ID NO: 16035
  GFR-binding peptide
  MOD_RES (7)..(41)..(43): Xaa is C or S
  MOD_RES (21)..(22)..(23)..(24)..(25): Xaa is A or G
  MOD_RES (26)..(27)..(28)..(29): Xaa is A or G or is absent

SEQ ID NO: 39689 - protein, 33 aa, Artificial Sequence; identical to SEQ ID NO: 14310
  GFR-binding peptide
  MOD_RES (1)..(33): Xaa is C or S

SEQ ID NO: 39690 - protein, 43 aa, Artificial Sequence; identical to SEQ ID NO: 14311
  GFR-binding peptide
  MOD_RES (5)..(6)..(40)..(42): Xaa is C or S
  MOD_RES (20)..(21)..(22)..(23)..(24): Xaa is A or G
  MOD_RES (25)..(26)..(27)..(28): Xaa is A or G or is absent

SEQ ID NO: 39691 - protein, 39 aa, Artificial Sequence; identical to SEQ ID NO: 14313
  GFR-binding peptide
  MOD_RES (2)..(3)..(37)..(39): Xaa is C or S
  MOD_RES (17)..(18)..(19)..(20)..(21): Xaa is A or G
  MOD_RES (22)..(23)..(24)..(25): Xaa is A or G or is absent

SEQ ID NO: 39692 - protein, 38 aa, Artificial Sequence; identical to SEQ ID NO: 6975
  GFR-binding peptide
  MOD_RES (4)..(5): Xaa is C or S
  MOD_RES (19)..(20)..(21)..(22)..(23): Xaa is A or G
  MOD_RES (24)..(25)..(26)..(27): Xaa is A or G or is absent

SEQ ID NO: 39693 - protein, 40 aa, Artificial Sequence; identical to SEQ ID NO: 16037
  GFR-binding peptide
  MOD_RES (4)..(5)..(37)..(39): Xaa is C or S

SEQ ID NO: 39694 - protein, 39 aa, Artificial Sequence; identical to SEQ ID NO: 14316
  GFR-binding peptide
  MOD_RES (3)..(4)..(36)..(38): Xaa is C or S

SEQ ID NO: 39695 - protein, 41 aa, Artificial Sequence; identical to SEQ ID NO: 14317
  GFR-binding peptide
  MOD_RES (4)..(5)..(39)..(41): Xaa is C or S
  MOD_RES (19)..(20)..(21)..(22)..(23): Xaa is A or G
  MOD_RES (24)..(25)..(26)..(27): Xaa is A or G or is absent

SEQ ID NO: 39696 - protein, 36 aa, Artificial Sequence; identical to SEQ ID NO: 16039
  GFR-binding peptide
  MOD_RES (4)..(5): Xaa is C or S

SEQ ID NO: 39697 - protein, 37 aa, Artificial Sequence; identical to SEQ ID NO: 14318
  GFR-binding peptide
  MOD_RES (34)..(36): Xaa is C or S
  MOD_RES (14)..(15)..(16)..(17)..(18): Xaa is A or G
  MOD_RES (19)..(20)..(21)..(22): Xaa is A or G or is absent

SEQ ID NO: 39698 - protein, 36 aa, Artificial Sequence; identical to SEQ ID NO: 8744
  GFR-binding peptide
  MOD_RES (5)..(6): Xaa is C or S

SEQ ID NO: 39699 - protein, 42 aa, Artificial Sequence; identical to SEQ ID NO: 16041
  GFR-binding peptide
  MOD_RES (4)..(5)..(39)..(41): Xaa is C or S
  MOD_RES (19)..(20)..(21)..(22)..(23): Xaa is A or G
  MOD_RES (24)..(25)..(26)..(27): Xaa is A or G or is absent

SEQ ID NO: 39700 - protein, 36 aa, Artificial Sequence; identical to SEQ ID NO: 16042
  GFR-binding peptide
  MOD_RES (1)..(2)..(35): Xaa is C or S
  MOD_RES (16)..(17)..(18)..(19)..(20): Xaa is A or G
  MOD_RES (21)..(22)..(23)..(24): Xaa is A or G or is absent

SEQ ID NO: 39701 - protein, 35 aa, Artificial Sequence; identical to SEQ ID NO: 16043
  GFR-binding peptide
  MOD_RES (2)..(3)..(34): Xaa is C or S

SEQ ID NO: 39702 - protein, 36 aa, Artificial Sequence; identical to SEQ ID NO: 16044
  GFR-binding peptide
  MOD_RES (4)..(5): Xaa is C or S

SEQ ID NO: 39703 - protein, 36 aa, Artificial Sequence; identical to SEQ ID NO: 16045
  GFR-binding peptide
  MOD_RES (6)..(6): Xaa is C or S

SEQ ID NO: 39704 - protein, 38 aa, Artificial Sequence; identical to SEQ ID NO: 16046
  GFR-binding peptide
  MOD_RES (1)..(2)..(36)..(38): Xaa is C or S
  MOD_RES (16)..(17)..(18)..(19)..(20): Xaa is A or G
  MOD_RES (21)..(22)..(23)..(24): Xaa is A or G or is absent

SEQ ID NO: 39705 - protein, 31 aa, Artificial Sequence; identical to SEQ ID NO: 16047
  GFR-binding peptide
  MOD_RES (1)..(1): Xaa is C or S

SEQ ID NO: 39706 - protein, 37 aa, Artificial Sequence; identical to SEQ ID NO: 16049
  GFR-binding peptide
  MOD_RES (6)..(7): Xaa is C or S

SEQ ID NO: 39707 - protein, 42 aa, Artificial Sequence; identical to SEQ ID NO: 16050
  GFR-binding peptide
  MOD_RES (6)..(7)..(41): Xaa is C or S
  MOD_RES (21)..(22)..(23)..(24)..(25): Xaa is A or G
  MOD_RES (26)..(27)..(28)..(29): Xaa is A or G or is absent

SEQ ID NO: 39708 - protein, 35 aa, Artificial Sequence; identical to SEQ ID NO: 14320
  GFR-binding peptide
  MOD_RES (5)..(5): Xaa is C or S

SEQ ID NO: 39709 - protein, 34 aa, Artificial Sequence; identical to SEQ ID NO: 16051
  GFR-binding peptide
  MOD_RES (1)..(2)..(34): Xaa is C or S

SEQ ID NO: 39710 - protein, 42 aa, Artificial Sequence; identical to SEQ ID NO: 14322
  GFR-binding peptide
  MOD_RES (6)..(7)..(39)..(41): Xaa is C or S

SEQ ID NO: 39711 - protein, 40 aa, Artificial Sequence; identical to SEQ ID NO: 14323
  GFR-binding peptide
  MOD_RES (5)..(6)..(39): Xaa is C or S
  MOD_RES (20)..(21)..(22)..(23)..(24): Xaa is A or G
  MOD_RES (25)..(26)..(27)..(28): Xaa is A or G or is absent

SEQ ID NO: 39712 - protein, 31 aa, Artificial Sequence; identical to SEQ ID NO: 6986
  GFR-binding peptide
  MOD_RES (1)..(1): Xaa is C or S

SEQ ID NO: 39713 - protein, 36 aa, Artificial Sequence; identical to SEQ ID NO: 14325
  GFR-binding peptide
  MOD_RES (34)..(36): Xaa is C or S
  MOD_RES (14)..(15)..(16)..(17)..(18): Xaa is A or G
  MOD_RES (19)..(20)..(21)..(22): Xaa is A or G or is absent

SEQ ID NO: 39714 - protein, 35 aa, Artificial Sequence; identical to SEQ ID NO: 16052
  GFR-binding peptide
  MOD_RES (2)..(3): Xaa is C or S
  MOD_RES (17)..(18)..(19)..(20)..(21): Xaa is A or G
  MOD_RES (22)..(23)..(24)..(25): Xaa is A or G or is absent

SEQ ID NO: 39715 - protein, 33 aa, Artificial Sequence; identical to SEQ ID NO: 16053
  GFR-binding peptide
  MOD_RES (1)..(33): Xaa is C or S

SEQ ID NO: 39716 - protein, 35 aa, Artificial Sequence; identical to SEQ ID NO: 14326
  GFR-binding peptide
  MOD_RES (34)..(34): Xaa is C or S
  MOD_RES (14)..(15)..(16)..(17)..(18): Xaa is A or G
  MOD_RES (19)..(20)..(21)..(22): Xaa is A or G or is absent

SEQ ID NO: 39717 - protein, 39 aa, Artificial Sequence; identical to SEQ ID NO: 16055
  GFR-binding peptide
  MOD_RES (3)..(4)..(38): Xaa is C or S
  MOD_RES (18)..(19)..(20)..(21)..(22): Xaa is A or G
  MOD_RES (23)..(24)..(25)..(26): Xaa is A or G or is absent

SEQ ID NO: 39718 - protein, 32 aa, Artificial Sequence; identical to SEQ ID NO: 16056
  GFR-binding peptide
  MOD_RES (1)..(32): Xaa is C or S

SEQ ID NO: 39719 - protein, 41 aa, Artificial Sequence; identical to SEQ ID NO: 16057
  GFR-binding peptide
  MOD_RES (5)..(6)..(39)..(41): Xaa is C or S
  MOD_RES (20)..(21)..(22)..(23)..(24): Xaa is A or G
  MOD_RES (25)..(26)..(27)..(28): Xaa is A or G or is absent

SEQ ID NO: 39720 - protein, 35 aa, Artificial Sequence; identical to SEQ ID NO: 16058
  GFR-binding peptide
  MOD_RES (3)..(3): Xaa is C or S
  MOD_RES (17)..(18)..(19)..(20)..(21): Xaa is A or G
  MOD_RES (22)..(23)..(24)..(25): Xaa is A or G or is absent

SEQ ID NO: 39721 - protein, 40 aa, Artificial Sequence; identical to SEQ ID NO: 16059
  GFR-binding peptide
  MOD_RES (4)..(5)..(39): Xaa is C or S
  MOD_RES (19)..(20)..(21)..(22)..(23): Xaa is A or G
  MOD_RES (24)..(25)..(26)..(27): Xaa is A or G or is absent

SEQ ID NO: 39722 - protein, 40 aa, Artificial Sequence; identical to SEQ ID NO: 14327
  GFR-binding peptide
  MOD_RES (3)..(37)..(39): Xaa is C or S
  MOD_RES (17)..(18)..(19)..(20)..(21): Xaa is A or G
  MOD_RES (22)..(23)..(24)..(25): Xaa is A or G or is absent

SEQ ID NO: 39723 - protein, 37 aa, Artificial Sequence; identical to SEQ ID NO: 16060
  GFR-binding peptide
  MOD_RES (4)..(5)..(37): Xaa is C or S

SEQ ID NO: 39724 - protein, 39 aa, Artificial Sequence; identical to SEQ ID NO: 16061
  GFR-binding peptide
  MOD_RES (5)..(6)..(38): Xaa is C or S

SEQ ID NO: 39725 - protein, 38 aa, Artificial Sequence; identical to SEQ ID NO: 14328
  GFR-binding peptide
  MOD_RES (4)..(5)..(37): Xaa is C or S

SEQ ID NO: 39726 - protein, 33 aa, Artificial Sequence; identical to SEQ ID NO: 16062
  GFR-binding peptide
  MOD_RES (1)..(1): Xaa is C or S
  MOD_RES (15)..(16)..(17)..(18)..(19): Xaa is A or G
  MOD_RES (20)..(21)..(22)..(23): Xaa is A or G or is absent

SEQ ID NO: 39727 - protein, 36 aa, Artificial Sequence; identical to SEQ ID NO: 16063
  GFR-binding peptide
  MOD_RES (5)..(6): Xaa is C or S

SEQ ID NO: 39728 - protein, 35 aa, Artificial Sequence; identical to SEQ ID NO: 14330
  GFR-binding peptide
  MOD_RES (1)..(33)..(35): Xaa is C or S

SEQ ID NO: 39729 - protein, 37 aa, Artificial Sequence; identical to SEQ ID NO: 16064
  GFR-binding peptide
  MOD_RES (6)..(7): Xaa is C or S

SEQ ID NO: 39730 - protein, 35 aa, Artificial Sequence; identical to SEQ ID NO: 14331
  GFR-binding peptide
  MOD_RES (2)..(3)..(35): Xaa is C or S

SEQ ID NO: 39731 - protein, 39 aa, Artificial Sequence; identical to SEQ ID NO: 16065
  GFR-binding peptide
  MOD_RES (2)..(3)..(37)..(39): Xaa is C or S
  MOD_RES (17)..(18)..(19)..(20)..(21): Xaa is A or G
  MOD_RES (22)..(23)..(24)..(25): Xaa is A or G or is absent

SEQ ID NO: 39732 - protein, 38 aa, Artificial Sequence; identical to SEQ ID NO: 14332
  GFR-binding peptide
  MOD_RES (4)..(36)..(38): Xaa is C or S

SEQ ID NO: 39733 - protein, 40 aa, Artificial Sequence; identical to SEQ ID NO: 14333
  GFR-binding peptide
  MOD_RES (6)..(7)..(39): Xaa is C or S

SEQ ID NO: 39734 - protein, 40 aa, Artificial Sequence; identical to SEQ ID NO: 14335
  GFR-binding peptide
  MOD_RES (3)..(4)..(38)..(40): Xaa is C or S
  MOD_RES (18)..(19)..(20)..(21)..(22): Xaa is A or G
  MOD_RES (23)..(24)..(25)..(26): Xaa is A or G or is absent

SEQ ID NO: 39735 - protein, 34 aa, Artificial Sequence; identical to SEQ ID NO: 16067
  GFR-binding peptide
  MOD_RES (1)..(33): Xaa is C or S

SEQ ID NO: 39736 - protein, 39 aa, Artificial Sequence; identical to SEQ ID NO: 16068
  GFR-binding peptide
  MOD_RES (5)..(39): Xaa is C or S
  MOD_RES (19)..(20)..(21)..(22)..(23): Xaa is A or G
  MOD_RES (24)..(25)..(26)..(27): Xaa is A or G or is absent

SEQ ID NO: 39737 - protein, 36 aa, Artificial Sequence; identical to SEQ ID NO: 14336
  GFR-binding peptide
  MOD_RES (2)..(3)..(36): Xaa is C or S
  MOD_RES (17)..(18)..(19)..(20)..(21): Xaa is A or G
  MOD_RES (22)..(23)..(24)..(25): Xaa is A or G or is absent

SEQ ID NO: 39738 - protein, 37 aa, Artificial Sequence; identical to SEQ ID NO: 14337
  GFR-binding peptide
  MOD_RES (4)..(5)..(37): Xaa is C or S

SEQ ID NO: 39739 - protein, 38 aa, Artificial Sequence; identical to SEQ ID NO: 16069
  GFR-binding peptide
  MOD_RES (4)..(5)..(38): Xaa is C or S
  MOD_RES (19)..(20)..(21)..(22)..(23): Xaa is A or G
  MOD_RES (24)..(25)..(26)..(27): Xaa is A or G or is absent

SEQ ID NO: 39740 - protein, 36 aa, Artificial Sequence; identical to SEQ ID NO: 16071
  GFR-binding peptide
  MOD_RES (4)..(5): Xaa is C or S

SEQ ID NO: 39741 - protein, 42 aa, Artificial Sequence; identical to SEQ ID NO: 16072
  GFR-binding peptide
  MOD_RES (6)..(7)..(40)..(42): Xaa is C or S
  MOD_RES (21)..(22)..(23)..(24)..(25): Xaa is A or G
  MOD_RES (26)..(27)..(28)..(29): Xaa is A or G or is absent

SEQ ID NO: 39742 - protein, 36 aa, Artificial Sequence; identical to SEQ ID NO: 8778
  GFR-binding peptide
  MOD_RES (4)..(5)..(36): Xaa is C or S

SEQ ID NO: 39743 - protein, 35 aa, Artificial Sequence; identical to SEQ ID NO: 16074
  GFR-binding peptide
  MOD_RES (34)..(34): Xaa is C or S
  MOD_RES (14)..(15)..(16)..(17)..(18): Xaa is A or G
  MOD_RES (19)..(20)..(21)..(22): Xaa is A or G or is absent

SEQ ID NO: 39744 - protein, 37 aa, Artificial Sequence; identical to SEQ ID NO: 16075
  GFR-binding peptide
  MOD_RES (4)..(5): Xaa is C or S
  MOD_RES (19)..(20)..(21)..(22)..(23): Xaa is A or G
  MOD_RES (24)..(25)..(26)..(27): Xaa is A or G or is absent

SEQ ID NO: 39745 - protein, 40 aa, Artificial Sequence; identical to SEQ ID NO: 14338
  GFR-binding peptide
  MOD_RES (6)..(7)..(38)..(40): Xaa is C or S

SEQ ID NO: 39746 - protein, 35 aa, Artificial Sequence; identical to SEQ ID NO: 14339
  GFR-binding peptide
  MOD_RES (1)..(33)..(35): Xaa is C or S

SEQ ID NO: 39747 - protein, 32 aa, Artificial Sequence; identical to SEQ ID NO: 14340
  GFR-binding peptide
  MOD_RES (1)..(2): Xaa is C or S

SEQ ID NO: 39748 - protein, 35 aa, Artificial Sequence; identical to SEQ ID NO: 7006
  GFR-binding peptide
  MOD_RES (33)..(35): Xaa is C or S
  MOD_RES (14)..(15)..(16)..(17)..(18): Xaa is A or G
  MOD_RES (19)..(20)..(21)..(22): Xaa is A or G or is absent

SEQ ID NO: 39749 - protein, 36 aa, Artificial Sequence; identical to SEQ ID NO: 7007
  GFR-binding peptide
  MOD_RES (1)..(2)..(33)..(35): Xaa is C or S

SEQ ID NO: 39750 - protein, 36 aa, Artificial Sequence; identical to SEQ ID NO: 16076
  GFR-binding peptide
  MOD_RES (34)..(36): Xaa is C or S
  MOD_RES (14)..(15)..(16)..(17)..(18): Xaa is A or G
  MOD_RES (19)..(20)..(21)..(22): Xaa is A or G or is absent

SEQ ID NO: 39751 - protein, 38 aa, Artificial Sequence; identical to SEQ ID NO: 8782
  GFR-binding peptide
  MOD_RES (3)..(4)..(38): Xaa is C or S
  MOD_RES (18)..(19)..(20)..(21)..(22): Xaa is A or G
  MOD_RES (23)..(24)..(25)..(26): Xaa is A or G or is absent

SEQ ID NO: 39752 - protein, 39 aa, Artificial Sequence; identical to SEQ ID NO: 14344
  GFR-binding peptide
  MOD_RES (2)..(3)..(36)..(38): Xaa is C or S
  MOD_RES (17)..(18)..(19)..(20)..(21): Xaa is A or G
  MOD_RES (22)..(23)..(24)..(25): Xaa is A or G or is absent

SEQ ID NO: 39753 - protein, 37 aa, Artificial Sequence; identical to SEQ ID NO: 16078
  GFR-binding peptide
  MOD_RES (1)..(35)..(37): Xaa is C or S
  MOD_RES (15)..(16)..(17)..(18)..(19): Xaa is A or G
  MOD_RES (20)..(21)..(22)..(23): Xaa is A or G or is absent

SEQ ID NO: 39754 - protein, 38 aa, Artificial Sequence; identical to SEQ ID NO: 14345
  GFR-binding peptide
  MOD_RES (5)..(6)..(37): Xaa is C or S

SEQ ID NO: 39755 - protein, 40 aa, Artificial Sequence
  GFR-binding peptide
  MOD_RES (4)..(5)..(38)..(40): Xaa is C or S
  MOD_RES (19)..(20)..(21)..(22)..(23): Xaa is A or G
  MOD_RES (24)..(25)..(26)..(27): Xaa is A or G or is absent
ASPXXVSQDLEPLTILYYXXXXXXXXXEQLSNMIVKSXKX

SEQ ID NO: 39756 - protein, 38 aa, Artificial Sequence; identical to SEQ ID NO: 8783
  GFR-binding peptide
  MOD_RES (5)..(6): Xaa is C or S
  MOD_RES (20)..(21)..(22)..(23)..(24): Xaa is A or G
  MOD_RES (25)..(26)..(27)..(28): Xaa is A or G or is absent

SEQ ID NO: 39757 - protein, 30 aa, Artificial Sequence; identical to SEQ ID NO: 8785
  GFR-binding peptide

SEQ ID NO: 39758 - protein, 31 aa, Artificial Sequence; identical to SEQ ID NO: 16082
  GFR-binding peptide
  MOD_RES (1)..(1): Xaa is C or S

SEQ ID NO: 39759 - protein, 34 aa, Artificial Sequence; identical to SEQ ID NO: 16083
  GFR-binding peptide
  MOD_RES (3)..(4): Xaa is C or S

SEQ ID NO: 39760 - protein, 37 aa, Artificial Sequence; identical to SEQ ID NO: 14347
  GFR-binding peptide
  MOD_RES (34)..(36): Xaa is C or S
  MOD_RES (14)..(15)..(16)..(17)..(18): Xaa is A or G
  MOD_RES (19)..(20)..(21)..(22): Xaa is A or G or is absent

SEQ ID NO: 39761 - protein, 37 aa, Artificial Sequence; identical to SEQ ID NO: 14350
  GFR-binding peptide
  MOD_RES (4)..(5): Xaa is C or S
  MOD_RES (19)..(20)..(21)..(22)..(23): Xaa is A or G
  MOD_RES (24)..(25)..(26)..(27): Xaa is A or G or is absent

SEQ ID NO: 39762 - protein, 39 aa, Artificial Sequence; identical to SEQ ID NO: 14351
  GFR-binding peptide
  MOD_RES (6)..(7): Xaa is C or S
  MOD_RES (21)..(22)..(23)..(24)..(25): Xaa is A or G
  MOD_RES (26)..(27)..(28)..(29): Xaa is A or G or is absent

SEQ ID NO: 39763 - protein, 34 aa, Artificial Sequence; identical to SEQ ID NO: 16085
  GFR-binding peptide
  MOD_RES (1)..(33): Xaa is C or S

SEQ ID NO: 39764 - protein, 33 aa, Artificial Sequence; identical to SEQ ID NO: 16087
  GFR-binding peptide
  MOD_RES (1)..(33): Xaa is C or S

SEQ ID NO: 39765 - protein, 40 aa, Artificial Sequence; identical to SEQ ID NO: 14353
  GFR-binding peptide
  MOD_RES (4)..(5)..(38)..(40): Xaa is C or S
  MOD_RES (19)..(20)..(21)..(22)..(23): Xaa is A or G
  MOD_RES (24)..(25)..(26)..(27): Xaa is A or G or is absent

SEQ ID NO: 39766 - protein, 32 aa, Artificial Sequence; identical to SEQ ID NO: 8795
  GFR-binding peptide
  MOD_RES (1)..(2): Xaa is C or S

SEQ ID NO: 39767 - protein, 39 aa, Artificial Sequence; identical to SEQ ID NO: 16090
  GFR-binding peptide
  MOD_RES (5)..(6)..(38): Xaa is C or S

SEQ ID NO: 39768 - protein, 35 aa, Artificial Sequence; identical to SEQ ID NO: 16091
  GFR-binding peptide
  MOD_RES (2)..(3): Xaa is C or S
  MOD_RES (17)..(18)..(19)..(20)..(21): Xaa is A or G
  MOD_RES (22)..(23)..(24)..(25): Xaa is A or G or is absent

SEQ ID NO: 39769 - protein, 36 aa, Artificial Sequence; identical to SEQ ID NO: 7025
  GFR-binding peptide
  MOD_RES (1)..(2)..(34)..(36): Xaa is C or S

SEQ ID NO: 39770 - protein, 42 aa, Artificial Sequence; identical to SEQ ID NO: 14356
  GFR-binding peptide
  MOD_RES (6)..(7)..(41): Xaa is C or S
  MOD_RES (21)..(22)..(23)..(24)..(25): Xaa is A or G
  MOD_RES (26)..(27)..(28)..(29): Xaa is A or G or is absent

SEQ ID NO: 39771 - protein, 31 aa, Artificial Sequence; identical to SEQ ID NO: 14357
  GFR-binding peptide
  MOD_RES (31)..(31): Xaa is C or S

SEQ ID NO: 39772 - protein, 38 aa, Artificial Sequence; identical to SEQ ID NO: 16092
  GFR-binding peptide
  MOD_RES (4)..(5)..(37): Xaa is C or S

SEQ ID NO: 39773 - protein, 43 aa, Artificial Sequence; identical to SEQ ID NO: 16093
  GFR-binding peptide
  MOD_RES (5)..(6)..(40)..(42): Xaa is C or S
  MOD_RES (20)..(21)..(22)..(23)..(24): Xaa is A or G
  MOD_RES (25)..(26)..(27)..(28): Xaa is A or G or is absent

SEQ ID NO: 39774 - protein, 34 aa, Artificial Sequence; identical to SEQ ID NO: 16094
  GFR-binding peptide
  MOD_RES (33)..(33): Xaa is C or S
  MOD_RES (14)..(15)..(16)..(17)..(18): Xaa is A or G
  MOD_RES (19)..(20)..(21)..(22): Xaa is A or G or is absent

SEQ ID NO: 39775 - protein, 35 aa, Artificial Sequence; identical to SEQ ID NO: 16095
  GFR-binding peptide
  MOD_RES (3)..(3): Xaa is C or S
  MOD_RES (17)..(18)..(19)..(20)..(21): Xaa is A or G
  MOD_RES (22)..(23)..(24)..(25): Xaa is A or G or is absent

SEQ ID NO: 39776 - protein, 44 aa, Artificial Sequence; identical to SEQ ID NO: 16096
  GFR-binding peptide
  MOD_RES (6)..(7)..(41)..(43): Xaa is C or S
  MOD_RES (21)..(22)..(23)..(24)..(25): Xaa is A or G
  MOD_RES (26)..(27)..(28)..(29): Xaa is A or G or is absent

SEQ ID NO: 39777 - protein, 41 aa, Artificial Sequence; identical to SEQ ID NO: 7031
  GFR-binding peptide
  MOD_RES (5)..(6)..(39)..(41): Xaa is C or S
  MOD_RES (20)..(21)..(22)..(23)..(24): Xaa is A or G
  MOD_RES (25)..(26)..(27)..(28): Xaa is A or G or is absent

SEQ ID NO: 39778 - protein, 31 aa, Artificial Sequence; identical to SEQ ID NO: 16097
  GFR-binding peptide
  MOD_RES (31)..(31): Xaa is C or S

SEQ ID NO: 39779 - protein, 36 aa, Artificial Sequence; identical to SEQ ID NO: 8800
  GFR-binding peptide
  MOD_RES (3)..(4): Xaa is C or S
  MOD_RES (18)..(19)..(20)..(21)..(22): Xaa is A or G
  MOD_RES (23)..(24)..(25)..(26): Xaa is A or G or is absent

SEQ ID NO: 39780 - protein, 39 aa, Artificial Sequence; identical to SEQ ID NO: 16099
  GFR-binding peptide
  MOD_RES (4)..(5)..(39): Xaa is C or S
  MOD_RES (19)..(20)..(21)..(22)..(23): Xaa is A or G
  MOD_RES (24)..(25)..(26)..(27): Xaa is A or G or is absent

SEQ ID NO: 39781 - protein, 35 aa, Artificial Sequence; identical to SEQ ID NO: 16100
  GFR-binding peptide
  MOD_RES (1)..(33)..(35): Xaa is C or S

SEQ ID NO: 39782 - protein, 36 aa, Artificial Sequence; identical to SEQ ID NO: 14360
  GFR-binding peptide
  MOD_RES (2)..(36): Xaa is C or S
  MOD_RES (16)..(17)..(18)..(19)..(20): Xaa is A or G
  MOD_RES (21)..(22)..(23)..(24): Xaa is A or G or is absent

SEQ ID NO: 39783 - protein, 34 aa, Artificial Sequence; identical to SEQ ID NO: 8802
  GFR-binding peptide
  MOD_RES (1)..(2): Xaa is C or S
  MOD_RES (16)..(17)..(18)..(19)..(20): Xaa is A or G
  MOD_RES (21)..(22)..(23)..(24): Xaa is A or G or is absent

SEQ ID NO: 39784 - protein, 38 aa, Artificial Sequence; identical to SEQ ID NO: 16102
  GFR-binding peptide
  MOD_RES (1)..(2)..(36)..(38): Xaa is C or S
  MOD_RES (16)..(17)..(18)..(19)..(20): Xaa is A or G
  MOD_RES (21)..(22)..(23)..(24): Xaa is A or G or is absent

SEQ ID NO: 39785 - protein, 38 aa, Artificial Sequence; identical to SEQ ID NO: 16103
  GFR-binding peptide
  MOD_RES (5)..(6)..(38): Xaa is C or S

SEQ ID NO: 39786 - protein, 40 aa, Artificial Sequence; identical to SEQ ID NO: 16104
  GFR-binding peptide
  MOD_RES (6)..(40): Xaa is C or S
  MOD_RES (20)..(21)..(22)..(23)..(24): Xaa is A or G
  MOD_RES (25)..(26)..(27)..(28): Xaa is A or G or is absent

SEQ ID NO: 39787 - protein, 37 aa, Artificial Sequence; identical to SEQ ID NO: 14362
  GFR-binding peptide
  MOD_RES (5)..(6): Xaa is C or S

SEQ ID NO: 39788 - protein, 37 aa, Artificial Sequence; identical to SEQ ID NO: 16105
  GFR-binding peptide
  MOD_RES (1)..(2)..(34)..(36): Xaa is C or S

SEQ ID NO: 39789 - protein, 34 aa, Artificial Sequence; identical to SEQ ID NO: 16106
  GFR-binding peptide
  MOD_RES (33)..(33): Xaa is C or S
  MOD_RES (14)..(15)..(16)..(17)..(18): Xaa is A or G
  MOD_RES (19)..(20)..(21)..(22): Xaa is A or G or is absent

SEQ ID NO: 39790 - protein, 32 aa, Artificial Sequence; identical to SEQ ID NO: 16107
  GFR-binding peptide
  MOD_RES (1)..(32): Xaa is C or S

SEQ ID NO: 39791 - protein, 37 aa, Artificial Sequence; identical to SEQ ID NO: 14363
  GFR-binding peptide
  MOD_RES (34)..(36): Xaa is C or S
  MOD_RES (14)..(15)..(16)..(17)..(18): Xaa is A or G
  MOD_RES (19)..(20)..(21)..(22): Xaa is A or G or is absent

SEQ ID NO: 39792 - protein, 36 aa, Artificial Sequence; identical to SEQ ID NO: 14364
  GFR-binding peptide
  MOD_RES (2)..(3)..(35): Xaa is C or S

SEQ ID NO: 39793 - protein, 44 aa, Artificial Sequence; identical to SEQ ID NO: 8808
  GFR-binding peptide
  MOD_RES (6)..(7)..(41)..(43): Xaa is C or S
  MOD_RES (21)..(22)..(23)..(24)..(25): Xaa is A or G
  MOD_RES (26)..(27)..(28)..(29): Xaa is A or G or is absent

SEQ ID NO: 39794 - protein, 42 aa, Artificial Sequence; identical to SEQ ID NO: 8809
  GFR-binding peptide
  MOD_RES (5)..(6)..(39)..(41): Xaa is C or S
  MOD_RES (20)..(21)..(22)..(23)..(24): Xaa is A or G
  MOD_RES (25)..(26)..(27)..(28): Xaa is A or G or is absent

SEQ ID NO: 39795 - protein, 37 aa, Artificial Sequence; identical to SEQ ID NO: 14365
  GFR-binding peptide
  MOD_RES (4)..(5)..(36): Xaa is C or S

SEQ ID NO: 39796 - protein, 39 aa, Artificial Sequence; identical to SEQ ID NO: 7043
  GFR-binding peptide
  MOD_RES (5)..(6): Xaa is C or S
  MOD_RES (20)..(21)..(22)..(23)..(24): Xaa is A or G
  MOD_RES (25)..(26)..(27)..(28): Xaa is A or G or is absent

SEQ ID NO: 39797 - protein, 34 aa, Artificial Sequence; identical to SEQ ID NO: 7044
  GFR-binding peptide
  MOD_RES (1)..(2): Xaa is C or S
  MOD_RES (16)..(17)..(18)..(19)..(20): Xaa is A or G
  MOD_RES (21)..(22)..(23)..(24): Xaa is A or G or is absent

SEQ ID NO: 39798 - protein, 39 aa, Artificial Sequence; identical to SEQ ID NO: 16112
  GFR-binding peptide
  MOD_RES (3)..(4)..(38): Xaa is C or S
  MOD_RES (18)..(19)..(20)..(21)..(22): Xaa is A or G
  MOD_RES (23)..(24)..(25)..(26): Xaa is A or G or is absent

SEQ ID NO: 39799 - protein, 35 aa, Artificial Sequence; identical to SEQ ID NO: 14369
  GFR-binding peptide
  MOD_RES (1)..(35): Xaa is C or S
  MOD_RES (15)..(16)..(17)..(18)..(19): Xaa is A or G
  MOD_RES (20)..(21)..(22)..(23): Xaa is A or G or is absent

SEQ ID NO: 39800 - protein, 34 aa, Artificial Sequence; identical to SEQ ID NO: 14370
  GFR-binding peptide
  MOD_RES (1)..(34): Xaa is C or S
  MOD_RES (15)..(16)..(17)..(18)..(19): Xaa is A or G
  MOD_RES (20)..(21)..(22)..(23): Xaa is A or G or is absent

SEQ ID NO: 39801 - protein, 42 aa, Artificial Sequence; identical to SEQ ID NO: 16115
  GFR-binding peptide
  MOD_RES (4)..(5)..(39)..(41): Xaa is C or S
  MOD_RES (19)..(20)..(21)..(22)..(23): Xaa is A or G
  MOD_RES (24)..(25)..(26)..(27): Xaa is A or G or is absent

SEQ ID NO: 39802 - protein, 34 aa, Artificial Sequence; identical to SEQ ID NO: 14372
  GFR-binding peptide
  MOD_RES (3)..(4): Xaa is C or S

SEQ ID NO: 39803 - protein, 38 aa, Artificial Sequence; identical to SEQ ID NO: 8816
  GFR-binding peptide
  MOD_RES (4)..(5)..(37): Xaa is C or S

SEQ ID NO: 39804 - protein, 41 aa, Artificial Sequence; identical to SEQ ID NO: 14373
  GFR-binding peptide
  MOD_RES (6)..(40): Xaa is C or S
  MOD_RES (20)..(21)..(22)..(23)..(24): Xaa is A or G
  MOD_RES (25)..(26)..(27)..(28): Xaa is A or G or is absent

SEQ ID NO: 39805 - protein, 33 aa, Artificial Sequence; identical to SEQ ID NO: 8817
  GFR-binding peptide
  MOD_RES (14)..(15)..(16)..(17)..(18): Xaa is A or G
  MOD_RES (19)..(20)..(21)..(22): Xaa is A or G or is absent

SEQ ID NO: 39806 - protein, 36 aa, Artificial Sequence; identical to SEQ ID NO: 16120
  GFR-binding peptide
  MOD_RES (1)..(34)..(36): Xaa is C or S
  MOD_RES (15)..(16)..(17)..(18)..(19): Xaa is A or G
  MOD_RES (20)..(21)..(22)..(23): Xaa is A or G or is absent

SEQ ID NO: 39807 - protein, 39 aa, Artificial Sequence; identical to SEQ ID NO: 14375
  GFR-binding peptide
  MOD_RES (6)..(7): Xaa is C or S
  MOD_RES (21)..(22)..(23)..(24)..(25): Xaa is A or G
  MOD_RES (26)..(27)..(28)..(29): Xaa is A or G or is absent

SEQ ID NO: 39808 - protein, 35 aa, Artificial Sequence; identical to SEQ ID NO: 16121
  GFR-binding peptide
  MOD_RES (2)..(3)..(35): Xaa is C or S

SEQ ID NO: 39809 - protein, 34 aa, Artificial Sequence; identical to SEQ ID NO: 16122
  GFR-binding peptide
  MOD_RES (1)..(2)..(34): Xaa is C or S

SEQ ID NO: 39810 - protein, 40 aa, Artificial Sequence; identical to SEQ ID NO: 14376
  GFR-binding peptide
  MOD_RES (6)..(7)..(40): Xaa is C or S
  MOD_RES (21)..(22)..(23)..(24)..(25): Xaa is A or G
  MOD_RES (26)..(27)..(28)..(29): Xaa is A or G or is absent

SEQ ID NO: 39811 - protein, 36 aa, Artificial Sequence; identical to SEQ ID NO: 14377
  GFR-binding peptide
  MOD_RES (3)..(4)..(36): Xaa is C or S

SEQ ID NO: 39812 - protein, 33 aa, Artificial Sequence; identical to SEQ ID NO: 16123
  GFR-binding peptide
  MOD_RES (1)..(1): Xaa is C or S
  MOD_RES (15)..(16)..(17)..(18)..(19): Xaa is A or G
  MOD_RES (20)..(21)..(22)..(23): Xaa is A or G or is absent

SEQ ID NO: 39813 - protein, 40 aa, Artificial Sequence; identical to SEQ ID NO: 16124
  GFR-binding peptide
  MOD_RES (2)..(3)..(37)..(39): Xaa is C or S
  MOD_RES (17)..(18)..(19)..(20)..(21): Xaa is A or G
  MOD_RES (22)..(23)..(24)..(25): Xaa is A or G or is absent

SEQ ID NO: 39814 - protein, 39 aa, Artificial Sequence; identical to SEQ ID NO: 14379
  GFR-binding peptide
  MOD_RES (6)..(7)..(39): Xaa is C or S

SEQ ID NO: 39815 - protein, 35 aa, Artificial Sequence; identical to SEQ ID NO: 14380
  GFR-binding peptide
  MOD_RES (1)..(34): Xaa is C or S
  MOD_RES (15)..(16)..(17)..(18)..(19): Xaa is A or G
  MOD_RES (20)..(21)..(22)..(23): Xaa is A or G or is absent

SEQ ID NO: 39816 - protein, 36 aa, Artificial Sequence; identical to SEQ ID NO: 14381
  GFR-binding peptide
  MOD_RES (3)..(4): Xaa is C or S
  MOD_RES (18)..(19)..(20)..(21)..(22): Xaa is A or G
  MOD_RES (23)..(24)..(25)..(26): Xaa is A or G or is absent

SEQ ID NO: 39817 - protein, 41 aa, Artificial Sequence; identical to SEQ ID NO: 16126
  GFR-binding peptide
  MOD_RES (5)..(39)..(41): Xaa is C or S
  MOD_RES (19)..(20)..(21)..(22)..(23): Xaa is A or G
  MOD_RES (24)..(25)..(26)..(27): Xaa is A or G or is absent

SEQ ID NO: 39818 - protein, 31 aa, Artificial Sequence; identical to SEQ ID NO: 16127
  GFR-binding peptide
  MOD_RES (1)..(1): Xaa is C or S

SEQ ID NO: 39819 - protein, 40 aa, Artificial Sequence; identical to SEQ ID NO: 16128
  GFR-binding peptide
  MOD_RES (3)..(4)..(38)..(40): Xaa is C or S
  MOD_RES (18)..(19)..(20)..(21)..(22): Xaa is A or G
  MOD_RES (23)..(24)..(25)..(26): Xaa is A or G or is absent

SEQ ID NO: 39820 - protein, 38 aa, Artificial Sequence; identical to SEQ ID NO: 16129
  GFR-binding peptide
  MOD_RES (5)..(6)..(38): Xaa is C or S

SEQ ID NO: 39821 - protein, 39 aa, Artificial Sequence; identical to SEQ ID NO: 8823
  GFR-binding peptide
  MOD_RES (6)..(7)..(39): Xaa is C or S

SEQ ID NO: 39822 - protein, 36 aa, Artificial Sequence; identical to SEQ ID NO: 8824
  GFR-binding peptide
  MOD_RES (1)..(2)..(33)..(35): Xaa is C or S

SEQ ID NO: 39823 - protein, 39 aa, Artificial Sequence; identical to SEQ ID NO: 14383
  GFR-binding peptide
  MOD_RES (5)..(6)..(38): Xaa is C or S

SEQ ID NO: 39824 - protein, 42 aa, Artificial Sequence; identical to SEQ ID NO: 7063
  GFR-binding peptide
  MOD_RES (6)..(7)..(39)..(41): Xaa is C or S

SEQ ID NO: 39825 - protein, 35 aa, Artificial Sequence; identical to SEQ ID NO: 14386
  GFR-binding peptide
  MOD_RES (34)..(34): Xaa is C or S
  MOD_RES (14)..(15)..(16)..(17)..(18): Xaa is A or G
  MOD_RES (19)..(20)..(21)..(22): Xaa is A or G or is absent

SEQ ID NO: 39826 - protein, 38 aa, Artificial Sequence; identical to SEQ ID NO: 16136
  GFR-binding peptide
  MOD_RES (4)..(5): Xaa is C or S
  MOD_RES (19)..(20)..(21)..(22)..(23): Xaa is A or G
  MOD_RES (24)..(25)..(26)..(27): Xaa is A or G or is absent

SEQ ID NO: 39827 - protein, 33 aa, Artificial Sequence; identical to SEQ ID NO: 16137
  GFR-binding peptide
  MOD_RES (2)..(3): Xaa is C or S

SEQ ID NO: 39828 - protein, 35 aa, Artificial Sequence; identical to SEQ ID NO: 16138
  GFR-binding peptide
  MOD_RES (2)..(3)..(34): Xaa is C or S

SEQ ID NO: 39829 - protein, 37 aa, Artificial Sequence; identical to SEQ ID NO: 14387
  GFR-binding peptide
  MOD_RES (2)..(36): Xaa is C or S
  MOD_RES (16)..(17)..(18)..(19)..(20): Xaa is A or G
  MOD_RES (21)..(22)..(23)..(24): Xaa is A or G or is absent

SEQ ID NO: 39830 - protein, 38 aa, Artificial Sequence; identical to SEQ ID NO: 16139
  GFR-binding peptide
  MOD_RES (4)..(36)..(38): Xaa is C or S

SEQ ID NO: 39831 - protein, 36 aa, Artificial Sequence; identical to SEQ ID NO: 8830
  GFR-binding peptide
  MOD_RES (2)..(3)..(35): Xaa is C or S

SEQ ID NO: 39832 - protein, 39 aa, Artificial Sequence; identical to SEQ ID NO: 16141
  GFR-binding peptide
  MOD_RES (3)..(4)..(38): Xaa is C or S
  MOD_RES (18)..(19)..(20)..(21)..(22): Xaa is A or G
  MOD_RES (23)..(24)..(25)..(26): Xaa is A or G or is absent

SEQ ID NO: 39833 - protein, 39 aa, Artificial Sequence; identical to SEQ ID NO: 16143
  GFR-binding peptide
  MOD_RES (5)..(6): Xaa is C or S
  MOD_RES (20)..(21)..(22)..(23)..(24): Xaa is A or G
  MOD_RES (25)..(26)..(27)..(28): Xaa is A or G or is absent

SEQ ID NO: 39834 - protein, 37 aa, Artificial Sequence; identical to SEQ ID NO: 14390
  GFR-binding peptide
  MOD_RES (1)..(2)..(34)..(36): Xaa is C or S

SEQ ID NO: 39835 - protein, 40 aa, Artificial Sequence; identical to SEQ ID NO: 14391
  GFR-binding peptide
  MOD_RES (5)..(6)..(38)..(40): Xaa is C or S

SEQ ID NO: 39836 - protein, 35 aa, Artificial Sequence; identical to SEQ ID NO: 16146
  GFR-binding peptide
  MOD_RES (3)..(4): Xaa is C or S

SEQ ID NO: 39837 - protein, 39 aa, Artificial Sequence; identical to SEQ ID NO: 16147
  GFR-binding peptide
  MOD_RES (6)..(7): Xaa is C or S
  MOD_RES (21)..(22)..(23)..(24)..(25): Xaa is A or G
  MOD_RES (26)..(27)..(28)..(29): Xaa is A or G or is absent

SEQ ID NO: 39838 - protein, 36 aa, Artificial Sequence; identical to SEQ ID NO: 16148
  GFR-binding peptide
  MOD_RES (3)..(4)..(35): Xaa is C or S

SEQ ID NO: 39839 - protein, 40 aa, Artificial Sequence; identical to SEQ ID NO: 16149
  GFR-binding peptide
  MOD_RES (5)..(6)..(40): Xaa is C or S
  MOD_RES (20)..(21)..(22)..(23)..(24): Xaa is A or G
  MOD_RES (25)..(26)..(27)..(28): Xaa is A or G or is absent

SEQ ID NO: 39840 - protein, 36 aa, Artificial Sequence; identical to SEQ ID NO: 14392
  GFR-binding peptide
  MOD_RES (3)..(4): Xaa is C or S
  MOD_RES (18)..(19)..(20)..(21)..(22): Xaa is A or G
  MOD_RES (23)..(24)..(25)..(26): Xaa is A or G or is absent

SEQ ID NO: 39841 - protein, 37 aa, Artificial Sequence; identical to SEQ ID NO: 8842
  GFR-binding peptide
  MOD_RES (3)..(4): Xaa is C or S
  MOD_RES (18)..(19)..(20)..(21)..(22): Xaa is A or G
  MOD_RES (23)..(24)..(25)..(26): Xaa is A or G or is absent

SEQ ID NO: 39842 - protein, 34 aa, Artificial Sequence; identical to SEQ ID NO: 16152
  GFR-binding peptide
  MOD_RES (1)..(2): Xaa is C or S
  MOD_RES (16)..(17)..(18)..(19)..(20): Xaa is A or G
  MOD_RES (21)..(22)..(23)..(24): Xaa is A or G or is absent

SEQ ID NO: 39843 - protein, 33 aa, Artificial Sequence; identical to SEQ ID NO: 7082
  GFR-binding peptide
  MOD_RES (2)..(3): Xaa is C or S

SEQ ID NO: 39844 - protein, 35 aa, Artificial Sequence; identical to SEQ ID NO: 14395
  GFR-binding peptide
  MOD_RES (1)..(33)..(35): Xaa is C or S

SEQ ID NO: 39845 - protein, 32 aa, Artificial Sequence; identical to SEQ ID NO: 8845
  GFR-binding peptide
  MOD_RES (1)..(2): Xaa is C or S

SEQ ID NO: 39846 - protein, 35 aa, Artificial Sequence; identical to SEQ ID NO: 14396
  GFR-binding peptide
  MOD_RES (2)..(2): Xaa is C or S
  MOD_RES (16)..(17)..(18)..(19)..(20): Xaa is A or G
  MOD_RES (21)..(22)..(23)..(24): Xaa is A or G or is absent

SEQ ID NO: 39847 - protein, 40 aa, Artificial Sequence; identical to SEQ ID NO: 14397
  GFR-binding peptide
  MOD_RES (4)..(5)..(39): Xaa is C or S
  MOD_RES (19)..(20)..(21)..(22)..(23): Xaa is A or G
  MOD_RES (24)..(25)..(26)..(27): Xaa is A or G or is absent

SEQ ID NO: 39848 - protein, 33 aa, Artificial Sequence; identical to SEQ ID NO: 16154
  GFR-binding peptide
  MOD_RES (1)..(33): Xaa is C or S

SEQ ID NO: 39849 - protein, 36 aa, Artificial Sequence; identical to SEQ ID NO: 14398
  GFR-binding peptide
  MOD_RES (5)..(6): Xaa is C or S

SEQ ID NO: 39850 - protein, 36 aa, Artificial Sequence
  GFR-binding peptide
  MOD_RES (1)..(2)..(35): Xaa is C or S
  MOD_RES (16)..(17)..(18)..(19)..(20): Xaa is A or G
  MOD_RES (21)..(22)..(23)..(24): Xaa is A or G or is absent
XXVSQDLEPLTILYYXXXXXXXXXEQLSNMIVKSXK

SEQ ID NO: 39851 - protein, 36 aa, Artificial Sequence; identical to SEQ ID NO: 16156
  GFR-binding peptide
  MOD_RES (3)..(4)..(36): Xaa is C or S

SEQ ID NO: 39852 - protein, 41 aa, Artificial Sequence; identical to SEQ ID NO: 14400
  GFR-binding peptide
  MOD_RES (5)..(6)..(38)..(40): Xaa is C or S

SEQ ID NO: 39853 - protein, 40 aa, Artificial Sequence; identical to SEQ ID NO: 14401
  GFR-binding peptide
  MOD_RES (6)..(7)..(38)..(40): Xaa is C or S

SEQ ID NO: 39854 - protein, 42 aa, Artificial Sequence; identical to SEQ ID NO: 14402
  GFR-binding peptide
  MOD_RES (6)..(7)..(40)..(42): Xaa is C or S
  MOD_RES (21)..(22)..(23)..(24)..(25): Xaa is A or G
  MOD_RES (26)..(27)..(28)..(29): Xaa is A or G or is absent

SEQ ID NO: 39855 - protein, 33 aa, Artificial Sequence; identical to SEQ ID NO: 16157
  GFR-binding peptide
  MOD_RES (1)..(32): Xaa is C or S

SEQ ID NO: 39856 - protein, 37 aa, Artificial Sequence; identical to SEQ ID NO: 14404
  GFR-binding peptide
  MOD_RES (3)..(4): Xaa is C or S
  MOD_RES (18)..(19)..(20)..(21)..(22): Xaa is A or G
  MOD_RES (23)..(24)..(25)..(26): Xaa is A or G or is absent

SEQ ID NO: 39857 - protein, 40 aa, Artificial Sequence; identical to SEQ ID NO: 14405
  GFR-binding peptide
  MOD_RES (6)..(7)..(38)..(40): Xaa is C or S

SEQ ID NO: 39858 - protein, 34 aa, Artificial Sequence; identical to SEQ ID NO: 14406
  GFR-binding peptide
  MOD_RES (1)..(34): Xaa is C or S
  MOD_RES (15)..(16)..(17)..(18)..(19): Xaa is A or G
  MOD_RES (20)..(21)..(22)..(23): Xaa is A or G or is absent

SEQ ID NO: 39859 - protein, 36 aa, Artificial Sequence; identical to SEQ ID NO: 14407
  GFR-binding peptide
  MOD_RES (3)..(4): Xaa is C or S
  MOD_RES (18)..(19)..(20)..(21)..(22): Xaa is A or G
  MOD_RES (23)..(24)..(25)..(26): Xaa is A or G or is absent

SEQ ID NO: 39860 - protein, 42 aa, Artificial Sequence; identical to SEQ ID NO: 14409
  GFR-binding peptide
  MOD_RES (4)..(5)..(39)..(41): Xaa is C or S
  MOD_RES (19)..(20)..(21)..(22)..(23): Xaa is A or G
  MOD_RES (24)..(25)..(26)..(27): Xaa is A or G or is absent

SEQ ID NO: 39861 - protein, 34 aa, Artificial Sequence; identical to SEQ ID NO: 8851
  GFR-binding peptide
  MOD_RES (1)..(2): Xaa is C or S
  MOD_RES (16)..(17)..(18)..(19)..(20): Xaa is A or G
  MOD_RES (21)..(22)..(23)..(24): Xaa is A or G or is absent

SEQ ID NO: 39862 - protein, 40 aa, Artificial Sequence; identical to SEQ ID NO: 16159
  GFR-binding peptide
  MOD_RES (2)..(3)..(37)..(39): Xaa is C or S
  MOD_RES (17)..(18)..(19)..(20)..(21): Xaa is A or G
  MOD_RES (22)..(23)..(24)..(25): Xaa is A or G or is absent

SEQ ID NO: 39863 - protein, 34 aa, Artificial Sequence; identical to SEQ ID NO: 16160
  GFR-binding peptide
  MOD_RES (2)..(3): Xaa is C or S

SEQ ID NO: 39864 - protein, 38 aa, Artificial Sequence; identical to SEQ ID NO: 14410
  GFR-binding peptide
  MOD_RES (5)..(6): Xaa is C or S
  MOD_RES (20)..(21)..(22)..(23)..(24): Xaa is A or G
  MOD_RES (25)..(26)..(27)..(28): Xaa is A or G or is absent

SEQ ID NO: 39865 - protein, 35 aa, Artificial Sequence; identical to SEQ ID NO: 14411
  GFR-binding peptide
  MOD_RES (3)..(4): Xaa is C or S

SEQ ID NO: 39866 - protein, 33 aa, Artificial Sequence; identical to SEQ ID NO: 8854
  GFR-binding peptide
  MOD_RES (14)..(15)..(16)..(17)..(18): Xaa is A or G
  MOD_RES (19)..(20)..(21)..(22): Xaa is A or G or is absent

SEQ ID NO: 39867 - protein, 36 aa, Artificial Sequence; identical to SEQ ID NO: 14413
  GFR-binding peptide
  MOD_RES (3)..(4): Xaa is C or S
  MOD_RES (18)..(19)..(20)..(21)..(22): Xaa is A or G
  MOD_RES (23)..(24)..(25)..(26): Xaa is A or G or is absent

SEQ ID NO: 39868 - protein, 41 aa, Artificial Sequence; identical to SEQ ID NO: 14414
  GFR-binding peptide
  MOD_RES (6)..(7)..(40): Xaa is C or S
  MOD_RES (21)..(22)..(23)..(24)..(25): Xaa is A or G
  MOD_RES (26)..(27)..(28)..(29): Xaa is A or G or is absent

SEQ ID NO: 39869 - protein, 35 aa, Artificial Sequence; identical to SEQ ID NO: 16162
  GFR-binding peptide
  MOD_RES (4)..(5): Xaa is C or S

SEQ ID NO: 39870 - protein, 35 aa, Artificial Sequence; identical to SEQ ID NO: 14415
  GFR-binding peptide
  MOD_RES (1)..(32)..(34): Xaa is C or S

SEQ ID NO: 39871 - protein, 37 aa, Artificial Sequence; identical to SEQ ID NO: 14417
  GFR-binding peptide
  MOD_RES (2)..(3)..(36): Xaa is C or S
  MOD_RES (17)..(18)..(19)..(20)..(21): Xaa is A or G
  MOD_RES (22)..(23)..(24)..(25): Xaa is A or G or is absent

SEQ ID NO: 39872 - protein, 33 aa, Artificial Sequence; identical to SEQ ID NO: 14418
  GFR-binding peptide
  MOD_RES (31)..(33): Xaa is C or S

SEQ ID NO: 39873 - protein, 36 aa, Artificial Sequence; identical to SEQ ID NO: 8858
  GFR-binding peptide
  MOD_RES (3)..(4)..(35): Xaa is C or S

SEQ ID NO: 39874 - protein, 40 aa, Artificial Sequence
  GFR-binding peptide
  MOD_RES (6)..(7)..(40): Xaa is C or S
  MOD_RES (21)..(22)..(23)..(24)..(25): Xaa is A or G
  MOD_RES (26)..(27)..(28)..(29): Xaa is A or G or is absent
ASASPXXVSQDLEPLTILYYXXXXXXXXXEQLSNMIVKSX

SEQ ID NO: 39875 - protein, 39 aa, Artificial Sequence; identical to SEQ ID NO: 16165
  GFR-binding peptide
  MOD_RES (2)..(3)..(37)..(39): Xaa is C or S
  MOD_RES (17)..(18)..(19)..(20)..(21): Xaa is A or G
  MOD_RES (22)..(23)..(24)..(25): Xaa is A or G or is absent

SEQ ID NO: 39876 - protein, 33 aa, Artificial Sequence; identical to SEQ ID NO: 16166
  GFR-binding peptide
  MOD_RES (14)..(15)..(16)..(17)..(18): Xaa is A or G
  MOD_RES (19)..(20)..(21)..(22): Xaa is A or G or is absent

SEQ ID NO: 39877 - protein, 38 aa, Artificial Sequence; identical to SEQ ID NO: 14422
  GFR-binding peptide
  MOD_RES (2)..(3)..(36)..(38): Xaa is C or S
  MOD_RES (17)..(18)..(19)..(20)..(21): Xaa is A or G
  MOD_RES (22)..(23)..(24)..(25): Xaa is A or G or is absent

SEQ ID NO: 39878 - protein, 42 aa, Artificial Sequence; identical to SEQ ID NO: 16168
  GFR-binding peptide
  MOD_RES (4)..(5)..(39)..(41): Xaa is C or S
  MOD_RES (19)..(20)..(21)..(22)..(23): Xaa is A or G
  MOD_RES (24)..(25)..(26)..(27): Xaa is A or G or is absent

SEQ ID NO: 39879 - protein, 38 aa, Artificial Sequence; identical to SEQ ID NO: 16170
  GFR-binding peptide
  MOD_RES (5)..(6): Xaa is C or S
  MOD_RES (20)..(21)..(22)..(23)..(24): Xaa is A or G
  MOD_RES (25)..(26)..(27)..(28): Xaa is A or G or is absent

SEQ ID NO: 39880 - protein, 42 aa, Artificial Sequence; identical to SEQ ID NO: 7102
  GFR-binding peptide
  MOD_RES (6)..(7)..(39)..(41): Xaa is C or S

SEQ ID NO: 39881 - protein, 35 aa, Artificial Sequence; identical to SEQ ID NO: 8868
  GFR-binding peptide
  MOD_RES (3)..(4)..(35): Xaa is C or S

SEQ ID NO: 39882 - protein, 36 aa, Artificial Sequence; identical to SEQ ID NO: 14424
  GFR-binding peptide
  MOD_RES (33)..(35): Xaa is C or S
  MOD_RES (14)..(15)..(16)..(17)..(18): Xaa is A or G
  MOD_RES (19)..(20)..(21)..(22): Xaa is A or G or is absent

SEQ ID NO: 39883 - protein, 39 aa, Artificial Sequence; identical to SEQ ID NO: 16172
  GFR-binding peptide
  MOD_RES (6)..(7): Xaa is C or S
  MOD_RES (21)..(22)..(23)..(24)..(25): Xaa is A or G
  MOD_RES (26)..(27)..(28)..(29): Xaa is A or G or is absent

SEQ ID NO: 39884 - protein, 37 aa, Artificial Sequence; identical to SEQ ID NO: 14425
  GFR-binding peptide
  MOD_RES (2)..(3)..(37): Xaa is C or S
  MOD_RES (17)..(18)..(19)..(20)..(21): Xaa is A or G
  MOD_RES (22)..(23)..(24)..(25): Xaa is A or G or is absent

SEQ ID NO: 39885 - protein, 41 aa, Artificial Sequence; identical to SEQ ID NO: 16173
  GFR-binding peptide
  MOD_RES (6)..(7)..(39)..(41): Xaa is C or S

SEQ ID NO: 39886 - protein, 35 aa, Artificial Sequence; identical to SEQ ID NO: 14426
  GFR-binding peptide
  MOD_RES (32)..(34): Xaa is C or S

SEQ ID NO: 39887 - protein, 39 aa, Artificial Sequence; identical to SEQ ID NO: 16174
  GFR-binding peptide
  MOD_RES (3)..(4)..(36)..(38): Xaa is C or S

SEQ ID NO: 39888 - protein, 39 aa, Artificial Sequence; identical to SEQ ID NO: 16175
  GFR-binding peptide
  MOD_RES (6)..(7)..(39): Xaa is C or S

SEQ ID NO: 39889 - protein, 32 aa, Artificial Sequence; identical to SEQ ID NO: 14429
  GFR-binding peptide
  MOD_RES (14)..(15)..(16)..(17)..(18): Xaa is A or G
  MOD_RES (19)..(20)..(21)..(22): Xaa is A or G or is absent

SEQ ID NO: 39890 - protein, 43 aa, Artificial Sequence; identical to SEQ ID NO: 16177
  GFR-binding peptide
  MOD_RES (6)..(7)..(41)..(43): Xaa is C or S
  MOD_RES (21)..(22)..(23)..(24)..(25): Xaa is A or G
  MOD_RES (26)..(27)..(28)..(29): Xaa is A or G or is absent

SEQ ID NO: 39891 - protein, 33 aa, Artificial Sequence; identical to SEQ ID NO: 7110
  GFR-binding peptide
  MOD_RES (1)..(32): Xaa is C or S

SEQ ID NO: 39892 - protein, 34 aa, Artificial Sequence; identical to SEQ ID NO: 16179
  GFR-binding peptide
  MOD_RES (31)..(33): Xaa is C or S

SEQ ID NO: 39893 - protein, 35 aa, Artificial Sequence; identical to SEQ ID NO: 16180
  GFR-binding peptide
  MOD_RES (1)..(35): Xaa is C or S
  MOD_RES (15)..(16)..(17)..(18)..(19): Xaa is A or G
  MOD_RES (20)..(21)..(22)..(23): Xaa is A or G or is absent

SEQ ID NO: 39894 - protein, 36 aa, Artificial Sequence; identical to SEQ ID NO: 14431
  GFR-binding peptide
  MOD_RES (4)..(5)..(36): Xaa is C or S

SEQ ID NO: 39895 - protein, 43 aa, Artificial Sequence; identical to SEQ ID NO: 16181
  GFR-binding peptide
  MOD_RES (5)..(6)..(40)..(42): Xaa is C or S
  MOD_RES (20)..(21)..(22)..(23)..(24): Xaa is A or G
  MOD_RES (25)..(26)..(27)..(28): Xaa is A or G or is absent

SEQ ID NO: 39896 - protein, 36 aa, Artificial Sequence; identical to SEQ ID NO: 14432
  GFR-binding peptide
  MOD_RES (34)..(36): Xaa is C or S
  MOD_RES (14)..(15)..(16)..(17)..(18): Xaa is A or G
  MOD_RES (19)..(20)..(21)..(22): Xaa is A or G or is absent

SEQ ID NO: 39897 - protein, 35 aa, Artificial Sequence; identical to SEQ ID NO: 7112
  GFR-binding peptide
  MOD_RES (1)..(35): Xaa is C or S
  MOD_RES (15)..(16)..(17)..(18)..(19): Xaa is A or G
  MOD_RES (20)..(21)..(22)..(23): Xaa is A or G or is absent

SEQ ID NO: 39898 - protein, 33 aa, Artificial Sequence; identical to SEQ ID NO: 16182
  GFR-binding peptide
  MOD_RES (33)..(33): Xaa is C or S
  MOD_RES (14)..(15)..(16)..(17)..(18): Xaa is A or G
  MOD_RES (19)..(20)..(21)..(22): Xaa is A or G or is absent

SEQ ID NO: 39899 - protein, 36 aa, Artificial Sequence; identical to SEQ ID NO: 14435
  GFR-binding peptide
  MOD_RES (3)..(4): Xaa is C or S
  MOD_RES (18)..(19)..(20)..(21)..(22): Xaa is A or G
  MOD_RES (23)..(24)..(25)..(26): Xaa is A or G or is absent

SEQ ID NO: 39900 - protein, 40 aa, Artificial Sequence; identical to SEQ ID NO: 16183
  GFR-binding peptide
  MOD_RES (4)..(5)..(37)..(39): Xaa is C or S

SEQ ID NO: 39901 - protein, 36 aa, Artificial Sequence; identical to SEQ ID NO: 14436
  GFR-binding peptide
  MOD_RES (2)..(3): Xaa is C or S
  MOD_RES (17)..(18)..(19)..(20)..(21): Xaa is A or G
  MOD_RES (22)..(23)..(24)..(25): Xaa is A or G or is absent

SEQ ID NO: 39902 - protein, 37 aa, Artificial Sequence; identical to SEQ ID NO: 16184
  GFR-binding peptide
  MOD_RES (4)..(5)..(37): Xaa is C or S

SEQ ID NO: 39903 - protein, 35 aa, Artificial Sequence; identical to SEQ ID NO: 16185
  GFR-binding peptide
  MOD_RES (1)..(34): Xaa is C or S
  MOD_RES (15)..(16)..(17)..(18)..(19): Xaa is A or G
  MOD_RES (20)..(21)..(22)..(23): Xaa is A or G or is absent

SEQ ID NO: 39904 - protein, 34 aa, Artificial Sequence; identical to SEQ ID NO: 16186
  GFR-binding peptide
  MOD_RES (1)..(2)..(34): Xaa is C or S

SEQ ID NO: 39905 - protein, 40 aa, Artificial Sequence; identical to SEQ ID NO: 16187
  GFR-binding peptide
  MOD_RES (2)..(3)..(37)..(39): Xaa is C or S
  MOD_RES (17)..(18)..(19)..(20)..(21): Xaa is A or G
  MOD_RES (22)..(23)..(24)..(25): Xaa is A or G or is absent

SEQ ID NO: 39906 - protein, 40 aa, Artificial Sequence; identical to SEQ ID NO: 16188
  GFR-binding peptide
  MOD_RES (4)..(38)..(40): Xaa is C or S
  MOD_RES (18)..(19)..(20)..(21)..(22): Xaa is A or G
  MOD_RES (23)..(24)..(25)..(26): Xaa is A or G or is absent

SEQ ID NO: 39907 - protein, 38 aa, Artificial Sequence; identical to SEQ ID NO: 14437
  GFR-binding peptide
  MOD_RES (4)..(5)..(37): Xaa is C or S

SEQ ID NO: 39908 - protein, 34 aa, Artificial Sequence; identical to SEQ ID NO: 16190
  GFR-binding peptide
  MOD_RES (1)..(2): Xaa is C or S
  MOD_RES (16)..(17)..(18)..(19)..(20): Xaa is A or G
  MOD_RES (21)..(22)..(23)..(24): Xaa is A or G or is absent

SEQ ID NO: 39909 - protein, 32 aa, Artificial Sequence; identical to SEQ ID NO: 14438
  GFR-binding peptide
  MOD_RES (14)..(15)..(16)..(17)..(18): Xaa is A or G
  MOD_RES (19)..(20)..(21)..(22): Xaa is A or G or is absent

SEQ ID NO: 39910 - protein, 33 aa, Artificial Sequence; identical to SEQ ID NO: 16191
  GFR-binding peptide
  MOD_RES (1)..(1): Xaa is C or S
  MOD_RES (15)..(16)..(17)..(18)..(19): Xaa is A or G
  MOD_RES (20)..(21)..(22)..(23): Xaa is A or G or is absent

SEQ ID NO: 39911 - protein, 41 aa, Artificial Sequence; identical to SEQ ID NO: 14439
  GFR-binding peptide
  MOD_RES (5)..(6)..(40): Xaa is C or S
  MOD_RES (20)..(21)..(22)..(23)..(24): Xaa is A or G
  MOD_RES (25)..(26)..(27)..(28): Xaa is A or G or is absent

SEQ ID NO: 39912 - protein, 41 aa, Artificial Sequence; identical to SEQ ID NO: 7121
  GFR-binding peptide
  MOD_RES (5)..(6)..(39)..(41): Xaa is C or S
  MOD_RES (20)..(21)..(22)..(23)..(24): Xaa is A or G
  MOD_RES (25)..(26)..(27)..(28): Xaa is A or G or is absent

SEQ ID NO: 39913 - protein, 38 aa, Artificial Sequence; identical to SEQ ID NO: 14441
  GFR-binding peptide
  MOD_RES (1)..(2)..(36)..(38): Xaa is C or S
  MOD_RES (16)..(17)..(18)..(19)..(20): Xaa is A or G
  MOD_RES (21)..(22)..(23)..(24): Xaa is A or G or is absent

SEQ ID NO: 39914 - protein, 37 aa, Artificial Sequence; identical to SEQ ID NO: 16192
  GFR-binding peptide
  MOD_RES (2)..(3)..(37): Xaa is C or S
  MOD_RES (17)..(18)..(19)..(20)..(21): Xaa is A or G
  MOD_RES (22)..(23)..(24)..(25): Xaa is A or G or is absent

SEQ ID NO: 39915 - protein, 39 aa, Artificial Sequence; identical to SEQ ID NO: 14442
  GFR-binding peptide
  MOD_RES (7)..(39): Xaa is C or S

SEQ ID NO: 39916 - protein, 37 aa, Artificial Sequence; identical to SEQ ID NO: 8889
  GFR-binding peptide
  MOD_RES (1)..(2)..(35)..(37): Xaa is C or S
  MOD_RES (16)..(17)..(18)..(19)..(20): Xaa is A or G
  MOD_RES (21)..(22)..(23)..(24): Xaa is A or G or is absent

SEQ ID NO: 39917 - protein, 42 aa, Artificial Sequence; identical to SEQ ID NO: 14443
  GFR-binding peptide
  MOD_RES (5)..(6)..(40)..(42): Xaa is C or S
  MOD_RES (20)..(21)..(22)..(23)..(24): Xaa is A or G
  MOD_RES (25)..(26)..(27)..(28): Xaa is A or G or is absent

SEQ ID NO: 39918 - protein, 36 aa, Artificial Sequence; identical to SEQ ID NO: 16194
  GFR-binding peptide
  MOD_RES (4)..(5)..(36): Xaa is C or S

SEQ ID NO: 39919 - protein, 37 aa, Artificial Sequence; identical to SEQ ID NO: 16196
  GFR-binding peptide
  MOD_RES (2)..(36): Xaa is C or S
  MOD_RES (16)..(17)..(18)..(19)..(20): Xaa is A or G
  MOD_RES (21)..(22)..(23)..(24): Xaa is A or G or is absent

SEQ ID NO: 39920 - protein, 36 aa, Artificial Sequence; identical to SEQ ID NO: 14445
  GFR-binding peptide
  MOD_RES (1)..(33)..(35): Xaa is C or S

SEQ ID NO: 39921 - protein, 32 aa, Artificial Sequence; identical to SEQ ID NO: 16197
  GFR-binding peptide
  MOD_RES (1)..(2): Xaa is C or S

SEQ ID NO: 39922 - protein, 39 aa, Artificial Sequence; identical to SEQ ID NO: 14447
  GFR-binding peptide
  MOD_RES (4)..(5)..(36)..(38): Xaa is C or S

SEQ ID NO: 39923 - protein, 42 aa, Artificial Sequence; identical to SEQ ID NO: 14448
  GFR-binding peptide
  MOD_RES (6)..(7)..(39)..(41): Xaa is C or S

SEQ ID NO: 39924 - protein, 37 aa, Artificial Sequence; identical to SEQ ID NO: 8895
  GFR-binding peptide
  MOD_RES (6)..(7): Xaa is C or S

SEQ ID NO: 39925 - protein, 38 aa, Artificial Sequence; identical to SEQ ID NO: 14449
  GFR-binding peptide
  MOD_RES (1)..(2)..(35)..(37): Xaa is C or S
  MOD_RES (16)..(17)..(18)..(19)..(20): Xaa is A or G
  MOD_RES (21)..(22)..(23)..(24): Xaa is A or G or is absent

SEQ ID NO: 39926 - protein, 37 aa, Artificial Sequence; identical to SEQ ID NO: 16199
  GFR-binding peptide
  MOD_RES (2)..(3)..(36): Xaa is C or S
  MOD_RES (17)..(18)..(19)..(20)..(21): Xaa is A or G
  MOD_RES (22)..(23)..(24)..(25): Xaa is A or G or is absent

SEQ ID NO: 39927 - protein, 32 aa, Artificial Sequence; identical to SEQ ID NO: 16200
  GFR-binding peptide
  MOD_RES (14)..(15)..(16)..(17)..(18): Xaa is A or G
  MOD_RES (19)..(20)..(21)..(22): Xaa is A or G or is absent

SEQ ID NO: 39928 - protein, 33 aa, Artificial Sequence; identical to SEQ ID NO: 14450
  GFR-binding peptide
  MOD_RES (33)..(33): Xaa is C or S
  MOD_RES (14)..(15)..(16)..(17)..(18): Xaa is A or G
  MOD_RES (19)..(20)..(21)..(22): Xaa is A or G or is absent

SEQ ID NO: 39929 - protein, 38 aa, Artificial Sequence; identical to SEQ ID NO: 14451
  GFR-binding peptide
  MOD_RES (5)..(6)..(38): Xaa is C or S

SEQ ID NO: 39930 - protein, 38 aa, Artificial Sequence; identical to SEQ ID NO: 14452
  GFR-binding peptide
  MOD_RES (1)..(2)..(35)..(37): Xaa is C or S
  MOD_RES (16)..(17)..(18)..(19)..(20): Xaa is A or G
  MOD_RES (21)..(22)..(23)..(24): Xaa is A or G or is absent

SEQ ID NO: 39931 - protein, 37 aa, Artificial Sequence; identical to SEQ ID NO: 14453
  GFR-binding peptide
  MOD_RES (3)..(4)..(37): Xaa is C or S
  MOD_RES (18)..(19)..(20)..(21)..(22): Xaa is A or G
  MOD_RES (23)..(24)..(25)..(26): Xaa is A or G or is absent

SEQ ID NO: 39932 - protein, 33 aa, Artificial Sequence; identical to SEQ ID NO: 14456
  GFR-binding peptide
  MOD_RES (1)..(2): Xaa is C or S

SEQ ID NO: 39933 - protein, 36 aa, Artificial Sequence; identical to SEQ ID NO: 16204
  GFR-binding peptide
  MOD_RES (2)..(3): Xaa is C or S
  MOD_RES (17)..(18)..(19)..(20)..(21): Xaa is A or G
  MOD_RES (22)..(23)..(24)..(25): Xaa is A or G or is absent

SEQ ID NO: 39934 - protein, 31 aa, Artificial Sequence; identical to SEQ ID NO: 16205
  GFR-binding peptide

SEQ ID NO: 39935 - protein, 37 aa, Artificial Sequence; identical to SEQ ID NO: 14457
  GFR-binding peptide
  MOD_RES (2)..(3)..(35)..(37): Xaa is C or S

SEQ ID NO: 39936 - protein, 37 aa, Artificial Sequence; identical to SEQ ID NO: 14459
  GFR-binding peptide
  MOD_RES (5)..(6): Xaa is C or S

SEQ ID NO: 39937 - protein, 37 aa, Artificial Sequence; identical to SEQ ID NO: 14460
  GFR-binding peptide
  MOD_RES (34)..(36): Xaa is C or S
  MOD_RES (14)..(15)..(16)..(17)..(18): Xaa is A or G
  MOD_RES (19)..(20)..(21)..(22): Xaa is A or G or is absent

SEQ ID NO: 39938 - protein, 34 aa, Artificial Sequence; identical to SEQ ID NO: 16206
  GFR-binding peptide
  MOD_RES (32)..(34): Xaa is C or S

SEQ ID NO: 39939 - protein, 42 aa, Artificial Sequence; identical to SEQ ID NO: 14461
  GFR-binding peptide
  MOD_RES (5)..(6)..(40)..(42): Xaa is C or S
  MOD_RES (20)..(21)..(22)..(23)..(24): Xaa is A or G
  MOD_RES (25)..(26)..(27)..(28): Xaa is A or G or is absent

SEQ ID NO: 39940 - protein, 35 aa, Artificial Sequence; identical to SEQ ID NO: 14462
  GFR-binding peptide
  MOD_RES (1)..(2)..(34): Xaa is C or S

SEQ ID NO: 39941 - protein, 37 aa, Artificial Sequence; identical to SEQ ID NO: 14463
  GFR-binding peptide
  MOD_RES (4)..(5)..(37): Xaa is C or S

SEQ ID NO: 39942 - protein, 37 aa, Artificial Sequence; identical to SEQ ID NO: 16207
  GFR-binding peptide
  MOD_RES (2)..(3)..(35)..(37): Xaa is C or S

SEQ ID NO: 39943 - protein, 39 aa, Artificial Sequence; identical to SEQ ID NO: 14464
  GFR-binding peptide
  MOD_RES (6)..(7)..(39): Xaa is C or S

SEQ ID NO: 39944 - protein, 36 aa, Artificial Sequence; identical to SEQ ID NO: 14465
  GFR-binding peptide
  MOD_RES (2)..(3)..(34)..(36): Xaa is C or S

SEQ ID NO: 39945 - protein, 37 aa, Artificial Sequence
  GFR-binding peptide
  MOD_RES (3)..(4)..(37): Xaa is C or S
  MOD_RES (18)..(19)..(20)..(21)..(22): Xaa is A or G
  MOD_RES (23)..(24)..(25)..(26): Xaa is A or G or is absent
SPXXVSQDLEPLTILYYXXXXXXXXXEQLSNMIVKSX

SEQ ID NO: 39946 - protein, 38 aa, Artificial Sequence; identical to SEQ ID NO: 16210
  GFR-binding peptide
  MOD_RES (7)..(7): Xaa is C or S

SEQ ID NO: 39947 - protein, 39 aa, Artificial Sequence; identical to SEQ ID NO: 14466
  GFR-binding peptide
  MOD_RES (6)..(7): Xaa is C or S
  MOD_RES (21)..(22)..(23)..(24)..(25): Xaa is A or G
  MOD_RES (26)..(27)..(28)..(29): Xaa is A or G or is absent

SEQ ID NO: 39948 - protein, 37 aa, Artificial Sequence; identical to SEQ ID NO: 14467
  GFR-binding peptide
  MOD_RES (4)..(5): Xaa is C or S
  MOD_RES (19)..(20)..(21)..(22)..(23): Xaa is A or G
  MOD_RES (24)..(25)..(26)..(27): Xaa is A or G or is absent

SEQ ID NO: 39949 - protein, 40 aa, Artificial Sequence; identical to SEQ ID NO: 16211
  GFR-binding peptide
  MOD_RES (3)..(4)..(37)..(39): Xaa is C or S
  MOD_RES (18)..(19)..(20)..(21)..(22): Xaa is A or G
  MOD_RES (23)..(24)..(25)..(26): Xaa is A or G or is absent

SEQ ID NO: 39950 - protein, 30 aa, Artificial Sequence; identical to SEQ ID NO: 14468
  GFR-binding peptide

SEQ ID NO: 39951 - protein, 38 aa, Artificial Sequence; identical to SEQ ID NO: 14469
  GFR-binding peptide
  MOD_RES (4)..(5)..(37): Xaa is C or S

SEQ ID NO: 39952 - protein, 40 aa, Artificial Sequence; identical to SEQ ID NO: 7150
  GFR-binding peptide
  MOD_RES (3)..(4)..(38)..(40): Xaa is C or S
  MOD_RES (18)..(19)..(20)..(21)..(22): Xaa is A or G
  MOD_RES (23)..(24)..(25)..(26): Xaa is A or G or is absent

SEQ ID NO: 39953 - protein, 39 aa, Artificial Sequence; identical to SEQ ID NO: 16213
  GFR-binding peptide
  MOD_RES (6)..(7): Xaa is C or S
  MOD_RES (21)..(22)..(23)..(24)..(25): Xaa is A or G
  MOD_RES (26)..(27)..(28)..(29): Xaa is A or G or is absent

SEQ ID NO: 39954 - protein, 41 aa, Artificial Sequence; identical to SEQ ID NO: 8913
  GFR-binding peptide
  MOD_RES (6)..(7)..(40): Xaa is C or S
  MOD_RES (21)..(22)..(23)..(24)..(25): Xaa is A or G
  MOD_RES (26)..(27)..(28)..(29): Xaa is A or G or is absent

SEQ ID NO: 39955 - protein, 36 aa, Artificial Sequence; identical to SEQ ID NO: 14472
  GFR-binding peptide
  MOD_RES (1)..(2)..(35): Xaa is C or S
  MOD_RES (16)..(17)..(18)..(19)..(20): Xaa is A or G
  MOD_RES (21)..(22)..(23)..(24): Xaa is A or G or is absent

SEQ ID NO: 39956 - protein, 39 aa, Artificial Sequence; identical to SEQ ID NO: 7159
  GFR-binding peptide
  MOD_RES (6)..(7)..(39): Xaa is C or S

SEQ ID NO: 39957 - protein, 36 aa, Artificial Sequence; identical to SEQ ID NO: 16218
  GFR-binding peptide
  MOD_RES (34)..(36): Xaa is C or S
  MOD_RES (14)..(15)..(16)..(17)..(18): Xaa is A or G
  MOD_RES (19)..(20)..(21)..(22): Xaa is A or G or is absent

SEQ ID NO: 39958 - protein, 33 aa, Artificial Sequence; identical to SEQ ID NO: 14475
  GFR-binding peptide
  MOD_RES (3)..(3): Xaa is C or S

SEQ ID NO: 39959 - protein, 41 aa, Artificial Sequence; identical to SEQ ID NO: 16219
  GFR-binding peptide
  MOD_RES (3)..(4)..(38)..(40): Xaa is C or S
  MOD_RES (18)..(19)..(20)..(21)..(22): Xaa is A or G
  MOD_RES (23)..(24)..(25)..(26): Xaa is A or G or is absent

SEQ ID NO: 39960 - protein, 33 aa, Artificial Sequence; identical to SEQ ID NO: 16220
  GFR-binding peptide
  MOD_RES (32)..(32): Xaa is C or S

SEQ ID NO: 39961 - protein, 38 aa, Artificial Sequence; identical to SEQ ID NO: 16221
  GFR-binding peptide
  MOD_RES (4)..(5): Xaa is C or S
  MOD_RES (19)..(20)..(21)..(22)..(23): Xaa is A or G
  MOD_RES (24)..(25)..(26)..(27): Xaa is A or G or is absent

SEQ ID NO: 39962 - protein, 38 aa, Artificial Sequence; identical to SEQ ID NO: 8920
  GFR-binding peptide
  MOD_RES (3)..(4)..(36)..(38): Xaa is C or S

SEQ ID NO: 39963 - protein, 41 aa, Artificial Sequence; identical to SEQ ID NO: 14477
  GFR-binding peptide
  MOD_RES (6)..(7)..(39)..(41): Xaa is C or S

SEQ ID NO: 39964 - protein, 33 aa, Artificial Sequence; identical to SEQ ID NO: 16223
  GFR-binding peptide
  MOD_RES (1)..(33): Xaa is C or S

SEQ ID NO: 39965 - protein, 43 aa, Artificial Sequence; identical to SEQ ID NO: 14478
  GFR-binding peptide
  MOD_RES (5)..(6)..(40)..(42): Xaa is C or S
  MOD_RES (20)..(21)..(22)..(23)..(24): Xaa is A or G
  MOD_RES (25)..(26)..(27)..(28): Xaa is A or G or is absent

SEQ ID NO: 39966 - protein, 33 aa, Artificial Sequence; identical to SEQ ID NO: 8925
  GFR-binding peptide
  MOD_RES (1)..(1): Xaa is C or S
  MOD_RES (15)..(16)..(17)..(18)..(19): Xaa is A or G
  MOD_RES (20)..(21)..(22)..(23): Xaa is A or G or is absent

SEQ ID NO: 39967 - protein, 43 aa, Artificial Sequence; identical to SEQ ID NO: 14479
  GFR-binding peptide
  MOD_RES (6)..(7)..(41)..(43): Xaa is C or S
  MOD_RES (21)..(22)..(23)..(24)..(25): Xaa is A or G
  MOD_RES (26)..(27)..(28)..(29): Xaa is A or G or is absent

SEQ ID NO: 39968 - protein, 40 aa, Artificial Sequence; identical to SEQ ID NO: 8926
  GFR-binding peptide
  MOD_RES (5)..(6)..(38)..(40): Xaa is C or S

SEQ ID NO: 39969 - protein, 33 aa, Artificial Sequence; identical to SEQ ID NO: 16226
  GFR-binding peptide
  MOD_RES (31)..(33): Xaa is C or S

SEQ ID NO: 39970 - protein, 37 aa, Artificial Sequence; identical to SEQ ID NO: 7170
  GFR-binding peptide
  MOD_RES (2)..(3)..(36): Xaa is C or S
  MOD_RES (17)..(18)..(19)..(20)..(21): Xaa is A or G
  MOD_RES (22)..(23)..(24)..(25): Xaa is A or G or is absent

SEQ ID NO: 39971 - protein, 33 aa, Artificial Sequence; identical to SEQ ID NO: 14482
  GFR-binding peptide
  MOD_RES (33)..(33): Xaa is C or S
  MOD_RES (14)..(15)..(16)..(17)..(18): Xaa is A or G
  MOD_RES (19)..(20)..(21)..(22): Xaa is A or G or is absent

SEQ ID NO: 39972 - protein, 37 aa, Artificial Sequence; identical to SEQ ID NO: 7171
  GFR-binding peptide
  MOD_RES (5)..(6)..(37): Xaa is C or S

SEQ ID NO: 39973 - protein, 33 aa, Artificial Sequence; identical to SEQ ID NO: 16230
  GFR-binding peptide
  MOD_RES (2)..(3): Xaa is C or S

SEQ ID NO: 39974 - protein, 34 aa, Artificial Sequence; identical to SEQ ID NO: 16231
  GFR-binding peptide
  MOD_RES (1)..(2): Xaa is C or S
  MOD_RES (16)..(17)..(18)..(19)..(20): Xaa is A or G
  MOD_RES (21)..(22)..(23)..(24): Xaa is A or G or is absent

SEQ ID NO: 39975 - protein, 43 aa, Artificial Sequence; identical to SEQ ID NO: 16232
  GFR-binding peptide
  MOD_RES (5)..(6)..(40)..(42): Xaa is C or S
  MOD_RES (20)..(21)..(22)..(23)..(24): Xaa is A or G
  MOD_RES (25)..(26)..(27)..(28): Xaa is A or G or is absent

SEQ ID NO: 39976 - protein, 39 aa, Artificial Sequence; identical to SEQ ID NO: 8935
  GFR-binding peptide
  MOD_RES (3)..(4)..(37)..(39): Xaa is C or S
  MOD_RES (18)..(19)..(20)..(21)..(22): Xaa is A or G
  MOD_RES (23)..(24)..(25)..(26): Xaa is A or G or is absent

SEQ ID NO: 39977 - protein, 33 aa, Artificial Sequence; identical to SEQ ID NO: 16234
  GFR-binding peptide
  MOD_RES (32)..(32): Xaa is C or S

SEQ ID NO: 39978 - protein, 39 aa, Artificial Sequence; identical to SEQ ID NO: 16235
  GFR-binding peptide
  MOD_RES (4)..(5)..(39): Xaa is C or S
  MOD_RES (19)..(20)..(21)..(22)..(23): Xaa is A or G
  MOD_RES (24)..(25)..(26)..(27): Xaa is A or G or is absent

SEQ ID NO: 39979 - protein, 38 aa, Artificial Sequence; identical to SEQ ID NO: 16236
  GFR-binding peptide
  MOD_RES (1)..(35)..(37): Xaa is C or S
  MOD_RES (15)..(16)..(17)..(18)..(19): Xaa is A or G
  MOD_RES (20)..(21)..(22)..(23): Xaa is A or G or is absent

SEQ ID NO: 39980 - protein, 36 aa, Artificial Sequence; identical to SEQ ID NO: 16238
  GFR-binding peptide
  MOD_RES (4)..(5): Xaa is C or S

SEQ ID NO: 39981 - protein, 40 aa, Artificial Sequence; identical to SEQ ID NO: 8938
  GFR-binding peptide
  MOD_RES (6)..(7): Xaa is C or S
  MOD_RES (21)..(22)..(23)..(24)..(25): Xaa is A or G
  MOD_RES (26)..(27)..(28)..(29): Xaa is A or G or is absent

SEQ ID NO: 39982 - protein, 40 aa, Artificial Sequence; identical to SEQ ID NO: 14488
  GFR-binding peptide
  MOD_RES (6)..(7)..(39): Xaa is C or S

SEQ ID NO: 39983 - protein, 35 aa, Artificial Sequence; identical to SEQ ID NO: 16240
  GFR-binding peptide
  MOD_RES (3)..(35): Xaa is C or S

SEQ ID NO: 39984 - protein, 43 aa, Artificial Sequence; identical to SEQ ID NO: 7185
  GFR-binding peptide
  MOD_RES (6)..(7)..(41)..(43): Xaa is C or S
  MOD_RES (21)..(22)..(23)..(24)..(25): Xaa is A or G
  MOD_RES (26)..(27)..(28)..(29): Xaa is A or G or is absent

SEQ ID NO: 39985 - protein, 32 aa, Artificial Sequence; identical to SEQ ID NO: 14490
  GFR-binding peptide
  MOD_RES (31)..(31): Xaa is C or S

SEQ ID NO: 39986 - protein, 42 aa, Artificial Sequence; identical to SEQ ID NO: 16242
  GFR-binding peptide
  MOD_RES (6)..(7)..(39)..(41): Xaa is C or S

SEQ ID NO: 39987 - protein, 38 aa, Artificial Sequence; identical to SEQ ID NO: 16243
  GFR-binding peptide
  MOD_RES (6)..(7): Xaa is C or S

SEQ ID NO: 39988 - protein, 38 aa, Artificial Sequence; identical to SEQ ID NO: 16244
  GFR-binding peptide
  MOD_RES (1)..(35)..(37): Xaa is C or S
  MOD_RES (15)..(16)..(17)..(18)..(19): Xaa is A or G
  MOD_RES (20)..(21)..(22)..(23): Xaa is A or G or is absent

SEQ ID NO: 39989 - protein, 32 aa, Artificial Sequence; identical to SEQ ID NO: 16245
  GFR-binding peptide
  MOD_RES (14)..(15)..(16)..(17)..(18): Xaa is A or G
  MOD_RES (19)..(20)..(21)..(22): Xaa is A or G or is absent

SEQ ID NO: 39990 - protein, 38 aa, Artificial Sequence; identical to SEQ ID NO: 14492
  GFR-binding peptide
  MOD_RES (6)..(7): Xaa is C or S

SEQ ID NO: 39991 - protein, 34 aa, Artificial Sequence; identical to SEQ ID NO: 14493
  GFR-binding peptide
  MOD_RES (1)..(32)..(34): Xaa is C or S

SEQ ID NO: 39992 - protein, 35 aa, Artificial Sequence; identical to SEQ ID NO: 14494
  GFR-binding peptide
  MOD_RES (4)..(4): Xaa is C or S

SEQ ID NO: 39993 - protein, 35 aa, Artificial Sequence; identical to SEQ ID NO: 14495
  GFR-binding peptide
  MOD_RES (4)..(5): Xaa is C or S

SEQ ID NO: 39994 - protein, 37 aa, Artificial Sequence; identical to SEQ ID NO: 7195
  GFR-binding peptide
  MOD_RES (1)..(2)..(34)..(36): Xaa is C or S

SEQ ID NO: 39995 - protein, 36 aa, Artificial Sequence; identical to SEQ ID NO: 7197
  GFR-binding peptide
  MOD_RES (1)..(2)..(36): Xaa is C or S
  MOD_RES (16)..(17)..(18)..(19)..(20): Xaa is A or G
  MOD_RES (21)..(22)..(23)..(24): Xaa is A or G or is absent

SEQ ID NO: 39996 - protein, 39 aa, Artificial Sequence; identical to SEQ ID NO: 14498
  GFR-binding peptide
  MOD_RES (3)..(4)..(38): Xaa is C or S
  MOD_RES (18)..(19)..(20)..(21)..(22): Xaa is A or G
  MOD_RES (23)..(24)..(25)..(26): Xaa is A or G or is absent

SEQ ID NO: 39997 - protein, 39 aa, Artificial Sequence; identical to SEQ ID NO: 16248
  GFR-binding peptide
  MOD_RES (3)..(4)..(36)..(38): Xaa is C or S

SEQ ID NO: 39998 - protein, 37 aa, Artificial Sequence; identical to SEQ ID NO: 7199
  GFR-binding peptide
  MOD_RES (1)..(35)..(37): Xaa is C or S
  MOD_RES (15)..(16)..(17)..(18)..(19): Xaa is A or G
  MOD_RES (20)..(21)..(22)..(23): Xaa is A or G or is absent

SEQ ID NO: 39999 - protein, 34 aa, Artificial Sequence; identical to SEQ ID NO: 16249
  GFR-binding peptide
  MOD_RES (1)..(2)..(34): Xaa is C or S

SEQ ID NO: 40000 - protein, 33 aa, Artificial Sequence; identical to SEQ ID NO: 14500
  GFR-binding peptide
  MOD_RES (1)..(1): Xaa is C or S
  MOD_RES (15)..(16)..(17)..(18)..(19): Xaa is A or G
  MOD_RES (20)..(21)..(22)..(23): Xaa is A or G or is absent

SEQ ID NO: 40001 - protein, 31 aa, Artificial Sequence; identical to SEQ ID NO: 14501
  GFR-binding peptide

SEQ ID NO: 40002 - protein, 37 aa, Artificial Sequence; identical to SEQ ID NO: 7200
  GFR-binding peptide
  MOD_RES (3)..(4)..(35)..(37): Xaa is C or S

SEQ ID NO: 40003 - protein, 35 aa, Artificial Sequence; identical to SEQ ID NO: 8957
  GFR-binding peptide
  MOD_RES (1)..(33)..(35): Xaa is C or S

SEQ ID NO: 40004 - protein, 39 aa, Artificial Sequence; identical to SEQ ID NO: 14503
  GFR-binding peptide
  MOD_RES (5)..(6): Xaa is C or S
  MOD_RES (20)..(21)..(22)..(23)..(24): Xaa is A or G
  MOD_RES (25)..(26)..(27)..(28): Xaa is A or G or is absent

SEQ ID NO: 40005 - protein, 40 aa, Artificial Sequence; identical to SEQ ID NO: 14504
  GFR-binding peptide
  MOD_RES (6)..(7)..(39): Xaa is C or S

SEQ ID NO: 40006 - protein, 40 aa, Artificial Sequence; identical to SEQ ID NO: 8959
  GFR-binding peptide
  MOD_RES (3)..(4)..(37)..(39): Xaa is C or S
  MOD_RES (18)..(19)..(20)..(21)..(22): Xaa is A or G
  MOD_RES (23)..(24)..(25)..(26): Xaa is A or G or is absent

SEQ ID NO: 40007 - protein, 35 aa, Artificial Sequence; identical to SEQ ID NO: 16254
  GFR-binding peptide
  MOD_RES (2)..(3): Xaa is C or S
  MOD_RES (17)..(18)..(19)..(20)..(21): Xaa is A or G
  MOD_RES (22)..(23)..(24)..(25): Xaa is A or G or is absent

SEQ ID NO: 40008 - protein, 36 aa, Artificial Sequence; identical to SEQ ID NO: 14506
  GFR-binding peptide
  MOD_RES (1)..(35): Xaa is C or S
  MOD_RES (15)..(16)..(17)..(18)..(19): Xaa is A or G
  MOD_RES (20)..(21)..(22)..(23): Xaa is A or G or is absent

SEQ ID NO: 40009 - protein, 38 aa, Artificial Sequence; identical to SEQ ID NO: 16255
  GFR-binding peptide
  MOD_RES (6)..(7)..(38): Xaa is C or S

SEQ ID NO: 40010 - protein, 42 aa, Artificial Sequence; identical to SEQ ID NO: 7204
  GFR-binding peptide
  MOD_RES (5)..(6)..(40)..(42): Xaa is C or S
  MOD_RES (20)..(21)..(22)..(23)..(24): Xaa is A or G
  MOD_RES (25)..(26)..(27)..(28): Xaa is A or G or is absent

SEQ ID NO: 40011 - protein, 40 aa, Artificial Sequence; identical to SEQ ID NO: 14508
  GFR-binding peptide
  MOD_RES (3)..(4)..(37)..(39): Xaa is C or S
  MOD_RES (18)..(19)..(20)..(21)..(22): Xaa is A or G
  MOD_RES (23)..(24)..(25)..(26): Xaa is A or G or is absent

SEQ ID NO: 40012 - protein, 32 aa, Artificial Sequence; identical to SEQ ID NO: 14509
  GFR-binding peptide
  MOD_RES (14)..(15)..(16)..(17)..(18): Xaa is A or G
  MOD_RES (19)..(20)..(21)..(22): Xaa is A or G or is absent

SEQ ID NO: 40013 - protein, 39 aa, Artificial Sequence; identical to SEQ ID NO: 14510
  GFR-binding peptide
  MOD_RES (5)..(6)..(38): Xaa is C or S

SEQ ID NO: 40014 - protein, 35 aa, Artificial Sequence; identical to SEQ ID NO: 8968
  GFR-binding peptide
  MOD_RES (32)..(34): Xaa is C or S

SEQ ID NO: 40015 - protein, 41 aa, Artificial Sequence; identical to SEQ ID NO: 14511
  GFR-binding peptide
  MOD_RES (6)..(7)..(41): Xaa is C or S
  MOD_RES (21)..(22)..(23)..(24)..(25): Xaa is A or G
  MOD_RES (26)..(27)..(28)..(29): Xaa is A or G or is absent

SEQ ID NO: 40016 - protein, 43 aa, Artificial Sequence; identical to SEQ ID NO: 16258
  GFR-binding peptide
  MOD_RES (6)..(7)..(41)..(43): Xaa is C or S
  MOD_RES (21)..(22)..(23)..(24)..(25): Xaa is A or G
  MOD_RES (26)..(27)..(28)..(29): Xaa is A or G or is absent

SEQ ID NO: 40017 - protein, 35 aa, Artificial Sequence; identical to SEQ ID NO: 14513
  GFR-binding peptide
  MOD_RES (1)..(2): Xaa is C or S
  MOD_RES (16)..(17)..(18)..(19)..(20): Xaa is A or G
  MOD_RES (21)..(22)..(23)..(24): Xaa is A or G or is absent

SEQ ID NO: 40018 - protein, 38 aa, Artificial Sequence; identical to SEQ ID NO: 14514
  GFR-binding peptide
  MOD_RES (4)..(5)..(37): Xaa is C or S

SEQ ID NO: 40019 - protein, 36 aa, Artificial Sequence; identical to SEQ ID NO: 8971
  GFR-binding peptide
  MOD_RES (5)..(6): Xaa is C or S

SEQ ID NO: 40020 - protein, 40 aa, Artificial Sequence; identical to SEQ ID NO: 16260
  GFR-binding peptide
  MOD_RES (5)..(37)..(39): Xaa is C or S

SEQ ID NO: 40021 - protein, 41 aa, Artificial Sequence; identical to SEQ ID NO: 16261
  GFR-binding peptide
  MOD_RES (4)..(5)..(38)..(40): Xaa is C or S
  MOD_RES (19)..(20)..(21)..(22)..(23): Xaa is A or G
  MOD_RES (24)..(25)..(26)..(27): Xaa is A or G or is absent

SEQ ID NO: 40022 - protein, 30 aa, Artificial Sequence; identical to SEQ ID NO: 16262
  GFR-binding peptide

SEQ ID NO: 40023 - protein, 41 aa, Artificial Sequence; identical to SEQ ID NO: 8972
  GFR-binding peptide
  MOD_RES (4)..(5)..(38)..(40): Xaa is C or S
  MOD_RES (19)..(20)..(21)..(22)..(23): Xaa is A or G
  MOD_RES (24)..(25)..(26)..(27): Xaa is A or G or is absent

SEQ ID NO: 40024 - protein, 37 aa, Artificial Sequence; identical to SEQ ID NO: 16264
  GFR-binding peptide
  MOD_RES (6)..(7): Xaa is C or S

SEQ ID NO: 40025 - protein, 40 aa, Artificial Sequence; identical to SEQ ID NO: 14516
  GFR-binding peptide
  MOD_RES (5)..(6)..(38)..(40): Xaa is C or S

SEQ ID NO: 40026 - protein, 39 aa, Artificial Sequence; identical to SEQ ID NO: 16265
  GFR-binding peptide
  MOD_RES (4)..(38): Xaa is C or S
  MOD_RES (18)..(19)..(20)..(21)..(22): Xaa is A or G
  MOD_RES (23)..(24)..(25)..(26): Xaa is A or G or is absent

SEQ ID NO: 40027 - protein, 41 aa, Artificial Sequence; identical to SEQ ID NO: 16266
  GFR-binding peptide
  MOD_RES (6)..(7)..(39)..(41): Xaa is C or S

SEQ ID NO: 40028 - protein, 36 aa, Artificial Sequence; identical to SEQ ID NO: 7214
  GFR-binding peptide
  MOD_RES (1)..(33)..(35): Xaa is C or S

SEQ ID NO: 40029 - protein, 34 aa, Artificial Sequence; identical to SEQ ID NO: 16267
  GFR-binding peptide
  MOD_RES (1)..(33): Xaa is C or S

SEQ ID NO: 40030 - protein, 36 aa, Artificial Sequence; identical to SEQ ID NO: 16268
  GFR-binding peptide
  MOD_RES (3)..(4): Xaa is C or S
  MOD_RES (18)..(19)..(20)..(21)..(22): Xaa is A or G
  MOD_RES (23)..(24)..(25)..(26): Xaa is A or G or is absent

SEQ ID NO: 40031 - protein, 39 aa, Artificial Sequence; identical to SEQ ID NO: 14518
  GFR-binding peptide
  MOD_RES (1)..(2)..(36)..(38): Xaa is C or S
  MOD_RES (16)..(17)..(18)..(19)..(20): Xaa is A or G
  MOD_RES (21)..(22)..(23)..(24): Xaa is A or G or is absent

SEQ ID NO: 40032 - protein, 38 aa, Artificial Sequence; identical to SEQ ID NO: 8980
  GFR-binding peptide
  MOD_RES (5)..(6)..(38): Xaa is C or S

SEQ ID NO: 40033 - protein, 38 aa, Artificial Sequence; identical to SEQ ID NO: 14520
  GFR-binding peptide
  MOD_RES (3)..(4)..(38): Xaa is C or S
  MOD_RES (18)..(19)..(20)..(21)..(22): Xaa is A or G
  MOD_RES (23)..(24)..(25)..(26): Xaa is A or G or is absent

SEQ ID NO: 40034 - protein, 41 aa, Artificial Sequence; identical to SEQ ID NO: 16271
  GFR-binding peptide
  MOD_RES (6)..(7)..(39)..(41): Xaa is C or S

SEQ ID NO: 40035 - protein, 32 aa, Artificial Sequence; identical to SEQ ID NO: 8981
  GFR-binding peptide
  MOD_RES (31)..(31): Xaa is C or S

SEQ ID NO: 40036 - protein, 38 aa, Artificial Sequence; identical to SEQ ID NO: 16273
  GFR-binding peptide
  MOD_RES (2)..(3)..(36)..(38): Xaa is C or S
  MOD_RES (17)..(18)..(19)..(20)..(21): Xaa is A or G
  MOD_RES (22)..(23)..(24)..(25): Xaa is A or G or is absent

SEQ ID NO: 40037 - protein, 37 aa, Artificial Sequence; identical to SEQ ID NO: 16274
  GFR-binding peptide
  MOD_RES (1)..(34)..(36): Xaa is C or S
  MOD_RES (15)..(16)..(17)..(18)..(19): Xaa is A or G
  MOD_RES (20)..(21)..(22)..(23): Xaa is A or G or is absent

SEQ ID NO: 40038 - protein, 42 aa, Artificial Sequence; identical to SEQ ID NO: 16275
  GFR-binding peptide
  MOD_RES (4)..(5)..(39)..(41): Xaa is C or S
  MOD_RES (19)..(20)..(21)..(22)..(23): Xaa is A or G
  MOD_RES (24)..(25)..(26)..(27): Xaa is A or G or is absent

SEQ ID NO: 40039 - protein, 34 aa, Artificial Sequence; identical to SEQ ID NO: 14521
  GFR-binding peptide
  MOD_RES (1)..(34): Xaa is C or S
  MOD_RES (15)..(16)..(17)..(18)..(19): Xaa is A or G
  MOD_RES (20)..(21)..(22)..(23): Xaa is A or G or is absent

SEQ ID NO: 40040 - protein, 36 aa, Artificial Sequence; identical to SEQ ID NO: 16276
  GFR-binding peptide
  MOD_RES (34)..(36): Xaa is C or S
  MOD_RES (14)..(15)..(16)..(17)..(18): Xaa is A or G
  MOD_RES (19)..(20)..(21)..(22): Xaa is A or G or is absent

SEQ ID NO: 40041 - protein, 36 aa, Artificial Sequence; identical to SEQ ID NO: 16277
  GFR-binding peptide
  MOD_RES (3)..(4): Xaa is C or S
  MOD_RES (18)..(19)..(20)..(21)..(22): Xaa is A or G
  MOD_RES (23)..(24)..(25)..(26): Xaa is A or G or is absent

SEQ ID NO: 40042 - protein, 36 aa, Artificial Sequence; identical to SEQ ID NO: 14522
  GFR-binding peptide
  MOD_RES (1)..(2)..(36): Xaa is C or S
  MOD_RES (16)..(17)..(18)..(19)..(20): Xaa is A or G
  MOD_RES (21)..(22)..(23)..(24): Xaa is A or G or is absent

SEQ ID NO: 40043 - protein, 33 aa, Artificial Sequence; identical to SEQ ID NO: 16278
  GFR-binding peptide
  MOD_RES (2)..(3): Xaa is C or S

SEQ ID NO: 40044 - protein, 35 aa, Artificial Sequence; identical to SEQ ID NO: 14523
  GFR-binding peptide
  MOD_RES (1)..(32)..(34): Xaa is C or S

SEQ ID NO: 40045 - protein, 30 aa, Artificial Sequence; identical to SEQ ID NO: 16279
  GFR-binding peptide

SEQ ID NO: 40046 - protein, 39 aa, Artificial Sequence; identical to SEQ ID NO: 14524
  GFR-binding peptide
  MOD_RES (2)..(3)..(37)..(39): Xaa is C or S
  MOD_RES (17)..(18)..(19)..(20)..(21): Xaa is A or G
  MOD_RES (22)..(23)..(24)..(25): Xaa is A or G or is absent

SEQ ID NO: 40047 - protein, 39 aa, Artificial Sequence; identical to SEQ ID NO: 14525
  GFR-binding peptide
  MOD_RES (1)..(2)..(36)..(38): Xaa is C or S
  MOD_RES (16)..(17)..(18)..(19)..(20): Xaa is A or G
  MOD_RES (21)..(22)..(23)..(24): Xaa is A or G or is absent

SEQ ID NO: 40048 - protein, 39 aa, Artificial Sequence; identical to SEQ ID NO: 16280
  GFR-binding peptide
  MOD_RES (5)..(6)..(37)..(39): Xaa is C or S

SEQ ID NO: 40049 - protein, 38 aa, Artificial Sequence; identical to SEQ ID NO: 14526
  GFR-binding peptide
  MOD_RES (3)..(35)..(37): Xaa is C or S

SEQ ID NO: 40050 - protein, 39 aa, Artificial Sequence; identical to SEQ ID NO: 16282
  GFR-binding peptide
  MOD_RES (2)..(3)..(36)..(38): Xaa is C or S
  MOD_RES (17)..(18)..(19)..(20)..(21): Xaa is A or G
  MOD_RES (22)..(23)..(24)..(25): Xaa is A or G or is absent

SEQ ID NO: 40051 - protein, 39 aa, Artificial Sequence; identical to SEQ ID NO: 14527
  GFR-binding peptide
  MOD_RES (4)..(38): Xaa is C or S
  MOD_RES (18)..(19)..(20)..(21)..(22): Xaa is A or G
  MOD_RES (23)..(24)..(25)..(26): Xaa is A or G or is absent

SEQ ID NO: 40052 - protein, 39 aa, Artificial Sequence; identical to SEQ ID NO: 14528
  GFR-binding peptide
  MOD_RES (5)..(6)..(39): Xaa is C or S
  MOD_RES (20)..(21)..(22)..(23)..(24): Xaa is A or G
  MOD_RES (25)..(26)..(27)..(28): Xaa is A or G or is absent

SEQ ID NO: 40053 - protein, 40 aa, Artificial Sequence; identical to SEQ ID NO: 14529
  GFR-binding peptide
  MOD_RES (4)..(5)..(37)..(39): Xaa is C or S

SEQ ID NO: 40054 - protein, 36 aa, Artificial Sequence; identical to SEQ ID NO: 14530
  GFR-binding peptide
  MOD_RES (4)..(36): Xaa is C or S

SEQ ID NO: 40055 - protein, 38 aa, Artificial Sequence; identical to SEQ ID NO: 16284
  GFR-binding peptide
  MOD_RES (3)..(4)..(38): Xaa is C or S
  MOD_RES (18)..(19)..(20)..(21)..(22): Xaa is A or G
  MOD_RES (23)..(24)..(25)..(26): Xaa is A or G or is absent

SEQ ID NO: 40056 - protein, 38 aa, Artificial Sequence; identical to SEQ ID NO: 16285
  GFR-binding peptide
  MOD_RES (4)..(38): Xaa is C or S
  MOD_RES (18)..(19)..(20)..(21)..(22): Xaa is A or G
  MOD_RES (23)..(24)..(25)..(26): Xaa is A or G or is absent

SEQ ID NO: 40057 - protein, 40 aa, Artificial Sequence; identical to SEQ ID NO: 14531
  GFR-binding peptide
  MOD_RES (6)..(7): Xaa is C or S
  MOD_RES (21)..(22)..(23)..(24)..(25): Xaa is A or G
  MOD_RES (26)..(27)..(28)..(29): Xaa is A or G or is absent

SEQ ID NO: 40058 - protein, 36 aa, Artificial Sequence; identical to SEQ ID NO: 16287
  GFR-binding peptide
  MOD_RES (1)..(35): Xaa is C or S
  MOD_RES (15)..(16)..(17)..(18)..(19): Xaa is A or G
  MOD_RES (20)..(21)..(22)..(23): Xaa is A or G or is absent

SEQ ID NO: 40059 - protein, 33 aa, Artificial Sequence; identical to SEQ ID NO: 8997
  GFR-binding peptide
  MOD_RES (1)..(33): Xaa is C or S

SEQ ID NO: 40060 - protein, 41 aa, Artificial Sequence; identical to SEQ ID NO: 16289
  GFR-binding peptide
  MOD_RES (6)..(7)..(39)..(41): Xaa is C or S

SEQ ID NO: 40061 - protein, 34 aa, Artificial Sequence; identical to SEQ ID NO: 16290
  GFR-binding peptide
  MOD_RES (33)..(33): Xaa is C or S
  MOD_RES (14)..(15)..(16)..(17)..(18): Xaa is A or G
  MOD_RES (19)..(20)..(21)..(22): Xaa is A or G or is absent

SEQ ID NO: 40062 - protein, 37 aa, Artificial Sequence; identical to SEQ ID NO: 14532
  GFR-binding peptide
  MOD_RES (4)..(5)..(37): Xaa is C or S

SEQ ID NO: 40063 - protein, 36 aa, Artificial Sequence; identical to SEQ ID NO: 14533
  GFR-binding peptide
  MOD_RES (1)..(35): Xaa is C or S
  MOD_RES (15)..(16)..(17)..(18)..(19): Xaa is A or G
  MOD_RES (20)..(21)..(22)..(23): Xaa is A or G or is absent

SEQ ID NO: 40064 - protein, 33 aa, Artificial Sequence; identical to SEQ ID NO: 14534
  GFR-binding peptide
  MOD_RES (1)..(2): Xaa is C or S

SEQ ID NO: 40065 - protein, 40 aa, Artificial Sequence; identical to SEQ ID NO: 14535
  GFR-binding peptide
  MOD_RES (5)..(39): Xaa is C or S
  MOD_RES (19)..(20)..(21)..(22)..(23): Xaa is A or G
  MOD_RES (24)..(25)..(26)..(27): Xaa is A or G or is absent

SEQ ID NO: 40066 - protein, 34 aa, Artificial Sequence; identical to SEQ ID NO: 14536
  GFR-binding peptide
  MOD_RES (1)..(1): Xaa is C or S
  MOD_RES (15)..(16)..(17)..(18)..(19): Xaa is A or G
  MOD_RES (20)..(21)..(22)..(23): Xaa is A or G or is absent

SEQ ID NO: 40067 - protein, 40 aa, Artificial Sequence; identical to SEQ ID NO: 7234
  GFR-binding peptide
  MOD_RES (6)..(7)..(40): Xaa is C or S
  MOD_RES (21)..(22)..(23)..(24)..(25): Xaa is A or G
  MOD_RES (26)..(27)..(28)..(29): Xaa is A or G or is absent

SEQ ID NO: 40068 - protein, 36 aa, Artificial Sequence; identical to SEQ ID NO: 9001
  GFR-binding peptide
  MOD_RES (2)..(3): Xaa is C or S
  MOD_RES (17)..(18)..(19)..(20)..(21): Xaa is A or G
  MOD_RES (22)..(23)..(24)..(25): Xaa is A or G or is absent

SEQ ID NO: 40069 - protein, 37 aa, Artificial Sequence; identical to SEQ ID NO: 14538
  GFR-binding peptide
  MOD_RES (2)..(3)..(36): Xaa is C or S
  MOD_RES (17)..(18)..(19)..(20)..(21): Xaa is A or G
  MOD_RES (22)..(23)..(24)..(25): Xaa is A or G or is absent

SEQ ID NO: 40070 - protein, 37 aa, Artificial Sequence; identical to SEQ ID NO: 14539
  GFR-binding peptide
  MOD_RES (5)..(37): Xaa is C or S

SEQ ID NO: 40071 - protein, 37 aa, Artificial Sequence; identical to SEQ ID NO: 16292
  GFR-binding peptide
  MOD_RES (6)..(7): Xaa is C or S

SEQ ID NO: 40072 - protein, 36 aa, Artificial Sequence; identical to SEQ ID NO: 14542
  GFR-binding peptide
  MOD_RES (5)..(6): Xaa is C or S

SEQ ID NO: 40073 - protein, 33 aa, Artificial Sequence; identical to SEQ ID NO: 16293
  GFR-binding peptide
  MOD_RES (1)..(2): Xaa is C or S

SEQ ID NO: 40074 - protein, 42 aa, Artificial Sequence; identical to SEQ ID NO: 14543
  GFR-binding peptide
  MOD_RES (5)..(6)..(39)..(41): Xaa is C or S
  MOD_RES (20)..(21)..(22)..(23)..(24): Xaa is A or G
  MOD_RES (25)..(26)..(27)..(28): Xaa is A or G or is absent

SEQ ID NO: 40075 - protein, 38 aa, Artificial Sequence; identical to SEQ ID NO: 16294
  GFR-binding peptide
  MOD_RES (5)..(5): Xaa is C or S
  MOD_RES (19)..(20)..(21)..(22)..(23): Xaa is A or G
  MOD_RES (24)..(25)..(26)..(27): Xaa is A or G or is absent

SEQ ID NO: 40076 - protein, 36 aa, Artificial Sequence; identical to SEQ ID NO: 7239
  GFR-binding peptide
  MOD_RES (3)..(4): Xaa is C or S
  MOD_RES (18)..(19)..(20)..(21)..(22): Xaa is A or G
  MOD_RES (23)..(24)..(25)..(26): Xaa is A or G or is absent

SEQ ID NO: 40077 - protein, 31 aa, Artificial Sequence; identical to SEQ ID NO: 9003
  GFR-binding peptide
  MOD_RES (1)..(1): Xaa is C or S

SEQ ID NO: 40078 - protein, 35 aa, Artificial Sequence; identical to SEQ ID NO: 16296
  GFR-binding peptide
  MOD_RES (1)..(2)..(33)..(35): Xaa is C or S

SEQ ID NO: 40079 - protein, 35 aa, Artificial Sequence; identical to SEQ ID NO: 14545
  GFR-binding peptide
  MOD_RES (4)..(5): Xaa is C or S

SEQ ID NO: 40080 - protein, 36 aa, Artificial Sequence; identical to SEQ ID NO: 16297
  GFR-binding peptide
  MOD_RES (1)..(35): Xaa is C or S
  MOD_RES (15)..(16)..(17)..(18)..(19): Xaa is A or G
  MOD_RES (20)..(21)..(22)..(23): Xaa is A or G or is absent

SEQ ID NO: 40081 - protein, 38 aa, Artificial Sequence; identical to SEQ ID NO: 9005
  GFR-binding peptide
  MOD_RES (3)..(4)..(36)..(38): Xaa is C or S

SEQ ID NO: 40082 - protein, 42 aa, Artificial Sequence; identical to SEQ ID NO: 16301
  GFR-binding peptide
  MOD_RES (4)..(5)..(39)..(41): Xaa is C or S
  MOD_RES (19)..(20)..(21)..(22)..(23): Xaa is A or G
  MOD_RES (24)..(25)..(26)..(27): Xaa is A or G or is absent

SEQ ID NO: 40083 - protein, 41 aa, Artificial Sequence; identical to SEQ ID NO: 14546
  GFR-binding peptide
  MOD_RES (6)..(7)..(41): Xaa is C or S
  MOD_RES (21)..(22)..(23)..(24)..(25): Xaa is A or G
  MOD_RES (26)..(27)..(28)..(29): Xaa is A or G or is absent

SEQ ID NO: 40084 - protein, 41 aa, Artificial Sequence; identical to SEQ ID NO: 16302
  GFR-binding peptide
  MOD_RES (6)..(7)..(41): Xaa is C or S
  MOD_RES (21)..(22)..(23)..(24)..(25): Xaa is A or G
  MOD_RES (26)..(27)..(28)..(29): Xaa is A or G or is absent

SEQ ID NO: 40085 - protein, 35 aa, Artificial Sequence; identical to SEQ ID NO: 16303
  GFR-binding peptide
  MOD_RES (2)..(3)..(34): Xaa is C or S

SEQ ID NO: 40086 - protein, 31 aa, Artificial Sequence; identical to SEQ ID NO: 16304
  GFR-binding peptide

SEQ ID NO: 40087 - protein, 36 aa, Artificial Sequence; identical to SEQ ID NO: 16305
  GFR-binding peptide
  MOD_RES (1)..(2)..(33)..(35): Xaa is C or S

SEQ ID NO: 40088 - protein, 32 aa, Artificial Sequence; identical to SEQ ID NO: 9012
  GFR-binding peptide
  MOD_RES (1)..(2): Xaa is C or S

SEQ ID NO: 40089 - protein, 34 aa, Artificial Sequence; identical to SEQ ID NO: 16307
  GFR-binding peptide
  MOD_RES (1)..(34): Xaa is C or S
  MOD_RES (15)..(16)..(17)..(18)..(19): Xaa is A or G
  MOD_RES (20)..(21)..(22)..(23): Xaa is A or G or is absent

SEQ ID NO: 40090 - protein, 44 aa, Artificial Sequence; identical to SEQ ID NO: 9014
  GFR-binding peptide
  MOD_RES (6)..(7)..(41)..(43): Xaa is C or S
  MOD_RES (21)..(22)..(23)..(24)..(25): Xaa is A or G
  MOD_RES (26)..(27)..(28)..(29): Xaa is A or G or is absent

SEQ ID NO: 40091 - protein, 33 aa, Artificial Sequence; identical to SEQ ID NO: 16310
  GFR-binding peptide
  MOD_RES (1)..(33): Xaa is C or S

SEQ ID NO: 40092 - protein, 39 aa, Artificial Sequence; identical to SEQ ID NO: 16311
  GFR-binding peptide
  MOD_RES (7)..(39): Xaa is C or S

SEQ ID NO: 40093 - protein, 43 aa, Artificial Sequence; identical to SEQ ID NO: 7248
  GFR-binding peptide
  MOD_RES (5)..(6)..(40)..(42): Xaa is C or S
  MOD_RES (20)..(21)..(22)..(23)..(24): Xaa is A or G
  MOD_RES (25)..(26)..(27)..(28): Xaa is A or G or is absent

SEQ ID NO: 40094 - protein, 38 aa, Artificial Sequence; identical to SEQ ID NO: 14548
  GFR-binding peptide
  MOD_RES (3)..(4)..(37): Xaa is C or S
  MOD_RES (18)..(19)..(20)..(21)..(22): Xaa is A or G
  MOD_RES (23)..(24)..(25)..(26): Xaa is A or G or is absent

SEQ ID NO: 40095 - protein, 39 aa, Artificial Sequence; identical to SEQ ID NO: 16313
  GFR-binding peptide
  MOD_RES (4)..(5)..(39): Xaa is C or S
  MOD_RES (19)..(20)..(21)..(22)..(23): Xaa is A or G
  MOD_RES (24)..(25)..(26)..(27): Xaa is A or G or is absent

SEQ ID NO: 40096 - protein, 40 aa, Artificial Sequence; identical to SEQ ID NO: 9020
  GFR-binding peptide
  MOD_RES (5)..(6)..(40): Xaa is C or S
  MOD_RES (20)..(21)..(22)..(23)..(24): Xaa is A or G
  MOD_RES (25)..(26)..(27)..(28): Xaa is A or G or is absent

SEQ ID NO: 40097 - protein, 34 aa, Artificial Sequence
  GFR-binding peptide
  MOD_RES (1)..(2): Xaa is C or S
  MOD_RES (16)..(17)..(18)..(19)..(20): Xaa is A or G
  MOD_RES (21)..(22)..(23)..(24): Xaa is A or G or is absent
XXVSQDLEPLTILYYXXXXXXXXXEQLSNMIVKS

SEQ ID NO: 40098 - protein, 39 aa, Artificial Sequence; identical to SEQ ID NO: 16316
  GFR-binding peptide
  MOD_RES (5)..(6): Xaa is C or S
  MOD_RES (20)..(21)..(22)..(23)..(24): Xaa is A or G
  MOD_RES (25)..(26)..(27)..(28): Xaa is A or G or is absent

SEQ ID NO: 40099 - protein, 36 aa, Artificial Sequence; identical to SEQ ID NO: 16317
  GFR-binding peptide
  MOD_RES (5)..(6): Xaa is C or S

SEQ ID NO: 40100 - protein, 37 aa, Artificial Sequence; identical to SEQ ID NO: 16318
  GFR-binding peptide
  MOD_RES (5)..(6): Xaa is C or S

SEQ ID NO: 40101 - protein, 40 aa, Artificial Sequence; identical to SEQ ID NO: 14549
  GFR-binding peptide
  MOD_RES (7)..(7): Xaa is C or S
  MOD_RES (21)..(22)..(23)..(24)..(25): Xaa is A or G
  MOD_RES (26)..(27)..(28)..(29): Xaa is A or G or is absent

SEQ ID NO: 40102 - protein, 38 aa, Artificial Sequence; identical to SEQ ID NO: 16320
  GFR-binding peptide
  MOD_RES (6)..(7): Xaa is C or S

SEQ ID NO: 40103 - protein, 37 aa, Artificial Sequence; identical to SEQ ID NO: 16321
  GFR-binding peptide
  MOD_RES (3)..(4)..(36): Xaa is C or S

SEQ ID NO: 40104 - protein, 37 aa, Artificial Sequence; identical to SEQ ID NO: 14550
  GFR-binding peptide
  MOD_RES (1)..(2)..(34)..(36): Xaa is C or S

SEQ ID NO: 40105 - protein, 39 aa, Artificial Sequence; identical to SEQ ID NO: 14551
  GFR-binding peptide
  MOD_RES (1)..(2)..(36)..(38): Xaa is C or S
  MOD_RES (16)..(17)..(18)..(19)..(20): Xaa is A or G
  MOD_RES (21)..(22)..(23)..(24): Xaa is A or G or is absent

SEQ ID NO: 40106 - protein, 37 aa, Artificial Sequence; identical to SEQ ID NO: 16322
  GFR-binding peptide
  MOD_RES (4)..(5)..(37): Xaa is C or S

SEQ ID NO: 40107 - protein, 43 aa, Artificial Sequence; identical to SEQ ID NO: 16323
  GFR-binding peptide
  MOD_RES (6)..(7)..(41)..(43): Xaa is C or S
  MOD_RES (21)..(22)..(23)..(24)..(25): Xaa is A or G
  MOD_RES (26)..(27)..(28)..(29): Xaa is A or G or is absent

SEQ ID NO: 40108 - protein, 37 aa, Artificial Sequence; identical to SEQ ID NO: 16324
  GFR-binding peptide
  MOD_RES (3)..(4)..(35)..(37): Xaa is C or S

SEQ ID NO: 40109 - protein, 40 aa, Artificial Sequence; identical to SEQ ID NO: 7256
  GFR-binding peptide
  MOD_RES (5)..(6)..(37)..(39): Xaa is C or S

SEQ ID NO: 40110 - protein, 44 aa, Artificial Sequence; identical to SEQ ID NO: 14555
  GFR-binding peptide
  MOD_RES (6)..(7)..(41)..(43): Xaa is C or S
  MOD_RES (21)..(22)..(23)..(24)..(25): Xaa is A or G
  MOD_RES (26)..(27)..(28)..(29): Xaa is A or G or is absent

SEQ ID NO: 40111 - protein, 41 aa, Artificial Sequence; identical to SEQ ID NO: 14556
  GFR-binding peptide
  MOD_RES (6)..(7)..(39)..(41): Xaa is C or S

SEQ ID NO: 40112 - protein, 40 aa, Artificial Sequence; identical to SEQ ID NO: 7257
  GFR-binding peptide
  MOD_RES (4)..(5)..(39): Xaa is C or S
  MOD_RES (19)..(20)..(21)..(22)..(23): Xaa is A or G
  MOD_RES (24)..(25)..(26)..(27): Xaa is A or G or is absent

SEQ ID NO: 40113 - protein, 38 aa, Artificial Sequence; identical to SEQ ID NO: 14558
  GFR-binding peptide
  MOD_RES (3)..(4)..(35)..(37): Xaa is C or S

SEQ ID NO: 40114 - protein, 38 aa, Artificial Sequence; identical to SEQ ID NO: 16325
  GFR-binding peptide
  MOD_RES (1)..(2)..(35)..(37): Xaa is C or S
  MOD_RES (16)..(17)..(18)..(19)..(20): Xaa is A or G
  MOD_RES (21)..(22)..(23)..(24): Xaa is A or G or is absent

SEQ ID NO: 40115 - protein, 41 aa, Artificial Sequence; identical to SEQ ID NO: 16326
  GFR-binding peptide
  MOD_RES (3)..(4)..(38)..(40): Xaa is C or S
  MOD_RES (18)..(19)..(20)..(21)..(22): Xaa is A or G
  MOD_RES (23)..(24)..(25)..(26): Xaa is A or G or is absent

SEQ ID NO: 40116 - protein, 33 aa, Artificial Sequence; identical to SEQ ID NO: 16327
  GFR-binding peptide
  MOD_RES (14)..(15)..(16)..(17)..(18): Xaa is A or G
  MOD_RES (19)..(20)..(21)..(22): Xaa is A or G or is absent

SEQ ID NO: 40117 - protein, 44 aa, Artificial Sequence; identical to SEQ ID NO: 16328
  GFR-binding peptide
  MOD_RES (6)..(7)..(41)..(43): Xaa is C or S
  MOD_RES (21)..(22)..(23)..(24)..(25): Xaa is A or G
  MOD_RES (26)..(27)..(28)..(29): Xaa is A or G or is absent

SEQ ID NO: 40118 - protein, 39 aa, Artificial Sequence; identical to SEQ ID NO: 16329
  GFR-binding peptide
  MOD_RES (5)..(6): Xaa is C or S
  MOD_RES (20)..(21)..(22)..(23)..(24): Xaa is A or G
  MOD_RES (25)..(26)..(27)..(28): Xaa is A or G or is absent

SEQ ID NO: 40119 - protein, 43 aa, Artificial Sequence; identical to SEQ ID NO: 14561
  GFR-binding peptide
  MOD_RES (6)..(7)..(40)..(42): Xaa is C or S
  MOD_RES (21)..(22)..(23)..(24)..(25): Xaa is A or G
  MOD_RES (26)..(27)..(28)..(29): Xaa is A or G or is absent

SEQ ID NO: 40120 - protein, 32 aa, Artificial Sequence; identical to SEQ ID NO: 14562
  GFR-binding peptide
  MOD_RES (1)..(2): Xaa is C or S

SEQ ID NO: 40121 - protein, 37 aa, Artificial Sequence; identical to SEQ ID NO: 14563
  GFR-binding peptide
  MOD_RES (6)..(7): Xaa is C or S

SEQ ID NO: 40122 - protein, 37 aa, Artificial Sequence; identical to SEQ ID NO: 14564
  GFR-binding peptide
  MOD_RES (1)..(35)..(37): Xaa is C or S
  MOD_RES (15)..(16)..(17)..(18)..(19): Xaa is A or G
  MOD_RES (20)..(21)..(22)..(23): Xaa is A or G or is absent

SEQ ID NO: 40123 - protein, 34 aa, Artificial Sequence; identical to SEQ ID NO: 14565
  GFR-binding peptide
  MOD_RES (1)..(2)..(34): Xaa is C or S

SEQ ID NO: 40124 - protein, 39 aa, Artificial Sequence; identical to SEQ ID NO: 16331
  GFR-binding peptide
  MOD_RES (4)..(36)..(38): Xaa is C or S

SEQ ID NO: 40125 - protein, 38 aa, Artificial Sequence; identical to SEQ ID NO: 14566
  GFR-binding peptide
  MOD_RES (2)..(3)..(35)..(37): Xaa is C or S

SEQ ID NO: 40126 - protein, 33 aa, Artificial Sequence; identical to SEQ ID NO: 14567
  GFR-binding peptide
  MOD_RES (3)..(3): Xaa is C or S

SEQ ID NO: 40127 - protein, 41 aa, Artificial Sequence; identical to SEQ ID NO: 16333
  GFR-binding peptide
  MOD_RES (4)..(5)..(38)..(40): Xaa is C or S
  MOD_RES (19)..(20)..(21)..(22)..(23): Xaa is A or G
  MOD_RES (24)..(25)..(26)..(27): Xaa is A or G or is absent

SEQ ID NO: 40128 - protein, 38 aa, Artificial Sequence; identical to SEQ ID NO: 14568
  GFR-binding peptide
  MOD_RES (2)..(3)..(35)..(37): Xaa is C or S

SEQ ID NO: 40129 - protein, 36 aa, Artificial Sequence; identical to SEQ ID NO: 16334
  GFR-binding peptide
  MOD_RES (5)..(6): Xaa is C or S

SEQ ID NO: 40130 - protein, 40 aa, Artificial Sequence; identical to SEQ ID NO: 14570
  GFR-binding peptide
  MOD_RES (6)..(7): Xaa is C or S
  MOD_RES (21)..(22)..(23)..(24)..(25): Xaa is A or G
  MOD_RES (26)..(27)..(28)..(29): Xaa is A or G or is absent

SEQ ID NO: 40131 - protein, 35 aa, Artificial Sequence; identical to SEQ ID NO: 16335
  GFR-binding peptide
  MOD_RES (1)..(2): Xaa is C or S
  MOD_RES (16)..(17)..(18)..(19)..(20): Xaa is A or G
  MOD_RES (21)..(22)..(23)..(24): Xaa is A or G or is absent

SEQ ID NO: 40132 - protein, 36 aa, Artificial Sequence; identical to SEQ ID NO: 14571
  GFR-binding peptide
  MOD_RES (3)..(4)..(35): Xaa is C or S

SEQ ID NO: 40133 - protein, 36 aa, Artificial Sequence; identical to SEQ ID NO: 9038
  GFR-binding peptide
  MOD_RES (1)..(34)..(36): Xaa is C or S
  MOD_RES (15)..(16)..(17)..(18)..(19): Xaa is A or G
  MOD_RES (20)..(21)..(22)..(23): Xaa is A or G or is absent

SEQ ID NO: 40134 - protein, 39 aa, Artificial Sequence; identical to SEQ ID NO: 14572
  GFR-binding peptide
  MOD_RES (4)..(5)..(39): Xaa is C or S
  MOD_RES (19)..(20)..(21)..(22)..(23): Xaa is A or G
  MOD_RES (24)..(25)..(26)..(27): Xaa is A or G or is absent

SEQ ID NO: 40135 - protein, 39 aa, Artificial Sequence; identical to SEQ ID NO: 16337
  GFR-binding peptide
  MOD_RES (4)..(5)..(36)..(38): Xaa is C or S

SEQ ID NO: 40136 - protein, 36 aa, Artificial Sequence; identical to SEQ ID NO: 9040
  GFR-binding peptide
  MOD_RES (33)..(35): Xaa is C or S
  MOD_RES (14)..(15)..(16)..(17)..(18): Xaa is A or G
  MOD_RES (19)..(20)..(21)..(22): Xaa is A or G or is absent

SEQ ID NO: 40137 - protein, 39 aa, Artificial Sequence; identical to SEQ ID NO: 9041
  GFR-binding peptide
  MOD_RES (3)..(4)..(37)..(39): Xaa is C or S
  MOD_RES (18)..(19)..(20)..(21)..(22): Xaa is A or G
  MOD_RES (23)..(24)..(25)..(26): Xaa is A or G or is absent

SEQ ID NO: 40138 - protein, 40 aa, Artificial Sequence; identical to SEQ ID NO: 16341
  GFR-binding peptide
  MOD_RES (3)..(4)..(38)..(40): Xaa is C or S
  MOD_RES (18)..(19)..(20)..(21)..(22): Xaa is A or G
  MOD_RES (23)..(24)..(25)..(26): Xaa is A or G or is absent

SEQ ID NO: 40139 - protein, 32 aa, Artificial Sequence; identical to SEQ ID NO: 16342
  GFR-binding peptide
  MOD_RES (1)..(2): Xaa is C or S

SEQ ID NO: 40140 - protein, 39 aa, Artificial Sequence; identical to SEQ ID NO: 16343
  GFR-binding peptide
  MOD_RES (1)..(2)..(36)..(38): Xaa is C or S
  MOD_RES (16)..(17)..(18)..(19)..(20): Xaa is A or G
  MOD_RES (21)..(22)..(23)..(24): Xaa is A or G or is absent

SEQ ID NO: 40141 - protein, 41 aa, Artificial Sequence; identical to SEQ ID NO: 14574
  GFR-binding peptide
  MOD_RES (6)..(7)..(39)..(41): Xaa is C or S

SEQ ID NO: 40142 - protein, 41 aa, Artificial Sequence
  GFR-binding peptide
  MOD_RES (6)..(7)..(40): Xaa is C or S
  MOD_RES (21)..(22)..(23)..(24)..(25): Xaa is A or G
  MOD_RES (26)..(27)..(28)..(29): Xaa is A or G or is absent
ASASPXXVSQDLEPLTILYYXXXXXXXXXEQLSNMIVKSXK

SEQ ID NO: 40143 - protein, 39 aa, Artificial Sequence; identical to SEQ ID NO: 16345
  GFR-binding peptide
  MOD_RES (3)..(4)..(36)..(38): Xaa is C or S

SEQ ID NO: 40144 - protein, 41 aa, Artificial Sequence; identical to SEQ ID NO: 14575
  GFR-binding peptide
  MOD_RES (4)..(5)..(39)..(41): Xaa is C or S
  MOD_RES (19)..(20)..(21)..(22)..(23): Xaa is A or G
  MOD_RES (24)..(25)..(26)..(27): Xaa is A or G or is absent

SEQ ID NO: 40145 - protein, 35 aa, Artificial Sequence; identical to SEQ ID NO: 16347
  GFR-binding peptide
  MOD_RES (32)..(34): Xaa is C or S

SEQ ID NO: 40146 - protein, 38 aa, Artificial Sequence; identical to SEQ ID NO: 16349
  GFR-binding peptide
  MOD_RES (4)..(5)..(38): Xaa is C or S
  MOD_RES (19)..(20)..(21)..(22)..(23): Xaa is A or G
  MOD_RES (24)..(25)..(26)..(27): Xaa is A or G or is absent

SEQ ID NO: 40147 - protein, 34 aa, Artificial Sequence; identical to SEQ ID NO: 7279
  GFR-binding peptide
  MOD_RES (3)..(4): Xaa is C or S

SEQ ID NO: 40148 - protein, 39 aa, Artificial Sequence; identical to SEQ ID NO: 14577
  GFR-binding peptide
  MOD_RES (4)..(5)..(36)..(38): Xaa is C or S

SEQ ID NO: 40149 - protein, 36 aa, Artificial Sequence; identical to SEQ ID NO: 16350
  GFR-binding peptide
  MOD_RES (1)..(35): Xaa is C or S
  MOD_RES (15)..(16)..(17)..(18)..(19): Xaa is A or G
  MOD_RES (20)..(21)..(22)..(23): Xaa is A or G or is absent

SEQ ID NO: 40150 - protein, 34 aa, Artificial Sequence; identical to SEQ ID NO: 14578
  GFR-binding peptide
  MOD_RES (3)..(4): Xaa is C or S

SEQ ID NO: 40151 - protein, 39 aa, Artificial Sequence; identical to SEQ ID NO: 7281
  GFR-binding peptide
  MOD_RES (5)..(6)..(38): Xaa is C or S

SEQ ID NO: 40152 - protein, 43 aa, Artificial Sequence; identical to SEQ ID NO: 9053
  GFR-binding peptide
  MOD_RES (5)..(6)..(40)..(42): Xaa is C or S
  MOD_RES (20)..(21)..(22)..(23)..(24): Xaa is A or G
  MOD_RES (25)..(26)..(27)..(28): Xaa is A or G or is absent

SEQ ID NO: 40153 - protein, 34 aa, Artificial Sequence; identical to SEQ ID NO: 14581
  GFR-binding peptide
  MOD_RES (3)..(4): Xaa is C or S

SEQ ID NO: 40154 - protein, 43 aa, Artificial Sequence; identical to SEQ ID NO: 14582
  GFR-binding peptide
  MOD_RES (6)..(40)..(42): Xaa is C or S
  MOD_RES (20)..(21)..(22)..(23)..(24): Xaa is A or G
  MOD_RES (25)..(26)..(27)..(28): Xaa is A or G or is absent

SEQ ID NO: 40155 - protein, 42 aa, Artificial Sequence; identical to SEQ ID NO: 9056
  GFR-binding peptide
  MOD_RES (6)..(7)..(41): Xaa is C or S
  MOD_RES (21)..(22)..(23)..(24)..(25): Xaa is A or G
  MOD_RES (26)..(27)..(28)..(29): Xaa is A or G or is absent

SEQ ID NO: 40156 - protein, 42 aa, Artificial Sequence; identical to SEQ ID NO: 16356
  GFR-binding peptide
  MOD_RES (6)..(7)..(39)..(41): Xaa is C or S

SEQ ID NO: 40157 - protein, 36 aa, Artificial Sequence; identical to SEQ ID NO: 16357
  GFR-binding peptide
  MOD_RES (1)..(33)..(35): Xaa is C or S

SEQ ID NO: 40158 - protein, 40 aa, Artificial Sequence; identical to SEQ ID NO: 14583
  GFR-binding peptide
  MOD_RES (3)..(37)..(39): Xaa is C or S
  MOD_RES (17)..(18)..(19)..(20)..(21): Xaa is A or G
  MOD_RES (22)..(23)..(24)..(25): Xaa is A or G or is absent

SEQ ID NO: 40159 - protein, 42 aa, Artificial Sequence; identical to SEQ ID NO: 14584
  GFR-binding peptide
  MOD_RES (5)..(6)..(40)..(42): Xaa is C or S
  MOD_RES (20)..(21)..(22)..(23)..(24): Xaa is A or G
  MOD_RES (25)..(26)..(27)..(28): Xaa is A or G or is absent

SEQ ID NO: 40160 - protein, 39 aa, Artificial Sequence; identical to SEQ ID NO: 14585
  GFR-binding peptide
  MOD_RES (2)..(3)..(37)..(39): Xaa is C or S
  MOD_RES (17)..(18)..(19)..(20)..(21): Xaa is A or G
  MOD_RES (22)..(23)..(24)..(25): Xaa is A or G or is absent

SEQ ID NO: 40161 - protein, 38 aa, Artificial Sequence; identical to SEQ ID NO: 14586
  GFR-binding peptide
  MOD_RES (2)..(3)..(35)..(37): Xaa is C or S

SEQ ID NO: 40162 - protein, 37 aa, Artificial Sequence; identical to SEQ ID NO: 7287
  GFR-binding peptide
  MOD_RES (3)..(4): Xaa is C or S
  MOD_RES (18)..(19)..(20)..(21)..(22): Xaa is A or G
  MOD_RES (23)..(24)..(25)..(26): Xaa is A or G or is absent

SEQ ID NO: 40163 - protein, 38 aa, Artificial Sequence; identical to SEQ ID NO: 14588
  GFR-binding peptide
  MOD_RES (4)..(5)..(38): Xaa is C or S
  MOD_RES (19)..(20)..(21)..(22)..(23): Xaa is A or G
  MOD_RES (24)..(25)..(26)..(27): Xaa is A or G or is absent

SEQ ID NO: 40164 - protein, 37 aa, Artificial Sequence; identical to SEQ ID NO: 16358
  GFR-binding peptide
  MOD_RES (5)..(6)..(37): Xaa is C or S

SEQ ID NO: 40165 - protein, 40 aa, Artificial Sequence; identical to SEQ ID NO: 14589
  GFR-binding peptide
  MOD_RES (6)..(7): Xaa is C or S
  MOD_RES (21)..(22)..(23)..(24)..(25): Xaa is A or G
  MOD_RES (26)..(27)..(28)..(29): Xaa is A or G or is absent

SEQ ID NO: 40166 - protein, 34 aa, Artificial Sequence; identical to SEQ ID NO: 7289
  GFR-binding peptide
  MOD_RES (31)..(33): Xaa is C or S

SEQ ID NO: 40167 - protein, 31 aa, Artificial Sequence; identical to SEQ ID NO: 16359
  GFR-binding peptide
  MOD_RES (1)..(1): Xaa is C or S

SEQ ID NO: 40168 - protein, 42 aa, Artificial Sequence; identical to SEQ ID NO: 14591
  GFR-binding peptide
  MOD_RES (6)..(7)..(41): Xaa is C or S
  MOD_RES (21)..(22)..(23)..(24)..(25): Xaa is A or G
  MOD_RES (26)..(27)..(28)..(29): Xaa is A or G or is absent

SEQ ID NO: 40169 - protein, 37 aa, Artificial Sequence; identical to SEQ ID NO: 16360
  GFR-binding peptide
  MOD_RES (1)..(2)..(36): Xaa is C or S
  MOD_RES (16)..(17)..(18)..(19)..(20): Xaa is A or G
  MOD_RES (21)..(22)..(23)..(24): Xaa is A or G or is absent

SEQ ID NO: 40170 - protein, 35 aa, Artificial Sequence; identical to SEQ ID NO: 7293
  GFR-binding peptide
  MOD_RES (4)..(5): Xaa is C or S

SEQ ID NO: 40171 - protein, 38 aa, Artificial Sequence; identical to SEQ ID NO: 16362
  GFR-binding peptide
  MOD_RES (5)..(6): Xaa is C or S
  MOD_RES (20)..(21)..(22)..(23)..(24): Xaa is A or G
  MOD_RES (25)..(26)..(27)..(28): Xaa is A or G or is absent

SEQ ID NO: 40172 - protein, 35 aa, Artificial Sequence; identical to SEQ ID NO: 16363
  GFR-binding peptide
  MOD_RES (32)..(34): Xaa is C or S

SEQ ID NO: 40173 - protein, 36 aa, Artificial Sequence; identical to SEQ ID NO: 14593
  GFR-binding peptide
  MOD_RES (3)..(4)..(36): Xaa is C or S

SEQ ID NO: 40174 - protein, 36 aa, Artificial Sequence; identical to SEQ ID NO: 16364
  GFR-binding peptide
  MOD_RES (2)..(36): Xaa is C or S
  MOD_RES (16)..(17)..(18)..(19)..(20): Xaa is A or G
  MOD_RES (21)..(22)..(23)..(24): Xaa is A or G or is absent

SEQ ID NO: 40175 - protein, 38 aa, Artificial Sequence; identical to SEQ ID NO: 14594
  GFR-binding peptide
  MOD_RES (5)..(6): Xaa is C or S
  MOD_RES (20)..(21)..(22)..(23)..(24): Xaa is A or G
  MOD_RES (25)..(26)..(27)..(28): Xaa is A or G or is absent

SEQ ID NO: 40176 - protein, 32 aa, Artificial Sequence; identical to SEQ ID NO: 16365
  GFR-binding peptide
  MOD_RES (1)..(2): Xaa is C or S

SEQ ID NO: 40177 - protein, 37 aa, Artificial Sequence
  GFR-binding peptide
  MOD_RES (1)..(34)..(36): Xaa is C or S
  MOD_RES (15)..(16)..(17)..(18)..(19): Xaa is A or G
  MOD_RES (20)..(21)..(22)..(23): Xaa is A or G or is absent
XVSQDLEPLTILYYXXXXXXXXXEQLSNMIVKSXKXS

SEQ ID NO: 40178 - protein, 35 aa, Artificial Sequence; identical to SEQ ID NO: 7297
  GFR-binding peptide
  MOD_RES (1)..(2): Xaa is C or S
  MOD_RES (16)..(17)..(18)..(19)..(20): Xaa is A or G
  MOD_RES (21)..(22)..(23)..(24): Xaa is A or G or is absent

SEQ ID NO: 40179 - protein, 36 aa, Artificial Sequence; identical to SEQ ID NO: 14596
  GFR-binding peptide
  MOD_RES (2)..(3)..(35): Xaa is C or S

SEQ ID NO: 40180 - protein, 39 aa, Artificial Sequence; identical to SEQ ID NO: 9070
  GFR-binding peptide
  MOD_RES (3)..(4)..(37)..(39): Xaa is C or S
  MOD_RES (18)..(19)..(20)..(21)..(22): Xaa is A or G
  MOD_RES (23)..(24)..(25)..(26): Xaa is A or G or is absent

SEQ ID NO: 40181 - protein, 38 aa, Artificial Sequence; identical to SEQ ID NO: 9071
  GFR-binding peptide
  MOD_RES (3)..(4)..(37): Xaa is C or S
  MOD_RES (18)..(19)..(20)..(21)..(22): Xaa is A or G
  MOD_RES (23)..(24)..(25)..(26): Xaa is A or G or is absent

SEQ ID NO: 40182 - protein, 32 aa, Artificial Sequence; identical to SEQ ID NO: 14597
  GFR-binding peptide
  MOD_RES (32)..(32): Xaa is C or S

SEQ ID NO: 40183 - protein, 32 aa, Artificial Sequence; identical to SEQ ID NO: 16368
  GFR-binding peptide
  MOD_RES (32)..(32): Xaa is C or S

SEQ ID NO: 40184 - protein, 35 aa, Artificial Sequence; identical to SEQ ID NO: 16369
  GFR-binding peptide
  MOD_RES (3)..(3): Xaa is C or S
  MOD_RES (17)..(18)..(19)..(20)..(21): Xaa is A or G
  MOD_RES (22)..(23)..(24)..(25): Xaa is A or G or is absent

SEQ ID NO: 40185 - protein, 33 aa, Artificial Sequence; identical to SEQ ID NO: 14598
  GFR-binding peptide
  MOD_RES (32)..(32): Xaa is C or S

SEQ ID NO: 40186 - protein, 35 aa, Artificial Sequence; identical to SEQ ID NO: 9072
  GFR-binding peptide
  MOD_RES (1)..(35): Xaa is C or S
  MOD_RES (15)..(16)..(17)..(18)..(19): Xaa is A or G
  MOD_RES (20)..(21)..(22)..(23): Xaa is A or G or is absent

SEQ ID NO: 40187 - protein, 32 aa, Artificial Sequence; identical to SEQ ID NO: 14599
  GFR-binding peptide
  MOD_RES (1)..(1): Xaa is C or S

SEQ ID NO: 40188 - protein, 39 aa, Artificial Sequence; identical to SEQ ID NO: 16371
  GFR-binding peptide
  MOD_RES (4)..(5)..(37)..(39): Xaa is C or S

SEQ ID NO: 40189 - protein, 40 aa, Artificial Sequence; identical to SEQ ID NO: 14600
  GFR-binding peptide
  MOD_RES (5)..(6)..(39): Xaa is C or S
  MOD_RES (20)..(21)..(22)..(23)..(24): Xaa is A or G
  MOD_RES (25)..(26)..(27)..(28): Xaa is A or G or is absent

SEQ ID NO: 40190 - protein, 40 aa, Artificial Sequence; identical to SEQ ID NO: 14601
  GFR-binding peptide
  MOD_RES (6)..(7)..(39): Xaa is C or S

SEQ ID NO: 40191 - protein, 41 aa, Artificial Sequence; identical to SEQ ID NO: 7302
  GFR-binding peptide
  MOD_RES (5)..(6)..(39)..(41): Xaa is C or S
  MOD_RES (20)..(21)..(22)..(23)..(24): Xaa is A or G
  MOD_RES (25)..(26)..(27)..(28): Xaa is A or G or is absent

SEQ ID NO: 40192 - protein, 36 aa, Artificial Sequence; identical to SEQ ID NO: 16372
  GFR-binding peptide
  MOD_RES (5)..(5): Xaa is C or S

SEQ ID NO: 40193 - protein, 37 aa, Artificial Sequence; identical to SEQ ID NO: 14604
  GFR-binding peptide
  MOD_RES (6)..(6): Xaa is C or S

SEQ ID NO: 40194 - protein, 34 aa, Artificial Sequence; identical to SEQ ID NO: 7305
  GFR-binding peptide
  MOD_RES (1)..(2): Xaa is C or S
  MOD_RES (16)..(17)..(18)..(19)..(20): Xaa is A or G
  MOD_RES (21)..(22)..(23)..(24): Xaa is A or G or is absent

SEQ ID NO: 40195 - protein, 39 aa, Artificial Sequence; identical to SEQ ID NO: 14607
  GFR-binding peptide
  MOD_RES (4)..(5)..(39): Xaa is C or S
  MOD_RES (19)..(20)..(21)..(22)..(23): Xaa is A or G
  MOD_RES (24)..(25)..(26)..(27): Xaa is A or G or is absent

SEQ ID NO: 40196 - protein, 32 aa, Artificial Sequence; identical to SEQ ID NO: 14608
  GFR-binding peptide
  MOD_RES (2)..(2): Xaa is C or S

SEQ ID NO: 40197 - protein, 35 aa, Artificial Sequence; identical to SEQ ID NO: 14609
  GFR-binding peptide
  MOD_RES (2)..(2): Xaa is C or S
  MOD_RES (16)..(17)..(18)..(19)..(20): Xaa is A or G
  MOD_RES (21)..(22)..(23)..(24): Xaa is A or G or is absent

SEQ ID NO: 40198 - protein, 34 aa, Artificial Sequence; identical to SEQ ID NO: 16376
  GFR-binding peptide
  MOD_RES (2)..(34): Xaa is C or S

SEQ ID NO: 40199 - protein, 35 aa, Artificial Sequence; identical to SEQ ID NO: 14610
  GFR-binding peptide
  MOD_RES (4)..(5): Xaa is C or S

SEQ ID NO: 40200 - protein, 35 aa, Artificial Sequence; identical to SEQ ID NO: 16377
  GFR-binding peptide
  MOD_RES (4)..(5): Xaa is C or S

SEQ ID NO: 40201 - protein, 33 aa, Artificial Sequence; identical to SEQ ID NO: 14611
  GFR-binding peptide
  MOD_RES (2)..(3): Xaa is C or S

SEQ ID NO: 40202 - protein, 36 aa, Artificial Sequence; identical to SEQ ID NO: 14612
  GFR-binding peptide
  MOD_RES (1)..(35): Xaa is C or S
  MOD_RES (15)..(16)..(17)..(18)..(19): Xaa is A or G
  MOD_RES (20)..(21)..(22)..(23): Xaa is A or G or is absent

SEQ ID NO: 40203 - protein, 33 aa, Artificial Sequence; identical to SEQ ID NO: 14613
  GFR-binding peptide
  MOD_RES (14)..(15)..(16)..(17)..(18): Xaa is A or G
  MOD_RES (19)..(20)..(21)..(22): Xaa is A or G or is absent

SEQ ID NO: 40204 - protein, 40 aa, Artificial Sequence; identical to SEQ ID NO: 16378
  GFR-binding peptide
  MOD_RES (3)..(37)..(39): Xaa is C or S
  MOD_RES (17)..(18)..(19)..(20)..(21): Xaa is A or G
  MOD_RES (22)..(23)..(24)..(25): Xaa is A or G or is absent

SEQ ID NO: 40205 - protein, 34 aa, Artificial Sequence; identical to SEQ ID NO: 14614
  GFR-binding peptide
  MOD_RES (2)..(2): Xaa is C or S
  MOD_RES (16)..(17)..(18)..(19)..(20): Xaa is A or G
  MOD_RES (21)..(22)..(23)..(24): Xaa is A or G or is absent

SEQ ID NO: 40206 - protein, 34 aa, Artificial Sequence; identical to SEQ ID NO: 7321
  GFR-binding peptide
  MOD_RES (1)..(1): Xaa is C or S
  MOD_RES (15)..(16)..(17)..(18)..(19): Xaa is A or G
  MOD_RES (20)..(21)..(22)..(23): Xaa is A or G or is absent

SEQ ID NO: 40207 - protein, 37 aa, Artificial Sequence; identical to SEQ ID NO: 7322
  GFR-binding peptide
  MOD_RES (2)..(3)..(34)..(36): Xaa is C or S

SEQ ID NO: 40208 - protein, 33 aa, Artificial Sequence; identical to SEQ ID NO: 16380
  GFR-binding peptide
  MOD_RES (14)..(15)..(16)..(17)..(18): Xaa is A or G
  MOD_RES (19)..(20)..(21)..(22): Xaa is A or G or is absent

SEQ ID NO: 40209 - protein, 43 aa, Artificial Sequence; identical to SEQ ID NO: 16381
  GFR-binding peptide
  MOD_RES (6)..(7)..(41)..(43): Xaa is C or S
  MOD_RES (21)..(22)..(23)..(24)..(25): Xaa is A or G
  MOD_RES (26)..(27)..(28)..(29): Xaa is A or G or is absent

SEQ ID NO: 40210 - protein, 32 aa, Artificial Sequence; identical to SEQ ID NO: 14620
  GFR-binding peptide
  MOD_RES (31)..(31): Xaa is C or S

SEQ ID NO: 40211 - protein, 42 aa, Artificial Sequence; identical to SEQ ID NO: 14621
  GFR-binding peptide
  MOD_RES (5)..(6)..(39)..(41): Xaa is C or S
  MOD_RES (20)..(21)..(22)..(23)..(24): Xaa is A or G
  MOD_RES (25)..(26)..(27)..(28): Xaa is A or G or is absent

SEQ ID NO: 40212 - protein, 41 aa, Artificial Sequence; identical to SEQ ID NO: 14622
  GFR-binding peptide
  MOD_RES (6)..(7)..(39)..(41): Xaa is C or S

SEQ ID NO: 40213 - protein, 37 aa, Artificial Sequence; identical to SEQ ID NO: 14623
  GFR-binding peptide
  MOD_RES (3)..(4)..(36): Xaa is C or S

SEQ ID NO: 40214 - protein, 37 aa, Artificial Sequence; identical to SEQ ID NO: 16383
  GFR-binding peptide
  MOD_RES (2)..(3)..(34)..(36): Xaa is C or S

SEQ ID NO: 40215 - protein, 39 aa, Artificial Sequence; identical to SEQ ID NO: 16385
  GFR-binding peptide
  MOD_RES (4)..(5)..(37)..(39): Xaa is C or S

SEQ ID NO: 40216 - protein, 39 aa, Artificial Sequence; identical to SEQ ID NO: 16386
  GFR-binding peptide
  MOD_RES (2)..(3)..(37)..(39): Xaa is C or S
  MOD_RES (17)..(18)..(19)..(20)..(21): Xaa is A or G
  MOD_RES (22)..(23)..(24)..(25): Xaa is A or G or is absent

SEQ ID NO: 40217 - protein, 41 aa, Artificial Sequence; identical to SEQ ID NO: 7327
  GFR-binding peptide
  MOD_RES (4)..(5)..(38)..(40): Xaa is C or S
  MOD_RES (19)..(20)..(21)..(22)..(23): Xaa is A or G
  MOD_RES (24)..(25)..(26)..(27): Xaa is A or G or is absent

SEQ ID NO: 40218 - protein, 39 aa, Artificial Sequence; identical to SEQ ID NO: 14625
  GFR-binding peptide
  MOD_RES (3)..(4)..(36)..(38): Xaa is C or S

SEQ ID NO: 40219 - protein, 35 aa, Artificial Sequence; identical to SEQ ID NO: 9104
  GFR-binding peptide
  MOD_RES (33)..(35): Xaa is C or S
  MOD_RES (14)..(15)..(16)..(17)..(18): Xaa is A or G
  MOD_RES (19)..(20)..(21)..(22): Xaa is A or G or is absent

SEQ ID NO: 40220 - protein, 33 aa, Artificial Sequence; identical to SEQ ID NO: 16389
  GFR-binding peptide
  MOD_RES (14)..(15)..(16)..(17)..(18): Xaa is A or G
  MOD_RES (19)..(20)..(21)..(22): Xaa is A or G or is absent

SEQ ID NO: 40221 - protein, 33 aa, Artificial Sequence; identical to SEQ ID NO: 9107
  GFR-binding peptide
  MOD_RES (14)..(15)..(16)..(17)..(18): Xaa is A or G
  MOD_RES (19)..(20)..(21)..(22): Xaa is A or G or is absent

SEQ ID NO: 40222 - protein, 31 aa, Artificial Sequence; identical to SEQ ID NO: 16391
  GFR-binding peptide
  MOD_RES (1)..(1): Xaa is C or S

SEQ ID NO: 40223 - protein, 36 aa, Artificial Sequence; identical to SEQ ID NO: 7332
  GFR-binding peptide
  MOD_RES (2)..(3)..(34)..(36): Xaa is C or S

SEQ ID NO: 40224 - protein, 31 aa, Artificial Sequence; identical to SEQ ID NO: 9111
  GFR-binding peptide
  MOD_RES (31)..(31): Xaa is C or S

SEQ ID NO: 40225 - protein, 41 aa, Artificial Sequence; identical to SEQ ID NO: 14629
  GFR-binding peptide
  MOD_RES (6)..(7)..(39)..(41): Xaa is C or S

SEQ ID NO: 40226 - protein, 36 aa, Artificial Sequence; identical to SEQ ID NO: 16395
  GFR-binding peptide
  MOD_RES (34)..(36): Xaa is C or S
  MOD_RES (14)..(15)..(16)..(17)..(18): Xaa is A or G
  MOD_RES (19)..(20)..(21)..(22): Xaa is A or G or is absent

SEQ ID NO: 40227 - protein, 36 aa, Artificial Sequence; identical to SEQ ID NO: 16396
  GFR-binding peptide
  MOD_RES (5)..(6): Xaa is C or S

SEQ ID NO: 40228 - protein, 39 aa, Artificial Sequence
  GFR-binding peptide
  MOD_RES (2)..(3)..(36)..(38): Xaa is C or S
  MOD_RES (17)..(18)..(19)..(20)..(21): Xaa is A or G
  MOD_RES (22)..(23)..(24)..(25): Xaa is A or G or is absent
PXXVSQDLEPLTILYYXXXXXXXXXEQLSNMIVKSXKXS

SEQ ID NO: 40229 - protein, 39 aa, Artificial Sequence; identical to SEQ ID NO: 14630
  GFR-binding peptide
  MOD_RES (2)..(3)..(37)..(39): Xaa is C or S
  MOD_RES (17)..(18)..(19)..(20)..(21): Xaa is A or G
  MOD_RES (22)..(23)..(24)..(25): Xaa is A or G or is absent

SEQ ID NO: 40230 - protein, 33 aa, Artificial Sequence; identical to SEQ ID NO: 16399
  GFR-binding peptide
  MOD_RES (2)..(2): Xaa is C or S

SEQ ID NO: 40231 - protein, 36 aa, Artificial Sequence; identical to SEQ ID NO: 14631
  GFR-binding peptide
  MOD_RES (1)..(33)..(35): Xaa is C or S

SEQ ID NO: 40232 - protein, 36 aa, Artificial Sequence; identical to SEQ ID NO: 16400
  GFR-binding peptide
  MOD_RES (4)..(36): Xaa is C or S

SEQ ID NO: 40233 - protein, 35 aa, Artificial Sequence; identical to SEQ ID NO: 14633
  GFR-binding peptide
  MOD_RES (1)..(33)..(35): Xaa is C or S

SEQ ID NO: 40234 - protein, 40 aa, Artificial Sequence; identical to SEQ ID NO: 14634
  GFR-binding peptide
  MOD_RES (5)..(6)..(40): Xaa is C or S
  MOD_RES (20)..(21)..(22)..(23)..(24): Xaa is A or G
  MOD_RES (25)..(26)..(27)..(28): Xaa is A or G or is absent

SEQ ID NO: 40235 - protein, 38 aa, Artificial Sequence; identical to SEQ ID NO: 14635
  GFR-binding peptide
  MOD_RES (4)..(5)..(36)..(38): Xaa is C or S

SEQ ID NO: 40236 - protein, 37 aa, Artificial Sequence; identical to SEQ ID NO: 16401
  GFR-binding peptide
  MOD_RES (1)..(2)..(36): Xaa is C or S
  MOD_RES (16)..(17)..(18)..(19)..(20): Xaa is A or G
  MOD_RES (21)..(22)..(23)..(24): Xaa is A or G or is absent

SEQ ID NO: 40237 - protein, 37 aa, Artificial Sequence; identical to SEQ ID NO: 14636
  GFR-binding peptide
  MOD_RES (4)..(4): Xaa is C or S
  MOD_RES (18)..(19)..(20)..(21)..(22): Xaa is A or G
  MOD_RES (23)..(24)..(25)..(26): Xaa is A or G or is absent

SEQ ID NO: 40238 - protein, 40 aa, Artificial Sequence; identical to SEQ ID NO: 16402
  GFR-binding peptide
  MOD_RES (6)..(7): Xaa is C or S
  MOD_RES (21)..(22)..(23)..(24)..(25): Xaa is A or G
  MOD_RES (26)..(27)..(28)..(29): Xaa is A or G or is absent

SEQ ID NO: 40239 - protein, 43 aa, Artificial Sequence; identical to SEQ ID NO: 14637
  GFR-binding peptide
  MOD_RES (6)..(7)..(41)..(43): Xaa is C or S
  MOD_RES (21)..(22)..(23)..(24)..(25): Xaa is A or G
  MOD_RES (26)..(27)..(28)..(29): Xaa is A or G or is absent

SEQ ID NO: 40240 - protein, 38 aa, Artificial Sequence; identical to SEQ ID NO: 16404
  GFR-binding peptide
  MOD_RES (5)..(37): Xaa is C or S

SEQ ID NO: 40241 - protein, 35 aa, Artificial Sequence; identical to SEQ ID NO: 14638
  GFR-binding peptide
  MOD_RES (1)..(35): Xaa is C or S
  MOD_RES (15)..(16)..(17)..(18)..(19): Xaa is A or G
  MOD_RES (20)..(21)..(22)..(23): Xaa is A or G or is absent

SEQ ID NO: 40242 - protein, 44 aa, Artificial Sequence; identical to SEQ ID NO: 9131
  GFR-binding peptide
  MOD_RES (6)..(7)..(41)..(43): Xaa is C or S
  MOD_RES (21)..(22)..(23)..(24)..(25): Xaa is A or G
  MOD_RES (26)..(27)..(28)..(29): Xaa is A or G or is absent

SEQ ID NO: 40243 - protein, 33 aa, Artificial Sequence; identical to SEQ ID NO: 16408
  GFR-binding peptide
  MOD_RES (2)..(3): Xaa is C or S

SEQ ID NO: 40244 - protein, 36 aa, Artificial Sequence; identical to SEQ ID NO: 14639
  GFR-binding peptide
  MOD_RES (1)..(33)..(35): Xaa is C or S

SEQ ID NO: 40245 - protein, 35 aa, Artificial Sequence; identical to SEQ ID NO: 14641
  GFR-binding peptide
  MOD_RES (1)..(2)..(34): Xaa is C or S

SEQ ID NO: 40246 - protein, 42 aa, Artificial Sequence; identical to SEQ ID NO: 14642
  GFR-binding peptide
  MOD_RES (5)..(6)..(40)..(42): Xaa is C or S
  MOD_RES (20)..(21)..(22)..(23)..(24): Xaa is A or G
  MOD_RES (25)..(26)..(27)..(28): Xaa is A or G or is absent

SEQ ID NO: 40247 - protein, 40 aa, Artificial Sequence; identical to SEQ ID NO: 14643
  GFR-binding peptide
  MOD_RES (3)..(4)..(38)..(40): Xaa is C or S
  MOD_RES (18)..(19)..(20)..(21)..(22): Xaa is A or G
  MOD_RES (23)..(24)..(25)..(26): Xaa is A or G or is absent

SEQ ID NO: 40248 - protein, 37 aa, Artificial Sequence; identical to SEQ ID NO: 14644
  GFR-binding peptide
  MOD_RES (1)..(2)..(36): Xaa is C or S
  MOD_RES (16)..(17)..(18)..(19)..(20): Xaa is A or G
  MOD_RES (21)..(22)..(23)..(24): Xaa is A or G or is absent

SEQ ID NO: 40249 - protein, 36 aa, Artificial Sequence; identical to SEQ ID NO: 16409
  GFR-binding peptide
  MOD_RES (1)..(35): Xaa is C or S
  MOD_RES (15)..(16)..(17)..(18)..(19): Xaa is A or G
  MOD_RES (20)..(21)..(22)..(23): Xaa is A or G or is absent

SEQ ID NO: 40250 - protein, 38 aa, Artificial Sequence; identical to SEQ ID NO: 14646
  GFR-binding peptide
  MOD_RES (5)..(6): Xaa is C or S
  MOD_RES (20)..(21)..(22)..(23)..(24): Xaa is A or G
  MOD_RES (25)..(26)..(27)..(28): Xaa is A or G or is absent

SEQ ID NO: 40251 - protein, 40 aa, Artificial Sequence; identical to SEQ ID NO: 16410
  GFR-binding peptide
  MOD_RES (5)..(6)..(38)..(40): Xaa is C or S

SEQ ID NO: 40252 - protein, 39 aa, Artificial Sequence; identical to SEQ ID NO: 9138
  GFR-binding peptide
  MOD_RES (4)..(5)..(38): Xaa is C or S
  MOD_RES (19)..(20)..(21)..(22)..(23): Xaa is A or G
  MOD_RES (24)..(25)..(26)..(27): Xaa is A or G or is absent

SEQ ID NO: 40253 - protein, 32 aa, Artificial Sequence; identical to SEQ ID NO: 16412
  GFR-binding peptide
  MOD_RES (1)..(1): Xaa is C or S

SEQ ID NO: 40254 - protein, 33 aa, Artificial Sequence; identical to SEQ ID NO: 16413
  GFR-binding peptide
  MOD_RES (14)..(15)..(16)..(17)..(18): Xaa is A or G
  MOD_RES (19)..(20)..(21)..(22): Xaa is A or G or is absent

SEQ ID NO: 40255 - protein, 34 aa, Artificial Sequence; identical to SEQ ID NO: 14647
  GFR-binding peptide
  MOD_RES (32)..(34): Xaa is C or S

SEQ ID NO: 40256 - protein, 34 aa, Artificial Sequence; identical to SEQ ID NO: 7352
  GFR-binding peptide
  MOD_RES (33)..(33): Xaa is C or S
  MOD_RES (14)..(15)..(16)..(17)..(18): Xaa is A or G
  MOD_RES (19)..(20)..(21)..(22): Xaa is A or G or is absent

SEQ ID NO: 40257 - protein, 43 aa, Artificial Sequence; identical to SEQ ID NO: 14650
  GFR-binding peptide
  MOD_RES (6)..(7)..(41)..(43): Xaa is C or S
  MOD_RES (21)..(22)..(23)..(24)..(25): Xaa is A or G
  MOD_RES (26)..(27)..(28)..(29): Xaa is A or G or is absent

SEQ ID NO: 40258 - protein, 32 aa, Artificial Sequence; identical to SEQ ID NO: 14651
  GFR-binding peptide
  MOD_RES (32)..(32): Xaa is C or S

SEQ ID NO: 40259 - protein, 39 aa, Artificial Sequence; identical to SEQ ID NO: 16416
  GFR-binding peptide
  MOD_RES (5)..(6)..(39): Xaa is C or S
  MOD_RES (20)..(21)..(22)..(23)..(24): Xaa is A or G
  MOD_RES (25)..(26)..(27)..(28): Xaa is A or G or is absent

SEQ ID NO: 40260 - protein, 37 aa, Artificial Sequence; identical to SEQ ID NO: 14652
  GFR-binding peptide
  MOD_RES (2)..(3)..(35)..(37): Xaa is C or S

SEQ ID NO: 40261 - protein, 36 aa, Artificial Sequence; identical to SEQ ID NO: 14653
  GFR-binding peptide
  MOD_RES (1)..(33)..(35): Xaa is C or S

SEQ ID NO: 40262 - protein, 35 aa, Artificial Sequence; identical to SEQ ID NO: 16418
  GFR-binding peptide
  MOD_RES (3)..(4)..(35): Xaa is C or S

SEQ ID NO: 40263 - protein, 38 aa, Artificial Sequence; identical to SEQ ID NO: 16419
  GFR-binding peptide
  MOD_RES (4)..(5)..(36)..(38): Xaa is C or S

SEQ ID NO: 40264 - protein, 40 aa, Artificial Sequence; identical to SEQ ID NO: 7353
  GFR-binding peptide
  MOD_RES (2)..(3)..(37)..(39): Xaa is C or S
  MOD_RES (17)..(18)..(19)..(20)..(21): Xaa is A or G
  MOD_RES (22)..(23)..(24)..(25): Xaa is A or G or is absent

SEQ ID NO: 40265 - protein, 38 aa, Artificial Sequence; identical to SEQ ID NO: 14655
  GFR-binding peptide
  MOD_RES (6)..(7): Xaa is C or S

SEQ ID NO: 40266 - protein, 35 aa, Artificial Sequence; identical to SEQ ID NO: 16421
  GFR-binding peptide
  MOD_RES (3)..(4): Xaa is C or S

SEQ ID NO: 40267 - protein, 36 aa, Artificial Sequence; identical to SEQ ID NO: 14656
  GFR-binding peptide
  MOD_RES (2)..(3)..(36): Xaa is C or S
  MOD_RES (17)..(18)..(19)..(20)..(21): Xaa is A or G
  MOD_RES (22)..(23)..(24)..(25): Xaa is A or G or is absent

SEQ ID NO: 40268 - protein, 37 aa, Artificial Sequence; identical to SEQ ID NO: 14657
  GFR-binding peptide
  MOD_RES (2)..(34)..(36): Xaa is C or S

SEQ ID NO: 40269 - protein, 40 aa, Artificial Sequence; identical to SEQ ID NO: 16422
  GFR-binding peptide
  MOD_RES (5)..(6)..(39): Xaa is C or S
  MOD_RES (20)..(21)..(22)..(23)..(24): Xaa is A or G
  MOD_RES (25)..(26)..(27)..(28): Xaa is A or G or is absent

SEQ ID NO: 40270 - protein, 39 aa, Artificial Sequence; identical to SEQ ID NO: 14658
  GFR-binding peptide
  MOD_RES (5)..(6): Xaa is C or S
  MOD_RES (20)..(21)..(22)..(23)..(24): Xaa is A or G
  MOD_RES (25)..(26)..(27)..(28): Xaa is A or G or is absent

SEQ ID NO: 40271 - protein, 43 aa, Artificial Sequence; identical to SEQ ID NO: 14659
  GFR-binding peptide
  MOD_RES (7)..(41)..(43): Xaa is C or S
  MOD_RES (21)..(22)..(23)..(24)..(25): Xaa is A or G
  MOD_RES (26)..(27)..(28)..(29): Xaa is A or G or is absent

SEQ ID NO: 40272 - protein, 31 aa, Artificial Sequence; identical to SEQ ID NO: 14661
  GFR-binding peptide
  MOD_RES (1)..(1): Xaa is C or S

SEQ ID NO: 40273 - protein, 37 aa, Artificial Sequence; identical to SEQ ID NO: 16424
  GFR-binding peptide
  MOD_RES (4)..(5)..(37): Xaa is C or S

SEQ ID NO: 40274 - protein, 39 aa, Artificial Sequence; identical to SEQ ID NO: 9155
  GFR-binding peptide
  MOD_RES (4)..(5)..(39): Xaa is C or S
  MOD_RES (19)..(20)..(21)..(22)..(23): Xaa is A or G
  MOD_RES (24)..(25)..(26)..(27): Xaa is A or G or is absent

SEQ ID NO: 40275 - protein, 40 aa, Artificial Sequence; identical to SEQ ID NO: 16426
  GFR-binding peptide
  MOD_RES (3)..(4)..(38)..(40): Xaa is C or S
  MOD_RES (18)..(19)..(20)..(21)..(22): Xaa is A or G
  MOD_RES (23)..(24)..(25)..(26): Xaa is A or G or is absent

SEQ ID NO: 40276 - protein, 36 aa, Artificial Sequence; identical to SEQ ID NO: 16427
  GFR-binding peptide
  MOD_RES (2)..(3): Xaa is C or S
  MOD_RES (17)..(18)..(19)..(20)..(21): Xaa is A or G
  MOD_RES (22)..(23)..(24)..(25): Xaa is A or G or is absent

SEQ ID NO: 40277 - protein, 38 aa, Artificial Sequence; identical to SEQ ID NO: 14662
  GFR-binding peptide
  MOD_RES (4)..(5): Xaa is C or S
  MOD_RES (19)..(20)..(21)..(22)..(23): Xaa is A or G
  MOD_RES (24)..(25)..(26)..(27): Xaa is A or G or is absent

SEQ ID NO: 40278 - protein, 35 aa, Artificial Sequence; identical to SEQ ID NO: 16428
  GFR-binding peptide
  MOD_RES (3)..(35): Xaa is C or S

SEQ ID NO: 40279 - protein, 35 aa, Artificial Sequence; identical to SEQ ID NO: 16429
  GFR-binding peptide
  MOD_RES (34)..(34): Xaa is C or S
  MOD_RES (14)..(15)..(16)..(17)..(18): Xaa is A or G
  MOD_RES (19)..(20)..(21)..(22): Xaa is A or G or is absent

SEQ ID NO: 40280 - protein, 36 aa, Artificial Sequence
  GFR-binding peptide
  MOD_RES (3)..(4): Xaa is C or S
  MOD_RES (18)..(19)..(20)..(21)..(22): Xaa is A or G
  MOD_RES (23)..(24)..(25)..(26): Xaa is A or G or is absent
SPXXVSQDLEPLTILYYXXXXXXXXXEQLSNMIVKS

SEQ ID NO: 40281 - protein, 35 aa, Artificial Sequence; identical to SEQ ID NO: 9157
  GFR-binding peptide
  MOD_RES (34)..(34): Xaa is C or S
  MOD_RES (14)..(15)..(16)..(17)..(18): Xaa is A or G
  MOD_RES (19)..(20)..(21)..(22): Xaa is A or G or is absent

SEQ ID NO: 40282 - protein, 42 aa, Artificial Sequence; identical to SEQ ID NO: 16431
  GFR-binding peptide
  MOD_RES (7)..(41): Xaa is C or S
  MOD_RES (21)..(22)..(23)..(24)..(25): Xaa is A or G
  MOD_RES (26)..(27)..(28)..(29): Xaa is A or G or is absent

SEQ ID NO: 40283 - protein, 40 aa, Artificial Sequence; identical to SEQ ID NO: 16432
  GFR-binding peptide
  MOD_RES (5)..(6)..(38)..(40): Xaa is C or S

SEQ ID NO: 40284 - protein, 34 aa, Artificial Sequence; identical to SEQ ID NO: 14663
  GFR-binding peptide
  MOD_RES (32)..(34): Xaa is C or S

SEQ ID NO: 40285 - protein, 38 aa, Artificial Sequence; identical to SEQ ID NO: 16433
  GFR-binding peptide
  MOD_RES (6)..(7): Xaa is C or S

SEQ ID NO: 40286 - protein, 39 aa, Artificial Sequence; identical to SEQ ID NO: 16434
  GFR-binding peptide
  MOD_RES (6)..(7): Xaa is C or S
  MOD_RES (21)..(22)..(23)..(24)..(25): Xaa is A or G
  MOD_RES (26)..(27)..(28)..(29): Xaa is A or G or is absent

SEQ ID NO: 40287 - protein, 39 aa, Artificial Sequence; identical to SEQ ID NO: 7359
  GFR-binding peptide
  MOD_RES (6)..(7)..(38): Xaa is C or S

SEQ ID NO: 40288 - protein, 41 aa, Artificial Sequence; identical to SEQ ID NO: 14665
  GFR-binding peptide
  MOD_RES (6)..(7)..(39)..(41): Xaa is C or S

SEQ ID NO: 40289 - protein, 40 aa, Artificial Sequence; identical to SEQ ID NO: 16435
  GFR-binding peptide
  MOD_RES (5)..(6)..(40): Xaa is C or S
  MOD_RES (20)..(21)..(22)..(23)..(24): Xaa is A or G
  MOD_RES (25)..(26)..(27)..(28): Xaa is A or G or is absent

SEQ ID NO: 40290 - protein, 40 aa, Artificial Sequence; identical to SEQ ID NO: 9161
  GFR-binding peptide
  MOD_RES (4)..(5)..(38)..(40): Xaa is C or S
  MOD_RES (19)..(20)..(21)..(22)..(23): Xaa is A or G
  MOD_RES (24)..(25)..(26)..(27): Xaa is A or G or is absent

SEQ ID NO: 40291 - protein, 30 aa, Artificial Sequence; identical to SEQ ID NO: 14666
  GFR-binding peptide

SEQ ID NO: 40292 - protein, 34 aa, Artificial Sequence; identical to SEQ ID NO: 16437
  GFR-binding peptide
  MOD_RES (1)..(1): Xaa is C or S
  MOD_RES (15)..(16)..(17)..(18)..(19): Xaa is A or G
  MOD_RES (20)..(21)..(22)..(23): Xaa is A or G or is absent

SEQ ID NO: 40293 - protein, 35 aa, Artificial Sequence; identical to SEQ ID NO: 7365
  GFR-binding peptide
  MOD_RES (32)..(34): Xaa is C or S

SEQ ID NO: 40294 - protein, 36 aa, Artificial Sequence; identical to SEQ ID NO: 7366
  GFR-binding peptide
  MOD_RES (5)..(6): Xaa is C or S

SEQ ID NO: 40295 - protein, 33 aa, Artificial Sequence; identical to SEQ ID NO: 14670
  GFR-binding peptide
  MOD_RES (1)..(2): Xaa is C or S

SEQ ID NO: 40296 - protein, 37 aa, Artificial Sequence; identical to SEQ ID NO: 16440
  GFR-binding peptide
  MOD_RES (4)..(5)..(37): Xaa is C or S

SEQ ID NO: 40297 - protein, 31 aa, Artificial Sequence; identical to SEQ ID NO: 16441
  GFR-binding peptide

SEQ ID NO: 40298 - protein, 36 aa, Artificial Sequence; identical to SEQ ID NO: 14671
  GFR-binding peptide
  MOD_RES (3)..(35): Xaa is C or S

SEQ ID NO: 40299 - protein, 38 aa, Artificial Sequence; identical to SEQ ID NO: 16443
  GFR-binding peptide
  MOD_RES (5)..(6)..(38): Xaa is C or S

SEQ ID NO: 40300 - protein, 42 aa, Artificial Sequence; identical to SEQ ID NO: 16444
  GFR-binding peptide
  MOD_RES (6)..(7)..(39)..(41): Xaa is C or S

SEQ ID NO: 40301 - protein, 35 aa, Artificial Sequence; identical to SEQ ID NO: 16445
  GFR-binding peptide
  MOD_RES (4)..(5): Xaa is C or S

SEQ ID NO: 40302 - protein, 33 aa, Artificial Sequence; identical to SEQ ID NO: 16446
  GFR-binding peptide
  MOD_RES (2)..(3): Xaa is C or S

SEQ ID NO: 40303 - protein, 36 aa, Artificial Sequence; identical to SEQ ID NO: 16447
  GFR-binding peptide
  MOD_RES (2)..(3)..(35): Xaa is C or S

SEQ ID NO: 40304 - protein, 38 aa, Artificial Sequence; identical to SEQ ID NO: 16448
  GFR-binding peptide
  MOD_RES (4)..(5)..(38): Xaa is C or S
  MOD_RES (19)..(20)..(21)..(22)..(23): Xaa is A or G
  MOD_RES (24)..(25)..(26)..(27): Xaa is A or G or is absent

SEQ ID NO: 40305 - protein, 36 aa, Artificial Sequence; identical to SEQ ID NO: 14672
  GFR-binding peptide
  MOD_RES (1)..(2)..(36): Xaa is C or S
  MOD_RES (16)..(17)..(18)..(19)..(20): Xaa is A or G
  MOD_RES (21)..(22)..(23)..(24): Xaa is A or G or is absent

SEQ ID NO: 40306 - protein, 35 aa, Artificial Sequence; identical to SEQ ID NO: 14673
  GFR-binding peptide
  MOD_RES (1)..(33)..(35): Xaa is C or S

SEQ ID NO: 40307 - protein, 43 aa, Artificial Sequence; identical to SEQ ID NO: 14674
  GFR-binding peptide
  MOD_RES (5)..(6)..(40)..(42): Xaa is C or S
  MOD_RES (20)..(21)..(22)..(23)..(24): Xaa is A or G
  MOD_RES (25)..(26)..(27)..(28): Xaa is A or G or is absent

SEQ ID NO: 40308 - protein, 34 aa, Artificial Sequence; identical to SEQ ID NO: 16450
  GFR-binding peptide
  MOD_RES (1)..(1): Xaa is C or S
  MOD_RES (15)..(16)..(17)..(18)..(19): Xaa is A or G
  MOD_RES (20)..(21)..(22)..(23): Xaa is A or G or is absent

SEQ ID NO: 40309 - protein, 30 aa, Artificial Sequence; identical to SEQ ID NO: 7373
  GFR-binding peptide

SEQ ID NO: 40310 - protein, 35 aa, Artificial Sequence; identical to SEQ ID NO: 16451
  GFR-binding peptide
  MOD_RES (1)..(2): Xaa is C or S
  MOD_RES (16)..(17)..(18)..(19)..(20): Xaa is A or G
  MOD_RES (21)..(22)..(23)..(24): Xaa is A or G or is absent

SEQ ID NO: 40311 - protein, 36 aa, Artificial Sequence; identical to SEQ ID NO: 14676
  GFR-binding peptide
  MOD_RES (2)..(3)..(35): Xaa is C or S

SEQ ID NO: 40312 - protein, 36 aa, Artificial Sequence; identical to SEQ ID NO: 16452
  GFR-binding peptide
  MOD_RES (2)..(3)..(35): Xaa is C or S

SEQ ID NO: 40313 - protein, 40 aa, Artificial Sequence; identical to SEQ ID NO: 14677
  GFR-binding peptide
  MOD_RES (6)..(7)..(39): Xaa is C or S

SEQ ID NO: 40314 - protein, 36 aa, Artificial Sequence; identical to SEQ ID NO: 16453
  GFR-binding peptide
  MOD_RES (3)..(4): Xaa is C or S
  MOD_RES (18)..(19)..(20)..(21)..(22): Xaa is A or G
  MOD_RES (23)..(24)..(25)..(26): Xaa is A or G or is absent

SEQ ID NO: 40315 - protein, 39 aa, Artificial Sequence; identical to SEQ ID NO: 14678
  GFR-binding peptide
  MOD_RES (1)..(2)..(36)..(38): Xaa is C or S
  MOD_RES (16)..(17)..(18)..(19)..(20): Xaa is A or G
  MOD_RES (21)..(22)..(23)..(24): Xaa is A or G or is absent

SEQ ID NO: 40316 - protein, 38 aa, Artificial Sequence; identical to SEQ ID NO: 7375
  GFR-binding peptide
  MOD_RES (3)..(4)..(35)..(37): Xaa is C or S

SEQ ID NO: 40317 - protein, 32 aa, Artificial Sequence; identical to SEQ ID NO: 14680
  GFR-binding peptide
  MOD_RES (31)..(31): Xaa is C or S

SEQ ID NO: 40318 - protein, 36 aa, Artificial Sequence; identical to SEQ ID NO: 16454
  GFR-binding peptide
  MOD_RES (5)..(5): Xaa is C or S

SEQ ID NO: 40319 - protein, 40 aa, Artificial Sequence; identical to SEQ ID NO: 16455
  GFR-binding peptide
  MOD_RES (5)..(6)..(37)..(39): Xaa is C or S

SEQ ID NO: 40320 - protein, 40 aa, Artificial Sequence; identical to SEQ ID NO: 16456
  GFR-binding peptide
  MOD_RES (6)..(7)..(39): Xaa is C or S

SEQ ID NO: 40321 - protein, 40 aa, Artificial Sequence; identical to SEQ ID NO: 7378
  GFR-binding peptide
  MOD_RES (4)..(5)..(39): Xaa is C or S
  MOD_RES (19)..(20)..(21)..(22)..(23): Xaa is A or G
  MOD_RES (24)..(25)..(26)..(27): Xaa is A or G or is absent

SEQ ID NO: 40322 - protein, 34 aa, Artificial Sequence; identical to SEQ ID NO: 16457
  GFR-binding peptide
  MOD_RES (1)..(2): Xaa is C or S
  MOD_RES (16)..(17)..(18)..(19)..(20): Xaa is A or G
  MOD_RES (21)..(22)..(23)..(24): Xaa is A or G or is absent

SEQ ID NO: 40323 - protein, 37 aa, Artificial Sequence; identical to SEQ ID NO: 14683
  GFR-binding peptide
  MOD_RES (7)..(7): Xaa is C or S

SEQ ID NO: 40324 - protein, 34 aa, Artificial Sequence; identical to SEQ ID NO: 16458
  GFR-binding peptide
  MOD_RES (2)..(3): Xaa is C or S

SEQ ID NO: 40325 - protein, 38 aa, Artificial Sequence; identical to SEQ ID NO: 16459
  GFR-binding peptide
  MOD_RES (4)..(5)..(37): Xaa is C or S

SEQ ID NO: 40326 - protein, 37 aa, Artificial Sequence; identical to SEQ ID NO: 14684
  GFR-binding peptide
  MOD_RES (3)..(4)..(36): Xaa is C or S

SEQ ID NO: 40327 - protein, 37 aa, Artificial Sequence; identical to SEQ ID NO: 16460
  GFR-binding peptide
  MOD_RES (1)..(2)..(34)..(36): Xaa is C or S

SEQ ID NO: 40328 - protein, 36 aa, Artificial Sequence; identical to SEQ ID NO: 7390
  GFR-binding peptide
  MOD_RES (1)..(34)..(36): Xaa is C or S
  MOD_RES (15)..(16)..(17)..(18)..(19): Xaa is A or G
  MOD_RES (20)..(21)..(22)..(23): Xaa is A or G or is absent

SEQ ID NO: 40329 - protein, 31 aa, Artificial Sequence; identical to SEQ ID NO: 16461
  GFR-binding peptide

SEQ ID NO: 40330 - protein, 43 aa, Artificial Sequence; identical to SEQ ID NO: 16462
  GFR-binding peptide
  MOD_RES (6)..(7)..(40)..(42): Xaa is C or S
  MOD_RES (21)..(22)..(23)..(24)..(25): Xaa is A or G
  MOD_RES (26)..(27)..(28)..(29): Xaa is A or G or is absent

SEQ ID NO: 40331 - protein, 39 aa, Artificial Sequence; identical to SEQ ID NO: 16463
  GFR-binding peptide
  MOD_RES (6)..(7): Xaa is C or S
  MOD_RES (21)..(22)..(23)..(24)..(25): Xaa is A or G
  MOD_RES (26)..(27)..(28)..(29): Xaa is A or G or is absent

SEQ ID NO: 40332 - protein, 41 aa, Artificial Sequence; identical to SEQ ID NO: 14686
  GFR-binding peptide
  MOD_RES (6)..(7)..(40): Xaa is C or S
  MOD_RES (21)..(22)..(23)..(24)..(25): Xaa is A or G
  MOD_RES (26)..(27)..(28)..(29): Xaa is A or G or is absent

SEQ ID NO: 40333 - protein, 39 aa, Artificial Sequence; identical to SEQ ID NO: 16464
  GFR-binding peptide
  MOD_RES (6)..(7): Xaa is C or S
  MOD_RES (21)..(22)..(23)..(24)..(25): Xaa is A or G
  MOD_RES (26)..(27)..(28)..(29): Xaa is A or G or is absent

SEQ ID NO: 40334 - protein, 37 aa, Artificial Sequence; identical to SEQ ID NO: 14687
  GFR-binding peptide
  MOD_RES (3)..(4)..(36): Xaa is C or S

SEQ ID NO: 40335 - protein, 40 aa, Artificial Sequence; identical to SEQ ID NO: 14688
  GFR-binding peptide
  MOD_RES (4)..(5)..(38)..(40): Xaa is C or S
  MOD_RES (19)..(20)..(21)..(22)..(23): Xaa is A or G
  MOD_RES (24)..(25)..(26)..(27): Xaa is A or G or is absent

SEQ ID NO: 40336 - protein, 37 aa, Artificial Sequence; identical to SEQ ID NO: 14689
  GFR-binding peptide
  MOD_RES (2)..(3)..(34)..(36): Xaa is C or S

SEQ ID NO: 40337 - protein, 34 aa, Artificial Sequence; identical to SEQ ID NO: 14691
  GFR-binding peptide
  MOD_RES (1)..(1): Xaa is C or S
  MOD_RES (15)..(16)..(17)..(18)..(19): Xaa is A or G
  MOD_RES (20)..(21)..(22)..(23): Xaa is A or G or is absent

SEQ ID NO: 40338 - protein, 37 aa, Artificial Sequence; identical to SEQ ID NO: 16469
  GFR-binding peptide
  MOD_RES (5)..(6): Xaa is C or S

SEQ ID NO: 40339 - protein, 35 aa, Artificial Sequence; identical to SEQ ID NO: 14693
  GFR-binding peptide
  MOD_RES (4)..(5): Xaa is C or S

SEQ ID NO: 40340 - protein, 37 aa, Artificial Sequence; identical to SEQ ID NO: 14694
  GFR-binding peptide
  MOD_RES (2)..(34)..(36): Xaa is C or S

SEQ ID NO: 40341 - protein, 31 aa, Artificial Sequence; identical to SEQ ID NO: 16470
  GFR-binding peptide
  MOD_RES (1)..(1): Xaa is C or S

SEQ ID NO: 40342 - protein, 38 aa, Artificial Sequence; identical to SEQ ID NO: 16471
  GFR-binding peptide
  MOD_RES (1)..(2)..(36)..(38): Xaa is C or S
  MOD_RES (16)..(17)..(18)..(19)..(20): Xaa is A or G
  MOD_RES (21)..(22)..(23)..(24): Xaa is A or G or is absent

SEQ ID NO: 40343 - protein, 41 aa, Artificial Sequence; identical to SEQ ID NO: 14695
  GFR-binding peptide
  MOD_RES (4)..(5)..(38)..(40): Xaa is C or S
  MOD_RES (19)..(20)..(21)..(22)..(23): Xaa is A or G
  MOD_RES (24)..(25)..(26)..(27): Xaa is A or G or is absent

SEQ ID NO: 40344 - protein, 36 aa, Artificial Sequence; identical to SEQ ID NO: 16472
  GFR-binding peptide
  MOD_RES (1)..(2)..(34)..(36): Xaa is C or S

SEQ ID NO: 40345 - protein, 41 aa, Artificial Sequence; identical to SEQ ID NO: 16473
  GFR-binding peptide
  MOD_RES (5)..(39)..(41): Xaa is C or S
  MOD_RES (19)..(20)..(21)..(22)..(23): Xaa is A or G
  MOD_RES (24)..(25)..(26)..(27): Xaa is A or G or is absent

SEQ ID NO: 40346 - protein, 38 aa, Artificial Sequence; identical to SEQ ID NO: 14696
  GFR-binding peptide
  MOD_RES (4)..(5)..(38): Xaa is C or S
  MOD_RES (19)..(20)..(21)..(22)..(23): Xaa is A or G
  MOD_RES (24)..(25)..(26)..(27): Xaa is A or G or is absent

SEQ ID NO: 40347 - protein, 37 aa, Artificial Sequence; identical to SEQ ID NO: 14697
  GFR-binding peptide
  MOD_RES (2)..(3)..(37): Xaa is C or S
  MOD_RES (17)..(18)..(19)..(20)..(21): Xaa is A or G
  MOD_RES (22)..(23)..(24)..(25): Xaa is A or G or is absent

SEQ ID NO: 40348 - protein, 40 aa, Artificial Sequence; identical to SEQ ID NO: 9195
  GFR-binding peptide
  MOD_RES (3)..(4)..(38)..(40): Xaa is C or S
  MOD_RES (18)..(19)..(20)..(21)..(22): Xaa is A or G
  MOD_RES (23)..(24)..(25)..(26): Xaa is A or G or is absent

SEQ ID NO: 40349 - protein, 40 aa, Artificial Sequence; identical to SEQ ID NO: 14698
  GFR-binding peptide
  MOD_RES (6)..(7): Xaa is C or S
  MOD_RES (21)..(22)..(23)..(24)..(25): Xaa is A or G
  MOD_RES (26)..(27)..(28)..(29): Xaa is A or G or is absent

SEQ ID NO: 40350 - protein, 39 aa, Artificial Sequence; identical to SEQ ID NO: 7408
  GFR-binding peptide
  MOD_RES (5)..(6)..(37)..(39): Xaa is C or S

SEQ ID NO: 40351 - protein, 34 aa, Artificial Sequence; identical to SEQ ID NO: 14700
  GFR-binding peptide
  MOD_RES (1)..(33): Xaa is C or S

SEQ ID NO: 40352 - protein, 36 aa, Artificial Sequence; identical to SEQ ID NO: 14701
  GFR-binding peptide
  MOD_RES (1)..(2)..(36): Xaa is C or S
  MOD_RES (16)..(17)..(18)..(19)..(20): Xaa is A or G
  MOD_RES (21)..(22)..(23)..(24): Xaa is A or G or is absent

SEQ ID NO: 40353 - protein, 40 aa, Artificial Sequence; identical to SEQ ID NO: 14702
  GFR-binding peptide
  MOD_RES (6)..(7): Xaa is C or S
  MOD_RES (21)..(22)..(23)..(24)..(25): Xaa is A or G
  MOD_RES (26)..(27)..(28)..(29): Xaa is A or G or is absent

SEQ ID NO: 40354 - protein, 34 aa, Artificial Sequence; identical to SEQ ID NO: 9202
  GFR-binding peptide
  MOD_RES (31)..(33): Xaa is C or S

SEQ ID NO: 40355 - protein, 40 aa, Artificial Sequence; identical to SEQ ID NO: 14703
  GFR-binding peptide
  MOD_RES (7)..(39): Xaa is C or S

SEQ ID NO: 40356 - protein, 42 aa, Artificial Sequence; identical to SEQ ID NO: 16478
  GFR-binding peptide
  MOD_RES (5)..(6)..(40)..(42): Xaa is C or S
  MOD_RES (20)..(21)..(22)..(23)..(24): Xaa is A or G
  MOD_RES (25)..(26)..(27)..(28): Xaa is A or G or is absent

SEQ ID NO: 40357 - protein, 37 aa, Artificial Sequence; identical to SEQ ID NO: 14704
  GFR-binding peptide
  MOD_RES (34)..(36): Xaa is C or S
  MOD_RES (14)..(15)..(16)..(17)..(18): Xaa is A or G
  MOD_RES (19)..(20)..(21)..(22): Xaa is A or G or is absent

SEQ ID NO: 40358 - protein, 39 aa, Artificial Sequence; identical to SEQ ID NO: 14705
  GFR-binding peptide
  MOD_RES (6)..(7)..(39): Xaa is C or S

SEQ ID NO: 40359 - protein, 34 aa, Artificial Sequence; identical to SEQ ID NO: 16479
  GFR-binding peptide
  MOD_RES (2)..(3)..(34): Xaa is C or S

SEQ ID NO: 40360 - protein, 37 aa, Artificial Sequence; identical to SEQ ID NO: 14706
  GFR-binding peptide
  MOD_RES (1)..(2)..(36): Xaa is C or S
  MOD_RES (16)..(17)..(18)..(19)..(20): Xaa is A or G
  MOD_RES (21)..(22)..(23)..(24): Xaa is A or G or is absent

SEQ ID NO: 40361 - protein, 37 aa, Artificial Sequence; identical to SEQ ID NO: 14708
  GFR-binding peptide
  MOD_RES (3)..(4)..(36): Xaa is C or S

SEQ ID NO: 40362 - protein, 34 aa, Artificial Sequence; identical to SEQ ID NO: 7413
  GFR-binding peptide
  MOD_RES (3)..(4): Xaa is C or S

SEQ ID NO: 40363 - protein, 38 aa, Artificial Sequence; identical to SEQ ID NO: 16480
  GFR-binding peptide
  MOD_RES (3)..(4)..(37): Xaa is C or S
  MOD_RES (18)..(19)..(20)..(21)..(22): Xaa is A or G
  MOD_RES (23)..(24)..(25)..(26): Xaa is A or G or is absent

SEQ ID NO: 40364 - protein, 37 aa, Artificial Sequence; identical to SEQ ID NO: 16481
  GFR-binding peptide
  MOD_RES (6)..(7): Xaa is C or S

SEQ ID NO: 40365 - protein, 39 aa, Artificial Sequence; identical to SEQ ID NO: 14710
  GFR-binding peptide
  MOD_RES (3)..(4)..(38): Xaa is C or S
  MOD_RES (18)..(19)..(20)..(21)..(22): Xaa is A or G
  MOD_RES (23)..(24)..(25)..(26): Xaa is A or G or is absent

SEQ ID NO: 40366 - protein, 33 aa, Artificial Sequence; identical to SEQ ID NO: 16482
  GFR-binding peptide
  MOD_RES (1)..(1): Xaa is C or S
  MOD_RES (15)..(16)..(17)..(18)..(19): Xaa is A or G
  MOD_RES (20)..(21)..(22)..(23): Xaa is A or G or is absent

SEQ ID NO: 40367 - protein, 39 aa, Artificial Sequence; identical to SEQ ID NO: 16483
  GFR-binding peptide
  MOD_RES (5)..(6)..(39): Xaa is C or S
  MOD_RES (20)..(21)..(22)..(23)..(24): Xaa is A or G
  MOD_RES (25)..(26)..(27)..(28): Xaa is A or G or is absent

SEQ ID NO: 40368 - protein, 36 aa, Artificial Sequence; identical to SEQ ID NO: 14711
  GFR-binding peptide
  MOD_RES (5)..(6): Xaa is C or S

SEQ ID NO: 40369 - protein, 36 aa, Artificial Sequence; identical to SEQ ID NO: 16484
  GFR-binding peptide
  MOD_RES (1)..(35): Xaa is C or S
  MOD_RES (15)..(16)..(17)..(18)..(19): Xaa is A or G
  MOD_RES (20)..(21)..(22)..(23): Xaa is A or G or is absent

SEQ ID NO: 40370 - protein, 37 aa, Artificial Sequence; identical to SEQ ID NO: 14712
  GFR-binding peptide
  MOD_RES (1)..(2)..(34)..(36): Xaa is C or S

SEQ ID NO: 40371 - protein, 35 aa, Artificial Sequence; identical to SEQ ID NO: 16485
  GFR-binding peptide
  MOD_RES (2)..(3): Xaa is C or S
  MOD_RES (17)..(18)..(19)..(20)..(21): Xaa is A or G
  MOD_RES (22)..(23)..(24)..(25): Xaa is A or G or is absent

SEQ ID NO: 40372 - protein, 35 aa, Artificial Sequence; identical to SEQ ID NO: 14713
  GFR-binding peptide
  MOD_RES (2)..(3): Xaa is C or S
  MOD_RES (17)..(18)..(19)..(20)..(21): Xaa is A or G
  MOD_RES (22)..(23)..(24)..(25): Xaa is A or G or is absent

SEQ ID NO: 40373 - protein, 37 aa, Artificial Sequence; identical to SEQ ID NO: 14715
  GFR-binding peptide
  MOD_RES (2)..(3)..(37): Xaa is C or S
  MOD_RES (17)..(18)..(19)..(20)..(21): Xaa is A or G
  MOD_RES (22)..(23)..(24)..(25): Xaa is A or G or is absent

SEQ ID NO: 40374 - protein, 37 aa, Artificial Sequence; identical to SEQ ID NO: 16486
  GFR-binding peptide
  MOD_RES (1)..(2)..(34)..(36): Xaa is C or S

SEQ ID NO: 40375 - protein, 36 aa, Artificial Sequence; identical to SEQ ID NO: 9213
  GFR-binding peptide
  MOD_RES (1)..(35): Xaa is C or S
  MOD_RES (15)..(16)..(17)..(18)..(19): Xaa is A or G
  MOD_RES (20)..(21)..(22)..(23): Xaa is A or G or is absent

SEQ ID NO: 40376 - protein, 30 aa, Artificial Sequence; identical to SEQ ID NO: 14717
  GFR-binding peptide

SEQ ID NO: 40377 - protein, 38 aa, Artificial Sequence; identical to SEQ ID NO: 14718
  GFR-binding peptide
  MOD_RES (1)..(2)..(36)..(38): Xaa is C or S
  MOD_RES (16)..(17)..(18)..(19)..(20): Xaa is A or G
  MOD_RES (21)..(22)..(23)..(24): Xaa is A or G or is absent

SEQ ID NO: 40378 - protein, 39 aa, Artificial Sequence; identical to SEQ ID NO: 14719
  GFR-binding peptide
  MOD_RES (3)..(4)..(36)..(38): Xaa is C or S

SEQ ID NO: 40379 - protein, 39 aa, Artificial Sequence; identical to SEQ ID NO: 14720
  GFR-binding peptide
  MOD_RES (6)..(7): Xaa is C or S
  MOD_RES (21)..(22)..(23)..(24)..(25): Xaa is A or G
  MOD_RES (26)..(27)..(28)..(29): Xaa is A or G or is absent

SEQ ID NO: 40380 - protein, 36 aa, Artificial Sequence; identical to SEQ ID NO: 16488
  GFR-binding peptide
  MOD_RES (1)..(2)..(34)..(36): Xaa is C or S

SEQ ID NO: 40381 - protein, 37 aa, Artificial Sequence; identical to SEQ ID NO: 16489
  GFR-binding peptide
  MOD_RES (1)..(2)..(36): Xaa is C or S
  MOD_RES (16)..(17)..(18)..(19)..(20): Xaa is A or G
  MOD_RES (21)..(22)..(23)..(24): Xaa is A or G or is absent

SEQ ID NO: 40382 - protein, 41 aa, Artificial Sequence; identical to SEQ ID NO: 14721
  GFR-binding peptide
  MOD_RES (6)..(7)..(40): Xaa is C or S
  MOD_RES (21)..(22)..(23)..(24)..(25): Xaa is A or G
  MOD_RES (26)..(27)..(28)..(29): Xaa is A or G or is absent

SEQ ID NO: 40383 - protein, 33 aa, Artificial Sequence; identical to SEQ ID NO: 7423
  GFR-binding peptide
  MOD_RES (1)..(33): Xaa is C or S

SEQ ID NO: 40384 - protein, 38 aa, Artificial Sequence; identical to SEQ ID NO: 16490
  GFR-binding peptide
  MOD_RES (5)..(6)..(37): Xaa is C or S

SEQ ID NO: 40385 - protein, 38 aa, Artificial Sequence; identical to SEQ ID NO: 16491
  GFR-binding peptide
  MOD_RES (5)..(6)..(38): Xaa is C or S

SEQ ID NO: 40386 - protein, 43 aa, Artificial Sequence; identical to SEQ ID NO: 14723
  GFR-binding peptide
  MOD_RES (5)..(6)..(40)..(42): Xaa is C or S
  MOD_RES (20)..(21)..(22)..(23)..(24): Xaa is A or G
  MOD_RES (25)..(26)..(27)..(28): Xaa is A or G or is absent

SEQ ID NO: 40387 - protein, 43 aa, Artificial Sequence; identical to SEQ ID NO: 7425
  GFR-binding peptide
  MOD_RES (6)..(7)..(41)..(43): Xaa is C or S
  MOD_RES (21)..(22)..(23)..(24)..(25): Xaa is A or G
  MOD_RES (26)..(27)..(28)..(29): Xaa is A or G or is absent

SEQ ID NO: 40388 - protein, 42 aa, Artificial Sequence; identical to SEQ ID NO: 14725
  GFR-binding peptide
  MOD_RES (6)..(7)..(39)..(41): Xaa is C or S

SEQ ID NO: 40389 - protein, 39 aa, Artificial Sequence; identical to SEQ ID NO: 16493
  GFR-binding peptide
  MOD_RES (2)..(3)..(36)..(38): Xaa is C or S
  MOD_RES (17)..(18)..(19)..(20)..(21): Xaa is A or G
  MOD_RES (22)..(23)..(24)..(25): Xaa is A or G or is absent

SEQ ID NO: 40390 - protein, 34 aa, Artificial Sequence; identical to SEQ ID NO: 16494
  GFR-binding peptide
  MOD_RES (1)..(33): Xaa is C or S

SEQ ID NO: 40391 - protein, 37 aa, Artificial Sequence; identical to SEQ ID NO: 16495
  GFR-binding peptide
  MOD_RES (5)..(6)..(37): Xaa is C or S

SEQ ID NO: 40392 - protein, 38 aa, Artificial Sequence; identical to SEQ ID NO: 7427
  GFR-binding peptide
  MOD_RES (5)..(6): Xaa is C or S
  MOD_RES (20)..(21)..(22)..(23)..(24): Xaa is A or G
  MOD_RES (25)..(26)..(27)..(28): Xaa is A or G or is absent

SEQ ID NO: 40393 - protein, 34 aa, Artificial Sequence; identical to SEQ ID NO: 7428
  GFR-binding peptide
  MOD_RES (1)..(2)..(34): Xaa is C or S

SEQ ID NO: 40394 - protein, 37 aa, Artificial Sequence; identical to SEQ ID NO: 14728
  GFR-binding peptide
  MOD_RES (3)..(4)..(36): Xaa is C or S

SEQ ID NO: 40395 - protein, 34 aa, Artificial Sequence; identical to SEQ ID NO: 14729
  GFR-binding peptide
  MOD_RES (1)..(2)..(33): Xaa is C or S

SEQ ID NO: 40396 - protein, 36 aa, Artificial Sequence; identical to SEQ ID NO: 16498
  GFR-binding peptide
  MOD_RES (2)..(3): Xaa is C or S
  MOD_RES (17)..(18)..(19)..(20)..(21): Xaa is A or G
  MOD_RES (22)..(23)..(24)..(25): Xaa is A or G or is absent

SEQ ID NO: 40397 - protein, 38 aa, Artificial Sequence; identical to SEQ ID NO: 14730
  GFR-binding peptide
  MOD_RES (5)..(6)..(37): Xaa is C or S

SEQ ID NO: 40398 - protein, 36 aa, Artificial Sequence; identical to SEQ ID NO: 9223
  GFR-binding peptide
  MOD_RES (2)..(3): Xaa is C or S
  MOD_RES (17)..(18)..(19)..(20)..(21): Xaa is A or G
  MOD_RES (22)..(23)..(24)..(25): Xaa is A or G or is absent

SEQ ID NO: 40399 - protein, 42 aa, Artificial Sequence; identical to SEQ ID NO: 9225
  GFR-binding peptide
  MOD_RES (5)..(6)..(40)..(42): Xaa is C or S
  MOD_RES (20)..(21)..(22)..(23)..(24): Xaa is A or G
  MOD_RES (25)..(26)..(27)..(28): Xaa is A or G or is absent

SEQ ID NO: 40400 - protein, 37 aa, Artificial Sequence; identical to SEQ ID NO: 14731
  GFR-binding peptide
  MOD_RES (5)..(5): Xaa is C or S
  MOD_RES (19)..(20)..(21)..(22)..(23): Xaa is A or G
  MOD_RES (24)..(25)..(26)..(27): Xaa is A or G or is absent

SEQ ID NO: 40401 - protein, 34 aa, Artificial Sequence; identical to SEQ ID NO: 14732
  GFR-binding peptide
  MOD_RES (2)..(3): Xaa is C or S

SEQ ID NO: 40402 - protein, 34 aa, Artificial Sequence; identical to SEQ ID NO: 16501
  GFR-binding peptide
  MOD_RES (1)..(2): Xaa is C or S
  MOD_RES (16)..(17)..(18)..(19)..(20): Xaa is A or G
  MOD_RES (21)..(22)..(23)..(24): Xaa is A or G or is absent

SEQ ID NO: 40403 - protein, 38 aa, Artificial Sequence; identical to SEQ ID NO: 9228
  GFR-binding peptide
  MOD_RES (1)..(2)..(36)..(38): Xaa is C or S
  MOD_RES (16)..(17)..(18)..(19)..(20): Xaa is A or G
  MOD_RES (21)..(22)..(23)..(24): Xaa is A or G or is absent

SEQ ID NO: 40404 - protein, 34 aa, Artificial Sequence; identical to SEQ ID NO: 16503
  GFR-binding peptide
  MOD_RES (3)..(4): Xaa is C or S

SEQ ID NO: 40405 - protein, 36 aa, Artificial Sequence; identical to SEQ ID NO: 16504
  GFR-binding peptide
  MOD_RES (2)..(3): Xaa is C or S
  MOD_RES (17)..(18)..(19)..(20)..(21): Xaa is A or G
  MOD_RES (22)..(23)..(24)..(25): Xaa is A or G or is absent

SEQ ID NO: 40406 - protein, 35 aa, Artificial Sequence; identical to SEQ ID NO: 7434
  GFR-binding peptide
  MOD_RES (1)..(34): Xaa is C or S
  MOD_RES (15)..(16)..(17)..(18)..(19): Xaa is A or G
  MOD_RES (20)..(21)..(22)..(23): Xaa is A or G or is absent

SEQ ID NO: 40407 - protein, 37 aa, Artificial Sequence; identical to SEQ ID NO: 14734
  GFR-binding peptide
  MOD_RES (4)..(5)..(37): Xaa is C or S

SEQ ID NO: 40408 - protein, 36 aa, Artificial Sequence; identical to SEQ ID NO: 7436
  GFR-binding peptide
  MOD_RES (1)..(2)..(33)..(35): Xaa is C or S

SEQ ID NO: 40409 - protein, 36 aa, Artificial Sequence; identical to SEQ ID NO: 16505
  GFR-binding peptide
  MOD_RES (34)..(36): Xaa is C or S
  MOD_RES (14)..(15)..(16)..(17)..(18): Xaa is A or G
  MOD_RES (19)..(20)..(21)..(22): Xaa is A or G or is absent

SEQ ID NO: 40410 - protein, 39 aa, Artificial Sequence; identical to SEQ ID NO: 16506
  GFR-binding peptide
  MOD_RES (3)..(4)..(38): Xaa is C or S
  MOD_RES (18)..(19)..(20)..(21)..(22): Xaa is A or G
  MOD_RES (23)..(24)..(25)..(26): Xaa is A or G or is absent

SEQ ID NO: 40411 - protein, 43 aa, Artificial Sequence; identical to SEQ ID NO: 16507
  GFR-binding peptide
  MOD_RES (6)..(40)..(42): Xaa is C or S
  MOD_RES (20)..(21)..(22)..(23)..(24): Xaa is A or G
  MOD_RES (25)..(26)..(27)..(28): Xaa is A or G or is absent

SEQ ID NO: 40412 - protein, 36 aa, Artificial Sequence; identical to SEQ ID NO: 7437
  GFR-binding peptide
  MOD_RES (1)..(2)..(36): Xaa is C or S
  MOD_RES (16)..(17)..(18)..(19)..(20): Xaa is A or G
  MOD_RES (21)..(22)..(23)..(24): Xaa is A or G or is absent

SEQ ID NO: 40413 - protein, 42 aa, Artificial Sequence; identical to SEQ ID NO: 14737
  GFR-binding peptide
  MOD_RES (7)..(39)..(41): Xaa is C or S

SEQ ID NO: 40414 - protein, 40 aa, Artificial Sequence; identical to SEQ ID NO: 16508
  GFR-binding peptide
  MOD_RES (5)..(6)..(40): Xaa is C or S
  MOD_RES (20)..(21)..(22)..(23)..(24): Xaa is A or G
  MOD_RES (25)..(26)..(27)..(28): Xaa is A or G or is absent

SEQ ID NO: 40415 - protein, 37 aa, Artificial Sequence; identical to SEQ ID NO: 9235
  GFR-binding peptide
  MOD_RES (2)..(3)..(36): Xaa is C or S
  MOD_RES (17)..(18)..(19)..(20)..(21): Xaa is A or G
  MOD_RES (22)..(23)..(24)..(25): Xaa is A or G or is absent

SEQ ID NO: 40416 - protein, 40 aa, Artificial Sequence; identical to SEQ ID NO: 16511
  GFR-binding peptide
  MOD_RES (4)..(5)..(39): Xaa is C or S
  MOD_RES (19)..(20)..(21)..(22)..(23): Xaa is A or G
  MOD_RES (24)..(25)..(26)..(27): Xaa is A or G or is absent

SEQ ID NO: 40417 - protein, 39 aa, Artificial Sequence; identical to SEQ ID NO: 16512
  GFR-binding peptide
  MOD_RES (5)..(6)..(38): Xaa is C or S

SEQ ID NO: 40418 - protein, 38 aa, Artificial Sequence; identical to SEQ ID NO: 16513
  GFR-binding peptide
  MOD_RES (4)..(5): Xaa is C or S
  MOD_RES (19)..(20)..(21)..(22)..(23): Xaa is A or G
  MOD_RES (24)..(25)..(26)..(27): Xaa is A or G or is absent

SEQ ID NO: 40419 - protein, 37 aa, Artificial Sequence; identical to SEQ ID NO: 9238
  GFR-binding peptide
  MOD_RES (1)..(2)..(35)..(37): Xaa is C or S
  MOD_RES (16)..(17)..(18)..(19)..(20): Xaa is A or G
  MOD_RES (21)..(22)..(23)..(24): Xaa is A or G or is absent

SEQ ID NO: 40420 - protein, 33 aa, Artificial Sequence; identical to SEQ ID NO: 14739
  GFR-binding peptide
  MOD_RES (1)..(2): Xaa is C or S

SEQ ID NO: 40421 - protein, 38 aa, Artificial Sequence; identical to SEQ ID NO: 7441
  GFR-binding peptide
  MOD_RES (5)..(6)..(38): Xaa is C or S

SEQ ID NO: 40422 - protein, 40 aa, Artificial Sequence; identical to SEQ ID NO: 14742
  GFR-binding peptide
  MOD_RES (5)..(6)..(38)..(40): Xaa is C or S

SEQ ID NO: 40423 - protein, 38 aa, Artificial Sequence; identical to SEQ ID NO: 16515
  GFR-binding peptide
  MOD_RES (4)..(5)..(37): Xaa is C or S

SEQ ID NO: 40424 - protein, 39 aa, Artificial Sequence; identical to SEQ ID NO: 9242
  GFR-binding peptide
  MOD_RES (2)..(3)..(37)..(39): Xaa is C or S
  MOD_RES (17)..(18)..(19)..(20)..(21): Xaa is A or G
  MOD_RES (22)..(23)..(24)..(25): Xaa is A or G or is absent

SEQ ID NO: 40425 - protein, 38 aa, Artificial Sequence; identical to SEQ ID NO: 7445
  GFR-binding peptide
  MOD_RES (2)..(3)..(37): Xaa is C or S
  MOD_RES (17)..(18)..(19)..(20)..(21): Xaa is A or G
  MOD_RES (22)..(23)..(24)..(25): Xaa is A or G or is absent

SEQ ID NO: 40426 - protein, 40 aa, Artificial Sequence; identical to SEQ ID NO: 16517
  GFR-binding peptide
  MOD_RES (6)..(40): Xaa is C or S
  MOD_RES (20)..(21)..(22)..(23)..(24): Xaa is A or G
  MOD_RES (25)..(26)..(27)..(28): Xaa is A or G or is absent

SEQ ID NO: 40427 - protein, 31 aa, Artificial Sequence; identical to SEQ ID NO: 14745
  GFR-binding peptide
  MOD_RES (1)..(1): Xaa is C or S

SEQ ID NO: 40428 - protein, 38 aa, Artificial Sequence; identical to SEQ ID NO: 16518
  GFR-binding peptide
  MOD_RES (1)..(2)..(36)..(38): Xaa is C or S
  MOD_RES (16)..(17)..(18)..(19)..(20): Xaa is A or G
  MOD_RES (21)..(22)..(23)..(24): Xaa is A or G or is absent

SEQ ID NO: 40429 - protein, 35 aa, Artificial Sequence; identical to SEQ ID NO: 14746
  GFR-binding peptide
  MOD_RES (2)..(3): Xaa is C or S
  MOD_RES (17)..(18)..(19)..(20)..(21): Xaa is A or G
  MOD_RES (22)..(23)..(24)..(25): Xaa is A or G or is absent

SEQ ID NO: 40430 - protein, 42 aa, Artificial Sequence; identical to SEQ ID NO: 14747
  GFR-binding peptide
  MOD_RES (6)..(40)..(42): Xaa is C or S
  MOD_RES (20)..(21)..(22)..(23)..(24): Xaa is A or G
  MOD_RES (25)..(26)..(27)..(28): Xaa is A or G or is absent

SEQ ID NO: 40431 - protein, 37 aa, Artificial Sequence; identical to SEQ ID NO: 9244
  GFR-binding peptide
  MOD_RES (3)..(4)..(37): Xaa is C or S
  MOD_RES (18)..(19)..(20)..(21)..(22): Xaa is A or G
  MOD_RES (23)..(24)..(25)..(26): Xaa is A or G or is absent

SEQ ID NO: 40432 - protein, 34 aa, Artificial Sequence; identical to SEQ ID NO: 16520
  GFR-binding peptide
  MOD_RES (1)..(33): Xaa is C or S

SEQ ID NO: 40433 - protein, 37 aa, Artificial Sequence; identical to SEQ ID NO: 16521
  GFR-binding peptide
  MOD_RES (2)..(3)..(37): Xaa is C or S
  MOD_RES (17)..(18)..(19)..(20)..(21): Xaa is A or G
  MOD_RES (22)..(23)..(24)..(25): Xaa is A or G or is absent

SEQ ID NO: 40434 - protein, 37 aa, Artificial Sequence; identical to SEQ ID NO: 16522
  GFR-binding peptide
  MOD_RES (1)..(35)..(37): Xaa is C or S
  MOD_RES (15)..(16)..(17)..(18)..(19): Xaa is A or G
  MOD_RES (20)..(21)..(22)..(23): Xaa is A or G or is absent

SEQ ID NO: 40435 - protein, 36 aa, Artificial Sequence; identical to SEQ ID NO: 14748
  GFR-binding peptide
  MOD_RES (3)..(4): Xaa is C or S
  MOD_RES (18)..(19)..(20)..(21)..(22): Xaa is A or G
  MOD_RES (23)..(24)..(25)..(26): Xaa is A or G or is absent

SEQ ID NO: 40436 - protein, 35 aa, Artificial Sequence; identical to SEQ ID NO: 16523
  GFR-binding peptide
  MOD_RES (1)..(34): Xaa is C or S
  MOD_RES (15)..(16)..(17)..(18)..(19): Xaa is A or G
  MOD_RES (20)..(21)..(22)..(23): Xaa is A or G or is absent

SEQ ID NO: 40437 - protein, 35 aa, Artificial Sequence; identical to SEQ ID NO: 16524
  GFR-binding peptide
  MOD_RES (3)..(4): Xaa is C or S

SEQ ID NO: 40438 - protein, 36 aa, Artificial Sequence; identical to SEQ ID NO: 14749
  GFR-binding peptide
  MOD_RES (3)..(4): Xaa is C or S
  MOD_RES (18)..(19)..(20)..(21)..(22): Xaa is A or G
  MOD_RES (23)..(24)..(25)..(26): Xaa is A or G or is absent

SEQ ID NO: 40439 - protein, 39 aa, Artificial Sequence; identical to SEQ ID NO: 16525
  GFR-binding peptide
  MOD_RES (6)..(7): Xaa is C or S
  MOD_RES (21)..(22)..(23)..(24)..(25): Xaa is A or G
  MOD_RES (26)..(27)..(28)..(29): Xaa is A or G or is absent

SEQ ID NO: 40440 - protein, 37 aa, Artificial Sequence; identical to SEQ ID NO: 14750
  GFR-binding peptide
  MOD_RES (1)..(2)..(34)..(36): Xaa is C or S

SEQ ID NO: 40441 - protein, 41 aa, Artificial Sequence; identical to SEQ ID NO: 16526
  GFR-binding peptide
  MOD_RES (4)..(5)..(39)..(41): Xaa is C or S
  MOD_RES (19)..(20)..(21)..(22)..(23): Xaa is A or G
  MOD_RES (24)..(25)..(26)..(27): Xaa is A or G or is absent

SEQ ID NO: 40442 - protein, 33 aa, Artificial Sequence; identical to SEQ ID NO: 14751
  GFR-binding peptide
  MOD_RES (1)..(1): Xaa is C or S
  MOD_RES (15)..(16)..(17)..(18)..(19): Xaa is A or G
  MOD_RES (20)..(21)..(22)..(23): Xaa is A or G or is absent

SEQ ID NO: 40443 - protein, 40 aa, Artificial Sequence; identical to SEQ ID NO: 14752
  GFR-binding peptide
  MOD_RES (5)..(6)..(39): Xaa is C or S
  MOD_RES (20)..(21)..(22)..(23)..(24): Xaa is A or G
  MOD_RES (25)..(26)..(27)..(28): Xaa is A or G or is absent

SEQ ID NO: 40444 - protein, 37 aa, Artificial Sequence; identical to SEQ ID NO: 14753
  GFR-binding peptide
  MOD_RES (4)..(5): Xaa is C or S
  MOD_RES (19)..(20)..(21)..(22)..(23): Xaa is A or G
  MOD_RES (24)..(25)..(26)..(27): Xaa is A or G or is absent

SEQ ID NO: 40445 - protein, 35 aa, Artificial Sequence; identical to SEQ ID NO: 16528
  GFR-binding peptide
  MOD_RES (1)..(35): Xaa is C or S
  MOD_RES (15)..(16)..(17)..(18)..(19): Xaa is A or G
  MOD_RES (20)..(21)..(22)..(23): Xaa is A or G or is absent

SEQ ID NO: 40446 - protein, 33 aa, Artificial Sequence; identical to SEQ ID NO: 14754
  GFR-binding peptide
  MOD_RES (1)..(1): Xaa is C or S
  MOD_RES (15)..(16)..(17)..(18)..(19): Xaa is A or G
  MOD_RES (20)..(21)..(22)..(23): Xaa is A or G or is absent

SEQ ID NO: 40447 - protein, 42 aa, Artificial Sequence; identical to SEQ ID NO: 16529
  GFR-binding peptide
  MOD_RES (7)..(41): Xaa is C or S
  MOD_RES (21)..(22)..(23)..(24)..(25): Xaa is A or G
  MOD_RES (26)..(27)..(28)..(29): Xaa is A or G or is absent

SEQ ID NO: 40448 - protein, 36 aa, Artificial Sequence; identical to SEQ ID NO: 9253
  GFR-binding peptide
  MOD_RES (1)..(34)..(36): Xaa is C or S
  MOD_RES (15)..(16)..(17)..(18)..(19): Xaa is A or G
  MOD_RES (20)..(21)..(22)..(23): Xaa is A or G or is absent

SEQ ID NO: 40449 - protein, 34 aa, Artificial Sequence; identical to SEQ ID NO: 16531
  GFR-binding peptide
  MOD_RES (1)..(2)..(34): Xaa is C or S

SEQ ID NO: 40450 - protein, 40 aa, Artificial Sequence; identical to SEQ ID NO: 14755
  GFR-binding peptide
  MOD_RES (5)..(6)..(37)..(39): Xaa is C or S

SEQ ID NO: 40451 - protein, 38 aa, Artificial Sequence; identical to SEQ ID NO: 9255
  GFR-binding peptide
  MOD_RES (5)..(6)..(37): Xaa is C or S

SEQ ID NO: 40452 - protein, 36 aa, Artificial Sequence; identical to SEQ ID NO: 14757
  GFR-binding peptide
  MOD_RES (33)..(35): Xaa is C or S
  MOD_RES (14)..(15)..(16)..(17)..(18): Xaa is A or G
  MOD_RES (19)..(20)..(21)..(22): Xaa is A or G or is absent

SEQ ID NO: 40453 - protein, 36 aa, Artificial Sequence; identical to SEQ ID NO: 9257
  GFR-binding peptide
  MOD_RES (1)..(33)..(35): Xaa is C or S

SEQ ID NO: 40454 - protein, 43 aa, Artificial Sequence; identical to SEQ ID NO: 16536
  GFR-binding peptide
  MOD_RES (6)..(7)..(41)..(43): Xaa is C or S
  MOD_RES (21)..(22)..(23)..(24)..(25): Xaa is A or G
  MOD_RES (26)..(27)..(28)..(29): Xaa is A or G or is absent

SEQ ID NO: 40455 - protein, 37 aa, Artificial Sequence; identical to SEQ ID NO: 9258
  GFR-binding peptide
  MOD_RES (4)..(5)..(36): Xaa is C or S

SEQ ID NO: 40456 - protein, 41 aa, Artificial Sequence; identical to SEQ ID NO: 16538
  GFR-binding peptide
  MOD_RES (4)..(5)..(39)..(41): Xaa is C or S
  MOD_RES (19)..(20)..(21)..(22)..(23): Xaa is A or G
  MOD_RES (24)..(25)..(26)..(27): Xaa is A or G or is absent

SEQ ID NO: 40457 - protein, 34 aa, Artificial Sequence; identical to SEQ ID NO: 9261
  GFR-binding peptide
  MOD_RES (3)..(4): Xaa is C or S

SEQ ID NO: 40458 - protein, 41 aa, Artificial Sequence; identical to SEQ ID NO: 16540
  GFR-binding peptide
  MOD_RES (6)..(7)..(39)..(41): Xaa is C or S

SEQ ID NO: 40459 - protein, 41 aa, Artificial Sequence; identical to SEQ ID NO: 7462
  GFR-binding peptide
  MOD_RES (6)..(7)..(39)..(41): Xaa is C or S

SEQ ID NO: 40460 - protein, 38 aa, Artificial Sequence; identical to SEQ ID NO: 14761
  GFR-binding peptide
  MOD_RES (3)..(4)..(38): Xaa is C or S
  MOD_RES (18)..(19)..(20)..(21)..(22): Xaa is A or G
  MOD_RES (23)..(24)..(25)..(26): Xaa is A or G or is absent

SEQ ID NO: 40461 - protein, 42 aa, Artificial Sequence; identical to SEQ ID NO: 14762
  GFR-binding peptide
  MOD_RES (5)..(6)..(40)..(42): Xaa is C or S
  MOD_RES (20)..(21)..(22)..(23)..(24): Xaa is A or G
  MOD_RES (25)..(26)..(27)..(28): Xaa is A or G or is absent

SEQ ID NO: 40462 - protein, 32 aa, Artificial Sequence; identical to SEQ ID NO: 14763
  GFR-binding peptide
  MOD_RES (32)..(32): Xaa is C or S

SEQ ID NO: 40463 - protein, 32 aa, Artificial Sequence; identical to SEQ ID NO: 14764
  GFR-binding peptide
  MOD_RES (14)..(15)..(16)..(17)..(18): Xaa is A or G
  MOD_RES (19)..(20)..(21)..(22): Xaa is A or G or is absent

SEQ ID NO: 40464 - protein, 36 aa, Artificial Sequence; identical to SEQ ID NO: 14765
  GFR-binding peptide
  MOD_RES (1)..(34)..(36): Xaa is C or S
  MOD_RES (15)..(16)..(17)..(18)..(19): Xaa is A or G
  MOD_RES (20)..(21)..(22)..(23): Xaa is A or G or is absent

SEQ ID NO: 40465 - protein, 37 aa, Artificial Sequence; identical to SEQ ID NO: 9265
  GFR-binding peptide
  MOD_RES (4)..(5): Xaa is C or S
  MOD_RES (19)..(20)..(21)..(22)..(23): Xaa is A or G
  MOD_RES (24)..(25)..(26)..(27): Xaa is A or G or is absent

SEQ ID NO: 40466 - protein, 32 aa, Artificial Sequence; identical to SEQ ID NO: 16544
  GFR-binding peptide
  MOD_RES (1)..(2): Xaa is C or S

SEQ ID NO: 40467 - protein, 36 aa, Artificial Sequence; identical to SEQ ID NO: 14767
  GFR-binding peptide
  MOD_RES (5)..(6): Xaa is C or S

SEQ ID NO: 40468 - protein, 38 aa, Artificial Sequence; identical to SEQ ID NO: 16545
  GFR-binding peptide
  MOD_RES (6)..(38): Xaa is C or S

SEQ ID NO: 40469 - protein, 32 aa, Artificial Sequence; identical to SEQ ID NO: 14768
  GFR-binding peptide
  MOD_RES (1)..(2): Xaa is C or S

SEQ ID NO: 40470 - protein, 38 aa, Artificial Sequence; identical to SEQ ID NO: 14769
  GFR-binding peptide
  MOD_RES (4)..(5)..(36)..(38): Xaa is C or S

SEQ ID NO: 40471 - protein, 34 aa, Artificial Sequence; identical to SEQ ID NO: 7475
  GFR-binding peptide
  MOD_RES (2)..(3)..(34): Xaa is C or S

SEQ ID NO: 40472 - protein, 36 aa, Artificial Sequence; identical to SEQ ID NO: 16547
  GFR-binding peptide
  MOD_RES (5)..(6): Xaa is C or S

SEQ ID NO: 40473 - protein, 40 aa, Artificial Sequence; identical to SEQ ID NO: 14772
  GFR-binding peptide
  MOD_RES (4)..(5)..(39): Xaa is C or S
  MOD_RES (19)..(20)..(21)..(22)..(23): Xaa is A or G
  MOD_RES (24)..(25)..(26)..(27): Xaa is A or G or is absent

SEQ ID NO: 40474 - protein, 40 aa, Artificial Sequence; identical to SEQ ID NO: 16548
  GFR-binding peptide
  MOD_RES (4)..(5)..(39): Xaa is C or S
  MOD_RES (19)..(20)..(21)..(22)..(23): Xaa is A or G
  MOD_RES (24)..(25)..(26)..(27): Xaa is A or G or is absent

SEQ ID NO: 40475 - protein, 38 aa, Artificial Sequence; identical to SEQ ID NO: 16549
  GFR-binding peptide
  MOD_RES (2)..(3)..(35)..(37): Xaa is C or S

SEQ ID NO: 40476 - protein, 33 aa, Artificial Sequence; identical to SEQ ID NO: 14773
  GFR-binding peptide
  MOD_RES (31)..(33): Xaa is C or S

SEQ ID NO: 40477 - protein, 36 aa, Artificial Sequence; identical to SEQ ID NO: 14774
  GFR-binding peptide
  MOD_RES (34)..(36): Xaa is C or S
  MOD_RES (14)..(15)..(16)..(17)..(18): Xaa is A or G
  MOD_RES (19)..(20)..(21)..(22): Xaa is A or G or is absent

SEQ ID NO: 40478 - protein, 38 aa, Artificial Sequence; identical to SEQ ID NO: 14775
  GFR-binding peptide
  MOD_RES (5)..(6): Xaa is C or S
  MOD_RES (20)..(21)..(22)..(23)..(24): Xaa is A or G
  MOD_RES (25)..(26)..(27)..(28): Xaa is A or G or is absent

SEQ ID NO: 40479 - protein, 41 aa, Artificial Sequence; identical to SEQ ID NO: 9276
  GFR-binding peptide
  MOD_RES (6)..(7)..(38)..(40): Xaa is C or S

SEQ ID NO: 40480 - protein, 36 aa, Artificial Sequence; identical to SEQ ID NO: 16552
  GFR-binding peptide
  MOD_RES (3)..(4)..(36): Xaa is C or S

SEQ ID NO: 40481 - protein, 38 aa, Artificial Sequence; identical to SEQ ID NO: 7480
  GFR-binding peptide
  MOD_RES (1)..(2)..(36)..(38): Xaa is C or S
  MOD_RES (16)..(17)..(18)..(19)..(20): Xaa is A or G
  MOD_RES (21)..(22)..(23)..(24): Xaa is A or G or is absent

SEQ ID NO: 40482 - protein, 30 aa, Artificial Sequence; identical to SEQ ID NO: 16553
  GFR-binding peptide

SEQ ID NO: 40483 - protein, 33 aa, Artificial Sequence; identical to SEQ ID NO: 16554
  GFR-binding peptide
  MOD_RES (14)..(15)..(16)..(17)..(18): Xaa is A or G
  MOD_RES (19)..(20)..(21)..(22): Xaa is A or G or is absent

SEQ ID NO: 40484 - protein, 40 aa, Artificial Sequence; identical to SEQ ID NO: 14777
  GFR-binding peptide
  MOD_RES (5)..(6)..(40): Xaa is C or S
  MOD_RES (20)..(21)..(22)..(23)..(24): Xaa is A or G
  MOD_RES (25)..(26)..(27)..(28): Xaa is A or G or is absent

SEQ ID NO: 40485 - protein, 34 aa, Artificial Sequence; identical to SEQ ID NO: 14778
  GFR-binding peptide
  MOD_RES (2)..(3): Xaa is C or S

SEQ ID NO: 40486 - protein, 44 aa, Artificial Sequence; identical to SEQ ID NO: 16555
  GFR-binding peptide
  MOD_RES (6)..(7)..(41)..(43): Xaa is C or S
  MOD_RES (21)..(22)..(23)..(24)..(25): Xaa is A or G
  MOD_RES (26)..(27)..(28)..(29): Xaa is A or G or is absent

SEQ ID NO: 40487 - protein, 36 aa, Artificial Sequence; identical to SEQ ID NO: 16556
  GFR-binding peptide
  MOD_RES (1)..(2)..(35): Xaa is C or S
  MOD_RES (16)..(17)..(18)..(19)..(20): Xaa is A or G
  MOD_RES (21)..(22)..(23)..(24): Xaa is A or G or is absent

SEQ ID NO: 40488 - protein, 32 aa, Artificial Sequence; identical to SEQ ID NO: 14779
  GFR-binding peptide
  MOD_RES (1)..(32): Xaa is C or S

SEQ ID NO: 40489 - protein, 39 aa, Artificial Sequence; identical to SEQ ID NO: 9279
  GFR-binding peptide
  MOD_RES (4)..(5)..(36)..(38): Xaa is C or S

SEQ ID NO: 40490 - protein, 42 aa, Artificial Sequence; identical to SEQ ID NO: 14780
  GFR-binding peptide
  MOD_RES (5)..(6)..(40)..(42): Xaa is C or S
  MOD_RES (20)..(21)..(22)..(23)..(24): Xaa is A or G
  MOD_RES (25)..(26)..(27)..(28): Xaa is A or G or is absent

SEQ ID NO: 40491 - protein, 37 aa, Artificial Sequence; identical to SEQ ID NO: 14783
  GFR-binding peptide
  MOD_RES (3)..(4)..(36): Xaa is C or S

SEQ ID NO: 40492 - protein, 34 aa, Artificial Sequence; identical to SEQ ID NO: 7485
  GFR-binding peptide
  MOD_RES (1)..(33): Xaa is C or S

SEQ ID NO: 40493 - protein, 40 aa, Artificial Sequence; identical to SEQ ID NO: 16560
  GFR-binding peptide
  MOD_RES (5)..(6)..(39): Xaa is C or S
  MOD_RES (20)..(21)..(22)..(23)..(24): Xaa is A or G
  MOD_RES (25)..(26)..(27)..(28): Xaa is A or G or is absent

SEQ ID NO: 40494 - protein, 41 aa, Artificial Sequence; identical to SEQ ID NO: 14786
  GFR-binding peptide
  MOD_RES (4)..(5)..(38)..(40): Xaa is C or S
  MOD_RES (19)..(20)..(21)..(22)..(23): Xaa is A or G
  MOD_RES (24)..(25)..(26)..(27): Xaa is A or G or is absent

SEQ ID NO: 40495 - protein, 37 aa, Artificial Sequence; identical to SEQ ID NO: 16561
  GFR-binding peptide
  MOD_RES (1)..(2)..(34)..(36): Xaa is C or S

SEQ ID NO: 40496 - protein, 39 aa, Artificial Sequence; identical to SEQ ID NO: 14787
  GFR-binding peptide
  MOD_RES (5)..(39): Xaa is C or S
  MOD_RES (19)..(20)..(21)..(22)..(23): Xaa is A or G
  MOD_RES (24)..(25)..(26)..(27): Xaa is A or G or is absent

SEQ ID NO: 40497 - protein, 38 aa, Artificial Sequence; identical to SEQ ID NO: 14788
  GFR-binding peptide
  MOD_RES (1)..(35)..(37): Xaa is C or S
  MOD_RES (15)..(16)..(17)..(18)..(19): Xaa is A or G
  MOD_RES (20)..(21)..(22)..(23): Xaa is A or G or is absent

SEQ ID NO: 40498 - protein, 38 aa, Artificial Sequence; identical to SEQ ID NO: 14790
  GFR-binding peptide
  MOD_RES (5)..(6): Xaa is C or S
  MOD_RES (20)..(21)..(22)..(23)..(24): Xaa is A or G
  MOD_RES (25)..(26)..(27)..(28): Xaa is A or G or is absent

SEQ ID NO: 40499 - protein, 37 aa, Artificial Sequence; identical to SEQ ID NO: 7489
  GFR-binding peptide
  MOD_RES (6)..(7): Xaa is C or S

SEQ ID NO: 40500 - protein, 40 aa, Artificial Sequence; identical to SEQ ID NO: 14792
  GFR-binding peptide
  MOD_RES (6)..(7): Xaa is C or S
  MOD_RES (21)..(22)..(23)..(24)..(25): Xaa is A or G
  MOD_RES (26)..(27)..(28)..(29): Xaa is A or G or is absent

SEQ ID NO: 40501 - protein, 33 aa, Artificial Sequence; identical to SEQ ID NO: 16562
  GFR-binding peptide
  MOD_RES (1)..(33): Xaa is C or S

SEQ ID NO: 40502 - protein, 36 aa, Artificial Sequence; identical to SEQ ID NO: 16563
  GFR-binding peptide
  MOD_RES (1)..(2)..(34)..(36): Xaa is C or S

SEQ ID NO: 40503 - protein, 41 aa, Artificial Sequence; identical to SEQ ID NO: 14793
  GFR-binding peptide
  MOD_RES (3)..(4)..(38)..(40): Xaa is C or S
  MOD_RES (18)..(19)..(20)..(21)..(22): Xaa is A or G
  MOD_RES (23)..(24)..(25)..(26): Xaa is A or G or is absent

SEQ ID NO: 40504 - protein, 32 aa, Artificial Sequence; identical to SEQ ID NO: 14794
  GFR-binding peptide
  MOD_RES (2)..(2): Xaa is C or S

SEQ ID NO: 40505 - protein, 38 aa, Artificial Sequence; identical to SEQ ID NO: 16564
  GFR-binding peptide
  MOD_RES (6)..(7)..(38): Xaa is C or S

SEQ ID NO: 40506 - protein, 37 aa, Artificial Sequence; identical to SEQ ID NO: 14797
  GFR-binding peptide
  MOD_RES (1)..(34)..(36): Xaa is C or S
  MOD_RES (15)..(16)..(17)..(18)..(19): Xaa is A or G
  MOD_RES (20)..(21)..(22)..(23): Xaa is A or G or is absent

SEQ ID NO: 40507 - protein, 33 aa, Artificial Sequence; identical to SEQ ID NO: 16565
  GFR-binding peptide
  MOD_RES (31)..(33): Xaa is C or S

SEQ ID NO: 40508 - protein, 37 aa, Artificial Sequence; identical to SEQ ID NO: 14799
  GFR-binding peptide
  MOD_RES (3)..(35)..(37): Xaa is C or S

SEQ ID NO: 40509 - protein, 31 aa, Artificial Sequence; identical to SEQ ID NO: 16567
  GFR-binding peptide

SEQ ID NO: 40510 - protein, 37 aa, Artificial Sequence; identical to SEQ ID NO: 14800
  GFR-binding peptide
  MOD_RES (4)..(5): Xaa is C or S
  MOD_RES (19)..(20)..(21)..(22)..(23): Xaa is A or G
  MOD_RES (24)..(25)..(26)..(27): Xaa is A or G or is absent

SEQ ID NO: 40511 - protein, 37 aa, Artificial Sequence; identical to SEQ ID NO: 9285
  GFR-binding peptide
  MOD_RES (4)..(5): Xaa is C or S
  MOD_RES (19)..(20)..(21)..(22)..(23): Xaa is A or G
  MOD_RES (24)..(25)..(26)..(27): Xaa is A or G or is absent

SEQ ID NO: 40512 - protein, 34 aa, Artificial Sequence; identical to SEQ ID NO: 16569
  GFR-binding peptide
  MOD_RES (34)..(34): Xaa is C or S
  MOD_RES (14)..(15)..(16)..(17)..(18): Xaa is A or G
  MOD_RES (19)..(20)..(21)..(22): Xaa is A or G or is absent

SEQ ID NO: 40513 - protein, 37 aa, Artificial Sequence; identical to SEQ ID NO: 14801
  GFR-binding peptide
  MOD_RES (5)..(5): Xaa is C or S
  MOD_RES (19)..(20)..(21)..(22)..(23): Xaa is A or G
  MOD_RES (24)..(25)..(26)..(27): Xaa is A or G or is absent

SEQ ID NO: 40514 - protein, 37 aa, Artificial Sequence; identical to SEQ ID NO: 16570
  GFR-binding peptide
  MOD_RES (2)..(3)..(34)..(36): Xaa is C or S

SEQ ID NO: 40515 - protein, 40 aa, Artificial Sequence; identical to SEQ ID NO: 14802
  GFR-binding peptide
  MOD_RES (2)..(3)..(37)..(39): Xaa is C or S
  MOD_RES (17)..(18)..(19)..(20)..(21): Xaa is A or G
  MOD_RES (22)..(23)..(24)..(25): Xaa is A or G or is absent

SEQ ID NO: 40516 - protein, 33 aa, Artificial Sequence; identical to SEQ ID NO: 7497
  GFR-binding peptide
  MOD_RES (1)..(2): Xaa is C or S

SEQ ID NO: 40517 - protein, 41 aa, Artificial Sequence; identical to SEQ ID NO: 16571
  GFR-binding peptide
  MOD_RES (5)..(39)..(41): Xaa is C or S
  MOD_RES (19)..(20)..(21)..(22)..(23): Xaa is A or G
  MOD_RES (24)..(25)..(26)..(27): Xaa is A or G or is absent

SEQ ID NO: 40518 - protein, 36 aa, Artificial Sequence; identical to SEQ ID NO: 16572
  GFR-binding peptide
  MOD_RES (2)..(3)..(36): Xaa is C or S
  MOD_RES (17)..(18)..(19)..(20)..(21): Xaa is A or G
  MOD_RES (22)..(23)..(24)..(25): Xaa is A or G or is absent

SEQ ID NO: 40519 - protein, 37 aa, Artificial Sequence; identical to SEQ ID NO: 14805
  GFR-binding peptide
  MOD_RES (4)..(5)..(36): Xaa is C or S

SEQ ID NO: 40520 - protein, 35 aa, Artificial Sequence; identical to SEQ ID NO: 16573
  GFR-binding peptide
  MOD_RES (4)..(5): Xaa is C or S

SEQ ID NO: 40521 - protein, 36 aa, Artificial Sequence; identical to SEQ ID NO: 14806
  GFR-binding peptide
  MOD_RES (3)..(4): Xaa is C or S
  MOD_RES (18)..(19)..(20)..(21)..(22): Xaa is A or G
  MOD_RES (23)..(24)..(25)..(26): Xaa is A or G or is absent

SEQ ID NO: 40522 - protein, 40 aa, Artificial Sequence; identical to SEQ ID NO: 16574
  GFR-binding peptide
  MOD_RES (4)..(5)..(37)..(39): Xaa is C or S

SEQ ID NO: 40523 - protein, 40 aa, Artificial Sequence; identical to SEQ ID NO: 9287
  GFR-binding peptide
  MOD_RES (5)..(6)..(38)..(40): Xaa is C or S

SEQ ID NO: 40524 - protein, 33 aa, Artificial Sequence; identical to SEQ ID NO: 16576
  GFR-binding peptide
  MOD_RES (33)..(33): Xaa is C or S
  MOD_RES (14)..(15)..(16)..(17)..(18): Xaa is A or G
  MOD_RES (19)..(20)..(21)..(22): Xaa is A or G or is absent

SEQ ID NO: 40525 - protein, 35 aa, Artificial Sequence; identical to SEQ ID NO: 16577
  GFR-binding peptide
  MOD_RES (1)..(2): Xaa is C or S
  MOD_RES (16)..(17)..(18)..(19)..(20): Xaa is A or G
  MOD_RES (21)..(22)..(23)..(24): Xaa is A or G or is absent

SEQ ID NO: 40526 - protein, 34 aa, Artificial Sequence; identical to SEQ ID NO: 16578
  GFR-binding peptide
  MOD_RES (34)..(34): Xaa is C or S
  MOD_RES (14)..(15)..(16)..(17)..(18): Xaa is A or G
  MOD_RES (19)..(20)..(21)..(22): Xaa is A or G or is absent

SEQ ID NO: 40527 - protein, 40 aa, Artificial Sequence; identical to SEQ ID NO: 14807
  GFR-binding peptide
  MOD_RES (6)..(7): Xaa is C or S
  MOD_RES (21)..(22)..(23)..(24)..(25): Xaa is A or G
  MOD_RES (26)..(27)..(28)..(29): Xaa is A or G or is absent

SEQ ID NO: 40528 - protein, 37 aa, Artificial Sequence; identical to SEQ ID NO: 14808
  GFR-binding peptide
  MOD_RES (1)..(2)..(36): Xaa is C or S
  MOD_RES (16)..(17)..(18)..(19)..(20): Xaa is A or G
  MOD_RES (21)..(22)..(23)..(24): Xaa is A or G or is absent

SEQ ID NO: 40529 - protein, 34 aa, Artificial Sequence; identical to SEQ ID NO: 16579
  GFR-binding peptide
  MOD_RES (34)..(34): Xaa is C or S
  MOD_RES (14)..(15)..(16)..(17)..(18): Xaa is A or G
  MOD_RES (19)..(20)..(21)..(22): Xaa is A or G or is absent

SEQ ID NO: 40530 - protein, 37 aa, Artificial Sequence; identical to SEQ ID NO: 7501
  GFR-binding peptide
  MOD_RES (1)..(2)..(34)..(36): Xaa is C or S

SEQ ID NO: 40531 - protein, 37 aa, Artificial Sequence; identical to SEQ ID NO: 16580
  GFR-binding peptide
  MOD_RES (4)..(5)..(36): Xaa is C or S

SEQ ID NO: 40532 - protein, 31 aa, Artificial Sequence; identical to SEQ ID NO: 16581
  GFR-binding peptide
  MOD_RES (1)..(1): Xaa is C or S

SEQ ID NO: 40533 - protein, 39 aa, Artificial Sequence; identical to SEQ ID NO: 9292
  GFR-binding peptide
  MOD_RES (6)..(7): Xaa is C or S
  MOD_RES (21)..(22)..(23)..(24)..(25): Xaa is A or G
  MOD_RES (26)..(27)..(28)..(29): Xaa is A or G or is absent

SEQ ID NO: 40534 - protein, 41 aa, Artificial Sequence; identical to SEQ ID NO: 14811
  GFR-binding peptide
  MOD_RES (6)..(7)..(41): Xaa is C or S
  MOD_RES (21)..(22)..(23)..(24)..(25): Xaa is A or G
  MOD_RES (26)..(27)..(28)..(29): Xaa is A or G or is absent

SEQ ID NO: 40535 - protein, 44 aa, Artificial Sequence; identical to SEQ ID NO: 9294
  GFR-binding peptide
  MOD_RES (6)..(7)..(41)..(43): Xaa is C or S
  MOD_RES (21)..(22)..(23)..(24)..(25): Xaa is A or G
  MOD_RES (26)..(27)..(28)..(29): Xaa is A or G or is absent

SEQ ID NO: 40536 - protein, 35 aa, Artificial Sequence; identical to SEQ ID NO: 16585
  GFR-binding peptide
  MOD_RES (32)..(34): Xaa is C or S

SEQ ID NO: 40537 - protein, 34 aa, Artificial Sequence; identical to SEQ ID NO: 16586
  GFR-binding peptide
  MOD_RES (2)..(3): Xaa is C or S

SEQ ID NO: 40538 - protein, 40 aa, Artificial Sequence; identical to SEQ ID NO: 16587
  GFR-binding peptide
  MOD_RES (5)..(6)..(38)..(40): Xaa is C or S

SEQ ID NO: 40539 - protein, 38 aa, Artificial Sequence; identical to SEQ ID NO: 16588
  GFR-binding peptide
  MOD_RES (3)..(4)..(38): Xaa is C or S
  MOD_RES (18)..(19)..(20)..(21)..(22): Xaa is A or G
  MOD_RES (23)..(24)..(25)..(26): Xaa is A or G or is absent

SEQ ID NO: 40540 - protein, 36 aa, Artificial Sequence; identical to SEQ ID NO: 7507
  GFR-binding peptide
  MOD_RES (5)..(6): Xaa is C or S

SEQ ID NO: 40541 - protein, 40 aa, Artificial Sequence; identical to SEQ ID NO: 16589
  GFR-binding peptide
  MOD_RES (5)..(6)..(38)..(40): Xaa is C or S

SEQ ID NO: 40542 - protein, 39 aa, Artificial Sequence; identical to SEQ ID NO: 14813
  GFR-binding peptide
  MOD_RES (3)..(4)..(38): Xaa is C or S
  MOD_RES (18)..(19)..(20)..(21)..(22): Xaa is A or G
  MOD_RES (23)..(24)..(25)..(26): Xaa is A or G or is absent

SEQ ID NO: 40543 - protein, 39 aa, Artificial Sequence; identical to SEQ ID NO: 14814
  GFR-binding peptide
  MOD_RES (4)..(5)..(36)..(38): Xaa is C or S

SEQ ID NO: 40544 - protein, 34 aa, Artificial Sequence; identical to SEQ ID NO: 16591
  GFR-binding peptide
  MOD_RES (1)..(2)..(33): Xaa is C or S

SEQ ID NO: 40545 - protein, 40 aa, Artificial Sequence; identical to SEQ ID NO: 14815
  GFR-binding peptide
  MOD_RES (5)..(6)..(38)..(40): Xaa is C or S

SEQ ID NO: 40546 - protein, 42 aa, Artificial Sequence; identical to SEQ ID NO: 9302
  GFR-binding peptide
  MOD_RES (6)..(7)..(40)..(42): Xaa is C or S
  MOD_RES (21)..(22)..(23)..(24)..(25): Xaa is A or G
  MOD_RES (26)..(27)..(28)..(29): Xaa is A or G or is absent

SEQ ID NO: 40547 - protein, 43 aa, Artificial Sequence; identical to SEQ ID NO: 14816
  GFR-binding peptide
  MOD_RES (6)..(7)..(41)..(43): Xaa is C or S
  MOD_RES (21)..(22)..(23)..(24)..(25): Xaa is A or G
  MOD_RES (26)..(27)..(28)..(29): Xaa is A or G or is absent

SEQ ID NO: 40548 - protein, 33 aa, Artificial Sequence; identical to SEQ ID NO: 14817
  GFR-binding peptide
  MOD_RES (14)..(15)..(16)..(17)..(18): Xaa is A or G
  MOD_RES (19)..(20)..(21)..(22): Xaa is A or G or is absent

SEQ ID NO: 40549 - protein, 32 aa, Artificial Sequence; identical to SEQ ID NO: 14818
  GFR-binding peptide
  MOD_RES (1)..(2): Xaa is C or S

SEQ ID NO: 40550 - protein, 39 aa, Artificial Sequence; identical to SEQ ID NO: 16593
  GFR-binding peptide
  MOD_RES (7)..(7): Xaa is C or S
  MOD_RES (21)..(22)..(23)..(24)..(25): Xaa is A or G
  MOD_RES (26)..(27)..(28)..(29): Xaa is A or G or is absent

SEQ ID NO: 40551 - protein, 36 aa, Artificial Sequence; identical to SEQ ID NO: 16594
  GFR-binding peptide
  MOD_RES (1)..(2)..(36): Xaa is C or S
  MOD_RES (16)..(17)..(18)..(19)..(20): Xaa is A or G
  MOD_RES (21)..(22)..(23)..(24): Xaa is A or G or is absent

SEQ ID NO: 40552 - protein, 42 aa, Artificial Sequence; identical to SEQ ID NO: 14819
  GFR-binding peptide
  MOD_RES (4)..(5)..(39)..(41): Xaa is C or S
  MOD_RES (19)..(20)..(21)..(22)..(23): Xaa is A or G
  MOD_RES (24)..(25)..(26)..(27): Xaa is A or G or is absent

SEQ ID NO: 40553 - protein, 34 aa, Artificial Sequence; identical to SEQ ID NO: 14820
  GFR-binding peptide
  MOD_RES (2)..(3): Xaa is C or S

SEQ ID NO: 40554 - protein, 37 aa, Artificial Sequence; identical to SEQ ID NO: 16595
  GFR-binding peptide
  MOD_RES (3)..(4)..(37): Xaa is C or S
  MOD_RES (18)..(19)..(20)..(21)..(22): Xaa is A or G
  MOD_RES (23)..(24)..(25)..(26): Xaa is A or G or is absent

SEQ ID NO: 40555 - protein, 40 aa, Artificial Sequence; identical to SEQ ID NO: 14821
  GFR-binding peptide
  MOD_RES (7)..(39): Xaa is C or S

SEQ ID NO: 40556 - protein, 38 aa, Artificial Sequence; identical to SEQ ID NO: 14822
  GFR-binding peptide
  MOD_RES (6)..(7)..(38): Xaa is C or S

SEQ ID NO: 40557 - protein, 41 aa, Artificial Sequence; identical to SEQ ID NO: 14823
  GFR-binding peptide
  MOD_RES (6)..(7)..(39)..(41): Xaa is C or S

SEQ ID NO: 40558 - protein, 43 aa, Artificial Sequence; identical to SEQ ID NO: 9303
  GFR-binding peptide
  MOD_RES (6)..(7)..(40)..(42): Xaa is C or S
  MOD_RES (21)..(22)..(23)..(24)..(25): Xaa is A or G
  MOD_RES (26)..(27)..(28)..(29): Xaa is A or G or is absent

SEQ ID NO: 40559 - protein, 35 aa, Artificial Sequence; identical to SEQ ID NO: 14824
  GFR-binding peptide
  MOD_RES (1)..(33)..(35): Xaa is C or S

SEQ ID NO: 40560 - protein, 33 aa, Artificial Sequence; identical to SEQ ID NO: 9304
  GFR-binding peptide
  MOD_RES (31)..(33): Xaa is C or S

SEQ ID NO: 40561 - protein, 37 aa, Artificial Sequence; identical to SEQ ID NO: 16598
  GFR-binding peptide
  MOD_RES (3)..(37): Xaa is C or S
  MOD_RES (17)..(18)..(19)..(20)..(21): Xaa is A or G
  MOD_RES (22)..(23)..(24)..(25): Xaa is A or G or is absent

SEQ ID NO: 40562 - protein, 38 aa, Artificial Sequence; identical to SEQ ID NO: 16600
  GFR-binding peptide
  MOD_RES (5)..(6): Xaa is C or S
  MOD_RES (20)..(21)..(22)..(23)..(24): Xaa is A or G
  MOD_RES (25)..(26)..(27)..(28): Xaa is A or G or is absent

SEQ ID NO: 40563 - protein, 37 aa, Artificial Sequence; identical to SEQ ID NO: 16601
  GFR-binding peptide
  MOD_RES (5)..(6): Xaa is C or S

SEQ ID NO: 40564 - protein, 34 aa, Artificial Sequence; identical to SEQ ID NO: 14826
  GFR-binding peptide
  MOD_RES (31)..(33): Xaa is C or S

SEQ ID NO: 40565 - protein, 40 aa, Artificial Sequence; identical to SEQ ID NO: 14827
  GFR-binding peptide
  MOD_RES (4)..(5)..(38)..(40): Xaa is C or S
  MOD_RES (19)..(20)..(21)..(22)..(23): Xaa is A or G
  MOD_RES (24)..(25)..(26)..(27): Xaa is A or G or is absent

SEQ ID NO: 40566 - protein, 38 aa, Artificial Sequence; identical to SEQ ID NO: 14828
  GFR-binding peptide
  MOD_RES (2)..(36)..(38): Xaa is C or S
  MOD_RES (16)..(17)..(18)..(19)..(20): Xaa is A or G
  MOD_RES (21)..(22)..(23)..(24): Xaa is A or G or is absent

SEQ ID NO: 40567 - protein, 34 aa, Artificial Sequence; identical to SEQ ID NO: 16602
  GFR-binding peptide
  MOD_RES (1)..(2)..(34): Xaa is C or S

SEQ ID NO: 40568 - protein, 41 aa, Artificial Sequence; identical to SEQ ID NO: 16603
  GFR-binding peptide
  MOD_RES (6)..(38)..(40): Xaa is C or S

SEQ ID NO: 40569 - protein, 39 aa, Artificial Sequence; identical to SEQ ID NO: 16604
  GFR-binding peptide
  MOD_RES (5)..(6)..(38): Xaa is C or S

SEQ ID NO: 40570 - protein, 40 aa, Artificial Sequence; identical to SEQ ID NO: 14829
  GFR-binding peptide
  MOD_RES (3)..(4)..(38)..(40): Xaa is C or S
  MOD_RES (18)..(19)..(20)..(21)..(22): Xaa is A or G
  MOD_RES (23)..(24)..(25)..(26): Xaa is A or G or is absent

SEQ ID NO: 40571 - protein, 39 aa, Artificial Sequence; identical to SEQ ID NO: 14830
  GFR-binding peptide
  MOD_RES (5)..(6): Xaa is C or S
  MOD_RES (20)..(21)..(22)..(23)..(24): Xaa is A or G
  MOD_RES (25)..(26)..(27)..(28): Xaa is A or G or is absent

SEQ ID NO: 40572 - protein, 41 aa, Artificial Sequence; identical to SEQ ID NO: 16605
  GFR-binding peptide
  MOD_RES (6)..(7)..(41): Xaa is C or S
  MOD_RES (21)..(22)..(23)..(24)..(25): Xaa is A or G
  MOD_RES (26)..(27)..(28)..(29): Xaa is A or G or is absent

SEQ ID NO: 40573 - protein, 39 aa, Artificial Sequence; identical to SEQ ID NO: 16606
  GFR-binding peptide
  MOD_RES (5)..(6)..(38): Xaa is C or S

SEQ ID NO: 40574 - protein, 38 aa, Artificial Sequence; identical to SEQ ID NO: 16607
  GFR-binding peptide
  MOD_RES (2)..(3)..(35)..(37): Xaa is C or S

SEQ ID NO: 40575 - protein, 37 aa, Artificial Sequence
  GFR-binding peptide
  MOD_RES (4)..(5): Xaa is C or S
  MOD_RES (19)..(20)..(21)..(22)..(23): Xaa is A or G
  MOD_RES (24)..(25)..(26)..(27): Xaa is A or G or is absent
ASPXXVSQDLEPLTILYYXXXXXXXXXEQLSNMIVKS

SEQ ID NO: 40576 - protein, 38 aa, Artificial Sequence; identical to SEQ ID NO: 16609
  GFR-binding peptide
  MOD_RES (1)..(2)..(36)..(38): Xaa is C or S
  MOD_RES (16)..(17)..(18)..(19)..(20): Xaa is A or G
  MOD_RES (21)..(22)..(23)..(24): Xaa is A or G or is absent

SEQ ID NO: 40577 - protein, 38 aa, Artificial Sequence; identical to SEQ ID NO: 16610
  GFR-binding peptide
  MOD_RES (5)..(6): Xaa is C or S
  MOD_RES (20)..(21)..(22)..(23)..(24): Xaa is A or G
  MOD_RES (25)..(26)..(27)..(28): Xaa is A or G or is absent

SEQ ID NO: 40578 - protein, 36 aa, Artificial Sequence; identical to SEQ ID NO: 14831
  GFR-binding peptide
  MOD_RES (1)..(2)..(34)..(36): Xaa is C or S

SEQ ID NO: 40579 - protein, 36 aa, Artificial Sequence; identical to SEQ ID NO: 14832
  GFR-binding peptide
  MOD_RES (3)..(35): Xaa is C or S

SEQ ID NO: 40580 - protein, 39 aa, Artificial Sequence; identical to SEQ ID NO: 14833
  GFR-binding peptide
  MOD_RES (6)..(7)..(39): Xaa is C or S

SEQ ID NO: 40581 - protein, 36 aa, Artificial Sequence; identical to SEQ ID NO: 16612
  GFR-binding peptide
  MOD_RES (5)..(6): Xaa is C or S

SEQ ID NO: 40582 - protein, 38 aa, Artificial Sequence; identical to SEQ ID NO: 7521
  GFR-binding peptide
  MOD_RES (3)..(4)..(38): Xaa is C or S
  MOD_RES (18)..(19)..(20)..(21)..(22): Xaa is A or G
  MOD_RES (23)..(24)..(25)..(26): Xaa is A or G or is absent

SEQ ID NO: 40583 - protein, 34 aa, Artificial Sequence; identical to SEQ ID NO: 16613
  GFR-binding peptide
  MOD_RES (1)..(1): Xaa is C or S
  MOD_RES (15)..(16)..(17)..(18)..(19): Xaa is A or G
  MOD_RES (20)..(21)..(22)..(23): Xaa is A or G or is absent

SEQ ID NO: 40584 - protein, 35 aa, Artificial Sequence; identical to SEQ ID NO: 14835
  GFR-binding peptide
  MOD_RES (34)..(34): Xaa is C or S
  MOD_RES (14)..(15)..(16)..(17)..(18): Xaa is A or G
  MOD_RES (19)..(20)..(21)..(22): Xaa is A or G or is absent

SEQ ID NO: 40585 - protein, 34 aa, Artificial Sequence; identical to SEQ ID NO: 16614
  GFR-binding peptide
  MOD_RES (1)..(2): Xaa is C or S
  MOD_RES (16)..(17)..(18)..(19)..(20): Xaa is A or G
  MOD_RES (21)..(22)..(23)..(24): Xaa is A or G or is absent

SEQ ID NO: 40586 - protein, 39 aa, Artificial Sequence; identical to SEQ ID NO: 7522
  GFR-binding peptide
  MOD_RES (6)..(7): Xaa is C or S
  MOD_RES (21)..(22)..(23)..(24)..(25): Xaa is A or G
  MOD_RES (26)..(27)..(28)..(29): Xaa is A or G or is absent

SEQ ID NO: 40587 - protein, 40 aa, Artificial Sequence; identical to SEQ ID NO: 16615
  GFR-binding peptide
  MOD_RES (4)..(5)..(38)..(40): Xaa is C or S
  MOD_RES (19)..(20)..(21)..(22)..(23): Xaa is A or G
  MOD_RES (24)..(25)..(26)..(27): Xaa is A or G or is absent

SEQ ID NO: 40588 - protein, 36 aa, Artificial Sequence; identical to SEQ ID NO: 9316
  GFR-binding peptide
  MOD_RES (3)..(4): Xaa is C or S
  MOD_RES (18)..(19)..(20)..(21)..(22): Xaa is A or G
  MOD_RES (23)..(24)..(25)..(26): Xaa is A or G or is absent

SEQ ID NO: 40589 - protein, 39 aa, Artificial Sequence; identical to SEQ ID NO: 14837
  GFR-binding peptide
  MOD_RES (4)..(5)..(37)..(39): Xaa is C or S

SEQ ID NO: 40590 - protein, 37 aa, Artificial Sequence; identical to SEQ ID NO: 16618
  GFR-binding peptide
  MOD_RES (34)..(36): Xaa is C or S
  MOD_RES (14)..(15)..(16)..(17)..(18): Xaa is A or G
  MOD_RES (19)..(20)..(21)..(22): Xaa is A or G or is absent

SEQ ID NO: 40591 - protein, 37 aa, Artificial Sequence; identical to SEQ ID NO: 9317
  GFR-binding peptide
  MOD_RES (3)..(4)..(37): Xaa is C or S
  MOD_RES (18)..(19)..(20)..(21)..(22): Xaa is A or G
  MOD_RES (23)..(24)..(25)..(26): Xaa is A or G or is absent

SEQ ID NO: 40592 - protein, 39 aa, Artificial Sequence; identical to SEQ ID NO: 16620
  GFR-binding peptide
  MOD_RES (4)..(38): Xaa is C or S
  MOD_RES (18)..(19)..(20)..(21)..(22): Xaa is A or G
  MOD_RES (23)..(24)..(25)..(26): Xaa is A or G or is absent

SEQ ID NO: 40593 - protein, 39 aa, Artificial Sequence; identical to SEQ ID NO: 7527
  GFR-binding peptide
  MOD_RES (5)..(6): Xaa is C or S
  MOD_RES (20)..(21)..(22)..(23)..(24): Xaa is A or G
  MOD_RES (25)..(26)..(27)..(28): Xaa is A or G or is absent

SEQ ID NO: 40594 - protein, 37 aa, Artificial Sequence; identical to SEQ ID NO: 14839
  GFR-binding peptide
  MOD_RES (34)..(36): Xaa is C or S
  MOD_RES (14)..(15)..(16)..(17)..(18): Xaa is A or G
  MOD_RES (19)..(20)..(21)..(22): Xaa is A or G or is absent

SEQ ID NO: 40595 - protein, 38 aa, Artificial Sequence; identical to SEQ ID NO: 14840
  GFR-binding peptide
  MOD_RES (4)..(5): Xaa is C or S
  MOD_RES (19)..(20)..(21)..(22)..(23): Xaa is A or G
  MOD_RES (24)..(25)..(26)..(27): Xaa is A or G or is absent

SEQ ID NO: 40596 - protein, 42 aa, Artificial Sequence; identical to SEQ ID NO: 14841
  GFR-binding peptide
  MOD_RES (5)..(6)..(40)..(42): Xaa is C or S
  MOD_RES (20)..(21)..(22)..(23)..(24): Xaa is A or G
  MOD_RES (25)..(26)..(27)..(28): Xaa is A or G or is absent

SEQ ID NO: 40597 - protein, 33 aa, Artificial Sequence; identical to SEQ ID NO: 14842
  GFR-binding peptide
  MOD_RES (31)..(33): Xaa is C or S

SEQ ID NO: 40598 - protein, 35 aa, Artificial Sequence; identical to SEQ ID NO: 14843
  GFR-binding peptide
  MOD_RES (1)..(33)..(35): Xaa is C or S

SEQ ID NO: 40599 - protein, 41 aa, Artificial Sequence; identical to SEQ ID NO: 16621
  GFR-binding peptide
  MOD_RES (4)..(5)..(39)..(41): Xaa is C or S
  MOD_RES (19)..(20)..(21)..(22)..(23): Xaa is A or G
  MOD_RES (24)..(25)..(26)..(27): Xaa is A or G or is absent

SEQ ID NO: 40600 - protein, 37 aa, Artificial Sequence; identical to SEQ ID NO: 14844
  GFR-binding peptide
  MOD_RES (3)..(35)..(37): Xaa is C or S

SEQ ID NO: 40601 - protein, 42 aa, Artificial Sequence; identical to SEQ ID NO: 14845
  GFR-binding peptide
  MOD_RES (5)..(6)..(39)..(41): Xaa is C or S
  MOD_RES (20)..(21)..(22)..(23)..(24): Xaa is A or G
  MOD_RES (25)..(26)..(27)..(28): Xaa is A or G or is absent

SEQ ID NO: 40602 - protein, 35 aa, Artificial Sequence; identical to SEQ ID NO: 16624
  GFR-binding peptide
  MOD_RES (32)..(34): Xaa is C or S

SEQ ID NO: 40603 - protein, 41 aa, Artificial Sequence; identical to SEQ ID NO: 16625
  GFR-binding peptide
  MOD_RES (7)..(41): Xaa is C or S
  MOD_RES (21)..(22)..(23)..(24)..(25): Xaa is A or G
  MOD_RES (26)..(27)..(28)..(29): Xaa is A or G or is absent

SEQ ID NO: 40604 - protein, 35 aa, Artificial Sequence; identical to SEQ ID NO: 9324
  GFR-binding peptide
  MOD_RES (1)..(33)..(35): Xaa is C or S

SEQ ID NO: 40605 - protein, 34 aa, Artificial Sequence; identical to SEQ ID NO: 14846
  GFR-binding peptide
  MOD_RES (34)..(34): Xaa is C or S
  MOD_RES (14)..(15)..(16)..(17)..(18): Xaa is A or G
  MOD_RES (19)..(20)..(21)..(22): Xaa is A or G or is absent

SEQ ID NO: 40606 - protein, 43 aa, Artificial Sequence; identical to SEQ ID NO: 14847
  GFR-binding peptide
  MOD_RES (5)..(6)..(40)..(42): Xaa is C or S
  MOD_RES (20)..(21)..(22)..(23)..(24): Xaa is A or G
  MOD_RES (25)..(26)..(27)..(28): Xaa is A or G or is absent

SEQ ID NO: 40607 - protein, 37 aa, Artificial Sequence; identical to SEQ ID NO: 9327
  GFR-binding peptide
  MOD_RES (1)..(2)..(35)..(37): Xaa is C or S
  MOD_RES (16)..(17)..(18)..(19)..(20): Xaa is A or G
  MOD_RES (21)..(22)..(23)..(24): Xaa is A or G or is absent

SEQ ID NO: 40608 - protein, 35 aa, Artificial Sequence; identical to SEQ ID NO: 16628
  GFR-binding peptide
  MOD_RES (33)..(35): Xaa is C or S
  MOD_RES (14)..(15)..(16)..(17)..(18): Xaa is A or G
  MOD_RES (19)..(20)..(21)..(22): Xaa is A or G or is absent

SEQ ID NO: 40609 - protein, 37 aa, Artificial Sequence; identical to SEQ ID NO: 9328
  GFR-binding peptide
  MOD_RES (3)..(4)..(36): Xaa is C or S

SEQ ID NO: 40610 - protein, 35 aa, Artificial Sequence; identical to SEQ ID NO: 16630
  GFR-binding peptide
  MOD_RES (2)..(3): Xaa is C or S
  MOD_RES (17)..(18)..(19)..(20)..(21): Xaa is A or G
  MOD_RES (22)..(23)..(24)..(25): Xaa is A or G or is absent

SEQ ID NO: 40611 - protein, 32 aa, Artificial Sequence; identical to SEQ ID NO: 16631
  GFR-binding peptide
  MOD_RES (32)..(32): Xaa is C or S

SEQ ID NO: 40612 - protein, 37 aa, Artificial Sequence; identical to SEQ ID NO: 14849
  GFR-binding peptide
  MOD_RES (2)..(3)..(36): Xaa is C or S
  MOD_RES (17)..(18)..(19)..(20)..(21): Xaa is A or G
  MOD_RES (22)..(23)..(24)..(25): Xaa is A or G or is absent

SEQ ID NO: 40613 - protein, 42 aa, Artificial Sequence; identical to SEQ ID NO: 14850
  GFR-binding peptide
  MOD_RES (5)..(6)..(40)..(42): Xaa is C or S
  MOD_RES (20)..(21)..(22)..(23)..(24): Xaa is A or G
  MOD_RES (25)..(26)..(27)..(28): Xaa is A or G or is absent

SEQ ID NO: 40614 - protein, 36 aa, Artificial Sequence; identical to SEQ ID NO: 9330
  GFR-binding peptide
  MOD_RES (34)..(36): Xaa is C or S
  MOD_RES (14)..(15)..(16)..(17)..(18): Xaa is A or G
  MOD_RES (19)..(20)..(21)..(22): Xaa is A or G or is absent

SEQ ID NO: 40615 - protein, 37 aa, Artificial Sequence; identical to SEQ ID NO: 7537
  GFR-binding peptide
  MOD_RES (1)..(34)..(36): Xaa is C or S
  MOD_RES (15)..(16)..(17)..(18)..(19): Xaa is A or G
  MOD_RES (20)..(21)..(22)..(23): Xaa is A or G or is absent

SEQ ID NO: 40616 - protein, 35 aa, Artificial Sequence; identical to SEQ ID NO: 9332
  GFR-binding peptide
  MOD_RES (3)..(4)..(35): Xaa is C or S

SEQ ID NO: 40617 - protein, 38 aa, Artificial Sequence; identical to SEQ ID NO: 16635
  GFR-binding peptide
  MOD_RES (5)..(6): Xaa is C or S
  MOD_RES (20)..(21)..(22)..(23)..(24): Xaa is A or G
  MOD_RES (25)..(26)..(27)..(28): Xaa is A or G or is absent

SEQ ID NO: 40618 - protein, 39 aa, Artificial Sequence; identical to SEQ ID NO: 16636
  GFR-binding peptide
  MOD_RES (5)..(6): Xaa is C or S
  MOD_RES (20)..(21)..(22)..(23)..(24): Xaa is A or G
  MOD_RES (25)..(26)..(27)..(28): Xaa is A or G or is absent

SEQ ID NO: 40619 - protein, 39 aa, Artificial Sequence; identical to SEQ ID NO: 7538
  GFR-binding peptide
  MOD_RES (5)..(6)..(37)..(39): Xaa is C or S

SEQ ID NO: 40620 - protein, 40 aa, Artificial Sequence; identical to SEQ ID NO: 14853
  GFR-binding peptide
  MOD_RES (3)..(4)..(38)..(40): Xaa is C or S
  MOD_RES (18)..(19)..(20)..(21)..(22): Xaa is A or G
  MOD_RES (23)..(24)..(25)..(26): Xaa is A or G or is absent

SEQ ID NO: 40621 - protein, 36 aa, Artificial Sequence; identical to SEQ ID NO: 14854
  GFR-binding peptide
  MOD_RES (1)..(33)..(35): Xaa is C or S

SEQ ID NO: 40622 - protein, 35 aa, Artificial Sequence; identical to SEQ ID NO: 9335
  GFR-binding peptide
  MOD_RES (2)..(3)..(34): Xaa is C or S

SEQ ID NO: 40623 - protein, 37 aa, Artificial Sequence; identical to SEQ ID NO: 16639
  GFR-binding peptide
  MOD_RES (6)..(7): Xaa is C or S

SEQ ID NO: 40624 - protein, 40 aa, Artificial Sequence; identical to SEQ ID NO: 14856
  GFR-binding peptide
  MOD_RES (3)..(4)..(38)..(40): Xaa is C or S
  MOD_RES (18)..(19)..(20)..(21)..(22): Xaa is A or G
  MOD_RES (23)..(24)..(25)..(26): Xaa is A or G or is absent

SEQ ID NO: 40625 - protein, 38 aa, Artificial Sequence; identical to SEQ ID NO: 7543
  GFR-binding peptide
  MOD_RES (2)..(3)..(37): Xaa is C or S
  MOD_RES (17)..(18)..(19)..(20)..(21): Xaa is A or G
  MOD_RES (22)..(23)..(24)..(25): Xaa is A or G or is absent

SEQ ID NO: 40626 - protein, 35 aa, Artificial Sequence; identical to SEQ ID NO: 16641
  GFR-binding peptide
  MOD_RES (1)..(35): Xaa is C or S
  MOD_RES (15)..(16)..(17)..(18)..(19): Xaa is A or G
  MOD_RES (20)..(21)..(22)..(23): Xaa is A or G or is absent

SEQ ID NO: 40627 - protein, 38 aa, Artificial Sequence; identical to SEQ ID NO: 14859
  GFR-binding peptide
  MOD_RES (3)..(4)..(36)..(38): Xaa is C or S

SEQ ID NO: 40628 - protein, 33 aa, Artificial Sequence; identical to SEQ ID NO: 16642
  GFR-binding peptide
  MOD_RES (1)..(1): Xaa is C or S
  MOD_RES (15)..(16)..(17)..(18)..(19): Xaa is A or G
  MOD_RES (20)..(21)..(22)..(23): Xaa is A or G or is absent

SEQ ID NO: 40629 - protein, 38 aa, Artificial Sequence; identical to SEQ ID NO: 7546
  GFR-binding peptide
  MOD_RES (1)..(35)..(37): Xaa is C or S
  MOD_RES (15)..(16)..(17)..(18)..(19): Xaa is A or G
  MOD_RES (20)..(21)..(22)..(23): Xaa is A or G or is absent

SEQ ID NO: 40630 - protein, 37 aa, Artificial Sequence; identical to SEQ ID NO: 7549
  GFR-binding peptide
  MOD_RES (6)..(7): Xaa is C or S

SEQ ID NO: 40631 - protein, 37 aa, Artificial Sequence; identical to SEQ ID NO: 14864
  GFR-binding peptide
  MOD_RES (1)..(2)..(35)..(37): Xaa is C or S
  MOD_RES (16)..(17)..(18)..(19)..(20): Xaa is A or G
  MOD_RES (21)..(22)..(23)..(24): Xaa is A or G or is absent

SEQ ID NO: 40632 - protein, 41 aa, Artificial Sequence; identical to SEQ ID NO: 7553
  GFR-binding peptide
  MOD_RES (5)..(6)..(40): Xaa is C or S
  MOD_RES (20)..(21)..(22)..(23)..(24): Xaa is A or G
  MOD_RES (25)..(26)..(27)..(28): Xaa is A or G or is absent

SEQ ID NO: 40633 - protein, 31 aa, Artificial Sequence; identical to SEQ ID NO: 9343
  GFR-binding peptide

SEQ ID NO: 40634 - protein, 38 aa, Artificial Sequence; identical to SEQ ID NO: 16645
  GFR-binding peptide
  MOD_RES (2)..(3)..(37): Xaa is C or S
  MOD_RES (17)..(18)..(19)..(20)..(21): Xaa is A or G
  MOD_RES (22)..(23)..(24)..(25): Xaa is A or G or is absent

SEQ ID NO: 40635 - protein, 37 aa, Artificial Sequence; identical to SEQ ID NO: 7556
  GFR-binding peptide
  MOD_RES (4)..(5): Xaa is C or S
  MOD_RES (19)..(20)..(21)..(22)..(23): Xaa is A or G
  MOD_RES (24)..(25)..(26)..(27): Xaa is A or G or is absent

SEQ ID NO: 40636 - protein, 41 aa, Artificial Sequence; identical to SEQ ID NO: 16646
  GFR-binding peptide
  MOD_RES (6)..(7)..(39)..(41): Xaa is C or S

SEQ ID NO: 40637 - protein, 41 aa, Artificial Sequence; identical to SEQ ID NO: 14869
  GFR-binding peptide
  MOD_RES (6)..(7)..(41): Xaa is C or S
  MOD_RES (21)..(22)..(23)..(24)..(25): Xaa is A or G
  MOD_RES (26)..(27)..(28)..(29): Xaa is A or G or is absent

SEQ ID NO: 40638 - protein, 40 aa, Artificial Sequence; identical to SEQ ID NO: 16647
  GFR-binding peptide
  MOD_RES (5)..(6)..(40): Xaa is C or S
  MOD_RES (20)..(21)..(22)..(23)..(24): Xaa is A or G
  MOD_RES (25)..(26)..(27)..(28): Xaa is A or G or is absent

SEQ ID NO: 40639 - protein, 40 aa, Artificial Sequence; identical to SEQ ID NO: 16648
  GFR-binding peptide
  MOD_RES (5)..(6)..(38)..(40): Xaa is C or S

SEQ ID NO: 40640 - protein, 33 aa, Artificial Sequence; identical to SEQ ID NO: 14870
  GFR-binding peptide
  MOD_RES (1)..(1): Xaa is C or S
  MOD_RES (15)..(16)..(17)..(18)..(19): Xaa is A or G
  MOD_RES (20)..(21)..(22)..(23): Xaa is A or G or is absent

SEQ ID NO: 40641 - protein, 38 aa, Artificial Sequence; identical to SEQ ID NO: 14871
  GFR-binding peptide
  MOD_RES (5)..(6): Xaa is C or S
  MOD_RES (20)..(21)..(22)..(23)..(24): Xaa is A or G
  MOD_RES (25)..(26)..(27)..(28): Xaa is A or G or is absent

SEQ ID NO: 40642 - protein, 32 aa, Artificial Sequence; identical to SEQ ID NO: 14872
  GFR-binding peptide
  MOD_RES (1)..(2): Xaa is C or S

SEQ ID NO: 40643 - protein, 42 aa, Artificial Sequence; identical to SEQ ID NO: 14873
  GFR-binding peptide
  MOD_RES (5)..(39)..(41): Xaa is C or S
  MOD_RES (19)..(20)..(21)..(22)..(23): Xaa is A or G
  MOD_RES (24)..(25)..(26)..(27): Xaa is A or G or is absent

SEQ ID NO: 40644 - protein, 35 aa, Artificial Sequence; identical to SEQ ID NO: 14874
  GFR-binding peptide
  MOD_RES (1)..(34): Xaa is C or S
  MOD_RES (15)..(16)..(17)..(18)..(19): Xaa is A or G
  MOD_RES (20)..(21)..(22)..(23): Xaa is A or G or is absent

SEQ ID NO: 40645 - protein, 39 aa, Artificial Sequence; identical to SEQ ID NO: 16649
  GFR-binding peptide
  MOD_RES (3)..(4)..(36)..(38): Xaa is C or S

SEQ ID NO: 40646 - protein, 37 aa, Artificial Sequence; identical to SEQ ID NO: 14875
  GFR-binding peptide
  MOD_RES (1)..(2)..(36): Xaa is C or S
  MOD_RES (16)..(17)..(18)..(19)..(20): Xaa is A or G
  MOD_RES (21)..(22)..(23)..(24): Xaa is A or G or is absent

SEQ ID NO: 40647 - protein, 36 aa, Artificial Sequence; identical to SEQ ID NO: 14879
  GFR-binding peptide
  MOD_RES (2)..(3)..(35): Xaa is C or S

SEQ ID NO: 40648 - protein, 33 aa, Artificial Sequence; identical to SEQ ID NO: 16652
  GFR-binding peptide
  MOD_RES (2)..(3): Xaa is C or S

SEQ ID NO: 40649 - protein, 38 aa, Artificial Sequence; identical to SEQ ID NO: 14880
  GFR-binding peptide
  MOD_RES (6)..(7)..(38): Xaa is C or S

SEQ ID NO: 40650 - protein, 35 aa, Artificial Sequence; identical to SEQ ID NO: 14881
  GFR-binding peptide
  MOD_RES (32)..(34): Xaa is C or S

SEQ ID NO: 40651 - protein, 39 aa, Artificial Sequence; identical to SEQ ID NO: 9352
  GFR-binding peptide
  MOD_RES (5)..(6)..(38): Xaa is C or S

SEQ ID NO: 40652 - protein, 32 aa, Artificial Sequence
  GFR-binding peptide
  MOD_RES (14)..(15)..(16)..(17)..(18): Xaa is A or G
  MOD_RES (19)..(20)..(21)..(22): Xaa is A or G or is absent
VSQDLEPLTILYYXXXXXXXXXEQLSNMIVKS

SEQ ID NO: 40653 - protein, 40 aa, Artificial Sequence; identical to SEQ ID NO: 14882
  GFR-binding peptide
  MOD_RES (5)..(6)..(38)..(40): Xaa is C or S

SEQ ID NO: 40654 - protein, 36 aa, Artificial Sequence; identical to SEQ ID NO: 7572
  GFR-binding peptide
  MOD_RES (34)..(36): Xaa is C or S
  MOD_RES (14)..(15)..(16)..(17)..(18): Xaa is A or G
  MOD_RES (19)..(20)..(21)..(22): Xaa is A or G or is absent

SEQ ID NO: 40655 - protein, 40 aa, Artificial Sequence; identical to SEQ ID NO: 16655
  GFR-binding peptide
  MOD_RES (5)..(6)..(38)..(40): Xaa is C or S

SEQ ID NO: 40656 - protein, 40 aa, Artificial Sequence; identical to SEQ ID NO: 14884
  GFR-binding peptide
  MOD_RES (5)..(6)..(40): Xaa is C or S
  MOD_RES (20)..(21)..(22)..(23)..(24): Xaa is A or G
  MOD_RES (25)..(26)..(27)..(28): Xaa is A or G or is absent

SEQ ID NO: 40657 - protein, 39 aa, Artificial Sequence; identical to SEQ ID NO: 16656
  GFR-binding peptide
  MOD_RES (6)..(7)..(39): Xaa is C or S

SEQ ID NO: 40658 - protein, 39 aa, Artificial Sequence; identical to SEQ ID NO: 16657
  GFR-binding peptide
  MOD_RES (5)..(6)..(38): Xaa is C or S

SEQ ID NO: 40659 - protein, 35 aa, Artificial Sequence; identical to SEQ ID NO: 9359
  GFR-binding peptide
  MOD_RES (4)..(5): Xaa is C or S

SEQ ID NO: 40660 - protein, 36 aa, Artificial Sequence; identical to SEQ ID NO: 16659
  GFR-binding peptide
  MOD_RES (1)..(2)..(33)..(35): Xaa is C or S

SEQ ID NO: 40661 - protein, 38 aa, Artificial Sequence; identical to SEQ ID NO: 9361
  GFR-binding peptide
  MOD_RES (3)..(4)..(38): Xaa is C or S
  MOD_RES (18)..(19)..(20)..(21)..(22): Xaa is A or G
  MOD_RES (23)..(24)..(25)..(26): Xaa is A or G or is absent

SEQ ID NO: 40662 - protein, 36 aa, Artificial Sequence; identical to SEQ ID NO: 16661
  GFR-binding peptide
  MOD_RES (1)..(33)..(35): Xaa is C or S

SEQ ID NO: 40663 - protein, 33 aa, Artificial Sequence; identical to SEQ ID NO: 14886
  GFR-binding peptide
  MOD_RES (1)..(2)..(33): Xaa is C or S

SEQ ID NO: 40664 - protein, 42 aa, Artificial Sequence; identical to SEQ ID NO: 16663
  GFR-binding peptide
  MOD_RES (4)..(5)..(39)..(41): Xaa is C or S
  MOD_RES (19)..(20)..(21)..(22)..(23): Xaa is A or G
  MOD_RES (24)..(25)..(26)..(27): Xaa is A or G or is absent

SEQ ID NO: 40665 - protein, 40 aa, Artificial Sequence; identical to SEQ ID NO: 7580
  GFR-binding peptide
  MOD_RES (4)..(5)..(39): Xaa is C or S
  MOD_RES (19)..(20)..(21)..(22)..(23): Xaa is A or G
  MOD_RES (24)..(25)..(26)..(27): Xaa is A or G or is absent

SEQ ID NO: 40666 - protein, 37 aa, Artificial Sequence; identical to SEQ ID NO: 14888
  GFR-binding peptide
  MOD_RES (4)..(5): Xaa is C or S
  MOD_RES (19)..(20)..(21)..(22)..(23): Xaa is A or G
  MOD_RES (24)..(25)..(26)..(27): Xaa is A or G or is absent

SEQ ID NO: 40667 - protein, 36 aa, Artificial Sequence; identical to SEQ ID NO: 16664
  GFR-binding peptide
  MOD_RES (1)..(2)..(33)..(35): Xaa is C or S

SEQ ID NO: 40668 - protein, 38 aa, Artificial Sequence; identical to SEQ ID NO: 16666
  GFR-binding peptide
  MOD_RES (3)..(4)..(36)..(38): Xaa is C or S

SEQ ID NO: 40669 - protein, 37 aa, Artificial Sequence; identical to SEQ ID NO: 14889
  GFR-binding peptide
  MOD_RES (1)..(2)..(36): Xaa is C or S
  MOD_RES (16)..(17)..(18)..(19)..(20): Xaa is A or G
  MOD_RES (21)..(22)..(23)..(24): Xaa is A or G or is absent

SEQ ID NO: 40670 - protein, 39 aa, Artificial Sequence; identical to SEQ ID NO: 14890
  GFR-binding peptide
  MOD_RES (4)..(5)..(38): Xaa is C or S
  MOD_RES (19)..(20)..(21)..(22)..(23): Xaa is A or G
  MOD_RES (24)..(25)..(26)..(27): Xaa is A or G or is absent

SEQ ID NO: 40671 - protein, 38 aa, Artificial Sequence; identical to SEQ ID NO: 16667
  GFR-binding peptide
  MOD_RES (5)..(6): Xaa is C or S
  MOD_RES (20)..(21)..(22)..(23)..(24): Xaa is A or G
  MOD_RES (25)..(26)..(27)..(28): Xaa is A or G or is absent

SEQ ID NO: 40672 - protein, 39 aa, Artificial Sequence; identical to SEQ ID NO: 7585
  GFR-binding peptide
  MOD_RES (6)..(7): Xaa is C or S
  MOD_RES (21)..(22)..(23)..(24)..(25): Xaa is A or G
  MOD_RES (26)..(27)..(28)..(29): Xaa is A or G or is absent

SEQ ID NO: 40673 - protein, 39 aa, Artificial Sequence; identical to SEQ ID NO: 16668
  GFR-binding peptide
  MOD_RES (4)..(5)..(37)..(39): Xaa is C or S

SEQ ID NO: 40674 - protein, 39 aa, Artificial Sequence; identical to SEQ ID NO: 14892
  GFR-binding peptide
  MOD_RES (1)..(2)..(36)..(38): Xaa is C or S
  MOD_RES (16)..(17)..(18)..(19)..(20): Xaa is A or G
  MOD_RES (21)..(22)..(23)..(24): Xaa is A or G or is absent

SEQ ID NO: 40675 - protein, 34 aa, Artificial Sequence; identical to SEQ ID NO: 14893
  GFR-binding peptide
  MOD_RES (34)..(34): Xaa is C or S
  MOD_RES (14)..(15)..(16)..(17)..(18): Xaa is A or G
  MOD_RES (19)..(20)..(21)..(22): Xaa is A or G or is absent

SEQ ID NO: 40676 - protein, 35 aa, Artificial Sequence; identical to SEQ ID NO: 14894
  GFR-binding peptide
  MOD_RES (1)..(2): Xaa is C or S
  MOD_RES (16)..(17)..(18)..(19)..(20): Xaa is A or G
  MOD_RES (21)..(22)..(23)..(24): Xaa is A or G or is absent

SEQ ID NO: 40677 - protein, 40 aa, Artificial Sequence; identical to SEQ ID NO: 16669
  GFR-binding peptide
  MOD_RES (2)..(3)..(37)..(39): Xaa is C or S
  MOD_RES (17)..(18)..(19)..(20)..(21): Xaa is A or G
  MOD_RES (22)..(23)..(24)..(25): Xaa is A or G or is absent

SEQ ID NO: 40678 - protein, 44 aa, Artificial Sequence; identical to SEQ ID NO: 16670
  GFR-binding peptide
  MOD_RES (7)..(41)..(43): Xaa is C or S
  MOD_RES (21)..(22)..(23)..(24)..(25): Xaa is A or G
  MOD_RES (26)..(27)..(28)..(29): Xaa is A or G or is absent

SEQ ID NO: 40679 - protein, 33 aa, Artificial Sequence; identical to SEQ ID NO: 16671
  GFR-binding peptide
  MOD_RES (32)..(32): Xaa is C or S

SEQ ID NO: 40680 - protein, 39 aa, Artificial Sequence; identical to SEQ ID NO: 14896
  GFR-binding peptide
  MOD_RES (5)..(6): Xaa is C or S
  MOD_RES (20)..(21)..(22)..(23)..(24): Xaa is A or G
  MOD_RES (25)..(26)..(27)..(28): Xaa is A or G or is absent

SEQ ID NO: 40681 - protein, 35 aa, Artificial Sequence; identical to SEQ ID NO: 7592
  GFR-binding peptide
  MOD_RES (1)..(2)..(35): Xaa is C or S
  MOD_RES (16)..(17)..(18)..(19)..(20): Xaa is A or G
  MOD_RES (21)..(22)..(23)..(24): Xaa is A or G or is absent

SEQ ID NO: 40682 - protein, 39 aa, Artificial Sequence; identical to SEQ ID NO: 9373
  GFR-binding peptide
  MOD_RES (4)..(5)..(36)..(38): Xaa is C or S

SEQ ID NO: 40683 - protein, 41 aa, Artificial Sequence; identical to SEQ ID NO: 16673
  GFR-binding peptide
  MOD_RES (3)..(4)..(38)..(40): Xaa is C or S
  MOD_RES (18)..(19)..(20)..(21)..(22): Xaa is A or G
  MOD_RES (23)..(24)..(25)..(26): Xaa is A or G or is absent

SEQ ID NO: 40684 - protein, 42 aa, Artificial Sequence; identical to SEQ ID NO: 16674
  GFR-binding peptide
  MOD_RES (4)..(5)..(39)..(41): Xaa is C or S
  MOD_RES (19)..(20)..(21)..(22)..(23): Xaa is A or G
  MOD_RES (24)..(25)..(26)..(27): Xaa is A or G or is absent

SEQ ID NO: 40685 - protein, 40 aa, Artificial Sequence; identical to SEQ ID NO: 16675
  GFR-binding peptide
  MOD_RES (5)..(6)..(40): Xaa is C or S
  MOD_RES (20)..(21)..(22)..(23)..(24): Xaa is A or G
  MOD_RES (25)..(26)..(27)..(28): Xaa is A or G or is absent

SEQ ID NO: 40686 - protein, 36 aa, Artificial Sequence; identical to SEQ ID NO: 16676
  GFR-binding peptide
  MOD_RES (33)..(35): Xaa is C or S
  MOD_RES (14)..(15)..(16)..(17)..(18): Xaa is A or G
  MOD_RES (19)..(20)..(21)..(22): Xaa is A or G or is absent

SEQ ID NO: 40687 - protein, 33 aa, Artificial Sequence; identical to SEQ ID NO: 16677
  GFR-binding peptide
  MOD_RES (1)..(2): Xaa is C or S

SEQ ID NO: 40688 - protein, 33 aa, Artificial Sequence; identical to SEQ ID NO: 16678
  GFR-binding peptide
  MOD_RES (1)..(2)..(33): Xaa is C or S

SEQ ID NO: 40689 - protein, 36 aa, Artificial Sequence; identical to SEQ ID NO: 14898
  GFR-binding peptide
  MOD_RES (5)..(6): Xaa is C or S

SEQ ID NO: 40690 - protein, 35 aa, Artificial Sequence; identical to SEQ ID NO: 16679
  GFR-binding peptide
  MOD_RES (3)..(4)..(35): Xaa is C or S

SEQ ID NO: 40691 - protein, 41 aa, Artificial Sequence; identical to SEQ ID NO: 16680
  GFR-binding peptide
  MOD_RES (5)..(6)..(38)..(40): Xaa is C or S

SEQ ID NO: 40692 - protein, 42 aa, Artificial Sequence; identical to SEQ ID NO: 14900
  GFR-binding peptide
  MOD_RES (4)..(5)..(39)..(41): Xaa is C or S
  MOD_RES (19)..(20)..(21)..(22)..(23): Xaa is A or G
  MOD_RES (24)..(25)..(26)..(27): Xaa is A or G or is absent

SEQ ID NO: 40693 - protein, 40 aa, Artificial Sequence; identical to SEQ ID NO: 14901
  GFR-binding peptide
  MOD_RES (6)..(7): Xaa is C or S
  MOD_RES (21)..(22)..(23)..(24)..(25): Xaa is A or G
  MOD_RES (26)..(27)..(28)..(29): Xaa is A or G or is absent

SEQ ID NO: 40694 - protein, 43 aa, Artificial Sequence; identical to SEQ ID NO: 14902
  GFR-binding peptide
  MOD_RES (6)..(40)..(42): Xaa is C or S
  MOD_RES (20)..(21)..(22)..(23)..(24): Xaa is A or G
  MOD_RES (25)..(26)..(27)..(28): Xaa is A or G or is absent

SEQ ID NO: 40695 - protein, 32 aa, Artificial Sequence; identical to SEQ ID NO: 16684
  GFR-binding peptide
  MOD_RES (14)..(15)..(16)..(17)..(18): Xaa is A or G
  MOD_RES (19)..(20)..(21)..(22): Xaa is A or G or is absent

SEQ ID NO: 40696 - protein, 32 aa, Artificial Sequence; identical to SEQ ID NO: 14903
  GFR-binding peptide
  MOD_RES (1)..(2): Xaa is C or S

SEQ ID NO: 40697 - protein, 38 aa, Artificial Sequence; identical to SEQ ID NO: 16685
  GFR-binding peptide
  MOD_RES (5)..(5): Xaa is C or S
  MOD_RES (19)..(20)..(21)..(22)..(23): Xaa is A or G
  MOD_RES (24)..(25)..(26)..(27): Xaa is A or G or is absent

SEQ ID NO: 40698 - protein, 32 aa, Artificial Sequence; identical to SEQ ID NO: 9383
  GFR-binding peptide
  MOD_RES (14)..(15)..(16)..(17)..(18): Xaa is A or G
  MOD_RES (19)..(20)..(21)..(22): Xaa is A or G or is absent

SEQ ID NO: 40699 - protein, 35 aa, Artificial Sequence; identical to SEQ ID NO: 7603
  GFR-binding peptide
  MOD_RES (2)..(3)..(34): Xaa is C or S

SEQ ID NO: 40700 - protein, 40 aa, Artificial Sequence; identical to SEQ ID NO: 14907
  GFR-binding peptide
  MOD_RES (4)..(5)..(39): Xaa is C or S
  MOD_RES (19)..(20)..(21)..(22)..(23): Xaa is A or G
  MOD_RES (24)..(25)..(26)..(27): Xaa is A or G or is absent

SEQ ID NO: 40701 - protein, 40 aa, Artificial Sequence; identical to SEQ ID NO: 16688
  GFR-binding peptide
  MOD_RES (5)..(39): Xaa is C or S
  MOD_RES (19)..(20)..(21)..(22)..(23): Xaa is A or G
  MOD_RES (24)..(25)..(26)..(27): Xaa is A or G or is absent

SEQ ID NO: 40702 - protein, 39 aa, Artificial Sequence; identical to SEQ ID NO: 9387
  GFR-binding peptide
  MOD_RES (4)..(5)..(39): Xaa is C or S
  MOD_RES (19)..(20)..(21)..(22)..(23): Xaa is A or G
  MOD_RES (24)..(25)..(26)..(27): Xaa is A or G or is absent

SEQ ID NO: 40703 - protein, 35 aa, Artificial Sequence; identical to SEQ ID NO: 7607
  GFR-binding peptide
  MOD_RES (4)..(5): Xaa is C or S

SEQ ID NO: 40704 - protein, 38 aa, Artificial Sequence; identical to SEQ ID NO: 9390
  GFR-binding peptide
  MOD_RES (1)..(2)..(35)..(37): Xaa is C or S
  MOD_RES (16)..(17)..(18)..(19)..(20): Xaa is A or G
  MOD_RES (21)..(22)..(23)..(24): Xaa is A or G or is absent

SEQ ID NO: 40705 - protein, 40 aa, Artificial Sequence; identical to SEQ ID NO: 16691
  GFR-binding peptide
  MOD_RES (5)..(6)..(38)..(40): Xaa is C or S

SEQ ID NO: 40706 - protein, 37 aa, Artificial Sequence; identical to SEQ ID NO: 14909
  GFR-binding peptide
  MOD_RES (3)..(4)..(36): Xaa is C or S

SEQ ID NO: 40707 - protein, 35 aa, Artificial Sequence; identical to SEQ ID NO: 16692
  GFR-binding peptide
  MOD_RES (2)..(3): Xaa is C or S
  MOD_RES (17)..(18)..(19)..(20)..(21): Xaa is A or G
  MOD_RES (22)..(23)..(24)..(25): Xaa is A or G or is absent

SEQ ID NO: 40708 - protein, 33 aa, Artificial Sequence; identical to SEQ ID NO: 16693
  GFR-binding peptide
  MOD_RES (2)..(3): Xaa is C or S

SEQ ID NO: 40709 - protein, 39 aa, Artificial Sequence; identical to SEQ ID NO: 16694
  GFR-binding peptide
  MOD_RES (6)..(7)..(39): Xaa is C or S

SEQ ID NO: 40710 - protein, 40 aa, Artificial Sequence; identical to SEQ ID NO: 14910
  GFR-binding peptide
  MOD_RES (6)..(7)..(39): Xaa is C or S

SEQ ID NO: 40711 - protein, 39 aa, Artificial Sequence; identical to SEQ ID NO: 16696
  GFR-binding peptide
  MOD_RES (6)..(7): Xaa is C or S
  MOD_RES (21)..(22)..(23)..(24)..(25): Xaa is A or G
  MOD_RES (26)..(27)..(28)..(29): Xaa is A or G or is absent

SEQ ID NO: 40712 - protein, 36 aa, Artificial Sequence; identical to SEQ ID NO: 14911
  GFR-binding peptide
  MOD_RES (4)..(5)..(36): Xaa is C or S

SEQ ID NO: 40713 - protein, 32 aa, Artificial Sequence; identical to SEQ ID NO: 7611
  GFR-binding peptide
  MOD_RES (32)..(32): Xaa is C or S

SEQ ID NO: 40714 - protein, 42 aa, Artificial Sequence; identical to SEQ ID NO: 14913
  GFR-binding peptide
  MOD_RES (6)..(7)..(41): Xaa is C or S
  MOD_RES (21)..(22)..(23)..(24)..(25): Xaa is A or G
  MOD_RES (26)..(27)..(28)..(29): Xaa is A or G or is absent

SEQ ID NO: 40715 - protein, 38 aa, Artificial Sequence; identical to SEQ ID NO: 14914
  GFR-binding peptide
  MOD_RES (2)..(3)..(37): Xaa is C or S
  MOD_RES (17)..(18)..(19)..(20)..(21): Xaa is A or G
  MOD_RES (22)..(23)..(24)..(25): Xaa is A or G or is absent

SEQ ID NO: 40716 - protein, 33 aa, Artificial Sequence; identical to SEQ ID NO: 16698
  GFR-binding peptide
  MOD_RES (1)..(33): Xaa is C or S

SEQ ID NO: 40717 - protein, 33 aa, Artificial Sequence; identical to SEQ ID NO: 14915
  GFR-binding peptide
  MOD_RES (1)..(2): Xaa is C or S

SEQ ID NO: 40718 - protein, 33 aa, Artificial Sequence; identical to SEQ ID NO: 14916
  GFR-binding peptide
  MOD_RES (1)..(2): Xaa is C or S

SEQ ID NO: 40719 - protein, 37 aa, Artificial Sequence; identical to SEQ ID NO: 16700
  GFR-binding peptide
  MOD_RES (2)..(3)..(35)..(37): Xaa is C or S

SEQ ID NO: 40720 - protein, 35 aa, Artificial Sequence; identical to SEQ ID NO: 16701
  GFR-binding peptide
  MOD_RES (34)..(34): Xaa is C or S
  MOD_RES (14)..(15)..(16)..(17)..(18): Xaa is A or G
  MOD_RES (19)..(20)..(21)..(22): Xaa is A or G or is absent

SEQ ID NO: 40721 - protein, 33 aa, Artificial Sequence; identical to SEQ ID NO: 14918
  GFR-binding peptide
  MOD_RES (1)..(1): Xaa is C or S
  MOD_RES (15)..(16)..(17)..(18)..(19): Xaa is A or G
  MOD_RES (20)..(21)..(22)..(23): Xaa is A or G or is absent

SEQ ID NO: 40722 - protein, 39 aa, Artificial Sequence; identical to SEQ ID NO: 16703
  GFR-binding peptide
  MOD_RES (5)..(6)..(39): Xaa is C or S
  MOD_RES (20)..(21)..(22)..(23)..(24): Xaa is A or G
  MOD_RES (25)..(26)..(27)..(28): Xaa is A or G or is absent

SEQ ID NO: 40723 - protein, 40 aa, Artificial Sequence; identical to SEQ ID NO: 16704
  GFR-binding peptide
  MOD_RES (4)..(5)..(37)..(39): Xaa is C or S

SEQ ID NO: 40724 - protein, 40 aa, Artificial Sequence; identical to SEQ ID NO: 14919
  GFR-binding peptide
  MOD_RES (3)..(4)..(37)..(39): Xaa is C or S
  MOD_RES (18)..(19)..(20)..(21)..(22): Xaa is A or G
  MOD_RES (23)..(24)..(25)..(26): Xaa is A or G or is absent

SEQ ID NO: 40725 - protein, 35 aa, Artificial Sequence; identical to SEQ ID NO: 16706
  GFR-binding peptide
  MOD_RES (3)..(4): Xaa is C or S

SEQ ID NO: 40726 - protein, 37 aa, Artificial Sequence; identical to SEQ ID NO: 14920
  GFR-binding peptide
  MOD_RES (5)..(6): Xaa is C or S

SEQ ID NO: 40727 - protein, 33 aa, Artificial Sequence; identical to SEQ ID NO: 14921
  GFR-binding peptide
  MOD_RES (14)..(15)..(16)..(17)..(18): Xaa is A or G
  MOD_RES (19)..(20)..(21)..(22): Xaa is A or G or is absent

SEQ ID NO: 40728 - protein, 34 aa, Artificial Sequence; identical to SEQ ID NO: 9404
  GFR-binding peptide
  MOD_RES (1)..(2)..(34): Xaa is C or S

SEQ ID NO: 40729 - protein, 39 aa, Artificial Sequence; identical to SEQ ID NO: 14922
  GFR-binding peptide
  MOD_RES (4)..(5)..(37)..(39): Xaa is C or S

SEQ ID NO: 40730 - protein, 33 aa, Artificial Sequence; identical to SEQ ID NO: 16708
  GFR-binding peptide
  MOD_RES (32)..(32): Xaa is C or S

SEQ ID NO: 40731 - protein, 35 aa, Artificial Sequence; identical to SEQ ID NO: 16709
  GFR-binding peptide
  MOD_RES (2)..(3): Xaa is C or S
  MOD_RES (17)..(18)..(19)..(20)..(21): Xaa is A or G
  MOD_RES (22)..(23)..(24)..(25): Xaa is A or G or is absent

SEQ ID NO: 40732 - protein, 34 aa, Artificial Sequence; identical to SEQ ID NO: 14923
  GFR-binding peptide
  MOD_RES (1)..(2): Xaa is C or S
  MOD_RES (16)..(17)..(18)..(19)..(20): Xaa is A or G
  MOD_RES (21)..(22)..(23)..(24): Xaa is A or G or is absent

SEQ ID NO: 40733 - protein, 42 aa, Artificial Sequence; identical to SEQ ID NO: 16711
  GFR-binding peptide
  MOD_RES (6)..(7)..(39)..(41): Xaa is C or S

SEQ ID NO: 40734 - protein, 37 aa, Artificial Sequence; identical to SEQ ID NO: 9406
  GFR-binding peptide
  MOD_RES (4)..(5)..(36): Xaa is C or S

SEQ ID NO: 40735 - protein, 33 aa, Artificial Sequence; identical to SEQ ID NO: 14924
  GFR-binding peptide
  MOD_RES (32)..(32): Xaa is C or S

SEQ ID NO: 40736 - protein, 38 aa, Artificial Sequence; identical to SEQ ID NO: 16713
  GFR-binding peptide
  MOD_RES (5)..(6): Xaa is C or S
  MOD_RES (20)..(21)..(22)..(23)..(24): Xaa is A or G
  MOD_RES (25)..(26)..(27)..(28): Xaa is A or G or is absent

SEQ ID NO: 40737 - protein, 36 aa, Artificial Sequence; identical to SEQ ID NO: 14925
  GFR-binding peptide
  MOD_RES (1)..(2)..(36): Xaa is C or S
  MOD_RES (16)..(17)..(18)..(19)..(20): Xaa is A or G
  MOD_RES (21)..(22)..(23)..(24): Xaa is A or G or is absent

SEQ ID NO: 40738 - protein, 41 aa, Artificial Sequence; identical to SEQ ID NO: 14927
  GFR-binding peptide
  MOD_RES (7)..(41): Xaa is C or S
  MOD_RES (21)..(22)..(23)..(24)..(25): Xaa is A or G
  MOD_RES (26)..(27)..(28)..(29): Xaa is A or G or is absent

SEQ ID NO: 40739 - protein, 37 aa, Artificial Sequence; identical to SEQ ID NO: 16714
  GFR-binding peptide
  MOD_RES (2)..(3)..(37): Xaa is C or S
  MOD_RES (17)..(18)..(19)..(20)..(21): Xaa is A or G
  MOD_RES (22)..(23)..(24)..(25): Xaa is A or G or is absent

SEQ ID NO: 40740 - protein, 43 aa, Artificial Sequence; identical to SEQ ID NO: 16716
  GFR-binding peptide
  MOD_RES (6)..(7)..(41)..(43): Xaa is C or S
  MOD_RES (21)..(22)..(23)..(24)..(25): Xaa is A or G
  MOD_RES (26)..(27)..(28)..(29): Xaa is A or G or is absent

SEQ ID NO: 40741 - protein, 34 aa, Artificial Sequence; identical to SEQ ID NO: 14929
  GFR-binding peptide
  MOD_RES (3)..(4): Xaa is C or S

SEQ ID NO: 40742 - protein, 42 aa, Artificial Sequence; identical to SEQ ID NO: 14930
  GFR-binding peptide
  MOD_RES (6)..(7)..(39)..(41): Xaa is C or S

SEQ ID NO: 40743 - protein, 38 aa, Artificial Sequence; identical to SEQ ID NO: 14931
  GFR-binding peptide
  MOD_RES (1)..(35)..(37): Xaa is C or S
  MOD_RES (15)..(16)..(17)..(18)..(19): Xaa is A or G
  MOD_RES (20)..(21)..(22)..(23): Xaa is A or G or is absent

SEQ ID NO: 40744 - protein, 39 aa, Artificial Sequence; identical to SEQ ID NO: 14932
  GFR-binding peptide
  MOD_RES (3)..(4)..(36)..(38): Xaa is C or S

SEQ ID NO: 40745 - protein, 34 aa, Artificial Sequence; identical to SEQ ID NO: 7626
  GFR-binding peptide
  MOD_RES (1)..(2)..(33): Xaa is C or S

SEQ ID NO: 40746 - protein, 36 aa, Artificial Sequence; identical to SEQ ID NO: 16717
  GFR-binding peptide
  MOD_RES (3)..(4): Xaa is C or S
  MOD_RES (18)..(19)..(20)..(21)..(22): Xaa is A or G
  MOD_RES (23)..(24)..(25)..(26): Xaa is A or G or is absent

SEQ ID NO: 40747 - protein, 32 aa, Artificial Sequence; identical to SEQ ID NO: 9416
  GFR-binding peptide
  MOD_RES (1)..(32): Xaa is C or S

SEQ ID NO: 40748 - protein, 38 aa, Artificial Sequence; identical to SEQ ID NO: 14934
  GFR-binding peptide
  MOD_RES (5)..(6)..(37): Xaa is C or S

SEQ ID NO: 40749 - protein, 36 aa, Artificial Sequence; identical to SEQ ID NO: 7629
  GFR-binding peptide
  MOD_RES (3)..(4): Xaa is C or S
  MOD_RES (18)..(19)..(20)..(21)..(22): Xaa is A or G
  MOD_RES (23)..(24)..(25)..(26): Xaa is A or G or is absent

SEQ ID NO: 40750 - protein, 38 aa, Artificial Sequence; identical to SEQ ID NO: 14936
  GFR-binding peptide
  MOD_RES (3)..(4)..(36)..(38): Xaa is C or S

SEQ ID NO: 40751 - protein, 33 aa, Artificial Sequence; identical to SEQ ID NO: 16720
  GFR-binding peptide
  MOD_RES (1)..(1): Xaa is C or S
  MOD_RES (15)..(16)..(17)..(18)..(19): Xaa is A or G
  MOD_RES (20)..(21)..(22)..(23): Xaa is A or G or is absent

SEQ ID NO: 40752 - protein, 39 aa, Artificial Sequence
  GFR-binding peptide
  MOD_RES (6)..(7): Xaa is C or S
  MOD_RES (21)..(22)..(23)..(24)..(25): Xaa is A or G
  MOD_RES (26)..(27)..(28)..(29): Xaa is A or G or is absent
ASASPXXVSQDLEPLTILYYXXXXXXXXXEQLSNMIVKS

SEQ ID NO: 40753 - protein, 37 aa, Artificial Sequence; identical to SEQ ID NO: 14937
  GFR-binding peptide
  MOD_RES (3)..(37): Xaa is C or S
  MOD_RES (17)..(18)..(19)..(20)..(21): Xaa is A or G
  MOD_RES (22)..(23)..(24)..(25): Xaa is A or G or is absent

SEQ ID NO: 40754 - protein, 35 aa, Artificial Sequence; identical to SEQ ID NO: 14938
  GFR-binding peptide
  MOD_RES (3)..(4): Xaa is C or S

SEQ ID NO: 40755 - protein, 34 aa, Artificial Sequence; identical to SEQ ID NO: 14939
  GFR-binding peptide
  MOD_RES (1)..(2): Xaa is C or S
  MOD_RES (16)..(17)..(18)..(19)..(20): Xaa is A or G
  MOD_RES (21)..(22)..(23)..(24): Xaa is A or G or is absent

SEQ ID NO: 40756 - protein, 36 aa, Artificial Sequence; identical to SEQ ID NO: 9420
  GFR-binding peptide
  MOD_RES (2)..(3): Xaa is C or S
  MOD_RES (17)..(18)..(19)..(20)..(21): Xaa is A or G
  MOD_RES (22)..(23)..(24)..(25): Xaa is A or G or is absent

SEQ ID NO: 40757 - protein, 38 aa, Artificial Sequence; identical to SEQ ID NO: 14940
  GFR-binding peptide
  MOD_RES (2)..(3)..(37): Xaa is C or S
  MOD_RES (17)..(18)..(19)..(20)..(21): Xaa is A or G
  MOD_RES (22)..(23)..(24)..(25): Xaa is A or G or is absent

SEQ ID NO: 40758 - protein, 32 aa, Artificial Sequence; identical to SEQ ID NO: 16722
  GFR-binding peptide
  MOD_RES (32)..(32): Xaa is C or S

SEQ ID NO: 40759 - protein, 40 aa, Artificial Sequence; identical to SEQ ID NO: 14941
  GFR-binding peptide
  MOD_RES (6)..(7)..(40): Xaa is C or S
  MOD_RES (21)..(22)..(23)..(24)..(25): Xaa is A or G
  MOD_RES (26)..(27)..(28)..(29): Xaa is A or G or is absent

SEQ ID NO: 40760 - protein, 34 aa, Artificial Sequence; identical to SEQ ID NO: 14942
  GFR-binding peptide
  MOD_RES (1)..(1): Xaa is C or S
  MOD_RES (15)..(16)..(17)..(18)..(19): Xaa is A or G
  MOD_RES (20)..(21)..(22)..(23): Xaa is A or G or is absent

SEQ ID NO: 40761 - protein, 43 aa, Artificial Sequence; identical to SEQ ID NO: 16723
  GFR-binding peptide
  MOD_RES (5)..(6)..(40)..(42): Xaa is C or S
  MOD_RES (20)..(21)..(22)..(23)..(24): Xaa is A or G
  MOD_RES (25)..(26)..(27)..(28): Xaa is A or G or is absent

SEQ ID NO: 40762 - protein, 35 aa, Artificial Sequence; identical to SEQ ID NO: 14943
  GFR-binding peptide
  MOD_RES (1)..(2)..(34): Xaa is C or S

SEQ ID NO: 40763 - protein, 37 aa, Artificial Sequence; identical to SEQ ID NO: 16724
  GFR-binding peptide
  MOD_RES (3)..(35)..(37): Xaa is C or S

SEQ ID NO: 40764 - protein, 35 aa, Artificial Sequence; identical to SEQ ID NO: 14944
  GFR-binding peptide
  MOD_RES (4)..(5): Xaa is C or S

SEQ ID NO: 40765 - protein, 37 aa, Artificial Sequence; identical to SEQ ID NO: 14945
  GFR-binding peptide
  MOD_RES (3)..(4): Xaa is C or S
  MOD_RES (18)..(19)..(20)..(21)..(22): Xaa is A or G
  MOD_RES (23)..(24)..(25)..(26): Xaa is A or G or is absent

SEQ ID NO: 40766 - protein, 37 aa, Artificial Sequence; identical to SEQ ID NO: 14946
  GFR-binding peptide
  MOD_RES (3)..(4)..(35)..(37): Xaa is C or S

SEQ ID NO: 40767 - protein, 34 aa, Artificial Sequence; identical to SEQ ID NO: 16725
  GFR-binding peptide
  MOD_RES (1)..(2)..(34): Xaa is C or S

SEQ ID NO: 40768 - protein, 37 aa, Artificial Sequence; identical to SEQ ID NO: 14947
  GFR-binding peptide
  MOD_RES (4)..(5): Xaa is C or S
  MOD_RES (19)..(20)..(21)..(22)..(23): Xaa is A or G
  MOD_RES (24)..(25)..(26)..(27): Xaa is A or G or is absent

SEQ ID NO: 40769 - protein, 39 aa, Artificial Sequence; identical to SEQ ID NO: 16726
  GFR-binding peptide
  MOD_RES (5)..(6)..(39): Xaa is C or S
  MOD_RES (20)..(21)..(22)..(23)..(24): Xaa is A or G
  MOD_RES (25)..(26)..(27)..(28): Xaa is A or G or is absent

SEQ ID NO: 40770 - protein, 36 aa, Artificial Sequence; identical to SEQ ID NO: 7635
  GFR-binding peptide
  MOD_RES (2)..(3)..(34)..(36): Xaa is C or S

SEQ ID NO: 40771 - protein, 41 aa, Artificial Sequence; identical to SEQ ID NO: 16727
  GFR-binding peptide
  MOD_RES (7)..(39)..(41): Xaa is C or S

SEQ ID NO: 40772 - protein, 37 aa, Artificial Sequence; identical to SEQ ID NO: 16728
  GFR-binding peptide
  MOD_RES (1)..(2)..(36): Xaa is C or S
  MOD_RES (16)..(17)..(18)..(19)..(20): Xaa is A or G
  MOD_RES (21)..(22)..(23)..(24): Xaa is A or G or is absent

SEQ ID NO: 40773 - protein, 36 aa, Artificial Sequence
  GFR-binding peptide
  MOD_RES (33)..(35): Xaa is C or S
  MOD_RES (14)..(15)..(16)..(17)..(18): Xaa is A or G
  MOD_RES (19)..(20)..(21)..(22): Xaa is A or G or is absent
VSQDLEPLTILYYXXXXXXXXXEQLSNMIVKSXKXS

SEQ ID NO: 40774 - protein, 40 aa, Artificial Sequence; identical to SEQ ID NO: 16730
  GFR-binding peptide
  MOD_RES (6)..(7)..(40): Xaa is C or S
  MOD_RES (21)..(22)..(23)..(24)..(25): Xaa is A or G
  MOD_RES (26)..(27)..(28)..(29): Xaa is A or G or is absent

SEQ ID NO: 40775 - protein, 31 aa, Artificial Sequence; identical to SEQ ID NO: 16732
  GFR-binding peptide

SEQ ID NO: 40776 - protein, 34 aa, Artificial Sequence; identical to SEQ ID NO: 14949
  GFR-binding peptide
  MOD_RES (32)..(34): Xaa is C or S

SEQ ID NO: 40777 - protein, 34 aa, Artificial Sequence; identical to SEQ ID NO: 14950
  GFR-binding peptide
  MOD_RES (34)..(34): Xaa is C or S
  MOD_RES (14)..(15)..(16)..(17)..(18): Xaa is A or G
  MOD_RES (19)..(20)..(21)..(22): Xaa is A or G or is absent

SEQ ID NO: 40778 - protein, 38 aa, Artificial Sequence; identical to SEQ ID NO: 7639
  GFR-binding peptide
  MOD_RES (4)..(5): Xaa is C or S
  MOD_RES (19)..(20)..(21)..(22)..(23): Xaa is A or G
  MOD_RES (24)..(25)..(26)..(27): Xaa is A or G or is absent

SEQ ID NO: 40779 - protein, 38 aa, Artificial Sequence; identical to SEQ ID NO: 16733
  GFR-binding peptide
  MOD_RES (6)..(7): Xaa is C or S

SEQ ID NO: 40780 - protein, 40 aa, Artificial Sequence; identical to SEQ ID NO: 7641
  GFR-binding peptide
  MOD_RES (6)..(7): Xaa is C or S
  MOD_RES (21)..(22)..(23)..(24)..(25): Xaa is A or G
  MOD_RES (26)..(27)..(28)..(29): Xaa is A or G or is absent

SEQ ID NO: 40781 - protein, 39 aa, Artificial Sequence; identical to SEQ ID NO: 16734
  GFR-binding peptide
  MOD_RES (4)..(5)..(39): Xaa is C or S
  MOD_RES (19)..(20)..(21)..(22)..(23): Xaa is A or G
  MOD_RES (24)..(25)..(26)..(27): Xaa is A or G or is absent

SEQ ID NO: 40782 - protein, 38 aa, Artificial Sequence; identical to SEQ ID NO: 16737
  GFR-binding peptide
  MOD_RES (3)..(4)..(37): Xaa is C or S
  MOD_RES (18)..(19)..(20)..(21)..(22): Xaa is A or G
  MOD_RES (23)..(24)..(25)..(26): Xaa is A or G or is absent

SEQ ID NO: 40783 - protein, 41 aa, Artificial Sequence; identical to SEQ ID NO: 16738
  GFR-binding peptide
  MOD_RES (6)..(7)..(39)..(41): Xaa is C or S

SEQ ID NO: 40784 - protein, 39 aa, Artificial Sequence; identical to SEQ ID NO: 14953
  GFR-binding peptide
  MOD_RES (4)..(5)..(38): Xaa is C or S
  MOD_RES (19)..(20)..(21)..(22)..(23): Xaa is A or G
  MOD_RES (24)..(25)..(26)..(27): Xaa is A or G or is absent

SEQ ID NO: 40785 - protein, 43 aa, Artificial Sequence; identical to SEQ ID NO: 16739
  GFR-binding peptide
  MOD_RES (5)..(6)..(40)..(42): Xaa is C or S
  MOD_RES (20)..(21)..(22)..(23)..(24): Xaa is A or G
  MOD_RES (25)..(26)..(27)..(28): Xaa is A or G or is absent

SEQ ID NO: 40786 - protein, 37 aa, Artificial Sequence; identical to SEQ ID NO: 16742
  GFR-binding peptide
  MOD_RES (1)..(2)..(34)..(36): Xaa is C or S

SEQ ID NO: 40787 - protein, 30 aa, Artificial Sequence; identical to SEQ ID NO: 9444
  GFR-binding peptide

SEQ ID NO: 40788 - protein, 37 aa, Artificial Sequence; identical to SEQ ID NO: 14956
  GFR-binding peptide
  MOD_RES (34)..(36): Xaa is C or S
  MOD_RES (14)..(15)..(16)..(17)..(18): Xaa is A or G
  MOD_RES (19)..(20)..(21)..(22): Xaa is A or G or is absent

SEQ ID NO: 40789 - protein, 34 aa, Artificial Sequence; identical to SEQ ID NO: 14957
  GFR-binding peptide
  MOD_RES (1)..(2): Xaa is C or S
  MOD_RES (16)..(17)..(18)..(19)..(20): Xaa is A or G
  MOD_RES (21)..(22)..(23)..(24): Xaa is A or G or is absent

SEQ ID NO: 40790 - protein, 35 aa, Artificial Sequence; identical to SEQ ID NO: 16744
  GFR-binding peptide
  MOD_RES (34)..(34): Xaa is C or S
  MOD_RES (14)..(15)..(16)..(17)..(18): Xaa is A or G
  MOD_RES (19)..(20)..(21)..(22): Xaa is A or G or is absent

SEQ ID NO: 40791 - protein, 40 aa, Artificial Sequence; identical to SEQ ID NO: 14958
  GFR-binding peptide
  MOD_RES (5)..(37)..(39): Xaa is C or S

SEQ ID NO: 40792 - protein, 36 aa, Artificial Sequence; identical to SEQ ID NO: 16746
  GFR-binding peptide
  MOD_RES (2)..(3)..(35): Xaa is C or S

SEQ ID NO: 40793 - protein, 37 aa, Artificial Sequence; identical to SEQ ID NO: 16751
  GFR-binding peptide
  MOD_RES (3)..(4): Xaa is C or S
  MOD_RES (18)..(19)..(20)..(21)..(22): Xaa is A or G
  MOD_RES (23)..(24)..(25)..(26): Xaa is A or G or is absent

SEQ ID NO: 40794 - protein, 31 aa, Artificial Sequence; identical to SEQ ID NO: 16754
  GFR-binding peptide
  MOD_RES (1)..(1): Xaa is C or S

SEQ ID NO: 40795 - protein, 42 aa, Artificial Sequence; identical to SEQ ID NO: 16755
  GFR-binding peptide
  MOD_RES (5)..(6)..(40)..(42): Xaa is C or S
  MOD_RES (20)..(21)..(22)..(23)..(24): Xaa is A or G
  MOD_RES (25)..(26)..(27)..(28): Xaa is A or G or is absent

SEQ ID NO: 40796 - protein, 33 aa, Artificial Sequence; identical to SEQ ID NO: 16756
  GFR-binding peptide
  MOD_RES (32)..(32): Xaa is C or S

SEQ ID NO: 40797 - protein, 38 aa, Artificial Sequence; identical to SEQ ID NO: 16757
  GFR-binding peptide
  MOD_RES (3)..(4)..(35)..(37): Xaa is C or S

SEQ ID NO: 40798 - protein, 39 aa, Artificial Sequence; identical to SEQ ID NO: 14962
  GFR-binding peptide
  MOD_RES (4)..(5)..(37)..(39): Xaa is C or S

SEQ ID NO: 40799 - protein, 38 aa, Artificial Sequence; identical to SEQ ID NO: 16759
  GFR-binding peptide
  MOD_RES (5)..(6)..(37): Xaa is C or S

SEQ ID NO: 40800 - protein, 41 aa, Artificial Sequence; identical to SEQ ID NO: 16760
  GFR-binding peptide
  MOD_RES (5)..(6)..(38)..(40): Xaa is C or S

SEQ ID NO: 40801 - protein, 36 aa, Artificial Sequence; identical to SEQ ID NO: 16761
  GFR-binding peptide
  MOD_RES (1)..(33)..(35): Xaa is C or S

SEQ ID NO: 40802 - protein, 36 aa, Artificial Sequence; identical to SEQ ID NO: 16762
  GFR-binding peptide
  MOD_RES (3)..(4): Xaa is C or S
  MOD_RES (18)..(19)..(20)..(21)..(22): Xaa is A or G
  MOD_RES (23)..(24)..(25)..(26): Xaa is A or G or is absent

SEQ ID NO: 40803 - protein, 39 aa, Artificial Sequence; identical to SEQ ID NO: 16763
  GFR-binding peptide
  MOD_RES (4)..(5)..(39): Xaa is C or S
  MOD_RES (19)..(20)..(21)..(22)..(23): Xaa is A or G
  MOD_RES (24)..(25)..(26)..(27): Xaa is A or G or is absent

SEQ ID NO: 40804 - protein, 39 aa, Artificial Sequence; identical to SEQ ID NO: 14964
  GFR-binding peptide
  MOD_RES (5)..(6)..(38): Xaa is C or S

SEQ ID NO: 40805 - protein, 38 aa, Artificial Sequence; identical to SEQ ID NO: 7663
  GFR-binding peptide
  MOD_RES (4)..(5)..(36)..(38): Xaa is C or S

SEQ ID NO: 40806 - protein, 35 aa, Artificial Sequence; identical to SEQ ID NO: 16764
  GFR-binding peptide
  MOD_RES (1)..(2)..(35): Xaa is C or S
  MOD_RES (16)..(17)..(18)..(19)..(20): Xaa is A or G
  MOD_RES (21)..(22)..(23)..(24): Xaa is A or G or is absent

SEQ ID NO: 40807 - protein, 41 aa, Artificial Sequence; identical to SEQ ID NO: 14966
  GFR-binding peptide
  MOD_RES (6)..(7)..(41): Xaa is C or S
  MOD_RES (21)..(22)..(23)..(24)..(25): Xaa is A or G
  MOD_RES (26)..(27)..(28)..(29): Xaa is A or G or is absent

SEQ ID NO: 40808 - protein, 34 aa, Artificial Sequence; identical to SEQ ID NO: 16766
  GFR-binding peptide
  MOD_RES (3)..(4): Xaa is C or S

SEQ ID NO: 40809 - protein, 34 aa, Artificial Sequence; identical to SEQ ID NO: 16767
  GFR-binding peptide
  MOD_RES (1)..(1): Xaa is C or S
  MOD_RES (15)..(16)..(17)..(18)..(19): Xaa is A or G
  MOD_RES (20)..(21)..(22)..(23): Xaa is A or G or is absent

SEQ ID NO: 40810 - protein, 33 aa, Artificial Sequence; identical to SEQ ID NO: 16768
  GFR-binding peptide
  MOD_RES (1)..(33): Xaa is C or S

SEQ ID NO: 40811 - protein, 37 aa, Artificial Sequence; identical to SEQ ID NO: 14967
  GFR-binding peptide
  MOD_RES (1)..(2)..(35)..(37): Xaa is C or S
  MOD_RES (16)..(17)..(18)..(19)..(20): Xaa is A or G
  MOD_RES (21)..(22)..(23)..(24): Xaa is A or G or is absent

SEQ ID NO: 40812 - protein, 37 aa, Artificial Sequence; identical to SEQ ID NO: 14968
  GFR-binding peptide
  MOD_RES (5)..(6)..(37): Xaa is C or S

SEQ ID NO: 40813 - protein, 42 aa, Artificial Sequence; identical to SEQ ID NO: 14969
  GFR-binding peptide
  MOD_RES (7)..(41): Xaa is C or S
  MOD_RES (21)..(22)..(23)..(24)..(25): Xaa is A or G
  MOD_RES (26)..(27)..(28)..(29): Xaa is A or G or is absent

SEQ ID NO: 40814 - protein, 41 aa, Artificial Sequence; identical to SEQ ID NO: 14970
  GFR-binding peptide
  MOD_RES (7)..(39)..(41): Xaa is C or S

SEQ ID NO: 40815 - protein, 35 aa, Artificial Sequence; identical to SEQ ID NO: 14972
  GFR-binding peptide
  MOD_RES (4)..(5): Xaa is C or S

SEQ ID NO: 40816 - protein, 36 aa, Artificial Sequence; identical to SEQ ID NO: 9468
  GFR-binding peptide
  MOD_RES (3)..(4)..(35): Xaa is C or S

SEQ ID NO: 40817 - protein, 34 aa, Artificial Sequence; identical to SEQ ID NO: 7671
  GFR-binding peptide
  MOD_RES (32)..(34): Xaa is C or S

SEQ ID NO: 40818 - protein, 39 aa, Artificial Sequence; identical to SEQ ID NO: 16772
  GFR-binding peptide
  MOD_RES (6)..(7)..(39): Xaa is C or S

SEQ ID NO: 40819 - protein, 35 aa, Artificial Sequence; identical to SEQ ID NO: 16773
  GFR-binding peptide
  MOD_RES (2)..(3): Xaa is C or S
  MOD_RES (17)..(18)..(19)..(20)..(21): Xaa is A or G
  MOD_RES (22)..(23)..(24)..(25): Xaa is A or G or is absent

SEQ ID NO: 40820 - protein, 40 aa, Artificial Sequence; identical to SEQ ID NO: 16774
  GFR-binding peptide
  MOD_RES (6)..(38)..(40): Xaa is C or S

SEQ ID NO: 40821 - protein, 35 aa, Artificial Sequence; identical to SEQ ID NO: 9474
  GFR-binding peptide
  MOD_RES (2)..(3)..(34): Xaa is C or S

SEQ ID NO: 40822 - protein, 39 aa, Artificial Sequence; identical to SEQ ID NO: 16777
  GFR-binding peptide
  MOD_RES (4)..(5)..(39): Xaa is C or S
  MOD_RES (19)..(20)..(21)..(22)..(23): Xaa is A or G
  MOD_RES (24)..(25)..(26)..(27): Xaa is A or G or is absent

SEQ ID NO: 40823 - protein, 36 aa, Artificial Sequence; identical to SEQ ID NO: 7673
  GFR-binding peptide
  MOD_RES (2)..(3)..(35): Xaa is C or S

SEQ ID NO: 40824 - protein, 34 aa, Artificial Sequence; identical to SEQ ID NO: 16778
  GFR-binding peptide
  MOD_RES (1)..(33): Xaa is C or S

SEQ ID NO: 40825 - protein, 33 aa, Artificial Sequence; identical to SEQ ID NO: 14975
  GFR-binding peptide
  MOD_RES (14)..(15)..(16)..(17)..(18): Xaa is A or G
  MOD_RES (19)..(20)..(21)..(22): Xaa is A or G or is absent

SEQ ID NO: 40826 - protein, 37 aa, Artificial Sequence; identical to SEQ ID NO: 16779
  GFR-binding peptide
  MOD_RES (3)..(4)..(37): Xaa is C or S
  MOD_RES (18)..(19)..(20)..(21)..(22): Xaa is A or G
  MOD_RES (23)..(24)..(25)..(26): Xaa is A or G or is absent

SEQ ID NO: 40827 - protein, 38 aa, Artificial Sequence; identical to SEQ ID NO: 14977
  GFR-binding peptide
  MOD_RES (4)..(5)..(37): Xaa is C or S

SEQ ID NO: 40828 - protein, 30 aa, Artificial Sequence; identical to SEQ ID NO: 14978
  GFR-binding peptide

SEQ ID NO: 40829 - protein, 42 aa, Artificial Sequence; identical to SEQ ID NO: 16780
  GFR-binding peptide
  MOD_RES (5)..(6)..(40)..(42): Xaa is C or S
  MOD_RES (20)..(21)..(22)..(23)..(24): Xaa is A or G
  MOD_RES (25)..(26)..(27)..(28): Xaa is A or G or is absent

SEQ ID NO: 40830 - protein, 40 aa, Artificial Sequence; identical to SEQ ID NO: 16781
  GFR-binding peptide
  MOD_RES (5)..(37)..(39): Xaa is C or S

SEQ ID NO: 40831 - protein, 38 aa, Artificial Sequence; identical to SEQ ID NO: 16782
  GFR-binding peptide
  MOD_RES (3)..(4)..(38): Xaa is C or S
  MOD_RES (18)..(19)..(20)..(21)..(22): Xaa is A or G
  MOD_RES (23)..(24)..(25)..(26): Xaa is A or G or is absent

SEQ ID NO: 40832 - protein, 38 aa, Artificial Sequence; identical to SEQ ID NO: 14979
  GFR-binding peptide
  MOD_RES (2)..(3)..(36)..(38): Xaa is C or S
  MOD_RES (17)..(18)..(19)..(20)..(21): Xaa is A or G
  MOD_RES (22)..(23)..(24)..(25): Xaa is A or G or is absent

SEQ ID NO: 40833 - protein, 30 aa, Artificial Sequence; identical to SEQ ID NO: 16783
  GFR-binding peptide

SEQ ID NO: 40834 - protein, 43 aa, Artificial Sequence; identical to SEQ ID NO: 14980
  GFR-binding peptide
  MOD_RES (5)..(6)..(40)..(42): Xaa is C or S
  MOD_RES (20)..(21)..(22)..(23)..(24): Xaa is A or G
  MOD_RES (25)..(26)..(27)..(28): Xaa is A or G or is absent

SEQ ID NO: 40835 - protein, 37 aa, Artificial Sequence; identical to SEQ ID NO: 16784
  GFR-binding peptide
  MOD_RES (4)..(5): Xaa is C or S
  MOD_RES (19)..(20)..(21)..(22)..(23): Xaa is A or G
  MOD_RES (24)..(25)..(26)..(27): Xaa is A or G or is absent

SEQ ID NO: 40836 - protein, 35 aa, Artificial Sequence; identical to SEQ ID NO: 16785
  GFR-binding peptide
  MOD_RES (32)..(34): Xaa is C or S

SEQ ID NO: 40837 - protein, 41 aa, Artificial Sequence; identical to SEQ ID NO: 9485
  GFR-binding peptide
  MOD_RES (3)..(4)..(38)..(40): Xaa is C or S
  MOD_RES (18)..(19)..(20)..(21)..(22): Xaa is A or G
  MOD_RES (23)..(24)..(25)..(26): Xaa is A or G or is absent

SEQ ID NO: 40838 - protein, 34 aa, Artificial Sequence; identical to SEQ ID NO: 16788
  GFR-binding peptide
  MOD_RES (32)..(34): Xaa is C or S

SEQ ID NO: 40839 - protein, 36 aa, Artificial Sequence; identical to SEQ ID NO: 16789
  GFR-binding peptide
  MOD_RES (1)..(2)..(36): Xaa is C or S
  MOD_RES (16)..(17)..(18)..(19)..(20): Xaa is A or G
  MOD_RES (21)..(22)..(23)..(24): Xaa is A or G or is absent

SEQ ID NO: 40840 - protein, 37 aa, Artificial Sequence; identical to SEQ ID NO: 7680
  GFR-binding peptide
  MOD_RES (1)..(35)..(37): Xaa is C or S
  MOD_RES (15)..(16)..(17)..(18)..(19): Xaa is A or G
  MOD_RES (20)..(21)..(22)..(23): Xaa is A or G or is absent

SEQ ID NO: 40841 - protein, 40 aa, Artificial Sequence; identical to SEQ ID NO: 9492
  GFR-binding peptide
  MOD_RES (2)..(3)..(37)..(39): Xaa is C or S
  MOD_RES (17)..(18)..(19)..(20)..(21): Xaa is A or G
  MOD_RES (22)..(23)..(24)..(25): Xaa is A or G or is absent

SEQ ID NO: 40842 - protein, 35 aa, Artificial Sequence; identical to SEQ ID NO: 14982
  GFR-binding peptide
  MOD_RES (1)..(2)..(34): Xaa is C or S

SEQ ID NO: 40843 - protein, 35 aa, Artificial Sequence; identical to SEQ ID NO: 7682
  GFR-binding peptide
  MOD_RES (4)..(5): Xaa is C or S

SEQ ID NO: 40844 - protein, 41 aa, Artificial Sequence; identical to SEQ ID NO: 7683
  GFR-binding peptide
  MOD_RES (6)..(7)..(40): Xaa is C or S
  MOD_RES (21)..(22)..(23)..(24)..(25): Xaa is A or G
  MOD_RES (26)..(27)..(28)..(29): Xaa is A or G or is absent

SEQ ID NO: 40845 - protein, 39 aa, Artificial Sequence; identical to SEQ ID NO: 16792
  GFR-binding peptide
  MOD_RES (3)..(37)..(39): Xaa is C or S
  MOD_RES (17)..(18)..(19)..(20)..(21): Xaa is A or G
  MOD_RES (22)..(23)..(24)..(25): Xaa is A or G or is absent

SEQ ID NO: 40846 - protein, 37 aa, Artificial Sequence; identical to SEQ ID NO: 16793
  GFR-binding peptide
  MOD_RES (3)..(4): Xaa is C or S
  MOD_RES (18)..(19)..(20)..(21)..(22): Xaa is A or G
  MOD_RES (23)..(24)..(25)..(26): Xaa is A or G or is absent

SEQ ID NO: 40847 - protein, 35 aa, Artificial Sequence; identical to SEQ ID NO: 14985
  GFR-binding peptide
  MOD_RES (33)..(35): Xaa is C or S
  MOD_RES (14)..(15)..(16)..(17)..(18): Xaa is A or G
  MOD_RES (19)..(20)..(21)..(22): Xaa is A or G or is absent

SEQ ID NO: 40848 - protein, 41 aa, Artificial Sequence; identical to SEQ ID NO: 14986
  GFR-binding peptide
  MOD_RES (3)..(4)..(38)..(40): Xaa is C or S
  MOD_RES (18)..(19)..(20)..(21)..(22): Xaa is A or G
  MOD_RES (23)..(24)..(25)..(26): Xaa is A or G or is absent

SEQ ID NO: 40849 - protein, 41 aa, Artificial Sequence; identical to SEQ ID NO: 14987
  GFR-binding peptide
  MOD_RES (3)..(4)..(38)..(40): Xaa is C or S
  MOD_RES (18)..(19)..(20)..(21)..(22): Xaa is A or G
  MOD_RES (23)..(24)..(25)..(26): Xaa is A or G or is absent

SEQ ID NO: 40850 - protein, 38 aa, Artificial Sequence; identical to SEQ ID NO: 16795
  GFR-binding peptide
  MOD_RES (5)..(37): Xaa is C or S

SEQ ID NO: 40851 - protein, 37 aa, Artificial Sequence; identical to SEQ ID NO: 14988
  GFR-binding peptide
  MOD_RES (5)..(6): Xaa is C or S

SEQ ID NO: 40852 - protein, 37 aa, Artificial Sequence; identical to SEQ ID NO: 14989
  GFR-binding peptide
  MOD_RES (1)..(35)..(37): Xaa is C or S
  MOD_RES (15)..(16)..(17)..(18)..(19): Xaa is A or G
  MOD_RES (20)..(21)..(22)..(23): Xaa is A or G or is absent

SEQ ID NO: 40853 - protein, 34 aa, Artificial Sequence; identical to SEQ ID NO: 16797
  GFR-binding peptide
  MOD_RES (3)..(4): Xaa is C or S

SEQ ID NO: 40854 - protein, 39 aa, Artificial Sequence; identical to SEQ ID NO: 7690
  GFR-binding peptide
  MOD_RES (6)..(7): Xaa is C or S
  MOD_RES (21)..(22)..(23)..(24)..(25): Xaa is A or G
  MOD_RES (26)..(27)..(28)..(29): Xaa is A or G or is absent

SEQ ID NO: 40855 - protein, 31 aa, Artificial Sequence; identical to SEQ ID NO: 14991
  GFR-binding peptide
  MOD_RES (1)..(1): Xaa is C or S

SEQ ID NO: 40856 - protein, 38 aa, Artificial Sequence; identical to SEQ ID NO: 14992
  GFR-binding peptide
  MOD_RES (4)..(5): Xaa is C or S
  MOD_RES (19)..(20)..(21)..(22)..(23): Xaa is A or G
  MOD_RES (24)..(25)..(26)..(27): Xaa is A or G or is absent

SEQ ID NO: 40857 - protein, 34 aa, Artificial Sequence; identical to SEQ ID NO: 9499
  GFR-binding peptide
  MOD_RES (34)..(34): Xaa is C or S
  MOD_RES (14)..(15)..(16)..(17)..(18): Xaa is A or G
  MOD_RES (19)..(20)..(21)..(22): Xaa is A or G or is absent

SEQ ID NO: 40858 - protein, 43 aa, Artificial Sequence; identical to SEQ ID NO: 9503
  GFR-binding peptide
  MOD_RES (6)..(7)..(40)..(42): Xaa is C or S
  MOD_RES (21)..(22)..(23)..(24)..(25): Xaa is A or G
  MOD_RES (26)..(27)..(28)..(29): Xaa is A or G or is absent

SEQ ID NO: 40859 - protein, 35 aa, Artificial Sequence; identical to SEQ ID NO: 16801
  GFR-binding peptide
  MOD_RES (2)..(3): Xaa is C or S
  MOD_RES (17)..(18)..(19)..(20)..(21): Xaa is A or G
  MOD_RES (22)..(23)..(24)..(25): Xaa is A or G or is absent

SEQ ID NO: 40860 - protein, 41 aa, Artificial Sequence; identical to SEQ ID NO: 9504
  GFR-binding peptide
  MOD_RES (6)..(7)..(38)..(40): Xaa is C or S

SEQ ID NO: 40861 - protein, 39 aa, Artificial Sequence; identical to SEQ ID NO: 14994
  GFR-binding peptide
  MOD_RES (2)..(3)..(37)..(39): Xaa is C or S
  MOD_RES (17)..(18)..(19)..(20)..(21): Xaa is A or G
  MOD_RES (22)..(23)..(24)..(25): Xaa is A or G or is absent

SEQ ID NO: 40862 - protein, 41 aa, Artificial Sequence; identical to SEQ ID NO: 16804
  GFR-binding peptide
  MOD_RES (7)..(39)..(41): Xaa is C or S

SEQ ID NO: 40863 - protein, 37 aa, Artificial Sequence; identical to SEQ ID NO: 16805
  GFR-binding peptide
  MOD_RES (1)..(35)..(37): Xaa is C or S
  MOD_RES (15)..(16)..(17)..(18)..(19): Xaa is A or G
  MOD_RES (20)..(21)..(22)..(23): Xaa is A or G or is absent

SEQ ID NO: 40864 - protein, 38 aa, Artificial Sequence; identical to SEQ ID NO: 7698
  GFR-binding peptide
  MOD_RES (5)..(6): Xaa is C or S
  MOD_RES (20)..(21)..(22)..(23)..(24): Xaa is A or G
  MOD_RES (25)..(26)..(27)..(28): Xaa is A or G or is absent

SEQ ID NO: 40865 - protein, 38 aa, Artificial Sequence; identical to SEQ ID NO: 16806
  GFR-binding peptide
  MOD_RES (3)..(4)..(38): Xaa is C or S
  MOD_RES (18)..(19)..(20)..(21)..(22): Xaa is A or G
  MOD_RES (23)..(24)..(25)..(26): Xaa is A or G or is absent

SEQ ID NO: 40866 - protein, 35 aa, Artificial Sequence; identical to SEQ ID NO: 9506
  GFR-binding peptide
  MOD_RES (1)..(2)..(34): Xaa is C or S

SEQ ID NO: 40867 - protein, 37 aa, Artificial Sequence; identical to SEQ ID NO: 14996
  GFR-binding peptide
  MOD_RES (1)..(2)..(36): Xaa is C or S
  MOD_RES (16)..(17)..(18)..(19)..(20): Xaa is A or G
  MOD_RES (21)..(22)..(23)..(24): Xaa is A or G or is absent

SEQ ID NO: 40868 - protein, 34 aa, Artificial Sequence; identical to SEQ ID NO: 14997
  GFR-binding peptide
  MOD_RES (2)..(3)..(34): Xaa is C or S

SEQ ID NO: 40869 - protein, 35 aa, Artificial Sequence; identical to SEQ ID NO: 7701
  GFR-binding peptide
  MOD_RES (2)..(3)..(35): Xaa is C or S

SEQ ID NO: 40870 - protein, 41 aa, Artificial Sequence; identical to SEQ ID NO: 14999
  GFR-binding peptide
  MOD_RES (5)..(6)..(40): Xaa is C or S
  MOD_RES (20)..(21)..(22)..(23)..(24): Xaa is A or G
  MOD_RES (25)..(26)..(27)..(28): Xaa is A or G or is absent

SEQ ID NO: 40871 - protein, 35 aa, Artificial Sequence; identical to SEQ ID NO: 7702
  GFR-binding peptide
  MOD_RES (2)..(3): Xaa is C or S
  MOD_RES (17)..(18)..(19)..(20)..(21): Xaa is A or G
  MOD_RES (22)..(23)..(24)..(25): Xaa is A or G or is absent

SEQ ID NO: 40872 - protein, 34 aa, Artificial Sequence; identical to SEQ ID NO: 16808
  GFR-binding peptide
  MOD_RES (33)..(33): Xaa is C or S
  MOD_RES (14)..(15)..(16)..(17)..(18): Xaa is A or G
  MOD_RES (19)..(20)..(21)..(22): Xaa is A or G or is absent

SEQ ID NO: 40873 - protein, 32 aa, Artificial Sequence; identical to SEQ ID NO: 15001
  GFR-binding peptide
  MOD_RES (1)..(1): Xaa is C or S

SEQ ID NO: 40874 - protein, 35 aa, Artificial Sequence; identical to SEQ ID NO: 7704
  GFR-binding peptide
  MOD_RES (1)..(2)..(33)..(35): Xaa is C or S

SEQ ID NO: 40875 - protein, 35 aa, Artificial Sequence; identical to SEQ ID NO: 15003
  GFR-binding peptide
  MOD_RES (3)..(4): Xaa is C or S

SEQ ID NO: 40876 - protein, 41 aa, Artificial Sequence; identical to SEQ ID NO: 16810
  GFR-binding peptide
  MOD_RES (4)..(5)..(39)..(41): Xaa is C or S
  MOD_RES (19)..(20)..(21)..(22)..(23): Xaa is A or G
  MOD_RES (24)..(25)..(26)..(27): Xaa is A or G or is absent

SEQ ID NO: 40877 - protein, 39 aa, Artificial Sequence; identical to SEQ ID NO: 15004
  GFR-binding peptide
  MOD_RES (4)..(36)..(38): Xaa is C or S

SEQ ID NO: 40878 - protein, 35 aa, Artificial Sequence; identical to SEQ ID NO: 15005
  GFR-binding peptide
  MOD_RES (2)..(3): Xaa is C or S
  MOD_RES (17)..(18)..(19)..(20)..(21): Xaa is A or G
  MOD_RES (22)..(23)..(24)..(25): Xaa is A or G or is absent

SEQ ID NO: 40879 - protein, 32 aa, Artificial Sequence; identical to SEQ ID NO: 16811
  GFR-binding peptide
  MOD_RES (1)..(1): Xaa is C or S

SEQ ID NO: 40880 - protein, 40 aa, Artificial Sequence; identical to SEQ ID NO: 16813
  GFR-binding peptide
  MOD_RES (5)..(6)..(38)..(40): Xaa is C or S

SEQ ID NO: 40881 - protein, 34 aa, Artificial Sequence; identical to SEQ ID NO: 15006
  GFR-binding peptide
  MOD_RES (31)..(33): Xaa is C or S

SEQ ID NO: 40882 - protein, 38 aa, Artificial Sequence; identical to SEQ ID NO: 16815
  GFR-binding peptide
  MOD_RES (4)..(5): Xaa is C or S
  MOD_RES (19)..(20)..(21)..(22)..(23): Xaa is A or G
  MOD_RES (24)..(25)..(26)..(27): Xaa is A or G or is absent

SEQ ID NO: 40883 - protein, 35 aa, Artificial Sequence; identical to SEQ ID NO: 16816
  GFR-binding peptide
  MOD_RES (32)..(34): Xaa is C or S

SEQ ID NO: 40884 - protein, 35 aa, Artificial Sequence; identical to SEQ ID NO: 7714
  GFR-binding peptide
  MOD_RES (1)..(2)..(33)..(35): Xaa is C or S

SEQ ID NO: 40885 - protein, 42 aa, Artificial Sequence; identical to SEQ ID NO: 9522
  GFR-binding peptide
  MOD_RES (4)..(5)..(39)..(41): Xaa is C or S
  MOD_RES (19)..(20)..(21)..(22)..(23): Xaa is A or G
  MOD_RES (24)..(25)..(26)..(27): Xaa is A or G or is absent

SEQ ID NO: 40886 - protein, 33 aa, Artificial Sequence; identical to SEQ ID NO: 16819
  GFR-binding peptide
  MOD_RES (1)..(33): Xaa is C or S

SEQ ID NO: 40887 - protein, 34 aa, Artificial Sequence; identical to SEQ ID NO: 16821
  GFR-binding peptide
  MOD_RES (2)..(3): Xaa is C or S

SEQ ID NO: 40888 - protein, 37 aa, Artificial Sequence
  GFR-binding peptide
  MOD_RES (1)..(2)..(35)..(37): Xaa is C or S
  MOD_RES (16)..(17)..(18)..(19)..(20): Xaa is A or G
  MOD_RES (21)..(22)..(23)..(24): Xaa is A or G or is absent
XXVSQDLEPLTILYYXXXXXXXXXEQLSNMIVKSXKX

SEQ ID NO: 40889 - protein, 36 aa, Artificial Sequence; identical to SEQ ID NO: 16822
  GFR-binding peptide
  MOD_RES (34)..(36): Xaa is C or S
  MOD_RES (14)..(15)..(16)..(17)..(18): Xaa is A or G
  MOD_RES (19)..(20)..(21)..(22): Xaa is A or G or is absent

SEQ ID NO: 40890 - protein, 39 aa, Artificial Sequence; identical to SEQ ID NO: 9525
  GFR-binding peptide
  MOD_RES (2)..(3)..(36)..(38): Xaa is C or S
  MOD_RES (17)..(18)..(19)..(20)..(21): Xaa is A or G
  MOD_RES (22)..(23)..(24)..(25): Xaa is A or G or is absent

SEQ ID NO: 40891 - protein, 35 aa, Artificial Sequence; identical to SEQ ID NO: 15010
  GFR-binding peptide
  MOD_RES (1)..(2)..(35): Xaa is C or S
  MOD_RES (16)..(17)..(18)..(19)..(20): Xaa is A or G
  MOD_RES (21)..(22)..(23)..(24): Xaa is A or G or is absent

SEQ ID NO: 40892 - protein, 33 aa, Artificial Sequence; identical to SEQ ID NO: 16825
  GFR-binding peptide
  MOD_RES (14)..(15)..(16)..(17)..(18): Xaa is A or G
  MOD_RES (19)..(20)..(21)..(22): Xaa is A or G or is absent

SEQ ID NO: 40893 - protein, 39 aa, Artificial Sequence; identical to SEQ ID NO: 7720
  GFR-binding peptide
  MOD_RES (3)..(4)..(38): Xaa is C or S
  MOD_RES (18)..(19)..(20)..(21)..(22): Xaa is A or G
  MOD_RES (23)..(24)..(25)..(26): Xaa is A or G or is absent

SEQ ID NO: 40894 - protein, 34 aa, Artificial Sequence; identical to SEQ ID NO: 7721
  GFR-binding peptide
  MOD_RES (32)..(34): Xaa is C or S

SEQ ID NO: 40895 - protein, 38 aa, Artificial Sequence; identical to SEQ ID NO: 15015
  GFR-binding peptide
  MOD_RES (5)..(6)..(38): Xaa is C or S

SEQ ID NO: 40896 - protein, 35 aa, Artificial Sequence; identical to SEQ ID NO: 16827
  GFR-binding peptide
  MOD_RES (3)..(4): Xaa is C or S

SEQ ID NO: 40897 - protein, 39 aa, Artificial Sequence; identical to SEQ ID NO: 16828
  GFR-binding peptide
  MOD_RES (6)..(7): Xaa is C or S
  MOD_RES (21)..(22)..(23)..(24)..(25): Xaa is A or G
  MOD_RES (26)..(27)..(28)..(29): Xaa is A or G or is absent

SEQ ID NO: 40898 - protein, 40 aa, Artificial Sequence; identical to SEQ ID NO: 9532
  GFR-binding peptide
  MOD_RES (2)..(3)..(37)..(39): Xaa is C or S
  MOD_RES (17)..(18)..(19)..(20)..(21): Xaa is A or G
  MOD_RES (22)..(23)..(24)..(25): Xaa is A or G or is absent

SEQ ID NO: 40899 - protein, 40 aa, Artificial Sequence; identical to SEQ ID NO: 15016
  GFR-binding peptide
  MOD_RES (4)..(5)..(37)..(39): Xaa is C or S

SEQ ID NO: 40900 - protein, 33 aa, Artificial Sequence; identical to SEQ ID NO: 15018
  GFR-binding peptide
  MOD_RES (1)..(2): Xaa is C or S

SEQ ID NO: 40901 - protein, 40 aa, Artificial Sequence; identical to SEQ ID NO: 15019
  GFR-binding peptide
  MOD_RES (5)..(6)..(39): Xaa is C or S
  MOD_RES (20)..(21)..(22)..(23)..(24): Xaa is A or G
  MOD_RES (25)..(26)..(27)..(28): Xaa is A or G or is absent

SEQ ID NO: 40902 - protein, 38 aa, Artificial Sequence; identical to SEQ ID NO: 15020
  GFR-binding peptide
  MOD_RES (6)..(38): Xaa is C or S

SEQ ID NO: 40903 - protein, 36 aa, Artificial Sequence; identical to SEQ ID NO: 15022
  GFR-binding peptide
  MOD_RES (1)..(35): Xaa is C or S
  MOD_RES (15)..(16)..(17)..(18)..(19): Xaa is A or G
  MOD_RES (20)..(21)..(22)..(23): Xaa is A or G or is absent

SEQ ID NO: 40904 - protein, 37 aa, Artificial Sequence; identical to SEQ ID NO: 15023
  GFR-binding peptide
  MOD_RES (2)..(3)..(37): Xaa is C or S
  MOD_RES (17)..(18)..(19)..(20)..(21): Xaa is A or G
  MOD_RES (22)..(23)..(24)..(25): Xaa is A or G or is absent

SEQ ID NO: 40905 - protein, 39 aa, Artificial Sequence; identical to SEQ ID NO: 7726
  GFR-binding peptide
  MOD_RES (3)..(4)..(36)..(38): Xaa is C or S

SEQ ID NO: 40906 - protein, 38 aa, Artificial Sequence; identical to SEQ ID NO: 9536
  GFR-binding peptide
  MOD_RES (6)..(7): Xaa is C or S

SEQ ID NO: 40907 - protein, 41 aa, Artificial Sequence; identical to SEQ ID NO: 15026
  GFR-binding peptide
  MOD_RES (4)..(5)..(39)..(41): Xaa is C or S
  MOD_RES (19)..(20)..(21)..(22)..(23): Xaa is A or G
  MOD_RES (24)..(25)..(26)..(27): Xaa is A or G or is absent

SEQ ID NO: 40908 - protein, 37 aa, Artificial Sequence; identical to SEQ ID NO: 16832
  GFR-binding peptide
  MOD_RES (2)..(3)..(34)..(36): Xaa is C or S

SEQ ID NO: 40909 - protein, 37 aa, Artificial Sequence; identical to SEQ ID NO: 15027
  GFR-binding peptide
  MOD_RES (34)..(36): Xaa is C or S
  MOD_RES (14)..(15)..(16)..(17)..(18): Xaa is A or G
  MOD_RES (19)..(20)..(21)..(22): Xaa is A or G or is absent

SEQ ID NO: 40910 - protein, 35 aa, Artificial Sequence; identical to SEQ ID NO: 15028
  GFR-binding peptide
  MOD_RES (1)..(35): Xaa is C or S
  MOD_RES (15)..(16)..(17)..(18)..(19): Xaa is A or G
  MOD_RES (20)..(21)..(22)..(23): Xaa is A or G or is absent

SEQ ID NO: 40911 - protein, 38 aa, Artificial Sequence; identical to SEQ ID NO: 16833
  GFR-binding peptide
  MOD_RES (5)..(6): Xaa is C or S
  MOD_RES (20)..(21)..(22)..(23)..(24): Xaa is A or G
  MOD_RES (25)..(26)..(27)..(28): Xaa is A or G or is absent

SEQ ID NO: 40912 - protein, 33 aa, Artificial Sequence; identical to SEQ ID NO: 16834
  GFR-binding peptide
  MOD_RES (1)..(2): Xaa is C or S

SEQ ID NO: 40913 - protein, 36 aa, Artificial Sequence; identical to SEQ ID NO: 15029
  GFR-binding peptide
  MOD_RES (34)..(36): Xaa is C or S
  MOD_RES (14)..(15)..(16)..(17)..(18): Xaa is A or G
  MOD_RES (19)..(20)..(21)..(22): Xaa is A or G or is absent

SEQ ID NO: 40914 - protein, 40 aa, Artificial Sequence; identical to SEQ ID NO: 9538
  GFR-binding peptide
  MOD_RES (5)..(6)..(37)..(39): Xaa is C or S

SEQ ID NO: 40915 - protein, 39 aa, Artificial Sequence; identical to SEQ ID NO: 15031
  GFR-binding peptide
  MOD_RES (6)..(38): Xaa is C or S

SEQ ID NO: 40916 - protein, 33 aa, Artificial Sequence; identical to SEQ ID NO: 15032
  GFR-binding peptide
  MOD_RES (3)..(3): Xaa is C or S

SEQ ID NO: 40917 - protein, 38 aa, Artificial Sequence; identical to SEQ ID NO: 16838
  GFR-binding peptide
  MOD_RES (6)..(7): Xaa is C or S

SEQ ID NO: 40918 - protein, 36 aa, Artificial Sequence; identical to SEQ ID NO: 15033
  GFR-binding peptide
  MOD_RES (3)..(4)..(36): Xaa is C or S

SEQ ID NO: 40919 - protein, 37 aa, Artificial Sequence; identical to SEQ ID NO: 16839
  GFR-binding peptide
  MOD_RES (6)..(7): Xaa is C or S

SEQ ID NO: 40920 - protein, 44 aa, Artificial Sequence; identical to SEQ ID NO: 15035
  GFR-binding peptide
  MOD_RES (6)..(7)..(41)..(43): Xaa is C or S
  MOD_RES (21)..(22)..(23)..(24)..(25): Xaa is A or G
  MOD_RES (26)..(27)..(28)..(29): Xaa is A or G or is absent

SEQ ID NO: 40921 - protein, 41 aa, Artificial Sequence; identical to SEQ ID NO: 15036
  GFR-binding peptide
  MOD_RES (5)..(6)..(39)..(41): Xaa is C or S
  MOD_RES (20)..(21)..(22)..(23)..(24): Xaa is A or G
  MOD_RES (25)..(26)..(27)..(28): Xaa is A or G or is absent

SEQ ID NO: 40922 - protein, 37 aa, Artificial Sequence; identical to SEQ ID NO: 15037
  GFR-binding peptide
  MOD_RES (2)..(3)..(37): Xaa is C or S
  MOD_RES (17)..(18)..(19)..(20)..(21): Xaa is A or G
  MOD_RES (22)..(23)..(24)..(25): Xaa is A or G or is absent

SEQ ID NO: 40923 - protein, 41 aa, Artificial Sequence; identical to SEQ ID NO: 15038
  GFR-binding peptide
  MOD_RES (6)..(7)..(41): Xaa is C or S
  MOD_RES (21)..(22)..(23)..(24)..(25): Xaa is A or G
  MOD_RES (26)..(27)..(28)..(29): Xaa is A or G or is absent

SEQ ID NO: 40924 - protein, 41 aa, Artificial Sequence; identical to SEQ ID NO: 16840
  GFR-binding peptide
  MOD_RES (3)..(4)..(38)..(40): Xaa is C or S
  MOD_RES (18)..(19)..(20)..(21)..(22): Xaa is A or G
  MOD_RES (23)..(24)..(25)..(26): Xaa is A or G or is absent

SEQ ID NO: 40925 - protein, 39 aa, Artificial Sequence; identical to SEQ ID NO: 9546
  GFR-binding peptide
  MOD_RES (6)..(7)..(38): Xaa is C or S

SEQ ID NO: 40926 - protein, 41 aa, Artificial Sequence; identical to SEQ ID NO: 15039
  GFR-binding peptide
  MOD_RES (3)..(4)..(38)..(40): Xaa is C or S
  MOD_RES (18)..(19)..(20)..(21)..(22): Xaa is A or G
  MOD_RES (23)..(24)..(25)..(26): Xaa is A or G or is absent

SEQ ID NO: 40927 - protein, 36 aa, Artificial Sequence; identical to SEQ ID NO: 16842
  GFR-binding peptide
  MOD_RES (4)..(4): Xaa is C or S
  MOD_RES (18)..(19)..(20)..(21)..(22): Xaa is A or G
  MOD_RES (23)..(24)..(25)..(26): Xaa is A or G or is absent

SEQ ID NO: 40928 - protein, 39 aa, Artificial Sequence; identical to SEQ ID NO: 15041
  GFR-binding peptide
  MOD_RES (5)..(6)..(37)..(39): Xaa is C or S

SEQ ID NO: 40929 - protein, 37 aa, Artificial Sequence; identical to SEQ ID NO: 16843
  GFR-binding peptide
  MOD_RES (5)..(37): Xaa is C or S

SEQ ID NO: 40930 - protein, 34 aa, Artificial Sequence; identical to SEQ ID NO: 15043
  GFR-binding peptide
  MOD_RES (1)..(1): Xaa is C or S
  MOD_RES (15)..(16)..(17)..(18)..(19): Xaa is A or G
  MOD_RES (20)..(21)..(22)..(23): Xaa is A or G or is absent

SEQ ID NO: 40931 - protein, 35 aa, Artificial Sequence; identical to SEQ ID NO: 16845
  GFR-binding peptide
  MOD_RES (5)..(5): Xaa is C or S

SEQ ID NO: 40932 - protein, 36 aa, Artificial Sequence; identical to SEQ ID NO: 16846
  GFR-binding peptide
  MOD_RES (3)..(4)..(36): Xaa is C or S

SEQ ID NO: 40933 - protein, 38 aa, Artificial Sequence; identical to SEQ ID NO: 16847
  GFR-binding peptide
  MOD_RES (1)..(35)..(37): Xaa is C or S
  MOD_RES (15)..(16)..(17)..(18)..(19): Xaa is A or G
  MOD_RES (20)..(21)..(22)..(23): Xaa is A or G or is absent

SEQ ID NO: 40934 - protein, 34 aa, Artificial Sequence; identical to SEQ ID NO: 7743
  GFR-binding peptide
  MOD_RES (3)..(4): Xaa is C or S

SEQ ID NO: 40935 - protein, 42 aa, Artificial Sequence; identical to SEQ ID NO: 16848
  GFR-binding peptide
  MOD_RES (6)..(40)..(42): Xaa is C or S
  MOD_RES (20)..(21)..(22)..(23)..(24): Xaa is A or G
  MOD_RES (25)..(26)..(27)..(28): Xaa is A or G or is absent

SEQ ID NO: 40936 - protein, 38 aa, Artificial Sequence
  GFR-binding peptide
  MOD_RES (1)..(2)..(35)..(37): Xaa is C or S
  MOD_RES (16)..(17)..(18)..(19)..(20): Xaa is A or G
  MOD_RES (21)..(22)..(23)..(24): Xaa is A or G or is absent
XXVSQDLEPLTILYYXXXXXXXXXEQLSNMIVKSXKXS

SEQ ID NO: 40937 - protein, 40 aa, Artificial Sequence; identical to SEQ ID NO: 16849
  GFR-binding peptide
  MOD_RES (4)..(5)..(39): Xaa is C or S
  MOD_RES (19)..(20)..(21)..(22)..(23): Xaa is A or G
  MOD_RES (24)..(25)..(26)..(27): Xaa is A or G or is absent

SEQ ID NO: 40938 - protein, 36 aa, Artificial Sequence; identical to SEQ ID NO: 7745
  GFR-binding peptide
  MOD_RES (2)..(3)..(34)..(36): Xaa is C or S

SEQ ID NO: 40939 - protein, 41 aa, Artificial Sequence; identical to SEQ ID NO: 7748
  GFR-binding peptide
  MOD_RES (4)..(5)..(39)..(41): Xaa is C or S
  MOD_RES (19)..(20)..(21)..(22)..(23): Xaa is A or G
  MOD_RES (24)..(25)..(26)..(27): Xaa is A or G or is absent

SEQ ID NO: 40940 - protein, 39 aa, Artificial Sequence; identical to SEQ ID NO: 16850
  GFR-binding peptide
  MOD_RES (5)..(6)..(38): Xaa is C or S

SEQ ID NO: 40941 - protein, 42 aa, Artificial Sequence; identical to SEQ ID NO: 15047
  GFR-binding peptide
  MOD_RES (6)..(7)..(40)..(42): Xaa is C or S
  MOD_RES (21)..(22)..(23)..(24)..(25): Xaa is A or G
  MOD_RES (26)..(27)..(28)..(29): Xaa is A or G or is absent

SEQ ID NO: 40942 - protein, 39 aa, Artificial Sequence; identical to SEQ ID NO: 7749
  GFR-binding peptide
  MOD_RES (4)..(5)..(38): Xaa is C or S
  MOD_RES (19)..(20)..(21)..(22)..(23): Xaa is A or G
  MOD_RES (24)..(25)..(26)..(27): Xaa is A or G or is absent

SEQ ID NO: 40943 - protein, 40 aa, Artificial Sequence; identical to SEQ ID NO: 15049
  GFR-binding peptide
  MOD_RES (6)..(7)..(40): Xaa is C or S
  MOD_RES (21)..(22)..(23)..(24)..(25): Xaa is A or G
  MOD_RES (26)..(27)..(28)..(29): Xaa is A or G or is absent

SEQ ID NO: 40944 - protein, 35 aa, Artificial Sequence; identical to SEQ ID NO: 16851
  GFR-binding peptide
  MOD_RES (1)..(2)..(34): Xaa is C or S

SEQ ID NO: 40945 - protein, 34 aa, Artificial Sequence; identical to SEQ ID NO: 16852
  GFR-binding peptide
  MOD_RES (34)..(34): Xaa is C or S
  MOD_RES (14)..(15)..(16)..(17)..(18): Xaa is A or G
  MOD_RES (19)..(20)..(21)..(22): Xaa is A or G or is absent

SEQ ID NO: 40946 - protein, 34 aa, Artificial Sequence; identical to SEQ ID NO: 9559
  GFR-binding peptide
  MOD_RES (1)..(32)..(34): Xaa is C or S

SEQ ID NO: 40947 - protein, 36 aa, Artificial Sequence; identical to SEQ ID NO: 16855
  GFR-binding peptide
  MOD_RES (34)..(36): Xaa is C or S
  MOD_RES (14)..(15)..(16)..(17)..(18): Xaa is A or G
  MOD_RES (19)..(20)..(21)..(22): Xaa is A or G or is absent

SEQ ID NO: 40948 - protein, 38 aa, Artificial Sequence; identical to SEQ ID NO: 15051
  GFR-binding peptide
  MOD_RES (1)..(35)..(37): Xaa is C or S
  MOD_RES (15)..(16)..(17)..(18)..(19): Xaa is A or G
  MOD_RES (20)..(21)..(22)..(23): Xaa is A or G or is absent

SEQ ID NO: 40949 - protein, 42 aa, Artificial Sequence; identical to SEQ ID NO: 15052
  GFR-binding peptide
  MOD_RES (4)..(5)..(39)..(41): Xaa is C or S
  MOD_RES (19)..(20)..(21)..(22)..(23): Xaa is A or G
  MOD_RES (24)..(25)..(26)..(27): Xaa is A or G or is absent

SEQ ID NO: 40950 - protein, 37 aa, Artificial Sequence; identical to SEQ ID NO: 16857
  GFR-binding peptide
  MOD_RES (6)..(7): Xaa is C or S

SEQ ID NO: 40951 - protein, 40 aa, Artificial Sequence; identical to SEQ ID NO: 9562
  GFR-binding peptide
  MOD_RES (5)..(6)..(39): Xaa is C or S
  MOD_RES (20)..(21)..(22)..(23)..(24): Xaa is A or G
  MOD_RES (25)..(26)..(27)..(28): Xaa is A or G or is absent

SEQ ID NO: 40952 - protein, 33 aa, Artificial Sequence; identical to SEQ ID NO: 16859
  GFR-binding peptide
  MOD_RES (1)..(33): Xaa is C or S

SEQ ID NO: 40953 - protein, 37 aa, Artificial Sequence; identical to SEQ ID NO: 15053
  GFR-binding peptide
  MOD_RES (2)..(36): Xaa is C or S
  MOD_RES (16)..(17)..(18)..(19)..(20): Xaa is A or G
  MOD_RES (21)..(22)..(23)..(24): Xaa is A or G or is absent

SEQ ID NO: 40954 - protein, 33 aa, Artificial Sequence; identical to SEQ ID NO: 16860
  GFR-binding peptide
  MOD_RES (1)..(2)..(33): Xaa is C or S

SEQ ID NO: 40955 - protein, 36 aa, Artificial Sequence; identical to SEQ ID NO: 7752
  GFR-binding peptide
  MOD_RES (2)..(3)..(36): Xaa is C or S
  MOD_RES (17)..(18)..(19)..(20)..(21): Xaa is A or G
  MOD_RES (22)..(23)..(24)..(25): Xaa is A or G or is absent

SEQ ID NO: 40956 - protein, 43 aa, Artificial Sequence; identical to SEQ ID NO: 16861
  GFR-binding peptide
  MOD_RES (5)..(6)..(40)..(42): Xaa is C or S
  MOD_RES (20)..(21)..(22)..(23)..(24): Xaa is A or G
  MOD_RES (25)..(26)..(27)..(28): Xaa is A or G or is absent

SEQ ID NO: 40957 - protein, 41 aa, Artificial Sequence; identical to SEQ ID NO: 16862
  GFR-binding peptide
  MOD_RES (6)..(7)..(39)..(41): Xaa is C or S

SEQ ID NO: 40958 - protein, 35 aa, Artificial Sequence; identical to SEQ ID NO: 15055
  GFR-binding peptide
  MOD_RES (34)..(34): Xaa is C or S
  MOD_RES (14)..(15)..(16)..(17)..(18): Xaa is A or G
  MOD_RES (19)..(20)..(21)..(22): Xaa is A or G or is absent

SEQ ID NO: 40959 - protein, 41 aa, Artificial Sequence; identical to SEQ ID NO: 15056
  GFR-binding peptide
  MOD_RES (5)..(6)..(40): Xaa is C or S
  MOD_RES (20)..(21)..(22)..(23)..(24): Xaa is A or G
  MOD_RES (25)..(26)..(27)..(28): Xaa is A or G or is absent

SEQ ID NO: 40960 - protein, 40 aa, Artificial Sequence; identical to SEQ ID NO: 16863
  GFR-binding peptide
  MOD_RES (3)..(4)..(37)..(39): Xaa is C or S
  MOD_RES (18)..(19)..(20)..(21)..(22): Xaa is A or G
  MOD_RES (23)..(24)..(25)..(26): Xaa is A or G or is absent

SEQ ID NO: 40961 - protein, 39 aa, Artificial Sequence; identical to SEQ ID NO: 15057
  GFR-binding peptide
  MOD_RES (4)..(5)..(37)..(39): Xaa is C or S

SEQ ID NO: 40962 - protein, 41 aa, Artificial Sequence; identical to SEQ ID NO: 15058
  GFR-binding peptide
  MOD_RES (4)..(5)..(39)..(41): Xaa is C or S
  MOD_RES (19)..(20)..(21)..(22)..(23): Xaa is A or G
  MOD_RES (24)..(25)..(26)..(27): Xaa is A or G or is absent

SEQ ID NO: 40963 - protein, 40 aa, Artificial Sequence; identical to SEQ ID NO: 15059
  GFR-binding peptide
  MOD_RES (5)..(6)..(39): Xaa is C or S
  MOD_RES (20)..(21)..(22)..(23)..(24): Xaa is A or G
  MOD_RES (25)..(26)..(27)..(28): Xaa is A or G or is absent

SEQ ID NO: 40964 - protein, 38 aa, Artificial Sequence; identical to SEQ ID NO: 15060
  GFR-binding peptide
  MOD_RES (3)..(4)..(38): Xaa is C or S
  MOD_RES (18)..(19)..(20)..(21)..(22): Xaa is A or G
  MOD_RES (23)..(24)..(25)..(26): Xaa is A or G or is absent

SEQ ID NO: 40965 - protein, 36 aa, Artificial Sequence; identical to SEQ ID NO: 16864
  GFR-binding peptide
  MOD_RES (1)..(2)..(34)..(36): Xaa is C or S

SEQ ID NO: 40966 - protein, 38 aa, Artificial Sequence; identical to SEQ ID NO: 15062
  GFR-binding peptide
  MOD_RES (2)..(3)..(37): Xaa is C or S
  MOD_RES (17)..(18)..(19)..(20)..(21): Xaa is A or G
  MOD_RES (22)..(23)..(24)..(25): Xaa is A or G or is absent

SEQ ID NO: 40967 - protein, 34 aa, Artificial Sequence; identical to SEQ ID NO: 15063
  GFR-binding peptide
  MOD_RES (2)..(3): Xaa is C or S

SEQ ID NO: 40968 - protein, 35 aa, Artificial Sequence; identical to SEQ ID NO: 16867
  GFR-binding peptide
  MOD_RES (1)..(2)..(35): Xaa is C or S
  MOD_RES (16)..(17)..(18)..(19)..(20): Xaa is A or G
  MOD_RES (21)..(22)..(23)..(24): Xaa is A or G or is absent

SEQ ID NO: 40969 - protein, 39 aa, Artificial Sequence; identical to SEQ ID NO: 15064
  GFR-binding peptide
  MOD_RES (6)..(6): Xaa is C or S
  MOD_RES (20)..(21)..(22)..(23)..(24): Xaa is A or G
  MOD_RES (25)..(26)..(27)..(28): Xaa is A or G or is absent

SEQ ID NO: 40970 - protein, 34 aa, Artificial Sequence; identical to SEQ ID NO: 15065
  GFR-binding peptide
  MOD_RES (3)..(4): Xaa is C or S

SEQ ID NO: 40971 - protein, 35 aa, Artificial Sequence; identical to SEQ ID NO: 16868
  GFR-binding peptide
  MOD_RES (1)..(2)..(35): Xaa is C or S
  MOD_RES (16)..(17)..(18)..(19)..(20): Xaa is A or G
  MOD_RES (21)..(22)..(23)..(24): Xaa is A or G or is absent

SEQ ID NO: 40972 - protein, 33 aa, Artificial Sequence; identical to SEQ ID NO: 9572
  GFR-binding peptide
  MOD_RES (1)..(1): Xaa is C or S
  MOD_RES (15)..(16)..(17)..(18)..(19): Xaa is A or G
  MOD_RES (20)..(21)..(22)..(23): Xaa is A or G or is absent

SEQ ID NO: 40973 - protein, 38 aa, Artificial Sequence; identical to SEQ ID NO: 16870
  GFR-binding peptide
  MOD_RES (5)..(6)..(38): Xaa is C or S

SEQ ID NO: 40974 - protein, 38 aa, Artificial Sequence; identical to SEQ ID NO: 16871
  GFR-binding peptide
  MOD_RES (3)..(4)..(36)..(38): Xaa is C or S

SEQ ID NO: 40975 - protein, 38 aa, Artificial Sequence; identical to SEQ ID NO: 16872
  GFR-binding peptide
  MOD_RES (6)..(38): Xaa is C or S

SEQ ID NO: 40976 - protein, 34 aa, Artificial Sequence; identical to SEQ ID NO: 16873
  GFR-binding peptide
  MOD_RES (34)..(34): Xaa is C or S
  MOD_RES (14)..(15)..(16)..(17)..(18): Xaa is A or G
  MOD_RES (19)..(20)..(21)..(22): Xaa is A or G or is absent

SEQ ID NO: 40977 - protein, 36 aa, Artificial Sequence; identical to SEQ ID NO: 16874
  GFR-binding peptide
  MOD_RES (3)..(4): Xaa is C or S
  MOD_RES (18)..(19)..(20)..(21)..(22): Xaa is A or G
  MOD_RES (23)..(24)..(25)..(26): Xaa is A or G or is absent

SEQ ID NO: 40978 - protein, 40 aa, Artificial Sequence; identical to SEQ ID NO: 16875
  GFR-binding peptide
  MOD_RES (3)..(4)..(38)..(40): Xaa is C or S
  MOD_RES (18)..(19)..(20)..(21)..(22): Xaa is A or G
  MOD_RES (23)..(24)..(25)..(26): Xaa is A or G or is absent

SEQ ID NO: 40979 - protein, 31 aa, Artificial Sequence; identical to SEQ ID NO: 15066
  GFR-binding peptide
  MOD_RES (1)..(1): Xaa is C or S

SEQ ID NO: 40980 - protein, 33 aa, Artificial Sequence; identical to SEQ ID NO: 15067
  GFR-binding peptide
  MOD_RES (1)..(2): Xaa is C or S

SEQ ID NO: 40981 - protein, 34 aa, Artificial Sequence; identical to SEQ ID NO: 15070
  GFR-binding peptide
  MOD_RES (32)..(34): Xaa is C or S

SEQ ID NO: 40982 - protein, 38 aa, Artificial Sequence; identical to SEQ ID NO: 9577
  GFR-binding peptide
  MOD_RES (4)..(5)..(37): Xaa is C or S

SEQ ID NO: 40983 - protein, 37 aa, Artificial Sequence; identical to SEQ ID NO: 16878
  GFR-binding peptide
  MOD_RES (5)..(6): Xaa is C or S

SEQ ID NO: 40984 - protein, 41 aa, Artificial Sequence; identical to SEQ ID NO: 9580
  GFR-binding peptide
  MOD_RES (6)..(7)..(41): Xaa is C or S
  MOD_RES (21)..(22)..(23)..(24)..(25): Xaa is A or G
  MOD_RES (26)..(27)..(28)..(29): Xaa is A or G or is absent

SEQ ID NO: 40985 - protein, 38 aa, Artificial Sequence; identical to SEQ ID NO: 15071
  GFR-binding peptide
  MOD_RES (3)..(4)..(36)..(38): Xaa is C or S

SEQ ID NO: 40986 - protein, 38 aa, Artificial Sequence; identical to SEQ ID NO: 15072
  GFR-binding peptide
  MOD_RES (2)..(3)..(37): Xaa is C or S
  MOD_RES (17)..(18)..(19)..(20)..(21): Xaa is A or G
  MOD_RES (22)..(23)..(24)..(25): Xaa is A or G or is absent

SEQ ID NO: 40987 - protein, 38 aa, Artificial Sequence; identical to SEQ ID NO: 15073
  GFR-binding peptide
  MOD_RES (1)..(35)..(37): Xaa is C or S
  MOD_RES (15)..(16)..(17)..(18)..(19): Xaa is A or G
  MOD_RES (20)..(21)..(22)..(23): Xaa is A or G or is absent

SEQ ID NO: 40988 - protein, 37 aa, Artificial Sequence; identical to SEQ ID NO: 9581
  GFR-binding peptide
  MOD_RES (4)..(5): Xaa is C or S
  MOD_RES (19)..(20)..(21)..(22)..(23): Xaa is A or G
  MOD_RES (24)..(25)..(26)..(27): Xaa is A or G or is absent

SEQ ID NO: 40989 - protein, 34 aa, Artificial Sequence; identical to SEQ ID NO: 15074
  GFR-binding peptide
  MOD_RES (2)..(3): Xaa is C or S

SEQ ID NO: 40990 - protein, 40 aa, Artificial Sequence; identical to SEQ ID NO: 15075
  GFR-binding peptide
  MOD_RES (4)..(5)..(37)..(39): Xaa is C or S

SEQ ID NO: 40991 - protein, 32 aa, Artificial Sequence; identical to SEQ ID NO: 16881
  GFR-binding peptide
  MOD_RES (14)..(15)..(16)..(17)..(18): Xaa is A or G
  MOD_RES (19)..(20)..(21)..(22): Xaa is A or G or is absent

SEQ ID NO: 40992 - protein, 40 aa, Artificial Sequence; identical to SEQ ID NO: 15076
  GFR-binding peptide
  MOD_RES (4)..(5)..(39): Xaa is C or S
  MOD_RES (19)..(20)..(21)..(22)..(23): Xaa is A or G
  MOD_RES (24)..(25)..(26)..(27): Xaa is A or G or is absent

SEQ ID NO: 40993 - protein, 36 aa, Artificial Sequence; identical to SEQ ID NO: 7771
  GFR-binding peptide
  MOD_RES (4)..(5)..(36): Xaa is C or S

SEQ ID NO: 40994 - protein, 43 aa, Artificial Sequence; identical to SEQ ID NO: 15078
  GFR-binding peptide
  MOD_RES (5)..(6)..(40)..(42): Xaa is C or S
  MOD_RES (20)..(21)..(22)..(23)..(24): Xaa is A or G
  MOD_RES (25)..(26)..(27)..(28): Xaa is A or G or is absent

SEQ ID NO: 40995 - protein, 42 aa, Artificial Sequence
  GFR-binding peptide
  MOD_RES (5)..(6)..(39)..(41): Xaa is C or S
  MOD_RES (20)..(21)..(22)..(23)..(24): Xaa is A or G
  MOD_RES (25)..(26)..(27)..(28): Xaa is A or G or is absent
SASPXXVSQDLEPLTILYYXXXXXXXXXEQLSNMIVKSXKXS

SEQ ID NO: 40996 - protein, 38 aa, Artificial Sequence; identical to SEQ ID NO: 15079
  GFR-binding peptide
  MOD_RES (4)..(5)..(37): Xaa is C or S

SEQ ID NO: 40997 - protein, 37 aa, Artificial Sequence; identical to SEQ ID NO: 15080
  GFR-binding peptide
  MOD_RES (3)..(4)..(35)..(37): Xaa is C or S

SEQ ID NO: 40998 - protein, 37 aa, Artificial Sequence; identical to SEQ ID NO: 15081
  GFR-binding peptide
  MOD_RES (34)..(36): Xaa is C or S
  MOD_RES (14)..(15)..(16)..(17)..(18): Xaa is A or G
  MOD_RES (19)..(20)..(21)..(22): Xaa is A or G or is absent

SEQ ID NO: 40999 - protein, 43 aa, Artificial Sequence; identical to SEQ ID NO: 16883
  GFR-binding peptide
  MOD_RES (6)..(7)..(41)..(43): Xaa is C or S
  MOD_RES (21)..(22)..(23)..(24)..(25): Xaa is A or G
  MOD_RES (26)..(27)..(28)..(29): Xaa is A or G or is absent

SEQ ID NO: 41000 - protein, 32 aa, Artificial Sequence; identical to SEQ ID NO: 9595
  GFR-binding peptide
  MOD_RES (14)..(15)..(16)..(17)..(18): Xaa is A or G
  MOD_RES (19)..(20)..(21)..(22): Xaa is A or G or is absent

SEQ ID NO: 41001 - protein, 39 aa, Artificial Sequence; identical to SEQ ID NO: 16886
  GFR-binding peptide
  MOD_RES (4)..(5)..(39): Xaa is C or S
  MOD_RES (19)..(20)..(21)..(22)..(23): Xaa is A or G
  MOD_RES (24)..(25)..(26)..(27): Xaa is A or G or is absent

SEQ ID NO: 41002 - protein, 38 aa, Artificial Sequence; identical to SEQ ID NO: 16887
  GFR-binding peptide
  MOD_RES (3)..(4)..(35)..(37): Xaa is C or S

SEQ ID NO: 41003 - protein, 42 aa, Artificial Sequence; identical to SEQ ID NO: 9598
  GFR-binding peptide
  MOD_RES (6)..(7)..(40)..(42): Xaa is C or S
  MOD_RES (21)..(22)..(23)..(24)..(25): Xaa is A or G
  MOD_RES (26)..(27)..(28)..(29): Xaa is A or G or is absent

SEQ ID NO: 41004 - protein, 34 aa, Artificial Sequence; identical to SEQ ID NO: 15084
  GFR-binding peptide
  MOD_RES (1)..(2)..(33): Xaa is C or S

SEQ ID NO: 41005 - protein, 38 aa, Artificial Sequence; identical to SEQ ID NO: 16891
  GFR-binding peptide
  MOD_RES (2)..(3)..(36)..(38): Xaa is C or S
  MOD_RES (17)..(18)..(19)..(20)..(21): Xaa is A or G
  MOD_RES (22)..(23)..(24)..(25): Xaa is A or G or is absent

SEQ ID NO: 41006 - protein, 39 aa, Artificial Sequence; identical to SEQ ID NO: 15087
  GFR-binding peptide
  MOD_RES (3)..(4)..(36)..(38): Xaa is C or S

SEQ ID NO: 41007 - protein, 39 aa, Artificial Sequence; identical to SEQ ID NO: 15088
  GFR-binding peptide
  MOD_RES (3)..(4)..(38): Xaa is C or S
  MOD_RES (18)..(19)..(20)..(21)..(22): Xaa is A or G
  MOD_RES (23)..(24)..(25)..(26): Xaa is A or G or is absent

SEQ ID NO: 41008 - protein, 33 aa, Artificial Sequence; identical to SEQ ID NO: 16892
  GFR-binding peptide
  MOD_RES (1)..(1): Xaa is C or S
  MOD_RES (15)..(16)..(17)..(18)..(19): Xaa is A or G
  MOD_RES (20)..(21)..(22)..(23): Xaa is A or G or is absent

SEQ ID NO: 41009 - protein, 35 aa, Artificial Sequence; identical to SEQ ID NO: 15091
  GFR-binding peptide
  MOD_RES (3)..(4)..(35): Xaa is C or S

SEQ ID NO: 41010 - protein, 37 aa, Artificial Sequence; identical to SEQ ID NO: 15092
  GFR-binding peptide
  MOD_RES (5)..(5): Xaa is C or S
  MOD_RES (19)..(20)..(21)..(22)..(23): Xaa is A or G
  MOD_RES (24)..(25)..(26)..(27): Xaa is A or G or is absent

SEQ ID NO: 41011 - protein, 41 aa, Artificial Sequence; identical to SEQ ID NO: 15093
  GFR-binding peptide
  MOD_RES (5)..(6)..(40): Xaa is C or S
  MOD_RES (20)..(21)..(22)..(23)..(24): Xaa is A or G
  MOD_RES (25)..(26)..(27)..(28): Xaa is A or G or is absent

SEQ ID NO: 41012 - protein, 42 aa, Artificial Sequence; identical to SEQ ID NO: 15094
  GFR-binding peptide
  MOD_RES (5)..(6)..(40)..(42): Xaa is C or S
  MOD_RES (20)..(21)..(22)..(23)..(24): Xaa is A or G
  MOD_RES (25)..(26)..(27)..(28): Xaa is A or G or is absent

SEQ ID NO: 41013 - protein, 37 aa, Artificial Sequence; identical to SEQ ID NO: 16893
  GFR-binding peptide
  MOD_RES (2)..(3)..(35)..(37): Xaa is C or S

SEQ ID NO: 41014 - protein, 37 aa, Artificial Sequence; identical to SEQ ID NO: 7787
  GFR-binding peptide
  MOD_RES (1)..(2)..(36): Xaa is C or S
  MOD_RES (16)..(17)..(18)..(19)..(20): Xaa is A or G
  MOD_RES (21)..(22)..(23)..(24): Xaa is A or G or is absent

SEQ ID NO: 41015 - protein, 41 aa, Artificial Sequence; identical to SEQ ID NO: 16894
  GFR-binding peptide
  MOD_RES (5)..(6)..(40): Xaa is C or S
  MOD_RES (20)..(21)..(22)..(23)..(24): Xaa is A or G
  MOD_RES (25)..(26)..(27)..(28): Xaa is A or G or is absent

SEQ ID NO: 41016 - protein, 37 aa, Artificial Sequence; identical to SEQ ID NO: 16895
  GFR-binding peptide
  MOD_RES (2)..(3)..(35)..(37): Xaa is C or S

SEQ ID NO: 41017 - protein, 34 aa, Artificial Sequence; identical to SEQ ID NO: 15096
  GFR-binding peptide
  MOD_RES (1)..(33): Xaa is C or S

SEQ ID NO: 41018 - protein, 33 aa, Artificial Sequence; identical to SEQ ID NO: 16896
  GFR-binding peptide
  MOD_RES (32)..(32): Xaa is C or S

SEQ ID NO: 41019 - protein, 35 aa, Artificial Sequence; identical to SEQ ID NO: 15097
  GFR-binding peptide
  MOD_RES (4)..(5): Xaa is C or S

SEQ ID NO: 41020 - protein, 36 aa, Artificial Sequence; identical to SEQ ID NO: 15098
  GFR-binding peptide
  MOD_RES (1)..(2)..(34)..(36): Xaa is C or S

SEQ ID NO: 41021 - protein, 32 aa, Artificial Sequence; identical to SEQ ID NO: 15099
  GFR-binding peptide
  MOD_RES (14)..(15)..(16)..(17)..(18): Xaa is A or G
  MOD_RES (19)..(20)..(21)..(22): Xaa is A or G or is absent

SEQ ID NO: 41022 - protein, 39 aa, Artificial Sequence; identical to SEQ ID NO: 15100
  GFR-binding peptide
  MOD_RES (4)..(5)..(38): Xaa is C or S
  MOD_RES (19)..(20)..(21)..(22)..(23): Xaa is A or G
  MOD_RES (24)..(25)..(26)..(27): Xaa is A or G or is absent

SEQ ID NO: 41023 - protein, 32 aa, Artificial Sequence; identical to SEQ ID NO: 16897
  GFR-binding peptide
  MOD_RES (14)..(15)..(16)..(17)..(18): Xaa is A or G
  MOD_RES (19)..(20)..(21)..(22): Xaa is A or G or is absent

SEQ ID NO: 41024 - protein, 41 aa, Artificial Sequence; identical to SEQ ID NO: 7793
  GFR-binding peptide
  MOD_RES (4)..(5)..(39)..(41): Xaa is C or S
  MOD_RES (19)..(20)..(21)..(22)..(23): Xaa is A or G
  MOD_RES (24)..(25)..(26)..(27): Xaa is A or G or is absent

SEQ ID NO: 41025 - protein, 41 aa, Artificial Sequence; identical to SEQ ID NO: 15102
  GFR-binding peptide
  MOD_RES (6)..(40): Xaa is C or S
  MOD_RES (20)..(21)..(22)..(23)..(24): Xaa is A or G
  MOD_RES (25)..(26)..(27)..(28): Xaa is A or G or is absent

SEQ ID NO: 41026 - protein, 38 aa, Artificial Sequence; identical to SEQ ID NO: 15103
  GFR-binding peptide
  MOD_RES (2)..(3)..(35)..(37): Xaa is C or S

SEQ ID NO: 41027 - protein, 42 aa, Artificial Sequence; identical to SEQ ID NO: 15104
  GFR-binding peptide
  MOD_RES (6)..(7)..(41): Xaa is C or S
  MOD_RES (21)..(22)..(23)..(24)..(25): Xaa is A or G
  MOD_RES (26)..(27)..(28)..(29): Xaa is A or G or is absent

SEQ ID NO: 41028 - protein, 33 aa, Artificial Sequence; identical to SEQ ID NO: 15105
  GFR-binding peptide
  MOD_RES (1)..(2)..(33): Xaa is C or S

SEQ ID NO: 41029 - protein, 42 aa, Artificial Sequence; identical to SEQ ID NO: 9614
  GFR-binding peptide
  MOD_RES (6)..(7)..(41): Xaa is C or S
  MOD_RES (21)..(22)..(23)..(24)..(25): Xaa is A or G
  MOD_RES (26)..(27)..(28)..(29): Xaa is A or G or is absent

SEQ ID NO: 41030 - protein, 37 aa, Artificial Sequence; identical to SEQ ID NO: 15106
  GFR-binding peptide
  MOD_RES (4)..(5): Xaa is C or S
  MOD_RES (19)..(20)..(21)..(22)..(23): Xaa is A or G
  MOD_RES (24)..(25)..(26)..(27): Xaa is A or G or is absent

SEQ ID NO: 41031 - protein, 37 aa, Artificial Sequence; identical to SEQ ID NO: 16900
  GFR-binding peptide
  MOD_RES (4)..(36): Xaa is C or S

SEQ ID NO: 41032 - protein, 43 aa, Artificial Sequence; identical to SEQ ID NO: 15107
  GFR-binding peptide
  MOD_RES (6)..(7)..(40)..(42): Xaa is C or S
  MOD_RES (21)..(22)..(23)..(24)..(25): Xaa is A or G
  MOD_RES (26)..(27)..(28)..(29): Xaa is A or G or is absent

SEQ ID NO: 41033 - protein, 36 aa, Artificial Sequence; identical to SEQ ID NO: 16901
  GFR-binding peptide
  MOD_RES (2)..(3): Xaa is C or S
  MOD_RES (17)..(18)..(19)..(20)..(21): Xaa is A or G
  MOD_RES (22)..(23)..(24)..(25): Xaa is A or G or is absent

SEQ ID NO: 41034 - protein, 35 aa, Artificial Sequence; identical to SEQ ID NO: 16902
  GFR-binding peptide
  MOD_RES (1)..(2): Xaa is C or S
  MOD_RES (16)..(17)..(18)..(19)..(20): Xaa is A or G
  MOD_RES (21)..(22)..(23)..(24): Xaa is A or G or is absent

SEQ ID NO: 41035 - protein, 38 aa, Artificial Sequence; identical to SEQ ID NO: 16903
  GFR-binding peptide
  MOD_RES (5)..(6)..(38): Xaa is C or S

SEQ ID NO: 41036 - protein, 37 aa, Artificial Sequence; identical to SEQ ID NO: 15110
  GFR-binding peptide
  MOD_RES (4)..(5): Xaa is C or S
  MOD_RES (19)..(20)..(21)..(22)..(23): Xaa is A or G
  MOD_RES (24)..(25)..(26)..(27): Xaa is A or G or is absent

SEQ ID NO: 41037 - protein, 38 aa, Artificial Sequence; identical to SEQ ID NO: 15111
  GFR-binding peptide
  MOD_RES (3)..(4)..(38): Xaa is C or S
  MOD_RES (18)..(19)..(20)..(21)..(22): Xaa is A or G
  MOD_RES (23)..(24)..(25)..(26): Xaa is A or G or is absent

SEQ ID NO: 41038 - protein, 35 aa, Artificial Sequence; identical to SEQ ID NO: 15112
  GFR-binding peptide
  MOD_RES (2)..(34): Xaa is C or S

SEQ ID NO: 41039 - protein, 40 aa, Artificial Sequence; identical to SEQ ID NO: 9622
  GFR-binding peptide
  MOD_RES (4)..(5)..(38)..(40): Xaa is C or S
  MOD_RES (19)..(20)..(21)..(22)..(23): Xaa is A or G
  MOD_RES (24)..(25)..(26)..(27): Xaa is A or G or is absent

SEQ ID NO: 41040 - protein, 42 aa, Artificial Sequence; identical to SEQ ID NO: 16905
  GFR-binding peptide
  MOD_RES (7)..(39)..(41): Xaa is C or S

SEQ ID NO: 41041 - protein, 39 aa, Artificial Sequence; identical to SEQ ID NO: 16906
  GFR-binding peptide
  MOD_RES (1)..(2)..(36)..(38): Xaa is C or S
  MOD_RES (16)..(17)..(18)..(19)..(20): Xaa is A or G
  MOD_RES (21)..(22)..(23)..(24): Xaa is A or G or is absent

SEQ ID NO: 41042 - protein, 41 aa, Artificial Sequence; identical to SEQ ID NO: 15113
  GFR-binding peptide
  MOD_RES (3)..(4)..(38)..(40): Xaa is C or S
  MOD_RES (18)..(19)..(20)..(21)..(22): Xaa is A or G
  MOD_RES (23)..(24)..(25)..(26): Xaa is A or G or is absent

SEQ ID NO: 41043 - protein, 41 aa, Artificial Sequence; identical to SEQ ID NO: 16907
  GFR-binding peptide
  MOD_RES (6)..(7)..(41): Xaa is C or S
  MOD_RES (21)..(22)..(23)..(24)..(25): Xaa is A or G
  MOD_RES (26)..(27)..(28)..(29): Xaa is A or G or is absent

SEQ ID NO: 41044 - protein, 38 aa, Artificial Sequence; identical to SEQ ID NO: 16909
  GFR-binding peptide
  MOD_RES (5)..(6): Xaa is C or S
  MOD_RES (20)..(21)..(22)..(23)..(24): Xaa is A or G
  MOD_RES (25)..(26)..(27)..(28): Xaa is A or G or is absent

SEQ ID NO: 41045 - protein, 38 aa, Artificial Sequence; identical to SEQ ID NO: 15114
  GFR-binding peptide
  MOD_RES (1)..(2)..(35)..(37): Xaa is C or S
  MOD_RES (16)..(17)..(18)..(19)..(20): Xaa is A or G
  MOD_RES (21)..(22)..(23)..(24): Xaa is A or G or is absent

SEQ ID NO: 41046 - protein, 39 aa, Artificial Sequence; identical to SEQ ID NO: 16910
  GFR-binding peptide
  MOD_RES (4)..(5)..(39): Xaa is C or S
  MOD_RES (19)..(20)..(21)..(22)..(23): Xaa is A or G
  MOD_RES (24)..(25)..(26)..(27): Xaa is A or G or is absent

SEQ ID NO: 41047 - protein, 39 aa, Artificial Sequence; identical to SEQ ID NO: 16911
  GFR-binding peptide
  MOD_RES (4)..(5)..(37)..(39): Xaa is C or S

SEQ ID NO: 41048 - protein, 38 aa, Artificial Sequence; identical to SEQ ID NO: 16913
  GFR-binding peptide
  MOD_RES (3)..(4)..(36)..(38): Xaa is C or S

SEQ ID NO: 41049 - protein, 37 aa, Artificial Sequence; identical to SEQ ID NO: 15117
  GFR-binding peptide
  MOD_RES (4)..(5): Xaa is C or S
  MOD_RES (19)..(20)..(21)..(22)..(23): Xaa is A or G
  MOD_RES (24)..(25)..(26)..(27): Xaa is A or G or is absent

SEQ ID NO: 41050 - protein, 35 aa, Artificial Sequence; identical to SEQ ID NO: 15118
  GFR-binding peptide
  MOD_RES (3)..(4): Xaa is C or S

SEQ ID NO: 41051 - protein, 34 aa, Artificial Sequence; identical to SEQ ID NO: 15119
  GFR-binding peptide
  MOD_RES (2)..(2): Xaa is C or S
  MOD_RES (16)..(17)..(18)..(19)..(20): Xaa is A or G
  MOD_RES (21)..(22)..(23)..(24): Xaa is A or G or is absent

SEQ ID NO: 41052 - protein, 40 aa, Artificial Sequence; identical to SEQ ID NO: 15120
  GFR-binding peptide
  MOD_RES (5)..(6)..(37)..(39): Xaa is C or S

SEQ ID NO: 41053 - protein, 40 aa, Artificial Sequence; identical to SEQ ID NO: 7809
  GFR-binding peptide
  MOD_RES (5)..(6)..(39): Xaa is C or S
  MOD_RES (20)..(21)..(22)..(23)..(24): Xaa is A or G
  MOD_RES (25)..(26)..(27)..(28): Xaa is A or G or is absent

SEQ ID NO: 41054 - protein, 33 aa, Artificial Sequence; identical to SEQ ID NO: 16915
  GFR-binding peptide
  MOD_RES (1)..(1): Xaa is C or S
  MOD_RES (15)..(16)..(17)..(18)..(19): Xaa is A or G
  MOD_RES (20)..(21)..(22)..(23): Xaa is A or G or is absent

SEQ ID NO: 41055 - protein, 37 aa, Artificial Sequence; identical to SEQ ID NO: 16916
  GFR-binding peptide
  MOD_RES (2)..(3)..(35)..(37): Xaa is C or S

SEQ ID NO: 41056 - protein, 41 aa, Artificial Sequence; identical to SEQ ID NO: 15123
  GFR-binding peptide
  MOD_RES (4)..(5)..(39)..(41): Xaa is C or S
  MOD_RES (19)..(20)..(21)..(22)..(23): Xaa is A or G
  MOD_RES (24)..(25)..(26)..(27): Xaa is A or G or is absent

SEQ ID NO: 41057 - protein, 36 aa, Artificial Sequence; identical to SEQ ID NO: 15124
  GFR-binding peptide
  MOD_RES (2)..(3)..(36): Xaa is C or S
  MOD_RES (17)..(18)..(19)..(20)..(21): Xaa is A or G
  MOD_RES (22)..(23)..(24)..(25): Xaa is A or G or is absent

SEQ ID NO: 41058 - protein, 41 aa, Artificial Sequence; identical to SEQ ID NO: 16917
  GFR-binding peptide
  MOD_RES (4)..(38)..(40): Xaa is C or S
  MOD_RES (18)..(19)..(20)..(21)..(22): Xaa is A or G
  MOD_RES (23)..(24)..(25)..(26): Xaa is A or G or is absent

SEQ ID NO: 41059 - protein, 38 aa, Artificial Sequence; identical to SEQ ID NO: 7817
  GFR-binding peptide
  MOD_RES (2)..(3)..(35)..(37): Xaa is C or S

SEQ ID NO: 41060 - protein, 39 aa, Artificial Sequence; identical to SEQ ID NO: 15127
  GFR-binding peptide
  MOD_RES (6)..(7): Xaa is C or S
  MOD_RES (21)..(22)..(23)..(24)..(25): Xaa is A or G
  MOD_RES (26)..(27)..(28)..(29): Xaa is A or G or is absent

SEQ ID NO: 41061 - protein, 36 aa, Artificial Sequence; identical to SEQ ID NO: 16919
  GFR-binding peptide
  MOD_RES (1)..(2)..(34)..(36): Xaa is C or S

SEQ ID NO: 41062 - protein, 38 aa, Artificial Sequence; identical to SEQ ID NO: 15130
  GFR-binding peptide
  MOD_RES (4)..(5)..(37): Xaa is C or S

SEQ ID NO: 41063 - protein, 33 aa, Artificial Sequence; identical to SEQ ID NO: 15131
  GFR-binding peptide
  MOD_RES (1)..(1): Xaa is C or S
  MOD_RES (15)..(16)..(17)..(18)..(19): Xaa is A or G
  MOD_RES (20)..(21)..(22)..(23): Xaa is A or G or is absent

SEQ ID NO: 41064 - protein, 38 aa, Artificial Sequence; identical to SEQ ID NO: 15133
  GFR-binding peptide
  MOD_RES (3)..(37): Xaa is C or S
  MOD_RES (17)..(18)..(19)..(20)..(21): Xaa is A or G
  MOD_RES (22)..(23)..(24)..(25): Xaa is A or G or is absent

SEQ ID NO: 41065 - protein, 34 aa, Artificial Sequence; identical to SEQ ID NO: 15134
  GFR-binding peptide
  MOD_RES (1)..(2): Xaa is C or S
  MOD_RES (16)..(17)..(18)..(19)..(20): Xaa is A or G
  MOD_RES (21)..(22)..(23)..(24): Xaa is A or G or is absent

SEQ ID NO: 41066 - protein, 36 aa, Artificial Sequence; identical to SEQ ID NO: 16921
  GFR-binding peptide
  MOD_RES (4)..(36): Xaa is C or S

SEQ ID NO: 41067 - protein, 39 aa, Artificial Sequence; identical to SEQ ID NO: 15135
  GFR-binding peptide
  MOD_RES (4)..(5)..(38): Xaa is C or S
  MOD_RES (19)..(20)..(21)..(22)..(23): Xaa is A or G
  MOD_RES (24)..(25)..(26)..(27): Xaa is A or G or is absent

SEQ ID NO: 41068 - protein, 32 aa, Artificial Sequence; identical to SEQ ID NO: 7823
  GFR-binding peptide
  MOD_RES (31)..(31): Xaa is C or S

SEQ ID NO: 41069 - protein, 39 aa, Artificial Sequence; identical to SEQ ID NO: 16923
  GFR-binding peptide
  MOD_RES (3)..(4)..(38): Xaa is C or S
  MOD_RES (18)..(19)..(20)..(21)..(22): Xaa is A or G
  MOD_RES (23)..(24)..(25)..(26): Xaa is A or G or is absent

SEQ ID NO: 41070 - protein, 36 aa, Artificial Sequence; identical to SEQ ID NO: 16924
  GFR-binding peptide
  MOD_RES (1)..(35): Xaa is C or S
  MOD_RES (15)..(16)..(17)..(18)..(19): Xaa is A or G
  MOD_RES (20)..(21)..(22)..(23): Xaa is A or G or is absent

SEQ ID NO: 41071 - protein, 37 aa, Artificial Sequence; identical to SEQ ID NO: 16925
  GFR-binding peptide
  MOD_RES (6)..(7): Xaa is C or S

SEQ ID NO: 41072 - protein, 41 aa, Artificial Sequence; identical to SEQ ID NO: 15138
  GFR-binding peptide
  MOD_RES (5)..(6)..(38)..(40): Xaa is C or S

SEQ ID NO: 41073 - protein, 39 aa, Artificial Sequence; identical to SEQ ID NO: 9646
  GFR-binding peptide
  MOD_RES (2)..(3)..(37)..(39): Xaa is C or S
  MOD_RES (17)..(18)..(19)..(20)..(21): Xaa is A or G
  MOD_RES (22)..(23)..(24)..(25): Xaa is A or G or is absent

SEQ ID NO: 41074 - protein, 36 aa, Artificial Sequence; identical to SEQ ID NO: 15139
  GFR-binding peptide
  MOD_RES (1)..(2)..(35): Xaa is C or S
  MOD_RES (16)..(17)..(18)..(19)..(20): Xaa is A or G
  MOD_RES (21)..(22)..(23)..(24): Xaa is A or G or is absent

SEQ ID NO: 41075 - protein, 40 aa, Artificial Sequence; identical to SEQ ID NO: 15141
  GFR-binding peptide
  MOD_RES (3)..(4)..(38)..(40): Xaa is C or S
  MOD_RES (18)..(19)..(20)..(21)..(22): Xaa is A or G
  MOD_RES (23)..(24)..(25)..(26): Xaa is A or G or is absent

SEQ ID NO: 41076 - protein, 32 aa, Artificial Sequence; identical to SEQ ID NO: 9650
  GFR-binding peptide
  MOD_RES (31)..(31): Xaa is C or S

SEQ ID NO: 41077 - protein, 42 aa, Artificial Sequence; identical to SEQ ID NO: 9652
  GFR-binding peptide
  MOD_RES (6)..(7)..(40)..(42): Xaa is C or S
  MOD_RES (21)..(22)..(23)..(24)..(25): Xaa is A or G
  MOD_RES (26)..(27)..(28)..(29): Xaa is A or G or is absent

SEQ ID NO: 41078 - protein, 39 aa, Artificial Sequence; identical to SEQ ID NO: 15142
  GFR-binding peptide
  MOD_RES (5)..(6)..(38): Xaa is C or S

SEQ ID NO: 41079 - protein, 37 aa, Artificial Sequence; identical to SEQ ID NO: 16930
  GFR-binding peptide
  MOD_RES (4)..(5)..(37): Xaa is C or S

SEQ ID NO: 41080 - protein, 39 aa, Artificial Sequence; identical to SEQ ID NO: 7832
  GFR-binding peptide
  MOD_RES (4)..(5)..(39): Xaa is C or S
  MOD_RES (19)..(20)..(21)..(22)..(23): Xaa is A or G
  MOD_RES (24)..(25)..(26)..(27): Xaa is A or G or is absent

SEQ ID NO: 41081 - protein, 41 aa, Artificial Sequence; identical to SEQ ID NO: 16931
  GFR-binding peptide
  MOD_RES (4)..(5)..(38)..(40): Xaa is C or S
  MOD_RES (19)..(20)..(21)..(22)..(23): Xaa is A or G
  MOD_RES (24)..(25)..(26)..(27): Xaa is A or G or is absent

SEQ ID NO: 41082 - protein, 37 aa, Artificial Sequence; identical to SEQ ID NO: 16932
  GFR-binding peptide
  MOD_RES (3)..(4)..(35)..(37): Xaa is C or S

SEQ ID NO: 41083 - protein, 34 aa, Artificial Sequence; identical to SEQ ID NO: 16933
  GFR-binding peptide
  MOD_RES (31)..(33): Xaa is C or S

SEQ ID NO: 41084 - protein, 41 aa, Artificial Sequence; identical to SEQ ID NO: 9655
  GFR-binding peptide
  MOD_RES (6)..(7)..(41): Xaa is C or S
  MOD_RES (21)..(22)..(23)..(24)..(25): Xaa is A or G
  MOD_RES (26)..(27)..(28)..(29): Xaa is A or G or is absent

SEQ ID NO: 41085 - protein, 42 aa, Artificial Sequence; identical to SEQ ID NO: 16936
  GFR-binding peptide
  MOD_RES (5)..(6)..(40)..(42): Xaa is C or S
  MOD_RES (20)..(21)..(22)..(23)..(24): Xaa is A or G
  MOD_RES (25)..(26)..(27)..(28): Xaa is A or G or is absent

SEQ ID NO: 41086 - protein, 37 aa, Artificial Sequence; identical to SEQ ID NO: 16937
  GFR-binding peptide
  MOD_RES (1)..(35)..(37): Xaa is C or S
  MOD_RES (15)..(16)..(17)..(18)..(19): Xaa is A or G
  MOD_RES (20)..(21)..(22)..(23): Xaa is A or G or is absent

SEQ ID NO: 41087 - protein, 43 aa, Artificial Sequence; identical to SEQ ID NO: 15145
  GFR-binding peptide
  MOD_RES (6)..(7)..(41)..(43): Xaa is C or S
  MOD_RES (21)..(22)..(23)..(24)..(25): Xaa is A or G
  MOD_RES (26)..(27)..(28)..(29): Xaa is A or G or is absent

SEQ ID NO: 41088 - protein, 33 aa, Artificial Sequence; identical to SEQ ID NO: 16938
  GFR-binding peptide
  MOD_RES (33)..(33): Xaa is C or S
  MOD_RES (14)..(15)..(16)..(17)..(18): Xaa is A or G
  MOD_RES (19)..(20)..(21)..(22): Xaa is A or G or is absent

SEQ ID NO: 41089 - protein, 40 aa, Artificial Sequence; identical to SEQ ID NO: 16939
  GFR-binding peptide
  MOD_RES (3)..(4)..(38)..(40): Xaa is C or S
  MOD_RES (18)..(19)..(20)..(21)..(22): Xaa is A or G
  MOD_RES (23)..(24)..(25)..(26): Xaa is A or G or is absent

SEQ ID NO: 41090 - protein, 41 aa, Artificial Sequence; identical to SEQ ID NO: 16940
  GFR-binding peptide
  MOD_RES (3)..(4)..(38)..(40): Xaa is C or S
  MOD_RES (18)..(19)..(20)..(21)..(22): Xaa is A or G
  MOD_RES (23)..(24)..(25)..(26): Xaa is A or G or is absent

SEQ ID NO: 41091 - protein, 35 aa, Artificial Sequence; identical to SEQ ID NO: 16941
  GFR-binding peptide
  MOD_RES (1)..(35): Xaa is C or S
  MOD_RES (15)..(16)..(17)..(18)..(19): Xaa is A or G
  MOD_RES (20)..(21)..(22)..(23): Xaa is A or G or is absent

SEQ ID NO: 41092 - protein, 36 aa, Artificial Sequence; identical to SEQ ID NO: 9661
  GFR-binding peptide
  MOD_RES (3)..(4)..(36): Xaa is C or S

SEQ ID NO: 41093 - protein, 39 aa, Artificial Sequence; identical to SEQ ID NO: 15146
  GFR-binding peptide
  MOD_RES (6)..(6): Xaa is C or S
  MOD_RES (20)..(21)..(22)..(23)..(24): Xaa is A or G
  MOD_RES (25)..(26)..(27)..(28): Xaa is A or G or is absent

SEQ ID NO: 41094 - protein, 38 aa, Artificial Sequence; identical to SEQ ID NO: 15147
  GFR-binding peptide
  MOD_RES (2)..(3)..(37): Xaa is C or S
  MOD_RES (17)..(18)..(19)..(20)..(21): Xaa is A or G
  MOD_RES (22)..(23)..(24)..(25): Xaa is A or G or is absent

SEQ ID NO: 41095 - protein, 44 aa, Artificial Sequence; identical to SEQ ID NO: 15148
  GFR-binding peptide
  MOD_RES (6)..(7)..(41)..(43): Xaa is C or S
  MOD_RES (21)..(22)..(23)..(24)..(25): Xaa is A or G
  MOD_RES (26)..(27)..(28)..(29): Xaa is A or G or is absent

SEQ ID NO: 41096 - protein, 35 aa, Artificial Sequence; identical to SEQ ID NO: 16943
  GFR-binding peptide
  MOD_RES (1)..(2)..(34): Xaa is C or S

SEQ ID NO: 41097 - protein, 35 aa, Artificial Sequence; identical to SEQ ID NO: 16944
  GFR-binding peptide
  MOD_RES (1)..(34): Xaa is C or S
  MOD_RES (15)..(16)..(17)..(18)..(19): Xaa is A or G
  MOD_RES (20)..(21)..(22)..(23): Xaa is A or G or is absent

SEQ ID NO: 41098 - protein, 35 aa, Artificial Sequence; identical to SEQ ID NO: 16945
  GFR-binding peptide
  MOD_RES (1)..(35): Xaa is C or S
  MOD_RES (15)..(16)..(17)..(18)..(19): Xaa is A or G
  MOD_RES (20)..(21)..(22)..(23): Xaa is A or G or is absent

SEQ ID NO: 41099 - protein, 34 aa, Artificial Sequence; identical to SEQ ID NO: 15150
  GFR-binding peptide
  MOD_RES (2)..(3): Xaa is C or S

SEQ ID NO: 41100 - protein, 37 aa, Artificial Sequence; identical to SEQ ID NO: 15151
  GFR-binding peptide
  MOD_RES (4)..(5)..(37): Xaa is C or S

SEQ ID NO: 41101 - protein, 32 aa, Artificial Sequence; identical to SEQ ID NO: 15155
  GFR-binding peptide
  MOD_RES (14)..(15)..(16)..(17)..(18): Xaa is A or G
  MOD_RES (19)..(20)..(21)..(22): Xaa is A or G or is absent

SEQ ID NO: 41102 - protein, 40 aa, Artificial Sequence; identical to SEQ ID NO: 15156
  GFR-binding peptide
  MOD_RES (4)..(38)..(40): Xaa is C or S
  MOD_RES (18)..(19)..(20)..(21)..(22): Xaa is A or G
  MOD_RES (23)..(24)..(25)..(26): Xaa is A or G or is absent

SEQ ID NO: 41103 - protein, 37 aa, Artificial Sequence; identical to SEQ ID NO: 15158
  GFR-binding peptide
  MOD_RES (4)..(5): Xaa is C or S
  MOD_RES (19)..(20)..(21)..(22)..(23): Xaa is A or G
  MOD_RES (24)..(25)..(26)..(27): Xaa is A or G or is absent

SEQ ID NO: 41104 - protein, 36 aa, Artificial Sequence; identical to SEQ ID NO: 7847
  GFR-binding peptide
  MOD_RES (3)..(4): Xaa is C or S
  MOD_RES (18)..(19)..(20)..(21)..(22): Xaa is A or G
  MOD_RES (23)..(24)..(25)..(26): Xaa is A or G or is absent

SEQ ID NO: 41105 - protein, 34 aa, Artificial Sequence; identical to SEQ ID NO: 15160
  GFR-binding peptide
  MOD_RES (1)..(1): Xaa is C or S
  MOD_RES (15)..(16)..(17)..(18)..(19): Xaa is A or G
  MOD_RES (20)..(21)..(22)..(23): Xaa is A or G or is absent

SEQ ID NO: 41106 - protein, 34 aa, Artificial Sequence; identical to SEQ ID NO: 16948
  GFR-binding peptide
  MOD_RES (2)..(3): Xaa is C or S

SEQ ID NO: 41107 - protein, 42 aa, Artificial Sequence; identical to SEQ ID NO: 16949
  GFR-binding peptide
  MOD_RES (5)..(6)..(40)..(42): Xaa is C or S
  MOD_RES (20)..(21)..(22)..(23)..(24): Xaa is A or G
  MOD_RES (25)..(26)..(27)..(28): Xaa is A or G or is absent

SEQ ID NO: 41108 - protein, 31 aa, Artificial Sequence; identical to SEQ ID NO: 16950
  GFR-binding peptide

SEQ ID NO: 41109 - protein, 38 aa, Artificial Sequence; identical to SEQ ID NO: 15161
  GFR-binding peptide
  MOD_RES (1)..(35)..(37): Xaa is C or S
  MOD_RES (15)..(16)..(17)..(18)..(19): Xaa is A or G
  MOD_RES (20)..(21)..(22)..(23): Xaa is A or G or is absent

SEQ ID NO: 41110 - protein, 40 aa, Artificial Sequence; identical to SEQ ID NO: 7854
  GFR-binding peptide
  MOD_RES (6)..(7)..(38)..(40): Xaa is C or S

SEQ ID NO: 41111 - protein, 34 aa, Artificial Sequence; identical to SEQ ID NO: 7856
  GFR-binding peptide
  MOD_RES (1)..(34): Xaa is C or S
  MOD_RES (15)..(16)..(17)..(18)..(19): Xaa is A or G
  MOD_RES (20)..(21)..(22)..(23): Xaa is A or G or is absent

SEQ ID NO: 41112 - protein, 38 aa, Artificial Sequence; identical to SEQ ID NO: 7857
  GFR-binding peptide
  MOD_RES (6)..(7)..(38): Xaa is C or S

SEQ ID NO: 41113 - protein, 40 aa, Artificial Sequence; identical to SEQ ID NO: 15165
  GFR-binding peptide
  MOD_RES (2)..(3)..(37)..(39): Xaa is C or S
  MOD_RES (17)..(18)..(19)..(20)..(21): Xaa is A or G
  MOD_RES (22)..(23)..(24)..(25): Xaa is A or G or is absent

SEQ ID NO: 41114 - protein, 37 aa, Artificial Sequence; identical to SEQ ID NO: 15166
  GFR-binding peptide
  MOD_RES (1)..(34)..(36): Xaa is C or S
  MOD_RES (15)..(16)..(17)..(18)..(19): Xaa is A or G
  MOD_RES (20)..(21)..(22)..(23): Xaa is A or G or is absent

SEQ ID NO: 41115 - protein, 39 aa, Artificial Sequence; identical to SEQ ID NO: 7860
  GFR-binding peptide
  MOD_RES (5)..(6)..(37)..(39): Xaa is C or S

SEQ ID NO: 41116 - protein, 43 aa, Artificial Sequence; identical to SEQ ID NO: 16953
  GFR-binding peptide
  MOD_RES (7)..(41)..(43): Xaa is C or S
  MOD_RES (21)..(22)..(23)..(24)..(25): Xaa is A or G
  MOD_RES (26)..(27)..(28)..(29): Xaa is A or G or is absent

SEQ ID NO: 41117 - protein, 31 aa, Artificial Sequence; identical to SEQ ID NO: 15168
  GFR-binding peptide

SEQ ID NO: 41118 - protein, 38 aa, Artificial Sequence; identical to SEQ ID NO: 16954
  GFR-binding peptide
  MOD_RES (2)..(3)..(36)..(38): Xaa is C or S
  MOD_RES (17)..(18)..(19)..(20)..(21): Xaa is A or G
  MOD_RES (22)..(23)..(24)..(25): Xaa is A or G or is absent

SEQ ID NO: 41119 - protein, 37 aa, Artificial Sequence; identical to SEQ ID NO: 16956
  GFR-binding peptide
  MOD_RES (4)..(5): Xaa is C or S
  MOD_RES (19)..(20)..(21)..(22)..(23): Xaa is A or G
  MOD_RES (24)..(25)..(26)..(27): Xaa is A or G or is absent

SEQ ID NO: 41120 - protein, 40 aa, Artificial Sequence; identical to SEQ ID NO: 15170
  GFR-binding peptide
  MOD_RES (6)..(7)..(39): Xaa is C or S

SEQ ID NO: 41121 - protein, 40 aa, Artificial Sequence; identical to SEQ ID NO: 16958
  GFR-binding peptide
  MOD_RES (3)..(4)..(38)..(40): Xaa is C or S
  MOD_RES (18)..(19)..(20)..(21)..(22): Xaa is A or G
  MOD_RES (23)..(24)..(25)..(26): Xaa is A or G or is absent

SEQ ID NO: 41122 - protein, 41 aa, Artificial Sequence; identical to SEQ ID NO: 7866
  GFR-binding peptide
  MOD_RES (5)..(6)..(40): Xaa is C or S
  MOD_RES (20)..(21)..(22)..(23)..(24): Xaa is A or G
  MOD_RES (25)..(26)..(27)..(28): Xaa is A or G or is absent

SEQ ID NO: 41123 - protein, 34 aa, Artificial Sequence; identical to SEQ ID NO: 15173
  GFR-binding peptide
  MOD_RES (1)..(34): Xaa is C or S
  MOD_RES (15)..(16)..(17)..(18)..(19): Xaa is A or G
  MOD_RES (20)..(21)..(22)..(23): Xaa is A or G or is absent

SEQ ID NO: 41124 - protein, 33 aa, Artificial Sequence; identical to SEQ ID NO: 16959
  GFR-binding peptide
  MOD_RES (14)..(15)..(16)..(17)..(18): Xaa is A or G
  MOD_RES (19)..(20)..(21)..(22): Xaa is A or G or is absent

SEQ ID NO: 41125 - protein, 35 aa, Artificial Sequence; identical to SEQ ID NO: 15174
  GFR-binding peptide
  MOD_RES (32)..(34): Xaa is C or S

SEQ ID NO: 41126 - protein, 40 aa, Artificial Sequence; identical to SEQ ID NO: 15175
  GFR-binding peptide
  MOD_RES (6)..(7)..(38)..(40): Xaa is C or S

SEQ ID NO: 41127 - protein, 38 aa, Artificial Sequence; identical to SEQ ID NO: 16960
  GFR-binding peptide
  MOD_RES (7)..(7): Xaa is C or S

SEQ ID NO: 41128 - protein, 35 aa, Artificial Sequence; identical to SEQ ID NO: 16961
  GFR-binding peptide
  MOD_RES (1)..(2)..(34): Xaa is C or S

SEQ ID NO: 41129 - protein, 33 aa, Artificial Sequence; identical to SEQ ID NO: 15176
  GFR-binding peptide
  MOD_RES (1)..(32): Xaa is C or S

SEQ ID NO: 41130 - protein, 32 aa, Artificial Sequence; identical to SEQ ID NO: 16962
  GFR-binding peptide
  MOD_RES (1)..(1): Xaa is C or S

SEQ ID NO: 41131 - protein, 36 aa, Artificial Sequence; identical to SEQ ID NO: 16963
  GFR-binding peptide
  MOD_RES (1)..(34)..(36): Xaa is C or S
  MOD_RES (15)..(16)..(17)..(18)..(19): Xaa is A or G
  MOD_RES (20)..(21)..(22)..(23): Xaa is A or G or is absent

SEQ ID NO: 41132 - protein, 38 aa, Artificial Sequence
  GFR-binding peptide
  MOD_RES (3)..(4)..(37): Xaa is C or S
  MOD_RES (18)..(19)..(20)..(21)..(22): Xaa is A or G
  MOD_RES (23)..(24)..(25)..(26): Xaa is A or G or is absent
SPXXVSQDLEPLTILYYXXXXXXXXXEQLSNMIVKSXK

SEQ ID NO: 41133 - protein, 39 aa, Artificial Sequence; identical to SEQ ID NO: 16964
  GFR-binding peptide
  MOD_RES (4)..(5)..(38): Xaa is C or S
  MOD_RES (19)..(20)..(21)..(22)..(23): Xaa is A or G
  MOD_RES (24)..(25)..(26)..(27): Xaa is A or G or is absent

SEQ ID NO: 41134 - protein, 36 aa, Artificial Sequence; identical to SEQ ID NO: 9683
  GFR-binding peptide
  MOD_RES (5)..(6): Xaa is C or S

SEQ ID NO: 41135 - protein, 39 aa, Artificial Sequence; identical to SEQ ID NO: 16966
  GFR-binding peptide
  MOD_RES (6)..(7): Xaa is C or S
  MOD_RES (21)..(22)..(23)..(24)..(25): Xaa is A or G
  MOD_RES (26)..(27)..(28)..(29): Xaa is A or G or is absent

SEQ ID NO: 41136 - protein, 38 aa, Artificial Sequence; identical to SEQ ID NO: 16967
  GFR-binding peptide
  MOD_RES (1)..(2)..(36)..(38): Xaa is C or S
  MOD_RES (16)..(17)..(18)..(19)..(20): Xaa is A or G
  MOD_RES (21)..(22)..(23)..(24): Xaa is A or G or is absent

SEQ ID NO: 41137 - protein, 32 aa, Artificial Sequence; identical to SEQ ID NO: 15177
  GFR-binding peptide
  MOD_RES (1)..(1): Xaa is C or S

SEQ ID NO: 41138 - protein, 36 aa, Artificial Sequence; identical to SEQ ID NO: 7875
  GFR-binding peptide
  MOD_RES (3)..(4)..(36): Xaa is C or S

SEQ ID NO: 41139 - protein, 39 aa, Artificial Sequence; identical to SEQ ID NO: 16969
  GFR-binding peptide
  MOD_RES (6)..(7)..(39): Xaa is C or S

SEQ ID NO: 41140 - protein, 34 aa, Artificial Sequence; identical to SEQ ID NO: 15180
  GFR-binding peptide
  MOD_RES (2)..(3)..(34): Xaa is C or S

SEQ ID NO: 41141 - protein, 37 aa, Artificial Sequence; identical to SEQ ID NO: 15182
  GFR-binding peptide
  MOD_RES (6)..(7): Xaa is C or S

SEQ ID NO: 41142 - protein, 34 aa, Artificial Sequence; identical to SEQ ID NO: 16971
  GFR-binding peptide
  MOD_RES (34)..(34): Xaa is C or S
  MOD_RES (14)..(15)..(16)..(17)..(18): Xaa is A or G
  MOD_RES (19)..(20)..(21)..(22): Xaa is A or G or is absent

SEQ ID NO: 41143 - protein, 42 aa, Artificial Sequence; identical to SEQ ID NO: 16972
  GFR-binding peptide
  MOD_RES (6)..(7)..(41): Xaa is C or S
  MOD_RES (21)..(22)..(23)..(24)..(25): Xaa is A or G
  MOD_RES (26)..(27)..(28)..(29): Xaa is A or G or is absent

SEQ ID NO: 41144 - protein, 37 aa, Artificial Sequence; identical to SEQ ID NO: 15183
  GFR-binding peptide
  MOD_RES (5)..(6): Xaa is C or S

SEQ ID NO: 41145 - protein, 35 aa, Artificial Sequence; identical to SEQ ID NO: 15184
  GFR-binding peptide
  MOD_RES (2)..(3): Xaa is C or S
  MOD_RES (17)..(18)..(19)..(20)..(21): Xaa is A or G
  MOD_RES (22)..(23)..(24)..(25): Xaa is A or G or is absent

SEQ ID NO: 41146 - protein, 40 aa, Artificial Sequence; identical to SEQ ID NO: 16973
  GFR-binding peptide
  MOD_RES (6)..(7)..(40): Xaa is C or S
  MOD_RES (21)..(22)..(23)..(24)..(25): Xaa is A or G
  MOD_RES (26)..(27)..(28)..(29): Xaa is A or G or is absent

SEQ ID NO: 41147 - protein, 39 aa, Artificial Sequence; identical to SEQ ID NO: 15185
  GFR-binding peptide
  MOD_RES (4)..(5)..(39): Xaa is C or S
  MOD_RES (19)..(20)..(21)..(22)..(23): Xaa is A or G
  MOD_RES (24)..(25)..(26)..(27): Xaa is A or G or is absent

SEQ ID NO: 41148 - protein, 32 aa, Artificial Sequence; identical to SEQ ID NO: 15187
  GFR-binding peptide
  MOD_RES (1)..(1): Xaa is C or S

SEQ ID NO: 41149 - protein, 31 aa, Artificial Sequence; identical to SEQ ID NO: 15188
  GFR-binding peptide

SEQ ID NO: 41150 - protein, 41 aa, Artificial Sequence; identical to SEQ ID NO: 9689
  GFR-binding peptide
  MOD_RES (6)..(7)..(40): Xaa is C or S
  MOD_RES (21)..(22)..(23)..(24)..(25): Xaa is A or G
  MOD_RES (26)..(27)..(28)..(29): Xaa is A or G or is absent

SEQ ID NO: 41151 - protein, 37 aa, Artificial Sequence; identical to SEQ ID NO: 7884
  GFR-binding peptide
  MOD_RES (5)..(6)..(37): Xaa is C or S

SEQ ID NO: 41152 - protein, 34 aa, Artificial Sequence; identical to SEQ ID NO: 16975
  GFR-binding peptide
  MOD_RES (1)..(2)..(34): Xaa is C or S

SEQ ID NO: 41153 - protein, 44 aa, Artificial Sequence; identical to SEQ ID NO: 15190
  GFR-binding peptide
  MOD_RES (6)..(7)..(41)..(43): Xaa is C or S
  MOD_RES (21)..(22)..(23)..(24)..(25): Xaa is A or G
  MOD_RES (26)..(27)..(28)..(29): Xaa is A or G or is absent

SEQ ID NO: 41154 - protein, 37 aa, Artificial Sequence; identical to SEQ ID NO: 7888
  GFR-binding peptide
  MOD_RES (4)..(5)..(37): Xaa is C or S

SEQ ID NO: 41155 - protein, 37 aa, Artificial Sequence; identical to SEQ ID NO: 9690
  GFR-binding peptide
  MOD_RES (4)..(5): Xaa is C or S
  MOD_RES (19)..(20)..(21)..(22)..(23): Xaa is A or G
  MOD_RES (24)..(25)..(26)..(27): Xaa is A or G or is absent

SEQ ID NO: 41156 - protein, 36 aa, Artificial Sequence; identical to SEQ ID NO: 15193
  GFR-binding peptide
  MOD_RES (1)..(35): Xaa is C or S
  MOD_RES (15)..(16)..(17)..(18)..(19): Xaa is A or G
  MOD_RES (20)..(21)..(22)..(23): Xaa is A or G or is absent

SEQ ID NO: 41157 - protein, 38 aa, Artificial Sequence; identical to SEQ ID NO: 16978
  GFR-binding peptide
  MOD_RES (3)..(4)..(35)..(37): Xaa is C or S

SEQ ID NO: 41158 - protein, 40 aa, Artificial Sequence; identical to SEQ ID NO: 16979
  GFR-binding peptide
  MOD_RES (5)..(6)..(40): Xaa is C or S
  MOD_RES (20)..(21)..(22)..(23)..(24): Xaa is A or G
  MOD_RES (25)..(26)..(27)..(28): Xaa is A or G or is absent

SEQ ID NO: 41159 - protein, 37 aa, Artificial Sequence; identical to SEQ ID NO: 16980
  GFR-binding peptide
  MOD_RES (1)..(2)..(35)..(37): Xaa is C or S
  MOD_RES (16)..(17)..(18)..(19)..(20): Xaa is A or G
  MOD_RES (21)..(22)..(23)..(24): Xaa is A or G or is absent

SEQ ID NO: 41160 - protein, 39 aa, Artificial Sequence; identical to SEQ ID NO: 16981
  GFR-binding peptide
  MOD_RES (6)..(7)..(39): Xaa is C or S

SEQ ID NO: 41161 - protein, 38 aa, Artificial Sequence; identical to SEQ ID NO: 15194
  GFR-binding peptide
  MOD_RES (4)..(5)..(37): Xaa is C or S

SEQ ID NO: 41162 - protein, 36 aa, Artificial Sequence; identical to SEQ ID NO: 16982
  GFR-binding peptide
  MOD_RES (1)..(2)..(34)..(36): Xaa is C or S

SEQ ID NO: 41163 - protein, 36 aa, Artificial Sequence; identical to SEQ ID NO: 16983
  GFR-binding peptide
  MOD_RES (3)..(4): Xaa is C or S
  MOD_RES (18)..(19)..(20)..(21)..(22): Xaa is A or G
  MOD_RES (23)..(24)..(25)..(26): Xaa is A or G or is absent

SEQ ID NO: 41164 - protein, 42 aa, Artificial Sequence; identical to SEQ ID NO: 16984
  GFR-binding peptide
  MOD_RES (5)..(6)..(39)..(41): Xaa is C or S
  MOD_RES (20)..(21)..(22)..(23)..(24): Xaa is A or G
  MOD_RES (25)..(26)..(27)..(28): Xaa is A or G or is absent

SEQ ID NO: 41165 - protein, 37 aa, Artificial Sequence; identical to SEQ ID NO: 15196
  GFR-binding peptide
  MOD_RES (2)..(3)..(35)..(37): Xaa is C or S

SEQ ID NO: 41166 - protein, 30 aa, Artificial Sequence; identical to SEQ ID NO: 9695
  GFR-binding peptide

SEQ ID NO: 41167 - protein, 32 aa, Artificial Sequence; identical to SEQ ID NO: 15198
  GFR-binding peptide
  MOD_RES (14)..(15)..(16)..(17)..(18): Xaa is A or G
  MOD_RES (19)..(20)..(21)..(22): Xaa is A or G or is absent

SEQ ID NO: 41168 - protein, 37 aa, Artificial Sequence; identical to SEQ ID NO: 15199
  GFR-binding peptide
  MOD_RES (4)..(5)..(36): Xaa is C or S

SEQ ID NO: 41169 - protein, 39 aa, Artificial Sequence; identical to SEQ ID NO: 16986
  GFR-binding peptide
  MOD_RES (4)..(5)..(38): Xaa is C or S
  MOD_RES (19)..(20)..(21)..(22)..(23): Xaa is A or G
  MOD_RES (24)..(25)..(26)..(27): Xaa is A or G or is absent

SEQ ID NO: 41170 - protein, 37 aa, Artificial Sequence; identical to SEQ ID NO: 16987
  GFR-binding peptide
  MOD_RES (5)..(6): Xaa is C or S

SEQ ID NO: 41171 - protein, 34 aa, Artificial Sequence; identical to SEQ ID NO: 16988
  GFR-binding peptide
  MOD_RES (32)..(34): Xaa is C or S

SEQ ID NO: 41172 - protein, 42 aa, Artificial Sequence; identical to SEQ ID NO: 16989
  GFR-binding peptide
  MOD_RES (4)..(5)..(39)..(41): Xaa is C or S
  MOD_RES (19)..(20)..(21)..(22)..(23): Xaa is A or G
  MOD_RES (24)..(25)..(26)..(27): Xaa is A or G or is absent

SEQ ID NO: 41173 - protein, 33 aa, Artificial Sequence; identical to SEQ ID NO: 15200
  GFR-binding peptide
  MOD_RES (1)..(1): Xaa is C or S
  MOD_RES (15)..(16)..(17)..(18)..(19): Xaa is A or G
  MOD_RES (20)..(21)..(22)..(23): Xaa is A or G or is absent

SEQ ID NO: 41174 - protein, 33 aa, Artificial Sequence
  GFR-binding peptide
  MOD_RES (1)..(1): Xaa is C or S
  MOD_RES (15)..(16)..(17)..(18)..(19): Xaa is A or G
  MOD_RES (20)..(21)..(22)..(23): Xaa is A or G or is absent
XVSQDLEPLTILYYXXXXXXXXXEQLSNMIVKS

SEQ ID NO: 41175 - protein, 37 aa, Artificial Sequence; identical to SEQ ID NO: 16990
  GFR-binding peptide
  MOD_RES (2)..(34)..(36): Xaa is C or S

SEQ ID NO: 41176 - protein, 40 aa, Artificial Sequence; identical to SEQ ID NO: 7904
  GFR-binding peptide
  MOD_RES (6)..(7)..(40): Xaa is C or S
  MOD_RES (21)..(22)..(23)..(24)..(25): Xaa is A or G
  MOD_RES (26)..(27)..(28)..(29): Xaa is A or G or is absent

SEQ ID NO: 41177 - protein, 33 aa, Artificial Sequence; identical to SEQ ID NO: 15202
  GFR-binding peptide
  MOD_RES (1)..(1): Xaa is C or S
  MOD_RES (15)..(16)..(17)..(18)..(19): Xaa is A or G
  MOD_RES (20)..(21)..(22)..(23): Xaa is A or G or is absent

SEQ ID NO: 41178 - protein, 40 aa, Artificial Sequence; identical to SEQ ID NO: 16991
  GFR-binding peptide
  MOD_RES (3)..(4)..(38)..(40): Xaa is C or S
  MOD_RES (18)..(19)..(20)..(21)..(22): Xaa is A or G
  MOD_RES (23)..(24)..(25)..(26): Xaa is A or G or is absent

SEQ ID NO: 41179 - protein, 37 aa, Artificial Sequence; identical to SEQ ID NO: 16992
  GFR-binding peptide
  MOD_RES (4)..(36): Xaa is C or S

SEQ ID NO: 41180 - protein, 33 aa, Artificial Sequence; identical to SEQ ID NO: 9706
  GFR-binding peptide
  MOD_RES (31)..(33): Xaa is C or S

SEQ ID NO: 41181 - protein, 39 aa, Artificial Sequence; identical to SEQ ID NO: 16994
  GFR-binding peptide
  MOD_RES (6)..(7)..(38): Xaa is C or S

SEQ ID NO: 41182 - protein, 39 aa, Artificial Sequence; identical to SEQ ID NO: 9708
  GFR-binding peptide
  MOD_RES (6)..(7): Xaa is C or S
  MOD_RES (21)..(22)..(23)..(24)..(25): Xaa is A or G
  MOD_RES (26)..(27)..(28)..(29): Xaa is A or G or is absent

SEQ ID NO: 41183 - protein, 39 aa, Artificial Sequence; identical to SEQ ID NO: 15203
  GFR-binding peptide
  MOD_RES (6)..(6): Xaa is C or S
  MOD_RES (20)..(21)..(22)..(23)..(24): Xaa is A or G
  MOD_RES (25)..(26)..(27)..(28): Xaa is A or G or is absent

SEQ ID NO: 41184 - protein, 40 aa, Artificial Sequence; identical to SEQ ID NO: 9709
  GFR-binding peptide
  MOD_RES (5)..(6)..(39): Xaa is C or S
  MOD_RES (20)..(21)..(22)..(23)..(24): Xaa is A or G
  MOD_RES (25)..(26)..(27)..(28): Xaa is A or G or is absent

SEQ ID NO: 41185 - protein, 43 aa, Artificial Sequence; identical to SEQ ID NO: 16997
  GFR-binding peptide
  MOD_RES (6)..(7)..(40)..(42): Xaa is C or S
  MOD_RES (21)..(22)..(23)..(24)..(25): Xaa is A or G
  MOD_RES (26)..(27)..(28)..(29): Xaa is A or G or is absent

SEQ ID NO: 41186 - protein, 35 aa, Artificial Sequence; identical to SEQ ID NO: 16998
  GFR-binding peptide
  MOD_RES (34)..(34): Xaa is C or S
  MOD_RES (14)..(15)..(16)..(17)..(18): Xaa is A or G
  MOD_RES (19)..(20)..(21)..(22): Xaa is A or G or is absent

SEQ ID NO: 41187 - protein, 40 aa, Artificial Sequence; identical to SEQ ID NO: 15205
  GFR-binding peptide
  MOD_RES (3)..(4)..(37)..(39): Xaa is C or S
  MOD_RES (18)..(19)..(20)..(21)..(22): Xaa is A or G
  MOD_RES (23)..(24)..(25)..(26): Xaa is A or G or is absent

SEQ ID NO: 41188 - protein, 37 aa, Artificial Sequence; identical to SEQ ID NO: 17001
  GFR-binding peptide
  MOD_RES (1)..(2)..(34)..(36): Xaa is C or S

SEQ ID NO: 41189 - protein, 34 aa, Artificial Sequence; identical to SEQ ID NO: 17002
  GFR-binding peptide
  MOD_RES (1)..(2): Xaa is C or S
  MOD_RES (16)..(17)..(18)..(19)..(20): Xaa is A or G
  MOD_RES (21)..(22)..(23)..(24): Xaa is A or G or is absent

SEQ ID NO: 41190 - protein, 39 aa, Artificial Sequence; identical to SEQ ID NO: 15207
  GFR-binding peptide
  MOD_RES (2)..(3)..(36)..(38): Xaa is C or S
  MOD_RES (17)..(18)..(19)..(20)..(21): Xaa is A or G
  MOD_RES (22)..(23)..(24)..(25): Xaa is A or G or is absent

SEQ ID NO: 41191 - protein, 35 aa, Artificial Sequence; identical to SEQ ID NO: 15208
  GFR-binding peptide
  MOD_RES (2)..(3): Xaa is C or S
  MOD_RES (17)..(18)..(19)..(20)..(21): Xaa is A or G
  MOD_RES (22)..(23)..(24)..(25): Xaa is A or G or is absent

SEQ ID NO: 41192 - protein, 34 aa, Artificial Sequence; identical to SEQ ID NO: 9718
  GFR-binding peptide
  MOD_RES (2)..(3): Xaa is C or S

SEQ ID NO: 41193 - protein, 38 aa, Artificial Sequence; identical to SEQ ID NO: 15211
  GFR-binding peptide
  MOD_RES (2)..(3)..(35)..(37): Xaa is C or S

SEQ ID NO: 41194 - protein, 37 aa, Artificial Sequence; identical to SEQ ID NO: 15212
  GFR-binding peptide
  MOD_RES (4)..(5)..(36): Xaa is C or S

SEQ ID NO: 41195 - protein, 35 aa, Artificial Sequence; identical to SEQ ID NO: 17004
  GFR-binding peptide
  MOD_RES (1)..(2)..(34): Xaa is C or S

SEQ ID NO: 41196 - protein, 38 aa, Artificial Sequence; identical to SEQ ID NO: 17005
  GFR-binding peptide
  MOD_RES (3)..(4)..(36)..(38): Xaa is C or S

SEQ ID NO: 41197 - protein, 36 aa, Artificial Sequence; identical to SEQ ID NO: 17007
  GFR-binding peptide
  MOD_RES (4)..(4): Xaa is C or S
  MOD_RES (18)..(19)..(20)..(21)..(22): Xaa is A or G
  MOD_RES (23)..(24)..(25)..(26): Xaa is A or G or is absent

SEQ ID NO: 41198 - protein, 37 aa, Artificial Sequence; identical to SEQ ID NO: 9721
  GFR-binding peptide
  MOD_RES (4)..(5)..(37): Xaa is C or S

SEQ ID NO: 41199 - protein, 39 aa, Artificial Sequence; identical to SEQ ID NO: 15213
  GFR-binding peptide
  MOD_RES (4)..(36)..(38): Xaa is C or S

SEQ ID NO: 41200 - protein, 42 aa, Artificial Sequence; identical to SEQ ID NO: 17009
  GFR-binding peptide
  MOD_RES (6)..(7)..(41): Xaa is C or S
  MOD_RES (21)..(22)..(23)..(24)..(25): Xaa is A or G
  MOD_RES (26)..(27)..(28)..(29): Xaa is A or G or is absent

SEQ ID NO: 41201 - protein, 40 aa, Artificial Sequence; identical to SEQ ID NO: 15214
  GFR-binding peptide
  MOD_RES (3)..(4)..(38)..(40): Xaa is C or S
  MOD_RES (18)..(19)..(20)..(21)..(22): Xaa is A or G
  MOD_RES (23)..(24)..(25)..(26): Xaa is A or G or is absent

SEQ ID NO: 41202 - protein, 34 aa, Artificial Sequence; identical to SEQ ID NO: 9724
  GFR-binding peptide
  MOD_RES (1)..(2): Xaa is C or S
  MOD_RES (16)..(17)..(18)..(19)..(20): Xaa is A or G
  MOD_RES (21)..(22)..(23)..(24): Xaa is A or G or is absent

SEQ ID NO: 41203 - protein, 38 aa, Artificial Sequence; identical to SEQ ID NO: 7925
  GFR-binding peptide
  MOD_RES (1)..(35)..(37): Xaa is C or S
  MOD_RES (15)..(16)..(17)..(18)..(19): Xaa is A or G
  MOD_RES (20)..(21)..(22)..(23): Xaa is A or G or is absent

SEQ ID NO: 41204 - protein, 38 aa, Artificial Sequence; identical to SEQ ID NO: 15216
  GFR-binding peptide
  MOD_RES (2)..(3)..(36)..(38): Xaa is C or S
  MOD_RES (17)..(18)..(19)..(20)..(21): Xaa is A or G
  MOD_RES (22)..(23)..(24)..(25): Xaa is A or G or is absent

SEQ ID NO: 41205 - protein, 34 aa, Artificial Sequence; identical to SEQ ID NO: 15217
  GFR-binding peptide
  MOD_RES (1)..(1): Xaa is C or S
  MOD_RES (15)..(16)..(17)..(18)..(19): Xaa is A or G
  MOD_RES (20)..(21)..(22)..(23): Xaa is A or G or is absent

SEQ ID NO: 41206 - protein, 41 aa, Artificial Sequence; identical to SEQ ID NO: 15220
  GFR-binding peptide
  MOD_RES (6)..(38)..(40): Xaa is C or S

SEQ ID NO: 41207 - protein, 36 aa, Artificial Sequence; identical to SEQ ID NO: 15221
  GFR-binding peptide
  MOD_RES (1)..(2)..(33)..(35): Xaa is C or S

SEQ ID NO: 41208 - protein, 34 aa, Artificial Sequence; identical to SEQ ID NO: 15223
  GFR-binding peptide
  MOD_RES (34)..(34): Xaa is C or S
  MOD_RES (14)..(15)..(16)..(17)..(18): Xaa is A or G
  MOD_RES (19)..(20)..(21)..(22): Xaa is A or G or is absent

SEQ ID NO: 41209 - protein, 40 aa, Artificial Sequence; identical to SEQ ID NO: 9731
  GFR-binding peptide
  MOD_RES (6)..(7)..(39): Xaa is C or S

SEQ ID NO: 41210 - protein, 36 aa, Artificial Sequence; identical to SEQ ID NO: 17013
  GFR-binding peptide
  MOD_RES (2)..(3): Xaa is C or S
  MOD_RES (17)..(18)..(19)..(20)..(21): Xaa is A or G
  MOD_RES (22)..(23)..(24)..(25): Xaa is A or G or is absent

SEQ ID NO: 41211 - protein, 43 aa, Artificial Sequence; identical to SEQ ID NO: 17014
  GFR-binding peptide
  MOD_RES (5)..(6)..(40)..(42): Xaa is C or S
  MOD_RES (20)..(21)..(22)..(23)..(24): Xaa is A or G
  MOD_RES (25)..(26)..(27)..(28): Xaa is A or G or is absent

SEQ ID NO: 41212 - protein, 37 aa, Artificial Sequence; identical to SEQ ID NO: 17016
  GFR-binding peptide
  MOD_RES (3)..(37): Xaa is C or S
  MOD_RES (17)..(18)..(19)..(20)..(21): Xaa is A or G
  MOD_RES (22)..(23)..(24)..(25): Xaa is A or G or is absent

SEQ ID NO: 41213 - protein, 36 aa, Artificial Sequence; identical to SEQ ID NO: 15225
  GFR-binding peptide
  MOD_RES (4)..(5): Xaa is C or S

SEQ ID NO: 41214 - protein, 41 aa, Artificial Sequence; identical to SEQ ID NO: 17017
  GFR-binding peptide
  MOD_RES (4)..(5)..(38)..(40): Xaa is C or S
  MOD_RES (19)..(20)..(21)..(22)..(23): Xaa is A or G
  MOD_RES (24)..(25)..(26)..(27): Xaa is A or G or is absent

SEQ ID NO: 41215 - protein, 36 aa, Artificial Sequence; identical to SEQ ID NO: 17019
  GFR-binding peptide
  MOD_RES (1)..(2)..(36): Xaa is C or S
  MOD_RES (16)..(17)..(18)..(19)..(20): Xaa is A or G
  MOD_RES (21)..(22)..(23)..(24): Xaa is A or G or is absent

SEQ ID NO: 41216 - protein, 38 aa, Artificial Sequence; identical to SEQ ID NO: 7934
  GFR-binding peptide
  MOD_RES (6)..(7)..(38): Xaa is C or S

SEQ ID NO: 41217 - protein, 37 aa, Artificial Sequence; identical to SEQ ID NO: 17020
  GFR-binding peptide
  MOD_RES (4)..(5): Xaa is C or S
  MOD_RES (19)..(20)..(21)..(22)..(23): Xaa is A or G
  MOD_RES (24)..(25)..(26)..(27): Xaa is A or G or is absent

SEQ ID NO: 41218 - protein, 40 aa, Artificial Sequence; identical to SEQ ID NO: 15227
  GFR-binding peptide
  MOD_RES (5)..(6)..(40): Xaa is C or S
  MOD_RES (20)..(21)..(22)..(23)..(24): Xaa is A or G
  MOD_RES (25)..(26)..(27)..(28): Xaa is A or G or is absent

SEQ ID NO: 41219 - protein, 34 aa, Artificial Sequence; identical to SEQ ID NO: 7937
  GFR-binding peptide
  MOD_RES (2)..(3): Xaa is C or S

SEQ ID NO: 41220 - protein, 36 aa, Artificial Sequence; identical to SEQ ID NO: 17021
  GFR-binding peptide
  MOD_RES (3)..(4): Xaa is C or S
  MOD_RES (18)..(19)..(20)..(21)..(22): Xaa is A or G
  MOD_RES (23)..(24)..(25)..(26): Xaa is A or G or is absent

SEQ ID NO: 41221 - protein, 40 aa, Artificial Sequence; identical to SEQ ID NO: 9741
  GFR-binding peptide
  MOD_RES (4)..(5)..(38)..(40): Xaa is C or S
  MOD_RES (19)..(20)..(21)..(22)..(23): Xaa is A or G
  MOD_RES (24)..(25)..(26)..(27): Xaa is A or G or is absent

SEQ ID NO: 41222 - protein, 39 aa, Artificial Sequence; identical to SEQ ID NO: 17023
  GFR-binding peptide
  MOD_RES (4)..(5)..(38): Xaa is C or S
  MOD_RES (19)..(20)..(21)..(22)..(23): Xaa is A or G
  MOD_RES (24)..(25)..(26)..(27): Xaa is A or G or is absent

SEQ ID NO: 41223 - protein, 39 aa, Artificial Sequence; identical to SEQ ID NO: 17025
  GFR-binding peptide
  MOD_RES (6)..(7)..(39): Xaa is C or S

SEQ ID NO: 41224 - protein, 35 aa, Artificial Sequence; identical to SEQ ID NO: 15230
  GFR-binding peptide
  MOD_RES (34)..(34): Xaa is C or S
  MOD_RES (14)..(15)..(16)..(17)..(18): Xaa is A or G
  MOD_RES (19)..(20)..(21)..(22): Xaa is A or G or is absent

SEQ ID NO: 41225 - protein, 36 aa, Artificial Sequence; identical to SEQ ID NO: 17027
  GFR-binding peptide
  MOD_RES (1)..(2)..(33)..(35): Xaa is C or S

SEQ ID NO: 41226 - protein, 36 aa, Artificial Sequence; identical to SEQ ID NO: 15231
  GFR-binding peptide
  MOD_RES (1)..(2)..(34)..(36): Xaa is C or S

SEQ ID NO: 41227 - protein, 34 aa, Artificial Sequence; identical to SEQ ID NO: 15232
  GFR-binding peptide
  MOD_RES (1)..(33): Xaa is C or S

SEQ ID NO: 41228 - protein, 35 aa, Artificial Sequence; identical to SEQ ID NO: 15233
  GFR-binding peptide
  MOD_RES (1)..(2): Xaa is C or S
  MOD_RES (16)..(17)..(18)..(19)..(20): Xaa is A or G
  MOD_RES (21)..(22)..(23)..(24): Xaa is A or G or is absent

SEQ ID NO: 41229 - protein, 38 aa, Artificial Sequence; identical to SEQ ID NO: 17030
  GFR-binding peptide
  MOD_RES (2)..(3)..(37): Xaa is C or S
  MOD_RES (17)..(18)..(19)..(20)..(21): Xaa is A or G
  MOD_RES (22)..(23)..(24)..(25): Xaa is A or G or is absent

SEQ ID NO: 41230 - protein, 37 aa, Artificial Sequence; identical to SEQ ID NO: 15234
  GFR-binding peptide
  MOD_RES (1)..(34)..(36): Xaa is C or S
  MOD_RES (15)..(16)..(17)..(18)..(19): Xaa is A or G
  MOD_RES (20)..(21)..(22)..(23): Xaa is A or G or is absent

SEQ ID NO: 41231 - protein, 35 aa, Artificial Sequence; identical to SEQ ID NO: 15235
  GFR-binding peptide
  MOD_RES (1)..(35): Xaa is C or S
  MOD_RES (15)..(16)..(17)..(18)..(19): Xaa is A or G
  MOD_RES (20)..(21)..(22)..(23): Xaa is A or G or is absent

SEQ ID NO: 41232 - protein, 38 aa, Artificial Sequence; identical to SEQ ID NO: 9756
  GFR-binding peptide
  MOD_RES (1)..(35)..(37): Xaa is C or S
  MOD_RES (15)..(16)..(17)..(18)..(19): Xaa is A or G
  MOD_RES (20)..(21)..(22)..(23): Xaa is A or G or is absent

SEQ ID NO: 41233 - protein, 41 aa, Artificial Sequence; identical to SEQ ID NO: 7948
  GFR-binding peptide
  MOD_RES (6)..(7)..(38)..(40): Xaa is C or S

SEQ ID NO: 41234 - protein, 32 aa, Artificial Sequence; identical to SEQ ID NO: 7949
  GFR-binding peptide
  MOD_RES (14)..(15)..(16)..(17)..(18): Xaa is A or G
  MOD_RES (19)..(20)..(21)..(22): Xaa is A or G or is absent

SEQ ID NO: 41235 - protein, 32 aa, Artificial Sequence; identical to SEQ ID NO: 17033
  GFR-binding peptide
  MOD_RES (1)..(1): Xaa is C or S

SEQ ID NO: 41236 - protein, 35 aa, Artificial Sequence; identical to SEQ ID NO: 15238
  GFR-binding peptide
  MOD_RES (2)..(3): Xaa is C or S
  MOD_RES (17)..(18)..(19)..(20)..(21): Xaa is A or G
  MOD_RES (22)..(23)..(24)..(25): Xaa is A or G or is absent

SEQ ID NO: 41237 - protein, 39 aa, Artificial Sequence; identical to SEQ ID NO: 15239
  GFR-binding peptide
  MOD_RES (6)..(7): Xaa is C or S
  MOD_RES (21)..(22)..(23)..(24)..(25): Xaa is A or G
  MOD_RES (26)..(27)..(28)..(29): Xaa is A or G or is absent

SEQ ID NO: 41238 - protein, 39 aa, Artificial Sequence; identical to SEQ ID NO: 15240
  GFR-binding peptide
  MOD_RES (6)..(7): Xaa is C or S
  MOD_RES (21)..(22)..(23)..(24)..(25): Xaa is A or G
  MOD_RES (26)..(27)..(28)..(29): Xaa is A or G or is absent

SEQ ID NO: 41239 - protein, 38 aa, Artificial Sequence; identical to SEQ ID NO: 7954
  GFR-binding peptide
  MOD_RES (2)..(3)..(37): Xaa is C or S
  MOD_RES (17)..(18)..(19)..(20)..(21): Xaa is A or G
  MOD_RES (22)..(23)..(24)..(25): Xaa is A or G or is absent

SEQ ID NO: 41240 - protein, 41 aa, Artificial Sequence; identical to SEQ ID NO: 17034
  GFR-binding peptide
  MOD_RES (4)..(38)..(40): Xaa is C or S
  MOD_RES (18)..(19)..(20)..(21)..(22): Xaa is A or G
  MOD_RES (23)..(24)..(25)..(26): Xaa is A or G or is absent

SEQ ID NO: 41241 - protein, 41 aa, Artificial Sequence; identical to SEQ ID NO: 17035
  GFR-binding peptide
  MOD_RES (5)..(6)..(40): Xaa is C or S
  MOD_RES (20)..(21)..(22)..(23)..(24): Xaa is A or G
  MOD_RES (25)..(26)..(27)..(28): Xaa is A or G or is absent

SEQ ID NO: 41242 - protein, 35 aa, Artificial Sequence; identical to SEQ ID NO: 15242
  GFR-binding peptide
  MOD_RES (1)..(2): Xaa is C or S
  MOD_RES (16)..(17)..(18)..(19)..(20): Xaa is A or G
  MOD_RES (21)..(22)..(23)..(24): Xaa is A or G or is absent

SEQ ID NO: 41243 - protein, 39 aa, Artificial Sequence; identical to SEQ ID NO: 15243
  GFR-binding peptide
  MOD_RES (2)..(3)..(37)..(39): Xaa is C or S
  MOD_RES (17)..(18)..(19)..(20)..(21): Xaa is A or G
  MOD_RES (22)..(23)..(24)..(25): Xaa is A or G or is absent

SEQ ID NO: 41244 - protein, 33 aa, Artificial Sequence; identical to SEQ ID NO: 17036
  GFR-binding peptide
  MOD_RES (1)..(2): Xaa is C or S

SEQ ID NO: 41245 - protein, 32 aa, Artificial Sequence; identical to SEQ ID NO: 15244
  GFR-binding peptide
  MOD_RES (1)..(2): Xaa is C or S

SEQ ID NO: 41246 - protein, 38 aa, Artificial Sequence; identical to SEQ ID NO: 15245
  GFR-binding peptide
  MOD_RES (3)..(4)..(37): Xaa is C or S
  MOD_RES (18)..(19)..(20)..(21)..(22): Xaa is A or G
  MOD_RES (23)..(24)..(25)..(26): Xaa is A or G or is absent

SEQ ID NO: 41247 - protein, 35 aa, Artificial Sequence; identical to SEQ ID NO: 15246
  GFR-binding peptide
  MOD_RES (1)..(33)..(35): Xaa is C or S

SEQ ID NO: 41248 - protein, 33 aa, Artificial Sequence; identical to SEQ ID NO: 7958
  GFR-binding peptide
  MOD_RES (1)..(1): Xaa is C or S
  MOD_RES (15)..(16)..(17)..(18)..(19): Xaa is A or G
  MOD_RES (20)..(21)..(22)..(23): Xaa is A or G or is absent

SEQ ID NO: 41249 - protein, 39 aa, Artificial Sequence; identical to SEQ ID NO: 15248
  GFR-binding peptide
  MOD_RES (3)..(4)..(38): Xaa is C or S
  MOD_RES (18)..(19)..(20)..(21)..(22): Xaa is A or G
  MOD_RES (23)..(24)..(25)..(26): Xaa is A or G or is absent

SEQ ID NO: 41250 - protein, 34 aa, Artificial Sequence; identical to SEQ ID NO: 17037
  GFR-binding peptide
  MOD_RES (3)..(4): Xaa is C or S

SEQ ID NO: 41251 - protein, 36 aa, Artificial Sequence; identical to SEQ ID NO: 15249
  GFR-binding peptide
  MOD_RES (2)..(3)..(36): Xaa is C or S
  MOD_RES (17)..(18)..(19)..(20)..(21): Xaa is A or G
  MOD_RES (22)..(23)..(24)..(25): Xaa is A or G or is absent

SEQ ID NO: 41252 - protein, 36 aa, Artificial Sequence; identical to SEQ ID NO: 15250
  GFR-binding peptide
  MOD_RES (1)..(34)..(36): Xaa is C or S
  MOD_RES (15)..(16)..(17)..(18)..(19): Xaa is A or G
  MOD_RES (20)..(21)..(22)..(23): Xaa is A or G or is absent

SEQ ID NO: 41253 - protein, 37 aa, Artificial Sequence; identical to SEQ ID NO: 7962
  GFR-binding peptide
  MOD_RES (2)..(3)..(37): Xaa is C or S
  MOD_RES (17)..(18)..(19)..(20)..(21): Xaa is A or G
  MOD_RES (22)..(23)..(24)..(25): Xaa is A or G or is absent

SEQ ID NO: 41254 - protein, 37 aa, Artificial Sequence; identical to SEQ ID NO: 17038
  GFR-binding peptide
  MOD_RES (1)..(2)..(34)..(36): Xaa is C or S

SEQ ID NO: 41255 - protein, 37 aa, Artificial Sequence; identical to SEQ ID NO: 15252
  GFR-binding peptide
  MOD_RES (2)..(3)..(36): Xaa is C or S
  MOD_RES (17)..(18)..(19)..(20)..(21): Xaa is A or G
  MOD_RES (22)..(23)..(24)..(25): Xaa is A or G or is absent

SEQ ID NO: 41256 - protein, 39 aa, Artificial Sequence; identical to SEQ ID NO: 17041
  GFR-binding peptide
  MOD_RES (1)..(2)..(36)..(38): Xaa is C or S
  MOD_RES (16)..(17)..(18)..(19)..(20): Xaa is A or G
  MOD_RES (21)..(22)..(23)..(24): Xaa is A or G or is absent

SEQ ID NO: 41257 - protein, 31 aa, Artificial Sequence; identical to SEQ ID NO: 15253
  GFR-binding peptide
  MOD_RES (1)..(1): Xaa is C or S

SEQ ID NO: 41258 - protein, 32 aa, Artificial Sequence; identical to SEQ ID NO: 7966
  GFR-binding peptide
  MOD_RES (1)..(32): Xaa is C or S

SEQ ID NO: 41259 - protein, 40 aa, Artificial Sequence; identical to SEQ ID NO: 15255
  GFR-binding peptide
  MOD_RES (4)..(5)..(39): Xaa is C or S
  MOD_RES (19)..(20)..(21)..(22)..(23): Xaa is A or G
  MOD_RES (24)..(25)..(26)..(27): Xaa is A or G or is absent

SEQ ID NO: 41260 - protein, 35 aa, Artificial Sequence; identical to SEQ ID NO: 9770
  GFR-binding peptide
  MOD_RES (1)..(32)..(34): Xaa is C or S

SEQ ID NO: 41261 - protein, 31 aa, Artificial Sequence; identical to SEQ ID NO: 7967
  GFR-binding peptide
  MOD_RES (31)..(31): Xaa is C or S

SEQ ID NO: 41262 - protein, 38 aa, Artificial Sequence; identical to SEQ ID NO: 17043
  GFR-binding peptide
  MOD_RES (5)..(5): Xaa is C or S
  MOD_RES (19)..(20)..(21)..(22)..(23): Xaa is A or G
  MOD_RES (24)..(25)..(26)..(27): Xaa is A or G or is absent

SEQ ID NO: 41263 - protein, 37 aa, Artificial Sequence; identical to SEQ ID NO: 7969
  GFR-binding peptide
  MOD_RES (1)..(2)..(36): Xaa is C or S
  MOD_RES (16)..(17)..(18)..(19)..(20): Xaa is A or G
  MOD_RES (21)..(22)..(23)..(24): Xaa is A or G or is absent

SEQ ID NO: 41264 - protein, 35 aa, Artificial Sequence; identical to SEQ ID NO: 15258
  GFR-binding peptide
  MOD_RES (2)..(34): Xaa is C or S

SEQ ID NO: 41265 - protein, 36 aa, Artificial Sequence; identical to SEQ ID NO: 15259
  GFR-binding peptide
  MOD_RES (33)..(35): Xaa is C or S
  MOD_RES (14)..(15)..(16)..(17)..(18): Xaa is A or G
  MOD_RES (19)..(20)..(21)..(22): Xaa is A or G or is absent

SEQ ID NO: 41266 - protein, 38 aa, Artificial Sequence; identical to SEQ ID NO: 17044
  GFR-binding peptide
  MOD_RES (3)..(4)..(36)..(38): Xaa is C or S

SEQ ID NO: 41267 - protein, 33 aa, Artificial Sequence; identical to SEQ ID NO: 9775
  GFR-binding peptide
  MOD_RES (2)..(3): Xaa is C or S

SEQ ID NO: 41268 - protein, 40 aa, Artificial Sequence; identical to SEQ ID NO: 7972
  GFR-binding peptide
  MOD_RES (6)..(7)..(38)..(40): Xaa is C or S

SEQ ID NO: 41269 - protein, 40 aa, Artificial Sequence; identical to SEQ ID NO: 23256
  GFR-binding peptide
  MOD_RES (1)..(3)..(38)..(39): Xaa is C or S
  MOD_RES (16)..(17)..(18)..(19)..(20): Xaa is A or G
  MOD_RES (21)..(22)..(23)..(24): Xaa is A or G or is absent

SEQ ID NO: 41270 - protein, 36 aa, Artificial Sequence; identical to SEQ ID NO: 23259
  GFR-binding peptide
  MOD_RES (2)..(36): Xaa is C or S
  MOD_RES (14)..(15)..(16)..(17)..(18): Xaa is A or G
  MOD_RES (19)..(20)..(21)..(22): Xaa is A or G or is absent

SEQ ID NO: 41271 - protein, 34 aa, Artificial Sequence
  GFR-binding peptide
  MOD_RES (2)..(2): Xaa is C or S
  MOD_RES (13)..(14)..(15)..(16)..(17): Xaa is A or G
  MOD_RES (18)..(19)..(20)..(21): Xaa is A or G or is absent
GXEEVIMEYQKYXXXXXXXXXIYLMSIPSTKVPA

SEQ ID NO: 41272 - protein, 35 aa, Artificial Sequence; identical to SEQ ID NO: 23260
  GFR-binding peptide
  MOD_RES (1)..(33)..(34): Xaa is C or S

SEQ ID NO: 41273 - protein, 38 aa, Artificial Sequence
  GFR-binding peptide
  MOD_RES (2)..(33)..(34): Xaa is C or S
GXEEVIMEYQKYLLVRGNDIYLMSIPSTKVPAXXTSPV

SEQ ID NO: 41274 - protein, 35 aa, Artificial Sequence
  GFR-binding peptide
  MOD_RES (31)..(32): Xaa is C or S
EEVIMEYQKYLLVRGNDIYLMSIPSTKVPAXXTSP

SEQ ID NO: 41275 - protein, 42 aa, Artificial Sequence; identical to SEQ ID NO: 24275
  GFR-binding peptide
  MOD_RES (2)..(36)..(37): Xaa is C or S
  MOD_RES (14)..(15)..(16)..(17)..(18): Xaa is A or G
  MOD_RES (19)..(20)..(21)..(22): Xaa is A or G or is absent

SEQ ID NO: 41276 - protein, 41 aa, Artificial Sequence; identical to SEQ ID NO: 23264
  GFR-binding peptide
  MOD_RES (2)..(4)..(39)..(40): Xaa is C or S
  MOD_RES (17)..(18)..(19)..(20)..(21): Xaa is A or G
  MOD_RES (22)..(23)..(24)..(25): Xaa is A or G or is absent

SEQ ID NO: 41277 - protein, 35 aa, Artificial Sequence; identical to SEQ ID NO: 25291
  GFR-binding peptide
  MOD_RES (31)..(32): Xaa is C or S

SEQ ID NO: 41278 - protein, 39 aa, Artificial Sequence; identical to SEQ ID NO: 26318
  GFR-binding peptide
  MOD_RES (1)..(33)..(34): Xaa is C or S

SEQ ID NO: 41279 - protein, 32 aa, Artificial Sequence; identical to SEQ ID NO: 23267
  GFR-binding peptide
  MOD_RES (31)..(32): Xaa is C or S

SEQ ID NO: 41280 - protein, 41 aa, Artificial Sequence; identical to SEQ ID NO: 26320
  GFR-binding peptide
  MOD_RES (2)..(36)..(37): Xaa is C or S
  MOD_RES (14)..(15)..(16)..(17)..(18): Xaa is A or G
  MOD_RES (19)..(20)..(21)..(22): Xaa is A or G or is absent

SEQ ID NO: 41281 - protein, 32 aa, Artificial Sequence
  GFR-binding peptide
  MOD_RES (2)..(2): Xaa is C or S
GXEEVIMEYQKYLLVRGNDIYLMSIPSTKVPA

SEQ ID NO: 41282 - protein, 34 aa, Artificial Sequence; identical to SEQ ID NO: 24283
  GFR-binding peptide
  MOD_RES (1)..(3): Xaa is C or S

SEQ ID NO: 41283 - protein, 40 aa, Artificial Sequence; identical to SEQ ID NO: 23268
  GFR-binding peptide
  MOD_RES (2)..(4)..(39)..(40): Xaa is C or S
  MOD_RES (17)..(18)..(19)..(20)..(21): Xaa is A or G
  MOD_RES (22)..(23)..(24)..(25): Xaa is A or G or is absent

SEQ ID NO: 41284 - protein, 40 aa, Artificial Sequence
  GFR-binding peptide
  MOD_RES (1)..(3)..(36)..(37): Xaa is C or S
  MOD_RES (14)..(15)..(16)..(17)..(18): Xaa is A or G
  MOD_RES (19)..(20)..(21)..(22): Xaa is A or G or is absent
XGXEEVIMEYQKYXXXXXXXXXIYLMSIPSTKVPAXXTSP

SEQ ID NO: 41285 - protein, 33 aa, Artificial Sequence; identical to SEQ ID NO: 26325
  GFR-binding peptide
  MOD_RES (12)..(13)..(14)..(15)..(16): Xaa is A or G
  MOD_RES (17)..(18)..(19)..(20): Xaa is A or G or is absent

SEQ ID NO: 41286 - protein, 39 aa, Artificial Sequence
  GFR-binding peptide
  MOD_RES (34)..(35): Xaa is C or S
  MOD_RES (12)..(13)..(14)..(15)..(16): Xaa is A or G
  MOD_RES (17)..(18)..(19)..(20): Xaa is A or G or is absent
RDVVMGEYQKYXXXXXXXXXIYLMSIPSMKTPTXXPGAS

SEQ ID NO: 41287 - protein, 36 aa, Artificial Sequence; identical to SEQ ID NO: 26328
  GFR-binding peptide
  MOD_RES (31)..(32): Xaa is C or S

SEQ ID NO: 41288 - protein, 39 aa, Artificial Sequence; identical to SEQ ID NO: 23274
  GFR-binding peptide
  MOD_RES (2)..(36): Xaa is C or S
  MOD_RES (14)..(15)..(16)..(17)..(18): Xaa is A or G
  MOD_RES (19)..(20)..(21)..(22): Xaa is A or G or is absent

SEQ ID NO: 41289 - protein, 36 aa, Artificial Sequence; identical to SEQ ID NO: 26335
  GFR-binding peptide
  MOD_RES (1)..(3)..(35)..(36): Xaa is C or S

SEQ ID NO: 41290 - protein, 32 aa, Artificial Sequence
  GFR-binding peptide
  MOD_RES (1)..(32): Xaa is C or S
XEEVIMEYQKYLLVRGNDIYLMSIPSTKVPAX

SEQ ID NO: 41291 - protein, 36 aa, Artificial Sequence; identical to SEQ ID NO: 23279
  GFR-binding peptide
  MOD_RES (33)..(34): Xaa is C or S
  MOD_RES (11)..(12)..(13)..(14)..(15): Xaa is A or G
  MOD_RES (16)..(17)..(18)..(19): Xaa is A or G or is absent

SEQ ID NO: 41292 - protein, 42 aa, Artificial Sequence; identical to SEQ ID NO: 23281
  GFR-binding peptide
  MOD_RES (1)..(3)..(37)..(38): Xaa is C or S
  MOD_RES (15)..(16)..(17)..(18)..(19): Xaa is A or G
  MOD_RES (20)..(21)..(22)..(23): Xaa is A or G or is absent

SEQ ID NO: 41293 - protein, 36 aa, Artificial Sequence; identical to SEQ ID NO: 23282
  GFR-binding peptide
  MOD_RES (31)..(32): Xaa is C or S

SEQ ID NO: 41294 - protein, 38 aa, Artificial Sequence; identical to SEQ ID NO: 23283
  GFR-binding peptide
  MOD_RES (33)..(34): Xaa is C or S
  MOD_RES (11)..(12)..(13)..(14)..(15): Xaa is A or G
  MOD_RES (16)..(17)..(18)..(19): Xaa is A or G or is absent

SEQ ID NO: 41295 - protein, 39 aa, Artificial Sequence; identical to SEQ ID NO: 24295
  GFR-binding peptide
  MOD_RES (2)..(4)..(36)..(37): Xaa is C or S

SEQ ID NO: 41296 - protein, 37 aa, Artificial Sequence; identical to SEQ ID NO: 24296
  GFR-binding peptide
  MOD_RES (2)..(34)..(35): Xaa is C or S

SEQ ID NO: 41297 - protein, 34 aa, Artificial Sequence; identical to SEQ ID NO: 24297
  GFR-binding peptide
  MOD_RES (34)..(34): Xaa is C or S
  MOD_RES (12)..(13)..(14)..(15)..(16): Xaa is A or G
  MOD_RES (17)..(18)..(19)..(20): Xaa is A or G or is absent

SEQ ID NO: 41298 - protein, 38 aa, Artificial Sequence; identical to SEQ ID NO: 25308
  GFR-binding peptide
  MOD_RES (32)..(32): Xaa is C or S

SEQ ID NO: 41299 - protein, 37 aa, Artificial Sequence; identical to SEQ ID NO: 25309
  GFR-binding peptide
  MOD_RES (1)..(35)..(36): Xaa is C or S
  MOD_RES (13)..(14)..(15)..(16)..(17): Xaa is A or G
  MOD_RES (18)..(19)..(20)..(21): Xaa is A or G or is absent

SEQ ID NO: 41300 - protein, 41 aa, Artificial Sequence; identical to SEQ ID NO: 26346
  GFR-binding peptide
  MOD_RES (2)..(4)..(38)..(39): Xaa is C or S
  MOD_RES (16)..(17)..(18)..(19)..(20): Xaa is A or G
  MOD_RES (21)..(22)..(23)..(24): Xaa is A or G or is absent

SEQ ID NO: 41301 - protein, 39 aa, Artificial Sequence; identical to SEQ ID NO: 25314
  GFR-binding peptide
  MOD_RES (34)..(35): Xaa is C or S
  MOD_RES (12)..(13)..(14)..(15)..(16): Xaa is A or G
  MOD_RES (17)..(18)..(19)..(20): Xaa is A or G or is absent

SEQ ID NO: 41302 - protein, 35 aa, Artificial Sequence; identical to SEQ ID NO: 26349
  GFR-binding peptide
  MOD_RES (2)..(34)..(35): Xaa is C or S

SEQ ID NO: 41303 - protein, 39 aa, Artificial Sequence; identical to SEQ ID NO: 24307
  GFR-binding peptide
  MOD_RES (1)..(34)..(35): Xaa is C or S

SEQ ID NO: 41304 - protein, 39 aa, Artificial Sequence; identical to SEQ ID NO: 26350
  GFR-binding peptide
  MOD_RES (2)..(34)..(35): Xaa is C or S

SEQ ID NO: 41305 - protein, 33 aa, Artificial Sequence
  GFR-binding peptide
  MOD_RES (1)..(33): Xaa is C or S
XRDVVMGEYQKYIIQQKDNIYLMSIPSMKTPTX

SEQ ID NO: 41306 - protein, 32 aa, Artificial Sequence; identical to SEQ ID NO: 26354
  GFR-binding peptide

SEQ ID NO: 41307 - protein, 38 aa, Artificial Sequence; identical to SEQ ID NO: 24311
  GFR-binding peptide
  MOD_RES (2)..(36)..(37): Xaa is C or S
  MOD_RES (14)..(15)..(16)..(17)..(18): Xaa is A or G
  MOD_RES (19)..(20)..(21)..(22): Xaa is A or G or is absent

SEQ ID NO: 41308 - protein, 42 aa, Artificial Sequence; identical to SEQ ID NO: 26355
  GFR-binding peptide
  MOD_RES (1)..(3)..(37)..(38): Xaa is C or S
  MOD_RES (15)..(16)..(17)..(18)..(19): Xaa is A or G
  MOD_RES (20)..(21)..(22)..(23): Xaa is A or G or is absent

SEQ ID NO: 41309 - protein, 35 aa, Artificial Sequence
  GFR-binding peptide
  MOD_RES (2)..(33)..(34): Xaa is C or S
GXEEVIMEYQKYLLVRGNDIYLMSIPSTKVPAXXT

SEQ ID NO: 41310 - protein, 34 aa, Artificial Sequence; identical to SEQ ID NO: 23300
  GFR-binding peptide
  MOD_RES (2)..(34): Xaa is C or S

SEQ ID NO: 41311 - protein, 37 aa, Artificial Sequence
  GFR-binding peptide
  MOD_RES (1)..(3)..(34)..(35): Xaa is C or S
XGXEEVIMEYQKYLLVRGNDIYLMSIPSTKVPAXXTS

SEQ ID NO: 41312 - protein, 42 aa, Artificial Sequence; identical to SEQ ID NO: 26356
  GFR-binding peptide
  MOD_RES (2)..(4)..(39)..(40): Xaa is C or S
  MOD_RES (17)..(18)..(19)..(20)..(21): Xaa is A or G
  MOD_RES (22)..(23)..(24)..(25): Xaa is A or G or is absent

SEQ ID NO: 41313 - protein, 36 aa, Artificial Sequence; identical to SEQ ID NO: 24314
  GFR-binding peptide
  MOD_RES (31)..(32): Xaa is C or S

SEQ ID NO: 41314 - protein, 33 aa, Artificial Sequence
  GFR-binding peptide
  MOD_RES (33)..(33): Xaa is C or S
  MOD_RES (11)..(12)..(13)..(14)..(15): Xaa is A or G
  MOD_RES (16)..(17)..(18)..(19): Xaa is A or G or is absent
DVVMGEYQKYXXXXXXXXXIYLMSIPSMKTPTX

SEQ ID NO: 41315 - protein, 38 aa, Artificial Sequence; identical to SEQ ID NO: 24317
  GFR-binding peptide
  MOD_RES (2)..(37)..(38): Xaa is C or S
  MOD_RES (15)..(16)..(17)..(18)..(19): Xaa is A or G
  MOD_RES (20)..(21)..(22)..(23): Xaa is A or G or is absent

SEQ ID NO: 41316 - protein, 37 aa, Artificial Sequence; identical to SEQ ID NO: 23304
  GFR-binding peptide
  MOD_RES (34)..(35): Xaa is C or S
  MOD_RES (12)..(13)..(14)..(15)..(16): Xaa is A or G
  MOD_RES (17)..(18)..(19)..(20): Xaa is A or G or is absent

SEQ ID NO: 41317 - protein, 38 aa, Artificial Sequence; identical to SEQ ID NO: 23309
  GFR-binding peptide
  MOD_RES (2)..(4)..(36): Xaa is C or S

SEQ ID NO: 41318 - protein, 37 aa, Artificial Sequence
  GFR-binding peptide
  MOD_RES (2)..(36)..(37): Xaa is C or S
  MOD_RES (14)..(15)..(16)..(17)..(18): Xaa is A or G
  MOD_RES (19)..(20)..(21)..(22): Xaa is A or G or is absent
GXRDVVMGEYQKYXXXXXXXXXIYLMSIPSMKTPTXX

SEQ ID NO: 41319 - protein, 37 aa, Artificial Sequence; identical to SEQ ID NO: 25319
  GFR-binding peptide
  MOD_RES (33)..(34): Xaa is C or S
  MOD_RES (11)..(12)..(13)..(14)..(15): Xaa is A or G
  MOD_RES (16)..(17)..(18)..(19): Xaa is A or G or is absent

SEQ ID NO: 41320 - protein, 32 aa, Artificial Sequence; identical to SEQ ID NO: 26364
  GFR-binding peptide
  MOD_RES (31)..(32): Xaa is C or S

SEQ ID NO: 41321 - protein, 33 aa, Artificial Sequence; identical to SEQ ID NO: 25321
  GFR-binding peptide
  MOD_RES (12)..(13)..(14)..(15)..(16): Xaa is A or G
  MOD_RES (17)..(18)..(19)..(20): Xaa is A or G or is absent

SEQ ID NO: 41322 - protein, 38 aa, Artificial Sequence; identical to SEQ ID NO: 23312
  GFR-binding peptide
  MOD_RES (2)..(4)..(38): Xaa is C or S
  MOD_RES (16)..(17)..(18)..(19)..(20): Xaa is A or G
  MOD_RES (21)..(22)..(23)..(24): Xaa is A or G or is absent

SEQ ID NO: 41323 - protein, 41 aa, Artificial Sequence; identical to SEQ ID NO: 23313
  GFR-binding peptide
  MOD_RES (1)..(3)..(35)..(36): Xaa is C or S

SEQ ID NO: 41324 - protein, 36 aa, Artificial Sequence; identical to SEQ ID NO: 26367
  GFR-binding peptide
  MOD_RES (2)..(34)..(35): Xaa is C or S

SEQ ID NO: 41325 - protein, 41 aa, Artificial Sequence; identical to SEQ ID NO: 26369
  GFR-binding peptide
  MOD_RES (2)..(36)..(37): Xaa is C or S
  MOD_RES (14)..(15)..(16)..(17)..(18): Xaa is A or G
  MOD_RES (19)..(20)..(21)..(22): Xaa is A or G or is absent

SEQ ID NO: 41326 - protein, 39 aa, Artificial Sequence; identical to SEQ ID NO: 26370
  GFR-binding peptide
  MOD_RES (2)..(4)..(38)..(39): Xaa is C or S
  MOD_RES (16)..(17)..(18)..(19)..(20): Xaa is A or G
  MOD_RES (21)..(22)..(23)..(24): Xaa is A or G or is absent

SEQ ID NO: 41327 - protein, 36 aa, Artificial Sequence
  GFR-binding peptide
  MOD_RES (1)..(33)..(34): Xaa is C or S
XRDVVMGEYQKYIIQQKDNIYLMSIPSMKTPTXXPG

SEQ ID NO: 41328 - protein, 33 aa, Artificial Sequence
  GFR-binding peptide
  MOD_RES (32)..(33): Xaa is C or S
RDVVMGEYQKYIIQQKDNIYLMSIPSMKTPTXX

SEQ ID NO: 41329 - protein, 34 aa, Artificial Sequence
  GFR-binding peptide
  MOD_RES (33)..(34): Xaa is C or S
  MOD_RES (11)..(12)..(13)..(14)..(15): Xaa is A or G
  MOD_RES (16)..(17)..(18)..(19): Xaa is A or G or is absent
DVVMGEYQKYXXXXXXXXXIYLMSIPSMKTPTXX

SEQ ID NO: 41330 - protein, 39 aa, Artificial Sequence; identical to SEQ ID NO: 26380
  GFR-binding peptide
  MOD_RES (33)..(34): Xaa is C or S
  MOD_RES (11)..(12)..(13)..(14)..(15): Xaa is A or G
  MOD_RES (16)..(17)..(18)..(19): Xaa is A or G or is absent

SEQ ID NO: 41331 - protein, 35 aa, Artificial Sequence; identical to SEQ ID NO: 26381
  GFR-binding peptide
  MOD_RES (1)..(33): Xaa is C or S

SEQ ID NO: 41332 - protein, 36 aa, Artificial Sequence
  GFR-binding peptide
  MOD_RES (1)..(3)..(36): Xaa is C or S
  MOD_RES (14)..(15)..(16)..(17)..(18): Xaa is A or G
  MOD_RES (19)..(20)..(21)..(22): Xaa is A or G or is absent
XGXEEVIMEYQKYXXXXXXXXXIYLMSIPSTKVPAX

SEQ ID NO: 41333 - protein, 36 aa, Artificial Sequence
  GFR-binding peptide
  MOD_RES (33)..(34): Xaa is C or S
  MOD_RES (11)..(12)..(13)..(14)..(15): Xaa is A or G
  MOD_RES (16)..(17)..(18)..(19): Xaa is A or G or is absent
EEVIMEYQKYXXXXXXXXXIYLMSIPSTKVPAXXTS

SEQ ID NO: 41334 - protein, 37 aa, Artificial Sequence; identical to SEQ ID NO: 24331
  GFR-binding peptide
  MOD_RES (2)..(34)..(35): Xaa is C or S

SEQ ID NO: 41335 - protein, 35 aa, Artificial Sequence; identical to SEQ ID NO: 26384
  GFR-binding peptide
  MOD_RES (1)..(35): Xaa is C or S
  MOD_RES (13)..(14)..(15)..(16)..(17): Xaa is A or G
  MOD_RES (18)..(19)..(20)..(21): Xaa is A or G or is absent

SEQ ID NO: 41336 - protein, 41 aa, Artificial Sequence; identical to SEQ ID NO: 23324
  GFR-binding peptide
  MOD_RES (1)..(3)..(35)..(36): Xaa is C or S

SEQ ID NO: 41337 - protein, 38 aa, Artificial Sequence; identical to SEQ ID NO: 25327
  GFR-binding peptide
  MOD_RES (32)..(33): Xaa is C or S

SEQ ID NO: 41338 - protein, 41 aa, Artificial Sequence; identical to SEQ ID NO: 26386
  GFR-binding peptide
  MOD_RES (1)..(3)..(37)..(38): Xaa is C or S
  MOD_RES (15)..(16)..(17)..(18)..(19): Xaa is A or G
  MOD_RES (20)..(21)..(22)..(23): Xaa is A or G or is absent

SEQ ID NO: 41339 - protein, 34 aa, Artificial Sequence; identical to SEQ ID NO: 25329
  GFR-binding peptide
  MOD_RES (1)..(3): Xaa is C or S

SEQ ID NO: 41340 - protein, 36 aa, Artificial Sequence; identical to SEQ ID NO: 23326
  GFR-binding peptide
  MOD_RES (2)..(36): Xaa is C or S
  MOD_RES (14)..(15)..(16)..(17)..(18): Xaa is A or G
  MOD_RES (19)..(20)..(21)..(22): Xaa is A or G or is absent

SEQ ID NO: 41341 - protein, 42 aa, Artificial Sequence; identical to SEQ ID NO: 23327
  GFR-binding peptide
  MOD_RES (2)..(36)..(37): Xaa is C or S
  MOD_RES (14)..(15)..(16)..(17)..(18): Xaa is A or G
  MOD_RES (19)..(20)..(21)..(22): Xaa is A or G or is absent

SEQ ID NO: 41342 - protein, 36 aa, Artificial Sequence; identical to SEQ ID NO: 23328
  GFR-binding peptide
  MOD_RES (31)..(31): Xaa is C or S

SEQ ID NO: 41343 - protein, 39 aa, Artificial Sequence; identical to SEQ ID NO: 24334
  GFR-binding peptide
  MOD_RES (34)..(35): Xaa is C or S
  MOD_RES (12)..(13)..(14)..(15)..(16): Xaa is A or G
  MOD_RES (17)..(18)..(19)..(20): Xaa is A or G or is absent

SEQ ID NO: 41344 - protein, 41 aa, Artificial Sequence; identical to SEQ ID NO: 25332
  GFR-binding peptide
  MOD_RES (1)..(3)..(35)..(36): Xaa is C or S

SEQ ID NO: 41345 - protein, 40 aa, Artificial Sequence; identical to SEQ ID NO: 26391
  GFR-binding peptide
  MOD_RES (34)..(35): Xaa is C or S
  MOD_RES (12)..(13)..(14)..(15)..(16): Xaa is A or G
  MOD_RES (17)..(18)..(19)..(20): Xaa is A or G or is absent

SEQ ID NO: 41346 - protein, 32 aa, Artificial Sequence; identical to SEQ ID NO: 25333
  GFR-binding peptide
  MOD_RES (1)..(1): Xaa is C or S

SEQ ID NO: 41347 - protein, 39 aa, Artificial Sequence; identical to SEQ ID NO: 26394
  GFR-binding peptide
  MOD_RES (1)..(36)..(37): Xaa is C or S
  MOD_RES (14)..(15)..(16)..(17)..(18): Xaa is A or G
  MOD_RES (19)..(20)..(21)..(22): Xaa is A or G or is absent

SEQ ID NO: 41348 - protein, 36 aa, Artificial Sequence; identical to SEQ ID NO: 23336
  GFR-binding peptide
  MOD_RES (34)..(35): Xaa is C or S
  MOD_RES (12)..(13)..(14)..(15)..(16): Xaa is A or G
  MOD_RES (17)..(18)..(19)..(20): Xaa is A or G or is absent

SEQ ID NO: 41349 - protein, 42 aa, Artificial Sequence; identical to SEQ ID NO: 25335
  GFR-binding peptide
  MOD_RES (2)..(4)..(36)..(37): Xaa is C or S

SEQ ID NO: 41350 - protein, 36 aa, Artificial Sequence; identical to SEQ ID NO: 23338
  GFR-binding peptide
  MOD_RES (31)..(32): Xaa is C or S

SEQ ID NO: 41351 - protein, 39 aa, Artificial Sequence
  GFR-binding peptide
  MOD_RES (2)..(34)..(35): Xaa is C or S
GXRDVVMGEYQKYIIQQKDNIYLMSIPSMKTPTXXPGAS

SEQ ID NO: 41352 - protein, 35 aa, Artificial Sequence; identical to SEQ ID NO: 25337
  GFR-binding peptide
  MOD_RES (32)..(32): Xaa is C or S

SEQ ID NO: 41353 - protein, 38 aa, Artificial Sequence; identical to SEQ ID NO: 26396
  GFR-binding peptide
  MOD_RES (33)..(34): Xaa is C or S
  MOD_RES (11)..(12)..(13)..(14)..(15): Xaa is A or G
  MOD_RES (16)..(17)..(18)..(19): Xaa is A or G or is absent

SEQ ID NO: 41354 - protein, 43 aa, Artificial Sequence; identical to SEQ ID NO: 26398
  GFR-binding peptide
  MOD_RES (1)..(3)..(38)..(39): Xaa is C or S
  MOD_RES (16)..(17)..(18)..(19)..(20): Xaa is A or G
  MOD_RES (21)..(22)..(23)..(24): Xaa is A or G or is absent

SEQ ID NO: 41355 - protein, 36 aa, Artificial Sequence; identical to SEQ ID NO: 24347
  GFR-binding peptide
  MOD_RES (1)..(3): Xaa is C or S
  MOD_RES (15)..(16)..(17)..(18)..(19): Xaa is A or G
  MOD_RES (20)..(21)..(22)..(23): Xaa is A or G or is absent

SEQ ID NO: 41356 - protein, 33 aa, Artificial Sequence; identical to SEQ ID NO: 26401
  GFR-binding peptide
  MOD_RES (1)..(33): Xaa is C or S

SEQ ID NO: 41357 - protein, 36 aa, Artificial Sequence; identical to SEQ ID NO: 25346
  GFR-binding peptide
  MOD_RES (32)..(33): Xaa is C or S

SEQ ID NO: 41358 - protein, 34 aa, Artificial Sequence; identical to SEQ ID NO: 26403
  GFR-binding peptide
  MOD_RES (31)..(32): Xaa is C or S

SEQ ID NO: 41359 - protein, 37 aa, Artificial Sequence; identical to SEQ ID NO: 26404
  GFR-binding peptide
  MOD_RES (1)..(3)..(35)..(36): Xaa is C or S

SEQ ID NO: 41360 - protein, 37 aa, Artificial Sequence; identical to SEQ ID NO: 24353
  GFR-binding peptide
  MOD_RES (31)..(32): Xaa is C or S

SEQ ID NO: 41361 - protein, 39 aa, Artificial Sequence; identical to SEQ ID NO: 24355
  GFR-binding peptide
  MOD_RES (1)..(35)..(36): Xaa is C or S
  MOD_RES (13)..(14)..(15)..(16)..(17): Xaa is A or G
  MOD_RES (18)..(19)..(20)..(21): Xaa is A or G or is absent

SEQ ID NO: 41362 - protein, 40 aa, Artificial Sequence; identical to SEQ ID NO: 25349
  GFR-binding peptide
  MOD_RES (1)..(3)..(35)..(36): Xaa is C or S

SEQ ID NO: 41363 - protein, 34 aa, Artificial Sequence; identical to SEQ ID NO: 26408
  GFR-binding peptide
  MOD_RES (33)..(33): Xaa is C or S
  MOD_RES (11)..(12)..(13)..(14)..(15): Xaa is A or G
  MOD_RES (16)..(17)..(18)..(19): Xaa is A or G or is absent

SEQ ID NO: 41364 - protein, 33 aa, Artificial Sequence; identical to SEQ ID NO: 25356
  GFR-binding peptide
  MOD_RES (2)..(2): Xaa is C or S

SEQ ID NO: 41365 - protein, 42 aa, Artificial Sequence; identical to SEQ ID NO: 26418
  GFR-binding peptide
  MOD_RES (1)..(3)..(37): Xaa is C or S
  MOD_RES (15)..(16)..(17)..(18)..(19): Xaa is A or G
  MOD_RES (20)..(21)..(22)..(23): Xaa is A or G or is absent

SEQ ID NO: 41366 - protein, 32 aa, Artificial Sequence; identical to SEQ ID NO: 24364
  GFR-binding peptide
  MOD_RES (11)..(12)..(13)..(14)..(15): Xaa is A or G
  MOD_RES (16)..(17)..(18)..(19): Xaa is A or G or is absent

SEQ ID NO: 41367 - protein, 33 aa, Artificial Sequence; identical to SEQ ID NO: 23351
  GFR-binding peptide
  MOD_RES (2)..(2): Xaa is C or S

SEQ ID NO: 41368 - protein, 37 aa, Artificial Sequence; identical to SEQ ID NO: 24366
  GFR-binding peptide
  MOD_RES (33)..(34): Xaa is C or S
  MOD_RES (11)..(12)..(13)..(14)..(15): Xaa is A or G
  MOD_RES (16)..(17)..(18)..(19): Xaa is A or G or is absent

SEQ ID NO: 41369 - protein, 34 aa, Artificial Sequence; identical to SEQ ID NO: 25366
  GFR-binding peptide
  MOD_RES (34)..(34): Xaa is C or S
  MOD_RES (12)..(13)..(14)..(15)..(16): Xaa is A or G
  MOD_RES (17)..(18)..(19)..(20): Xaa is A or G or is absent

SEQ ID NO: 41370 - protein, 32 aa, Artificial Sequence; identical to SEQ ID NO: 25371
  GFR-binding peptide
  MOD_RES (11)..(12)..(13)..(14)..(15): Xaa is A or G
  MOD_RES (16)..(17)..(18)..(19): Xaa is A or G or is absent

SEQ ID NO: 41371 - protein, 35 aa, Artificial Sequence
  GFR-binding peptide
  MOD_RES (1)..(3): Xaa is C or S
  MOD_RES (14)..(15)..(16)..(17)..(18): Xaa is A or G
  MOD_RES (19)..(20)..(21)..(22): Xaa is A or G or is absent
XGXEEVIMEYQKYXXXXXXXXXIYLMSIPSTKVPA

SEQ ID NO: 41372 - protein, 36 aa, Artificial Sequence
  GFR-binding peptide
  MOD_RES (1)..(32)..(33): Xaa is C or S
XEEVIMEYQKYLLVRGNDIYLMSIPSTKVPAXXTSP

SEQ ID NO: 41373 - protein, 38 aa, Artificial Sequence; identical to SEQ ID NO: 25375
  GFR-binding peptide
  MOD_RES (2)..(4)..(36)..(37): Xaa is C or S

SEQ ID NO: 41374 - protein, 39 aa, Artificial Sequence; identical to SEQ ID NO: 23365
  GFR-binding peptide
  MOD_RES (2)..(4)..(36)..(37): Xaa is C or S

SEQ ID NO: 41375 - protein, 41 aa, Artificial Sequence
  GFR-binding peptide
  MOD_RES (2)..(4)..(36)..(37): Xaa is C or S
SXGXRDVVMGEYQKYIIQQKDNIYLMSIPSMKTPTXXPGAS

SEQ ID NO: 41376 - protein, 40 aa, Artificial Sequence; identical to SEQ ID NO: 25381
  GFR-binding peptide
  MOD_RES (1)..(34)..(35): Xaa is C or S

SEQ ID NO: 41377 - protein, 39 aa, Artificial Sequence; identical to SEQ ID NO: 25382
  GFR-binding peptide
  MOD_RES (2)..(36)..(37): Xaa is C or S
  MOD_RES (14)..(15)..(16)..(17)..(18): Xaa is A or G
  MOD_RES (19)..(20)..(21)..(22): Xaa is A or G or is absent

SEQ ID NO: 41378 - protein, 38 aa, Artificial Sequence
  GFR-binding peptide
  MOD_RES (1)..(3)..(36)..(37): Xaa is C or S
  MOD_RES (14)..(15)..(16)..(17)..(18): Xaa is A or G
  MOD_RES (19)..(20)..(21)..(22): Xaa is A or G or is absent
XGXEEVIMEYQKYXXXXXXXXXIYLMSIPSTKVPAXXT

SEQ ID NO: 41379 - protein, 42 aa, Artificial Sequence
  GFR-binding peptide
  MOD_RES (2)..(4)..(38)..(39): Xaa is C or S
  MOD_RES (16)..(17)..(18)..(19)..(20): Xaa is A or G
  MOD_RES (21)..(22)..(23)..(24): Xaa is A or G or is absent
SXGXRDVVMGEYQKYXXXXXXXXXIYLMSIPSMKTPTXXPGA

SEQ ID NO: 41380 - protein, 39 aa, Artificial Sequence; identical to SEQ ID NO: 23373
  GFR-binding peptide
  MOD_RES (1)..(35)..(36): Xaa is C or S
  MOD_RES (13)..(14)..(15)..(16)..(17): Xaa is A or G
  MOD_RES (18)..(19)..(20)..(21): Xaa is A or G or is absent

SEQ ID NO: 41381 - protein, 34 aa, Artificial Sequence; identical to SEQ ID NO: 23374
  GFR-binding peptide
  MOD_RES (1)..(3): Xaa is C or S

SEQ ID NO: 41382 - protein, 39 aa, Artificial Sequence; identical to SEQ ID NO: 26444
  GFR-binding peptide
  MOD_RES (2)..(4)..(36)..(37): Xaa is C or S

SEQ ID NO: 41383 - protein, 41 aa, Artificial Sequence; identical to SEQ ID NO: 24373
  GFR-binding peptide
  MOD_RES (2)..(4)..(38)..(39): Xaa is C or S
  MOD_RES (16)..(17)..(18)..(19)..(20): Xaa is A or G
  MOD_RES (21)..(22)..(23)..(24): Xaa is A or G or is absent

SEQ ID NO: 41384 - protein, 38 aa, Artificial Sequence; identical to SEQ ID NO: 26445
  GFR-binding peptide
  MOD_RES (1)..(3)..(35): Xaa is C or S

SEQ ID NO: 41385 - protein, 31 aa, Artificial Sequence; identical to SEQ ID NO: 26446
  GFR-binding peptide

SEQ ID NO: 41386 - protein, 37 aa, Artificial Sequence
  GFR-binding peptide
  MOD_RES (2)..(4)..(37): Xaa is C or S
  MOD_RES (15)..(16)..(17)..(18)..(19): Xaa is A or G
  MOD_RES (20)..(21)..(22)..(23): Xaa is A or G or is absent
LXGXEEVIMEYQKYXXXXXXXXXIYLMSIPSTKVPAX

SEQ ID NO: 41387 - protein, 44 aa, Artificial Sequence; identical to SEQ ID NO: 24375
  GFR-binding peptide
  MOD_RES (2)..(4)..(38): Xaa is C or S
  MOD_RES (16)..(17)..(18)..(19)..(20): Xaa is A or G
  MOD_RES (21)..(22)..(23)..(24): Xaa is A or G or is absent

SEQ ID NO: 41388 - protein, 37 aa, Artificial Sequence; identical to SEQ ID NO: 25389
  GFR-binding peptide
  MOD_RES (31)..(32): Xaa is C or S

SEQ ID NO: 41389 - protein, 36 aa, Artificial Sequence; identical to SEQ ID NO: 23376
  GFR-binding peptide
  MOD_RES (2)..(34)..(35): Xaa is C or S

SEQ ID NO: 41390 - protein, 38 aa, Artificial Sequence; identical to SEQ ID NO: 25395
  GFR-binding peptide
  MOD_RES (34)..(35): Xaa is C or S
  MOD_RES (12)..(13)..(14)..(15)..(16): Xaa is A or G
  MOD_RES (17)..(18)..(19)..(20): Xaa is A or G or is absent

SEQ ID NO: 41391 - protein, 42 aa, Artificial Sequence; identical to SEQ ID NO: 24379
  GFR-binding peptide
  MOD_RES (2)..(4)..(38)..(39): Xaa is C or S
  MOD_RES (16)..(17)..(18)..(19)..(20): Xaa is A or G
  MOD_RES (21)..(22)..(23)..(24): Xaa is A or G or is absent

SEQ ID NO: 41392 - protein, 44 aa, Artificial Sequence; identical to SEQ ID NO: 24380
  GFR-binding peptide
  MOD_RES (2)..(4)..(38)..(39): Xaa is C or S
  MOD_RES (16)..(17)..(18)..(19)..(20): Xaa is A or G
  MOD_RES (21)..(22)..(23)..(24): Xaa is A or G or is absent

SEQ ID NO: 41393 - protein, 33 aa, Artificial Sequence; identical to SEQ ID NO: 26450
  GFR-binding peptide
  MOD_RES (12)..(13)..(14)..(15)..(16): Xaa is A or G
  MOD_RES (17)..(18)..(19)..(20): Xaa is A or G or is absent

SEQ ID NO: 41394 - protein, 40 aa, Artificial Sequence; identical to SEQ ID NO: 26451
  GFR-binding peptide
  MOD_RES (1)..(35)..(36): Xaa is C or S
  MOD_RES (13)..(14)..(15)..(16)..(17): Xaa is A or G
  MOD_RES (18)..(19)..(20)..(21): Xaa is A or G or is absent

SEQ ID NO: 41395 - protein, 38 aa, Artificial Sequence; identical to SEQ ID NO: 26453
  GFR-binding peptide
  MOD_RES (32)..(33): Xaa is C or S

SEQ ID NO: 41396 - protein, 43 aa, Artificial Sequence; identical to SEQ ID NO: 24386
  GFR-binding peptide
  MOD_RES (2)..(4)..(38)..(39): Xaa is C or S
  MOD_RES (16)..(17)..(18)..(19)..(20): Xaa is A or G
  MOD_RES (21)..(22)..(23)..(24): Xaa is A or G or is absent

SEQ ID NO: 41397 - protein, 32 aa, Artificial Sequence; identical to SEQ ID NO: 23384
  GFR-binding peptide
  MOD_RES (11)..(12)..(13)..(14)..(15): Xaa is A or G
  MOD_RES (16)..(17)..(18)..(19): Xaa is A or G or is absent

SEQ ID NO: 41398 - protein, 31 aa, Artificial Sequence; identical to SEQ ID NO: 23386
  GFR-binding peptide

SEQ ID NO: 41399 - protein, 40 aa, Artificial Sequence
  GFR-binding peptide
  MOD_RES (1)..(34)..(35): Xaa is C or S
  MOD_RES (12)..(13)..(14)..(15)..(16): Xaa is A or G
  MOD_RES (17)..(18)..(19)..(20): Xaa is A or G or is absent
XEEVIMEYQKYXXXXXXXXXIYLMSIPSTKVPAXXTSPVR

SEQ ID NO: 41400 - protein, 37 aa, Artificial Sequence; identical to SEQ ID NO: 24389
  GFR-binding peptide
  MOD_RES (1)..(33)..(34): Xaa is C or S

SEQ ID NO: 41401 - protein, 39 aa, Artificial Sequence; identical to SEQ ID NO: 23388
  GFR-binding peptide
  MOD_RES (2)..(4)..(38)..(39): Xaa is C or S
  MOD_RES (16)..(17)..(18)..(19)..(20): Xaa is A or G
  MOD_RES (21)..(22)..(23)..(24): Xaa is A or G or is absent

SEQ ID NO: 41402 - protein, 35 aa, Artificial Sequence; identical to SEQ ID NO: 23390
  GFR-binding peptide
  MOD_RES (1)..(35): Xaa is C or S
  MOD_RES (13)..(14)..(15)..(16)..(17): Xaa is A or G
  MOD_RES (18)..(19)..(20)..(21): Xaa is A or G or is absent

SEQ ID NO: 41403 - protein, 34 aa, Artificial Sequence; identical to SEQ ID NO: 23394
  GFR-binding peptide
  MOD_RES (31)..(32): Xaa is C or S

SEQ ID NO: 41404 - protein, 37 aa, Artificial Sequence; identical to SEQ ID NO: 26461
  GFR-binding peptide
  MOD_RES (1)..(33)..(34): Xaa is C or S

SEQ ID NO: 41405 - protein, 35 aa, Artificial Sequence
  GFR-binding peptide
  MOD_RES (1)..(3)..(35): Xaa is C or S
XGXRDVVMGEYQKYIIQQKDNIYLMSIPSMKTPTX

SEQ ID NO: 41406 - protein, 33 aa, Artificial Sequence; identical to SEQ ID NO: 24396
  GFR-binding peptide
  MOD_RES (31)..(32): Xaa is C or S

SEQ ID NO: 41407 - protein, 36 aa, Artificial Sequence; identical to SEQ ID NO: 26462
  GFR-binding peptide
  MOD_RES (34)..(35): Xaa is C or S
  MOD_RES (12)..(13)..(14)..(15)..(16): Xaa is A or G
  MOD_RES (17)..(18)..(19)..(20): Xaa is A or G or is absent

SEQ ID NO: 41408 - protein, 34 aa, Artificial Sequence; identical to SEQ ID NO: 26463
  GFR-binding peptide
  MOD_RES (34)..(34): Xaa is C or S
  MOD_RES (12)..(13)..(14)..(15)..(16): Xaa is A or G
  MOD_RES (17)..(18)..(19)..(20): Xaa is A or G or is absent

SEQ ID NO: 41409 - protein, 40 aa, Artificial Sequence; identical to SEQ ID NO: 23401
  GFR-binding peptide
  MOD_RES (2)..(36): Xaa is C or S
  MOD_RES (14)..(15)..(16)..(17)..(18): Xaa is A or G
  MOD_RES (19)..(20)..(21)..(22): Xaa is A or G or is absent

SEQ ID NO: 41410 - protein, 38 aa, Artificial Sequence; identical to SEQ ID NO: 24399
  GFR-binding peptide
  MOD_RES (1)..(3)..(36)..(37): Xaa is C or S

SEQ ID NO: 41411 - protein, 31 aa, Artificial Sequence; identical to SEQ ID NO: 24403
  GFR-binding peptide

SEQ ID NO: 41412 - protein, 39 aa, Artificial Sequence; identical to SEQ ID NO: 23405
  GFR-binding peptide
  MOD_RES (1)..(3)..(37)..(38): Xaa is C or S
  MOD_RES (15)..(16)..(17)..(18)..(19): Xaa is A or G
  MOD_RES (20)..(21)..(22)..(23): Xaa is A or G or is absent

SEQ ID NO: 41413 - protein, 42 aa, Artificial Sequence; identical to SEQ ID NO: 26465
  GFR-binding peptide
  MOD_RES (2)..(36)..(37): Xaa is C or S
  MOD_RES (14)..(15)..(16)..(17)..(18): Xaa is A or G
  MOD_RES (19)..(20)..(21)..(22): Xaa is A or G or is absent

SEQ ID NO: 41414 - protein, 40 aa, Artificial Sequence; identical to SEQ ID NO: 24404
  GFR-binding peptide
  MOD_RES (2)..(36)..(37): Xaa is C or S
  MOD_RES (14)..(15)..(16)..(17)..(18): Xaa is A or G
  MOD_RES (19)..(20)..(21)..(22): Xaa is A or G or is absent

SEQ ID NO: 41415 - protein, 37 aa, Artificial Sequence; identical to SEQ ID NO: 23406
  GFR-binding peptide
  MOD_RES (34)..(35): Xaa is C or S
  MOD_RES (12)..(13)..(14)..(15)..(16): Xaa is A or G
  MOD_RES (17)..(18)..(19)..(20): Xaa is A or G or is absent

SEQ ID NO: 41416 - protein, 38 aa, Artificial Sequence; identical to SEQ ID NO: 26467
  GFR-binding peptide
  MOD_RES (2)..(34)..(35): Xaa is C or S

SEQ ID NO: 41417 - protein, 38 aa, Artificial Sequence; identical to SEQ ID NO: 24405
  GFR-binding peptide
  MOD_RES (33)..(34): Xaa is C or S
  MOD_RES (11)..(12)..(13)..(14)..(15): Xaa is A or G
  MOD_RES (16)..(17)..(18)..(19): Xaa is A or G or is absent

SEQ ID NO: 41418 - protein, 38 aa, Artificial Sequence; identical to SEQ ID NO: 23408
  GFR-binding peptide
  MOD_RES (1)..(3)..(35)..(36): Xaa is C or S

SEQ ID NO: 41419 - protein, 33 aa, Artificial Sequence; identical to SEQ ID NO: 26472
  GFR-binding peptide
  MOD_RES (12)..(13)..(14)..(15)..(16): Xaa is A or G
  MOD_RES (17)..(18)..(19)..(20): Xaa is A or G or is absent

SEQ ID NO: 41420 - protein, 38 aa, Artificial Sequence; identical to SEQ ID NO: 25424
  GFR-binding peptide
  MOD_RES (1)..(35)..(36): Xaa is C or S
  MOD_RES (13)..(14)..(15)..(16)..(17): Xaa is A or G
  MOD_RES (18)..(19)..(20)..(21): Xaa is A or G or is absent

SEQ ID NO: 41421 - protein, 39 aa, Artificial Sequence; identical to SEQ ID NO: 24410
  GFR-binding peptide
  MOD_RES (2)..(36)..(37): Xaa is C or S
  MOD_RES (14)..(15)..(16)..(17)..(18): Xaa is A or G
  MOD_RES (19)..(20)..(21)..(22): Xaa is A or G or is absent

SEQ ID NO: 41422 - protein, 38 aa, Artificial Sequence
  GFR-binding peptide
  MOD_RES (2)..(4)..(37)..(38): Xaa is C or S
  MOD_RES (15)..(16)..(17)..(18)..(19): Xaa is A or G
  MOD_RES (20)..(21)..(22)..(23): Xaa is A or G or is absent
LXGXEEVIMEYQKYXXXXXXXXXIYLMSIPSTKVPAXX

SEQ ID NO: 41423 - protein, 36 aa, Artificial Sequence; identical to SEQ ID NO: 24411
  GFR-binding peptide
  MOD_RES (2)..(36): Xaa is C or S
  MOD_RES (14)..(15)..(16)..(17)..(18): Xaa is A or G
  MOD_RES (19)..(20)..(21)..(22): Xaa is A or G or is absent

SEQ ID NO: 41424 - protein, 37 aa, Artificial Sequence; identical to SEQ ID NO: 25426
  GFR-binding peptide
  MOD_RES (1)..(3)..(35)..(36): Xaa is C or S

SEQ ID NO: 41425 - protein, 38 aa, Artificial Sequence; identical to SEQ ID NO: 24414
  GFR-binding peptide
  MOD_RES (34)..(35): Xaa is C or S
  MOD_RES (12)..(13)..(14)..(15)..(16): Xaa is A or G
  MOD_RES (17)..(18)..(19)..(20): Xaa is A or G or is absent

SEQ ID NO: 41426 - protein, 43 aa, Artificial Sequence
  GFR-binding peptide
  MOD_RES (2)..(4)..(37)..(38): Xaa is C or S
  MOD_RES (15)..(16)..(17)..(18)..(19): Xaa is A or G
  MOD_RES (20)..(21)..(22)..(23): Xaa is A or G or is absent
LXGXEEVIMEYQKYXXXXXXXXXIYLMSIPSTKVPAXXTSPVR

SEQ ID NO: 41427 - protein, 32 aa, Artificial Sequence; identical to SEQ ID NO: 23414
  GFR-binding peptide
  MOD_RES (11)..(12)..(13)..(14)..(15): Xaa is A or G
  MOD_RES (16)..(17)..(18)..(19): Xaa is A or G or is absent

SEQ ID NO: 41428 - protein, 33 aa, Artificial Sequence; identical to SEQ ID NO: 26479
  GFR-binding peptide
  MOD_RES (1)..(33): Xaa is C or S

SEQ ID NO: 41429 - protein, 35 aa, Artificial Sequence; identical to SEQ ID NO: 24417
  GFR-binding peptide
  MOD_RES (1)..(35): Xaa is C or S
  MOD_RES (13)..(14)..(15)..(16)..(17): Xaa is A or G
  MOD_RES (18)..(19)..(20)..(21): Xaa is A or G or is absent

SEQ ID NO: 41430 - protein, 42 aa, Artificial Sequence; identical to SEQ ID NO: 25428
  GFR-binding peptide
  MOD_RES (2)..(36)..(37): Xaa is C or S
  MOD_RES (14)..(15)..(16)..(17)..(18): Xaa is A or G
  MOD_RES (19)..(20)..(21)..(22): Xaa is A or G or is absent

SEQ ID NO: 41431 - protein, 32 aa, Artificial Sequence; identical to SEQ ID NO: 23416
  GFR-binding peptide
  MOD_RES (31)..(32): Xaa is C or S

SEQ ID NO: 41432 - protein, 41 aa, Artificial Sequence; identical to SEQ ID NO: 24419
  GFR-binding peptide
  MOD_RES (2)..(4)..(36)..(37): Xaa is C or S

SEQ ID NO: 41433 - protein, 40 aa, Artificial Sequence; identical to SEQ ID NO: 25429
  GFR-binding peptide
  MOD_RES (1)..(3)..(35)..(36): Xaa is C or S

SEQ ID NO: 41434 - protein, 37 aa, Artificial Sequence; identical to SEQ ID NO: 24425
  GFR-binding peptide
  MOD_RES (1)..(3): Xaa is C or S
  MOD_RES (16)..(17)..(18)..(19)..(20): Xaa is A or G
  MOD_RES (21)..(22)..(23)..(24): Xaa is A or G or is absent

SEQ ID NO: 41435 - protein, 31 aa, Artificial Sequence; identical to SEQ ID NO: 25431
  GFR-binding peptide
  MOD_RES (31)..(31): Xaa is C or S

SEQ ID NO: 41436 - protein, 39 aa, Artificial Sequence; identical to SEQ ID NO: 25434
  GFR-binding peptide
  MOD_RES (2)..(36)..(37): Xaa is C or S
  MOD_RES (14)..(15)..(16)..(17)..(18): Xaa is A or G
  MOD_RES (19)..(20)..(21)..(22): Xaa is A or G or is absent

SEQ ID NO: 41437 - protein, 37 aa, Artificial Sequence
  GFR-binding peptide
  MOD_RES (1)..(3)..(36)..(37): Xaa is C or S
  MOD_RES (14)..(15)..(16)..(17)..(18): Xaa is A or G
  MOD_RES (19)..(20)..(21)..(22): Xaa is A or G or is absent
XGXEEVIMEYQKYXXXXXXXXXIYLMSIPSTKVPAXX

SEQ ID NO: 41438 - protein, 38 aa, Artificial Sequence; identical to SEQ ID NO: 24429
  GFR-binding peptide
  MOD_RES (2)..(34)..(35): Xaa is C or S

SEQ ID NO: 41439 - protein, 31 aa, Artificial Sequence; identical to SEQ ID NO: 25437
  GFR-binding peptide
  MOD_RES (31)..(31): Xaa is C or S

SEQ ID NO: 41440 - protein, 32 aa, Artificial Sequence; identical to SEQ ID NO: 26494
  GFR-binding peptide
  MOD_RES (1)..(1): Xaa is C or S

SEQ ID NO: 41441 - protein, 41 aa, Artificial Sequence; identical to SEQ ID NO: 23425
  GFR-binding peptide
  MOD_RES (2)..(4)..(36)..(37): Xaa is C or S

SEQ ID NO: 41442 - protein, 41 aa, Artificial Sequence; identical to SEQ ID NO: 23426
  GFR-binding peptide
  MOD_RES (2)..(36)..(37): Xaa is C or S
  MOD_RES (14)..(15)..(16)..(17)..(18): Xaa is A or G
  MOD_RES (19)..(20)..(21)..(22): Xaa is A or G or is absent

SEQ ID NO: 41443 - protein, 36 aa, Artificial Sequence; identical to SEQ ID NO: 23427
  GFR-binding peptide
  MOD_RES (33)..(34): Xaa is C or S
  MOD_RES (11)..(12)..(13)..(14)..(15): Xaa is A or G
  MOD_RES (16)..(17)..(18)..(19): Xaa is A or G or is absent

SEQ ID NO: 41444 - protein, 33 aa, Artificial Sequence; identical to SEQ ID NO: 25439
  GFR-binding peptide
  MOD_RES (33)..(33): Xaa is C or S
  MOD_RES (11)..(12)..(13)..(14)..(15): Xaa is A or G
  MOD_RES (16)..(17)..(18)..(19): Xaa is A or G or is absent

SEQ ID NO: 41445 - protein, 37 aa, Artificial Sequence; identical to SEQ ID NO: 24431
  GFR-binding peptide
  MOD_RES (1)..(35)..(36): Xaa is C or S
  MOD_RES (13)..(14)..(15)..(16)..(17): Xaa is A or G
  MOD_RES (18)..(19)..(20)..(21): Xaa is A or G or is absent

SEQ ID NO: 41446 - protein, 37 aa, Artificial Sequence; identical to SEQ ID NO: 23429
  GFR-binding peptide
  MOD_RES (31)..(32): Xaa is C or S

SEQ ID NO: 41447 - protein, 35 aa, Artificial Sequence; identical to SEQ ID NO: 23431
  GFR-binding peptide
  MOD_RES (33)..(34): Xaa is C or S
  MOD_RES (11)..(12)..(13)..(14)..(15): Xaa is A or G
  MOD_RES (16)..(17)..(18)..(19): Xaa is A or G or is absent

SEQ ID NO: 41448 - protein, 39 aa, Artificial Sequence; identical to SEQ ID NO: 26503
  GFR-binding peptide
  MOD_RES (2)..(34)..(35): Xaa is C or S

SEQ ID NO: 41449 - protein, 41 aa, Artificial Sequence; identical to SEQ ID NO: 25444
  GFR-binding peptide
  MOD_RES (1)..(3)..(38)..(39): Xaa is C or S
  MOD_RES (16)..(17)..(18)..(19)..(20): Xaa is A or G
  MOD_RES (21)..(22)..(23)..(24): Xaa is A or G or is absent

SEQ ID NO: 41450 - protein, 33 aa, Artificial Sequence; identical to SEQ ID NO: 23434
  GFR-binding peptide
  MOD_RES (12)..(13)..(14)..(15)..(16): Xaa is A or G
  MOD_RES (17)..(18)..(19)..(20): Xaa is A or G or is absent

SEQ ID NO: 41451 - protein, 40 aa, Artificial Sequence; identical to SEQ ID NO: 24433
  GFR-binding peptide
  MOD_RES (1)..(3)..(35)..(36): Xaa is C or S

SEQ ID NO: 41452 - protein, 37 aa, Artificial Sequence; identical to SEQ ID NO: 24435
  GFR-binding peptide
  MOD_RES (1)..(3)..(37): Xaa is C or S
  MOD_RES (15)..(16)..(17)..(18)..(19): Xaa is A or G
  MOD_RES (20)..(21)..(22)..(23): Xaa is A or G or is absent

SEQ ID NO: 41453 - protein, 32 aa, Artificial Sequence
  GFR-binding peptide
  MOD_RES (1)..(1): Xaa is C or S
XRDVVMGEYQKYIIQQKDNIYLMSIPSMKTPT

SEQ ID NO: 41454 - protein, 36 aa, Artificial Sequence; identical to SEQ ID NO: 25449
  GFR-binding peptide
  MOD_RES (1)..(3)..(35)..(36): Xaa is C or S

SEQ ID NO: 41455 - protein, 36 aa, Artificial Sequence; identical to SEQ ID NO: 23436
  GFR-binding peptide
  MOD_RES (2)..(4)..(36): Xaa is C or S

SEQ ID NO: 41456 - protein, 35 aa, Artificial Sequence; identical to SEQ ID NO: 25454
  GFR-binding peptide
  MOD_RES (33)..(34): Xaa is C or S
  MOD_RES (11)..(12)..(13)..(14)..(15): Xaa is A or G
  MOD_RES (16)..(17)..(18)..(19): Xaa is A or G or is absent

SEQ ID NO: 41457 - protein, 39 aa, Artificial Sequence; identical to SEQ ID NO: 23441
  GFR-binding peptide
  MOD_RES (1)..(3)..(36)..(37): Xaa is C or S

SEQ ID NO: 41458 - protein, 37 aa, Artificial Sequence
  GFR-binding peptide
  MOD_RES (1)..(32)..(33): Xaa is C or S
XEEVIMEYQKYLLVRGNDIYLMSIPSTKVPAXXTSPV

SEQ ID NO: 41459 - protein, 30 aa, Artificial Sequence
  GFR-binding peptide
DVVMGEYQKYIIQQKDNIYLMSIPSMKTPT

SEQ ID NO: 41460 - protein, 35 aa, Artificial Sequence; identical to SEQ ID NO: 25457
  GFR-binding peptide
  MOD_RES (33)..(33): Xaa is C or S
  MOD_RES (11)..(12)..(13)..(14)..(15): Xaa is A or G
  MOD_RES (16)..(17)..(18)..(19): Xaa is A or G or is absent

SEQ ID NO: 41461 - protein, 36 aa, Artificial Sequence; identical to SEQ ID NO: 25458
  GFR-binding peptide
  MOD_RES (1)..(3): Xaa is C or S
  MOD_RES (15)..(16)..(17)..(18)..(19): Xaa is A or G
  MOD_RES (20)..(21)..(22)..(23): Xaa is A or G or is absent

SEQ ID NO: 41462 - protein, 33 aa, Artificial Sequence; identical to SEQ ID NO: 25460
  GFR-binding peptide
  MOD_RES (1)..(33): Xaa is C or S

SEQ ID NO: 41463 - protein, 34 aa, Artificial Sequence; identical to SEQ ID NO: 26517
  GFR-binding peptide
  MOD_RES (1)..(1): Xaa is C or S
  MOD_RES (13)..(14)..(15)..(16)..(17): Xaa is A or G
  MOD_RES (18)..(19)..(20)..(21): Xaa is A or G or is absent

SEQ ID NO: 41464 - protein, 39 aa, Artificial Sequence
  GFR-binding peptide
  MOD_RES (2)..(4)..(38)..(39): Xaa is C or S
  MOD_RES (16)..(17)..(18)..(19)..(20): Xaa is A or G
  MOD_RES (21)..(22)..(23)..(24): Xaa is A or G or is absent
SXGXRDVVMGEYQKYXXXXXXXXXIYLMSIPSMKTPTXX

SEQ ID NO: 41465 - protein, 35 aa, Artificial Sequence; identical to SEQ ID NO: 23452
  GFR-binding peptide
  MOD_RES (2)..(2): Xaa is C or S
  MOD_RES (14)..(15)..(16)..(17)..(18): Xaa is A or G
  MOD_RES (19)..(20)..(21)..(22): Xaa is A or G or is absent

SEQ ID NO: 41466 - protein, 36 aa, Artificial Sequence; identical to SEQ ID NO: 24451
  GFR-binding peptide
  MOD_RES (2)..(34): Xaa is C or S

SEQ ID NO: 41467 - protein, 35 aa, Artificial Sequence; identical to SEQ ID NO: 23457
  GFR-binding peptide
  MOD_RES (2)..(34): Xaa is C or S

SEQ ID NO: 41468 - protein, 34 aa, Artificial Sequence; identical to SEQ ID NO: 25468
  GFR-binding peptide
  MOD_RES (32)..(33): Xaa is C or S

SEQ ID NO: 41469 - protein, 40 aa, Artificial Sequence; identical to SEQ ID NO: 25472
  GFR-binding peptide
  MOD_RES (2)..(36)..(37): Xaa is C or S
  MOD_RES (14)..(15)..(16)..(17)..(18): Xaa is A or G
  MOD_RES (19)..(20)..(21)..(22): Xaa is A or G or is absent

SEQ ID NO: 41470 - protein, 39 aa, Artificial Sequence; identical to SEQ ID NO: 26526
  GFR-binding peptide
  MOD_RES (1)..(3)..(35): Xaa is C or S

SEQ ID NO: 41471 - protein, 35 aa, Artificial Sequence; identical to SEQ ID NO: 26530
  GFR-binding peptide
  MOD_RES (32)..(33): Xaa is C or S

SEQ ID NO: 41472 - protein, 40 aa, Artificial Sequence
  GFR-binding peptide
  MOD_RES (1)..(35)..(36): Xaa is C or S
  MOD_RES (13)..(14)..(15)..(16)..(17): Xaa is A or G
  MOD_RES (18)..(19)..(20)..(21): Xaa is A or G or is absent
XRDVVMGEYQKYXXXXXXXXXIYLMSIPSMKTPTXXPGAS

SEQ ID NO: 41473 - protein, 32 aa, Artificial Sequence
  GFR-binding peptide
  MOD_RES (31)..(32): Xaa is C or S
EEVIMEYQKYLLVRGNDIYLMSIPSTKVPAXX

SEQ ID NO: 41474 - protein, 37 aa, Artificial Sequence
  GFR-binding peptide
  MOD_RES (2)..(35)..(36): Xaa is C or S
  MOD_RES (13)..(14)..(15)..(16)..(17): Xaa is A or G
  MOD_RES (18)..(19)..(20)..(21): Xaa is A or G or is absent
GXEEVIMEYQKYXXXXXXXXXIYLMSIPSTKVPAXXT

SEQ ID NO: 41475 - protein, 34 aa, Artificial Sequence; identical to SEQ ID NO: 25481
  GFR-binding peptide
  MOD_RES (1)..(33)..(34): Xaa is C or S

SEQ ID NO: 41476 - protein, 40 aa, Artificial Sequence; identical to SEQ ID NO: 25482
  GFR-binding peptide
  MOD_RES (1)..(35)..(36): Xaa is C or S
  MOD_RES (13)..(14)..(15)..(16)..(17): Xaa is A or G
  MOD_RES (18)..(19)..(20)..(21): Xaa is A or G or is absent

SEQ ID NO: 41477 - protein, 36 aa, Artificial Sequence; identical to SEQ ID NO: 24464
  GFR-binding peptide
  MOD_RES (1)..(33)..(34): Xaa is C or S

SEQ ID NO: 41478 - protein, 36 aa, Artificial Sequence; identical to SEQ ID NO: 26533
  GFR-binding peptide
  MOD_RES (1)..(3)..(35)..(36): Xaa is C or S

SEQ ID NO: 41479 - protein, 40 aa, Artificial Sequence
  GFR-binding peptide
  MOD_RES (2)..(34)..(35): Xaa is C or S
GXSRVVMNEYQKYIVNSSDDIYLVSIPSLKTPAXXPKPVH

SEQ ID NO: 41480 - protein, 38 aa, Artificial Sequence; identical to SEQ ID NO: 25486
  GFR-binding peptide
  MOD_RES (1)..(3)..(37)..(38): Xaa is C or S
  MOD_RES (15)..(16)..(17)..(18)..(19): Xaa is A or G
  MOD_RES (20)..(21)..(22)..(23): Xaa is A or G or is absent

SEQ ID NO: 41481 - protein, 35 aa, Artificial Sequence
  GFR-binding peptide
  MOD_RES (2)..(34)..(35): Xaa is C or S
GXRDVVMGEYQKYIIQQKDNIYLMSIPSMKTPTXX

SEQ ID NO: 41482 - protein, 35 aa, Artificial Sequence
  GFR-binding peptide
  MOD_RES (31)..(32): Xaa is C or S
DVVMGEYQKYIIQQKDNIYLMSIPSMKTPTXXPGA

SEQ ID NO: 41483 - protein, 34 aa, Artificial Sequence; identical to SEQ ID NO: 25487
  GFR-binding peptide
  MOD_RES (32)..(33): Xaa is C or S

SEQ ID NO: 41484 - protein, 37 aa, Artificial Sequence; identical to SEQ ID NO: 25489
  GFR-binding peptide
  MOD_RES (31)..(32): Xaa is C or S

SEQ ID NO: 41485 - protein, 32 aa, Artificial Sequence; identical to SEQ ID NO: 23472
  GFR-binding peptide
  MOD_RES (31)..(32): Xaa is C or S

SEQ ID NO: 41486 - protein, 43 aa, Artificial Sequence; identical to SEQ ID NO: 23474
  GFR-binding peptide
  MOD_RES (1)..(3)..(37)..(38): Xaa is C or S
  MOD_RES (15)..(16)..(17)..(18)..(19): Xaa is A or G
  MOD_RES (20)..(21)..(22)..(23): Xaa is A or G or is absent

SEQ ID NO: 41487 - protein, 41 aa, Artificial Sequence
  GFR-binding peptide
  MOD_RES (1)..(35)..(36): Xaa is C or S
  MOD_RES (13)..(14)..(15)..(16)..(17): Xaa is A or G
  MOD_RES (18)..(19)..(20)..(21): Xaa is A or G or is absent
XSRVVMNEYQKYXXXXXXXXXIYLVSIPSLKTPAXXPKPVH

SEQ ID NO: 41488 - protein, 33 aa, Artificial Sequence
  GFR-binding peptide
  MOD_RES (1)..(3): Xaa is C or S
XGXEEVIMEYQKYLLVRGNDIYLMSIPSTKVPA

SEQ ID NO: 41489 - protein, 39 aa, Artificial Sequence; identical to SEQ ID NO: 25498
  GFR-binding peptide
  MOD_RES (34)..(34): Xaa is C or S
  MOD_RES (12)..(13)..(14)..(15)..(16): Xaa is A or G
  MOD_RES (17)..(18)..(19)..(20): Xaa is A or G or is absent

SEQ ID NO: 41490 - protein, 35 aa, Artificial Sequence; identical to SEQ ID NO: 25499
  GFR-binding peptide
  MOD_RES (2)..(35): Xaa is C or S

SEQ ID NO: 41491 - protein, 35 aa, Artificial Sequence; identical to SEQ ID NO: 26540
  GFR-binding peptide
  MOD_RES (1)..(3)..(35): Xaa is C or S

SEQ ID NO: 41492 - protein, 34 aa, Artificial Sequence; identical to SEQ ID NO: 25500
  GFR-binding peptide
  MOD_RES (34)..(34): Xaa is C or S
  MOD_RES (12)..(13)..(14)..(15)..(16): Xaa is A or G
  MOD_RES (17)..(18)..(19)..(20): Xaa is A or G or is absent

SEQ ID NO: 41493 - protein, 39 aa, Artificial Sequence; identical to SEQ ID NO: 23478
  GFR-binding peptide
  MOD_RES (1)..(3)..(35)..(36): Xaa is C or S

SEQ ID NO: 41494 - protein, 40 aa, Artificial Sequence; identical to SEQ ID NO: 23480
  GFR-binding peptide
  MOD_RES (35)..(36): Xaa is C or S
  MOD_RES (13)..(14)..(15)..(16)..(17): Xaa is A or G
  MOD_RES (18)..(19)..(20)..(21): Xaa is A or G or is absent

SEQ ID NO: 41495 - protein, 39 aa, Artificial Sequence; identical to SEQ ID NO: 23482
  GFR-binding peptide
  MOD_RES (1)..(35)..(36): Xaa is C or S
  MOD_RES (13)..(14)..(15)..(16)..(17): Xaa is A or G
  MOD_RES (18)..(19)..(20)..(21): Xaa is A or G or is absent

SEQ ID NO: 41496 - protein, 40 aa, Artificial Sequence; identical to SEQ ID NO: 25505
  GFR-binding peptide
  MOD_RES (2)..(34)..(35): Xaa is C or S

SEQ ID NO: 41497 - protein, 41 aa, Artificial Sequence; identical to SEQ ID NO: 24477
  GFR-binding peptide
  MOD_RES (2)..(4)..(36)..(37): Xaa is C or S

SEQ ID NO: 41498 - protein, 42 aa, Artificial Sequence; identical to SEQ ID NO: 24478
  GFR-binding peptide
  MOD_RES (1)..(3)..(37)..(38): Xaa is C or S
  MOD_RES (15)..(16)..(17)..(18)..(19): Xaa is A or G
  MOD_RES (20)..(21)..(22)..(23): Xaa is A or G or is absent

SEQ ID NO: 41499 - protein, 37 aa, Artificial Sequence; identical to SEQ ID NO: 23486
  GFR-binding peptide
  MOD_RES (2)..(36)..(37): Xaa is C or S
  MOD_RES (14)..(15)..(16)..(17)..(18): Xaa is A or G
  MOD_RES (19)..(20)..(21)..(22): Xaa is A or G or is absent

SEQ ID NO: 41500 - protein, 40 aa, Artificial Sequence; identical to SEQ ID NO: 25507
  GFR-binding peptide
  MOD_RES (2)..(34)..(35): Xaa is C or S

SEQ ID NO: 41501 - protein, 37 aa, Artificial Sequence; identical to SEQ ID NO: 26547
  GFR-binding peptide
  MOD_RES (2)..(4): Xaa is C or S
  MOD_RES (16)..(17)..(18)..(19)..(20): Xaa is A or G
  MOD_RES (21)..(22)..(23)..(24): Xaa is A or G or is absent

SEQ ID NO: 41502 - protein, 32 aa, Artificial Sequence; identical to SEQ ID NO: 26551
  GFR-binding peptide
  MOD_RES (11)..(12)..(13)..(14)..(15): Xaa is A or G
  MOD_RES (16)..(17)..(18)..(19): Xaa is A or G or is absent

SEQ ID NO: 41503 - protein, 34 aa, Artificial Sequence; identical to SEQ ID NO: 23490
  GFR-binding peptide
  MOD_RES (31)..(32): Xaa is C or S

SEQ ID NO: 41504 - protein, 34 aa, Artificial Sequence; identical to SEQ ID NO: 25511
  GFR-binding peptide
  MOD_RES (1)..(33)..(34): Xaa is C or S

SEQ ID NO: 41505 - protein, 35 aa, Artificial Sequence; identical to SEQ ID NO: 25515
  GFR-binding peptide
  MOD_RES (2)..(4): Xaa is C or S

SEQ ID NO: 41506 - protein, 36 aa, Artificial Sequence; identical to SEQ ID NO: 24485
  GFR-binding peptide
  MOD_RES (1)..(33)..(34): Xaa is C or S

SEQ ID NO: 41507 - protein, 40 aa, Artificial Sequence; identical to SEQ ID NO: 24490
  GFR-binding peptide
  MOD_RES (2)..(4)..(36)..(37): Xaa is C or S

SEQ ID NO: 41508 - protein, 37 aa, Artificial Sequence; identical to SEQ ID NO: 23497
  GFR-binding peptide
  MOD_RES (34)..(35): Xaa is C or S
  MOD_RES (12)..(13)..(14)..(15)..(16): Xaa is A or G
  MOD_RES (17)..(18)..(19)..(20): Xaa is A or G or is absent

SEQ ID NO: 41509 - protein, 35 aa, Artificial Sequence; identical to SEQ ID NO: 25522
  GFR-binding peptide
  MOD_RES (1)..(3)..(35): Xaa is C or S

SEQ ID NO: 41510 - protein, 39 aa, Artificial Sequence; identical to SEQ ID NO: 23502
  GFR-binding peptide
  MOD_RES (2)..(36)..(37): Xaa is C or S
  MOD_RES (14)..(15)..(16)..(17)..(18): Xaa is A or G
  MOD_RES (19)..(20)..(21)..(22): Xaa is A or G or is absent

SEQ ID NO: 41511 - protein, 44 aa, Artificial Sequence; identical to SEQ ID NO: 25524
  GFR-binding peptide
  MOD_RES (2)..(4)..(38)..(39): Xaa is C or S
  MOD_RES (16)..(17)..(18)..(19)..(20): Xaa is A or G
  MOD_RES (21)..(22)..(23)..(24): Xaa is A or G or is absent

SEQ ID NO: 41512 - protein, 37 aa, Artificial Sequence; identical to SEQ ID NO: 24501
  GFR-binding peptide
  MOD_RES (1)..(35)..(36): Xaa is C or S
  MOD_RES (13)..(14)..(15)..(16)..(17): Xaa is A or G
  MOD_RES (18)..(19)..(20)..(21): Xaa is A or G or is absent

SEQ ID NO: 41513 - protein, 37 aa, Artificial Sequence
  GFR-binding peptide
  MOD_RES (2)..(34)..(35): Xaa is C or S
GXRDVVMGEYQKYIIQQKDNIYLMSIPSMKTPTXXPG

SEQ ID NO: 41514 - protein, 41 aa, Artificial Sequence; identical to SEQ ID NO: 25530
  GFR-binding peptide
  MOD_RES (1)..(3)..(35)..(36): Xaa is C or S

SEQ ID NO: 41515 - protein, 33 aa, Artificial Sequence; identical to SEQ ID NO: 26558
  GFR-binding peptide
  MOD_RES (33)..(33): Xaa is C or S
  MOD_RES (11)..(12)..(13)..(14)..(15): Xaa is A or G
  MOD_RES (16)..(17)..(18)..(19): Xaa is A or G or is absent

SEQ ID NO: 41516 - protein, 40 aa, Artificial Sequence; identical to SEQ ID NO: 23505
  GFR-binding peptide
  MOD_RES (1)..(35): Xaa is C or S
  MOD_RES (13)..(14)..(15)..(16)..(17): Xaa is A or G
  MOD_RES (18)..(19)..(20)..(21): Xaa is A or G or is absent

SEQ ID NO: 41517 - protein, 39 aa, Artificial Sequence; identical to SEQ ID NO: 26559
  GFR-binding peptide
  MOD_RES (1)..(33)..(34): Xaa is C or S

SEQ ID NO: 41518 - protein, 41 aa, Artificial Sequence; identical to SEQ ID NO: 25532
  GFR-binding peptide
  MOD_RES (2)..(36): Xaa is C or S
  MOD_RES (14)..(15)..(16)..(17)..(18): Xaa is A or G
  MOD_RES (19)..(20)..(21)..(22): Xaa is A or G or is absent

SEQ ID NO: 41519 - protein, 34 aa, Artificial Sequence
  GFR-binding peptide
  MOD_RES (32)..(33): Xaa is C or S
RDVVMGEYQKYIIQQKDNIYLMSIPSMKTPTXXP

SEQ ID NO: 41520 - protein, 36 aa, Artificial Sequence; identical to SEQ ID NO: 23506
  GFR-binding peptide
  MOD_RES (34)..(34): Xaa is C or S
  MOD_RES (12)..(13)..(14)..(15)..(16): Xaa is A or G
  MOD_RES (17)..(18)..(19)..(20): Xaa is A or G or is absent

SEQ ID NO: 41521 - protein, 35 aa, Artificial Sequence; identical to SEQ ID NO: 25533
  GFR-binding peptide
  MOD_RES (31)..(32): Xaa is C or S

SEQ ID NO: 41522 - protein, 38 aa, Artificial Sequence; identical to SEQ ID NO: 25538
  GFR-binding peptide
  MOD_RES (34)..(35): Xaa is C or S
  MOD_RES (12)..(13)..(14)..(15)..(16): Xaa is A or G
  MOD_RES (17)..(18)..(19)..(20): Xaa is A or G or is absent

SEQ ID NO: 41523 - protein, 33 aa, Artificial Sequence; identical to SEQ ID NO: 26564
  GFR-binding peptide
  MOD_RES (31)..(31): Xaa is C or S

SEQ ID NO: 41524 - protein, 37 aa, Artificial Sequence
  GFR-binding peptide
  MOD_RES (1)..(35)..(36): Xaa is C or S
  MOD_RES (13)..(14)..(15)..(16)..(17): Xaa is A or G
  MOD_RES (18)..(19)..(20)..(21): Xaa is A or G or is absent
XRDVVMGEYQKYXXXXXXXXXIYLMSIPSMKTPTXXP

SEQ ID NO: 41525 - protein, 40 aa, Artificial Sequence; identical to SEQ ID NO: 23509
  GFR-binding peptide
  MOD_RES (2)..(4)..(38)..(39): Xaa is C or S
  MOD_RES (16)..(17)..(18)..(19)..(20): Xaa is A or G
  MOD_RES (21)..(22)..(23)..(24): Xaa is A or G or is absent

SEQ ID NO: 41526 - protein, 41 aa, Artificial Sequence
  GFR-binding peptide
  MOD_RES (1)..(3)..(35)..(36): Xaa is C or S
XGXRDVVMGEYQKYIIQQKDNIYLMSIPSMKTPTXXPGASG

SEQ ID NO: 41527 - protein, 43 aa, Artificial Sequence; identical to SEQ ID NO: 26567
  GFR-binding peptide
  MOD_RES (1)..(3)..(37)..(38): Xaa is C or S
  MOD_RES (15)..(16)..(17)..(18)..(19): Xaa is A or G
  MOD_RES (20)..(21)..(22)..(23): Xaa is A or G or is absent

SEQ ID NO: 41528 - protein, 34 aa, Artificial Sequence; identical to SEQ ID NO: 25542
  GFR-binding peptide
  MOD_RES (31)..(31): Xaa is C or S

SEQ ID NO: 41529 - protein, 40 aa, Artificial Sequence; identical to SEQ ID NO: 23512
  GFR-binding peptide
  MOD_RES (34)..(35): Xaa is C or S
  MOD_RES (12)..(13)..(14)..(15)..(16): Xaa is A or G
  MOD_RES (17)..(18)..(19)..(20): Xaa is A or G or is absent

SEQ ID NO: 41530 - protein, 40 aa, Artificial Sequence; identical to SEQ ID NO: 24518
  GFR-binding peptide
  MOD_RES (2)..(4)..(38)..(39): Xaa is C or S
  MOD_RES (16)..(17)..(18)..(19)..(20): Xaa is A or G
  MOD_RES (21)..(22)..(23)..(24): Xaa is A or G or is absent

SEQ ID NO: 41531 - protein, 39 aa, Artificial Sequence; identical to SEQ ID NO: 26572
  GFR-binding peptide
  MOD_RES (2)..(4)..(36)..(37): Xaa is C or S

SEQ ID NO: 41532 - protein, 38 aa, Artificial Sequence; identical to SEQ ID NO: 26573
  GFR-binding peptide
  MOD_RES (2)..(4)..(36)..(37): Xaa is C or S

SEQ ID NO: 41533 - protein, 35 aa, Artificial Sequence; identical to SEQ ID NO: 25548
  GFR-binding peptide
  MOD_RES (34)..(35): Xaa is C or S
  MOD_RES (12)..(13)..(14)..(15)..(16): Xaa is A or G
  MOD_RES (17)..(18)..(19)..(20): Xaa is A or G or is absent

SEQ ID NO: 41534 - protein, 36 aa, Artificial Sequence; identical to SEQ ID NO: 26576
  GFR-binding peptide
  MOD_RES (33)..(33): Xaa is C or S
  MOD_RES (11)..(12)..(13)..(14)..(15): Xaa is A or G
  MOD_RES (16)..(17)..(18)..(19): Xaa is A or G or is absent

SEQ ID NO: 41535 - protein, 36 aa, Artificial Sequence; identical to SEQ ID NO: 23521
  GFR-binding peptide
  MOD_RES (33)..(34): Xaa is C or S
  MOD_RES (11)..(12)..(13)..(14)..(15): Xaa is A or G
  MOD_RES (16)..(17)..(18)..(19): Xaa is A or G or is absent

SEQ ID NO: 41536 - protein, 41 aa, Artificial Sequence; identical to SEQ ID NO: 23524
  GFR-binding peptide
  MOD_RES (2)..(4)..(36)..(37): Xaa is C or S

SEQ ID NO: 41537 - protein, 41 aa, Artificial Sequence; identical to SEQ ID NO: 25553
  GFR-binding peptide
  MOD_RES (2)..(4)..(36): Xaa is C or S

SEQ ID NO: 41538 - protein, 33 aa, Artificial Sequence
  GFR-binding peptide
  MOD_RES (31)..(32): Xaa is C or S
EEVIMEYQKYLLVRGNDIYLMSIPSTKVPAXXT

SEQ ID NO: 41539 - protein, 39 aa, Artificial Sequence; identical to SEQ ID NO: 23530
  GFR-binding peptide
  MOD_RES (1)..(33)..(34): Xaa is C or S

SEQ ID NO: 41540 - protein, 36 aa, Artificial Sequence; identical to SEQ ID NO: 24529
  GFR-binding peptide
  MOD_RES (1)..(3)..(35)..(36): Xaa is C or S

SEQ ID NO: 41541 - protein, 36 aa, Artificial Sequence; identical to SEQ ID NO: 24530
  GFR-binding peptide
  MOD_RES (34)..(35): Xaa is C or S
  MOD_RES (12)..(13)..(14)..(15)..(16): Xaa is A or G
  MOD_RES (17)..(18)..(19)..(20): Xaa is A or G or is absent

SEQ ID NO: 41542 - protein, 34 aa, Artificial Sequence; identical to SEQ ID NO: 25558
  GFR-binding peptide
  MOD_RES (1)..(3): Xaa is C or S

SEQ ID NO: 41543 - protein, 34 aa, Artificial Sequence; identical to SEQ ID NO: 26586
  GFR-binding peptide
  MOD_RES (1)..(1): Xaa is C or S
  MOD_RES (13)..(14)..(15)..(16)..(17): Xaa is A or G
  MOD_RES (18)..(19)..(20)..(21): Xaa is A or G or is absent

SEQ ID NO: 41544 - protein, 40 aa, Artificial Sequence; identical to SEQ ID NO: 23534
  GFR-binding peptide
  MOD_RES (1)..(3)..(35)..(36): Xaa is C or S

SEQ ID NO: 41545 - protein, 42 aa, Artificial Sequence; identical to SEQ ID NO: 23535
  GFR-binding peptide
  MOD_RES (2)..(36): Xaa is C or S
  MOD_RES (14)..(15)..(16)..(17)..(18): Xaa is A or G
  MOD_RES (19)..(20)..(21)..(22): Xaa is A or G or is absent

SEQ ID NO: 41546 - protein, 34 aa, Artificial Sequence
  GFR-binding peptide
  MOD_RES (1)..(3): Xaa is C or S
XGXRDVVMGEYQKYIIQQKDNIYLMSIPSMKTPT

SEQ ID NO: 41547 - protein, 41 aa, Artificial Sequence; identical to SEQ ID NO: 24535
  GFR-binding peptide
  MOD_RES (2)..(4)..(38): Xaa is C or S
  MOD_RES (16)..(17)..(18)..(19)..(20): Xaa is A or G
  MOD_RES (21)..(22)..(23)..(24): Xaa is A or G or is absent

SEQ ID NO: 41548 - protein, 38 aa, Artificial Sequence
  GFR-binding peptide
  MOD_RES (1)..(3)..(34)..(35): Xaa is C or S
XGXEEVIMEYQKYLLVRGNDIYLMSIPSTKVPAXXTSP

SEQ ID NO: 41549 - protein, 37 aa, Artificial Sequence
  GFR-binding peptide
  MOD_RES (1)..(3)..(37): Xaa is C or S
  MOD_RES (15)..(16)..(17)..(18)..(19): Xaa is A or G
  MOD_RES (20)..(21)..(22)..(23): Xaa is A or G or is absent
XGXRDVVMGEYQKYXXXXXXXXXIYLMSIPSMKTPTX

SEQ ID NO: 41550 - protein, 40 aa, Artificial Sequence; identical to SEQ ID NO: 24536
  GFR-binding peptide
  MOD_RES (2)..(36)..(37): Xaa is C or S
  MOD_RES (14)..(15)..(16)..(17)..(18): Xaa is A or G
  MOD_RES (19)..(20)..(21)..(22): Xaa is A or G or is absent

SEQ ID NO: 41551 - protein, 37 aa, Artificial Sequence; identical to SEQ ID NO: 23544
  GFR-binding peptide
  MOD_RES (1)..(3)..(35): Xaa is C or S

SEQ ID NO: 41552 - protein, 37 aa, Artificial Sequence; identical to SEQ ID NO: 23547
  GFR-binding peptide
  MOD_RES (2)..(4)..(36)..(37): Xaa is C or S

SEQ ID NO: 41553 - protein, 34 aa, Artificial Sequence; identical to SEQ ID NO: 23549
  GFR-binding peptide
  MOD_RES (33)..(34): Xaa is C or S
  MOD_RES (11)..(12)..(13)..(14)..(15): Xaa is A or G
  MOD_RES (16)..(17)..(18)..(19): Xaa is A or G or is absent

SEQ ID NO: 41554 - protein, 39 aa, Artificial Sequence
  GFR-binding peptide
  MOD_RES (33)..(34): Xaa is C or S
  MOD_RES (11)..(12)..(13)..(14)..(15): Xaa is A or G
  MOD_RES (16)..(17)..(18)..(19): Xaa is A or G or is absent
DVVMGEYQKYXXXXXXXXXIYLMSIPSMKTPTXXPGASG

SEQ ID NO: 41555 - protein, 36 aa, Artificial Sequence; identical to SEQ ID NO: 26594
  GFR-binding peptide
  MOD_RES (1)..(3): Xaa is C or S
  MOD_RES (15)..(16)..(17)..(18)..(19): Xaa is A or G
  MOD_RES (20)..(21)..(22)..(23): Xaa is A or G or is absent

SEQ ID NO: 41556 - protein, 37 aa, Artificial Sequence; identical to SEQ ID NO: 26597
  GFR-binding peptide
  MOD_RES (1)..(33)..(34): Xaa is C or S

SEQ ID NO: 41557 - protein, 38 aa, Artificial Sequence; identical to SEQ ID NO: 24543
  GFR-binding peptide
  MOD_RES (2)..(36): Xaa is C or S
  MOD_RES (14)..(15)..(16)..(17)..(18): Xaa is A or G
  MOD_RES (19)..(20)..(21)..(22): Xaa is A or G or is absent

SEQ ID NO: 41558 - protein, 36 aa, Artificial Sequence; identical to SEQ ID NO: 23552
  GFR-binding peptide
  MOD_RES (2)..(4)..(36): Xaa is C or S

SEQ ID NO: 41559 - protein, 36 aa, Artificial Sequence; identical to SEQ ID NO: 24546
  GFR-binding peptide
  MOD_RES (1)..(3)..(35): Xaa is C or S

SEQ ID NO: 41560 - protein, 37 aa, Artificial Sequence
  GFR-binding peptide
  MOD_RES (1)..(33)..(34): Xaa is C or S
XRDVVMGEYQKYIIQQKDNIYLMSIPSMKTPTXXPGA

SEQ ID NO: 41561 - protein, 36 aa, Artificial Sequence; identical to SEQ ID NO: 24549
  GFR-binding peptide
  MOD_RES (1)..(35)..(36): Xaa is C or S
  MOD_RES (13)..(14)..(15)..(16)..(17): Xaa is A or G
  MOD_RES (18)..(19)..(20)..(21): Xaa is A or G or is absent

SEQ ID NO: 41562 - protein, 39 aa, Artificial Sequence; identical to SEQ ID NO: 25578
  GFR-binding peptide
  MOD_RES (2)..(4)..(36)..(37): Xaa is C or S

SEQ ID NO: 41563 - protein, 39 aa, Artificial Sequence; identical to SEQ ID NO: 23556
  GFR-binding peptide
  MOD_RES (2)..(4)..(36)..(37): Xaa is C or S

SEQ ID NO: 41564 - protein, 35 aa, Artificial Sequence; identical to SEQ ID NO: 23558
  GFR-binding peptide
  MOD_RES (1)..(33)..(34): Xaa is C or S

SEQ ID NO: 41565 - protein, 41 aa, Artificial Sequence; identical to SEQ ID NO: 26600
  GFR-binding peptide
  MOD_RES (1)..(3)..(37)..(38): Xaa is C or S
  MOD_RES (15)..(16)..(17)..(18)..(19): Xaa is A or G
  MOD_RES (20)..(21)..(22)..(23): Xaa is A or G or is absent

SEQ ID NO: 41566 - protein, 39 aa, Artificial Sequence; identical to SEQ ID NO: 23562
  GFR-binding peptide
  MOD_RES (2)..(4)..(38)..(39): Xaa is C or S
  MOD_RES (16)..(17)..(18)..(19)..(20): Xaa is A or G
  MOD_RES (21)..(22)..(23)..(24): Xaa is A or G or is absent

SEQ ID NO: 41567 - protein, 35 aa, Artificial Sequence; identical to SEQ ID NO: 25581
  GFR-binding peptide
  MOD_RES (32)..(33): Xaa is C or S

SEQ ID NO: 41568 - protein, 37 aa, Artificial Sequence; identical to SEQ ID NO: 24552
  GFR-binding peptide
  MOD_RES (34)..(35): Xaa is C or S
  MOD_RES (12)..(13)..(14)..(15)..(16): Xaa is A or G
  MOD_RES (17)..(18)..(19)..(20): Xaa is A or G or is absent

SEQ ID NO: 41569 - protein, 34 aa, Artificial Sequence
  GFR-binding peptide
  MOD_RES (2)..(4): Xaa is C or S
LXGXEEVIMEYQKYLLVRGNDIYLMSIPSTKVPA

SEQ ID NO: 41570 - protein, 34 aa, Artificial Sequence; identical to SEQ ID NO: 24553
  GFR-binding peptide
  MOD_RES (32)..(33): Xaa is C or S

SEQ ID NO: 41571 - protein, 38 aa, Artificial Sequence; identical to SEQ ID NO: 26603
  GFR-binding peptide
  MOD_RES (1)..(33)..(34): Xaa is C or S

SEQ ID NO: 41572 - protein, 44 aa, Artificial Sequence; identical to SEQ ID NO: 26604
  GFR-binding peptide
  MOD_RES (2)..(4)..(39)..(40): Xaa is C or S
  MOD_RES (17)..(18)..(19)..(20)..(21): Xaa is A or G
  MOD_RES (22)..(23)..(24)..(25): Xaa is A or G or is absent

SEQ ID NO: 41573 - protein, 41 aa, Artificial Sequence; identical to SEQ ID NO: 23566
  GFR-binding peptide
  MOD_RES (1)..(35)..(36): Xaa is C or S
  MOD_RES (13)..(14)..(15)..(16)..(17): Xaa is A or G
  MOD_RES (18)..(19)..(20)..(21): Xaa is A or G or is absent

SEQ ID NO: 41574 - protein, 42 aa, Artificial Sequence; identical to SEQ ID NO: 24555
  GFR-binding peptide
  MOD_RES (2)..(36)..(37): Xaa is C or S
  MOD_RES (14)..(15)..(16)..(17)..(18): Xaa is A or G
  MOD_RES (19)..(20)..(21)..(22): Xaa is A or G or is absent

SEQ ID NO: 41575 - protein, 36 aa, Artificial Sequence
  GFR-binding peptide
  MOD_RES (32)..(33): Xaa is C or S
RDVVMGEYQKYIIQQKDNIYLMSIPSMKTPTXXPGA

SEQ ID NO: 41576 - protein, 38 aa, Artificial Sequence
  GFR-binding peptide
  MOD_RES (1)..(34)..(35): Xaa is C or S
  MOD_RES (12)..(13)..(14)..(15)..(16): Xaa is A or G
  MOD_RES (17)..(18)..(19)..(20): Xaa is A or G or is absent
XEEVIMEYQKYXXXXXXXXXIYLMSIPSTKVPAXXTSP

SEQ ID NO: 41577 - protein, 37 aa, Artificial Sequence; identical to SEQ ID NO: 23567
  GFR-binding peptide
  MOD_RES (1)..(35): Xaa is C or S
  MOD_RES (13)..(14)..(15)..(16)..(17): Xaa is A or G
  MOD_RES (18)..(19)..(20)..(21): Xaa is A or G or is absent

SEQ ID NO: 41578 - protein, 34 aa, Artificial Sequence; identical to SEQ ID NO: 23568
  GFR-binding peptide
  MOD_RES (31)..(32): Xaa is C or S

SEQ ID NO: 41579 - protein, 41 aa, Artificial Sequence; identical to SEQ ID NO: 25590
  GFR-binding peptide
  MOD_RES (1)..(35)..(36): Xaa is C or S
  MOD_RES (13)..(14)..(15)..(16)..(17): Xaa is A or G
  MOD_RES (18)..(19)..(20)..(21): Xaa is A or G or is absent

SEQ ID NO: 41580 - protein, 36 aa, Artificial Sequence; identical to SEQ ID NO: 23569
  GFR-binding peptide
  MOD_RES (2)..(4)..(36): Xaa is C or S

SEQ ID NO: 41581 - protein, 37 aa, Artificial Sequence; identical to SEQ ID NO: 25592
  GFR-binding peptide
  MOD_RES (2)..(4): Xaa is C or S
  MOD_RES (16)..(17)..(18)..(19)..(20): Xaa is A or G
  MOD_RES (21)..(22)..(23)..(24): Xaa is A or G or is absent

SEQ ID NO: 41582 - protein, 37 aa, Artificial Sequence; identical to SEQ ID NO: 25594
  GFR-binding peptide
  MOD_RES (2)..(36)..(37): Xaa is C or S
  MOD_RES (14)..(15)..(16)..(17)..(18): Xaa is A or G
  MOD_RES (19)..(20)..(21)..(22): Xaa is A or G or is absent

SEQ ID NO: 41583 - protein, 36 aa, Artificial Sequence; identical to SEQ ID NO: 23573
  GFR-binding peptide
  MOD_RES (33)..(34): Xaa is C or S
  MOD_RES (11)..(12)..(13)..(14)..(15): Xaa is A or G
  MOD_RES (16)..(17)..(18)..(19): Xaa is A or G or is absent

SEQ ID NO: 41584 - protein, 36 aa, Artificial Sequence; identical to SEQ ID NO: 26612
  GFR-binding peptide
  MOD_RES (2)..(36): Xaa is C or S
  MOD_RES (14)..(15)..(16)..(17)..(18): Xaa is A or G
  MOD_RES (19)..(20)..(21)..(22): Xaa is A or G or is absent

SEQ ID NO: 41585 - protein, 38 aa, Artificial Sequence; identical to SEQ ID NO: 24569
  GFR-binding peptide
  MOD_RES (2)..(4)..(38): Xaa is C or S
  MOD_RES (16)..(17)..(18)..(19)..(20): Xaa is A or G
  MOD_RES (21)..(22)..(23)..(24): Xaa is A or G or is absent

SEQ ID NO: 41586 - protein, 42 aa, Artificial Sequence; identical to SEQ ID NO: 26614
  GFR-binding peptide
  MOD_RES (2)..(4)..(38)..(39): Xaa is C or S
  MOD_RES (16)..(17)..(18)..(19)..(20): Xaa is A or G
  MOD_RES (21)..(22)..(23)..(24): Xaa is A or G or is absent

SEQ ID NO: 41587 - protein, 35 aa, Artificial Sequence; identical to SEQ ID NO: 24572
  GFR-binding peptide
  MOD_RES (32)..(33): Xaa is C or S

SEQ ID NO: 41588 - protein, 37 aa, Artificial Sequence; identical to SEQ ID NO: 25598
  GFR-binding peptide
  MOD_RES (32)..(33): Xaa is C or S

SEQ ID NO: 41589 - protein, 34 aa, Artificial Sequence
  GFR-binding peptide
  MOD_RES (1)..(34): Xaa is C or S
  MOD_RES (12)..(13)..(14)..(15)..(16): Xaa is A or G
  MOD_RES (17)..(18)..(19)..(20): Xaa is A or G or is absent
XEEVIMEYQKYXXXXXXXXXIYLMSIPSTKVPAX

SEQ ID NO: 41590 - protein, 39 aa, Artificial Sequence; identical to SEQ ID NO: 23582
  GFR-binding peptide
  MOD_RES (2)..(36)..(37): Xaa is C or S
  MOD_RES (14)..(15)..(16)..(17)..(18): Xaa is A or G
  MOD_RES (19)..(20)..(21)..(22): Xaa is A or G or is absent

SEQ ID NO: 41591 - protein, 36 aa, Artificial Sequence; identical to SEQ ID NO: 26623
  GFR-binding peptide
  MOD_RES (1)..(3)..(35)..(36): Xaa is C or S

SEQ ID NO: 41592 - protein, 34 aa, Artificial Sequence; identical to SEQ ID NO: 24576
  GFR-binding peptide
  MOD_RES (1)..(1): Xaa is C or S
  MOD_RES (13)..(14)..(15)..(16)..(17): Xaa is A or G
  MOD_RES (18)..(19)..(20)..(21): Xaa is A or G or is absent

SEQ ID NO: 41593 - protein, 41 aa, Artificial Sequence; identical to SEQ ID NO: 24577
  GFR-binding peptide
  MOD_RES (2)..(4)..(38)..(39): Xaa is C or S
  MOD_RES (16)..(17)..(18)..(19)..(20): Xaa is A or G
  MOD_RES (21)..(22)..(23)..(24): Xaa is A or G or is absent

SEQ ID NO: 41594 - protein, 36 aa, Artificial Sequence; identical to SEQ ID NO: 23591
  GFR-binding peptide
  MOD_RES (2)..(36): Xaa is C or S
  MOD_RES (14)..(15)..(16)..(17)..(18): Xaa is A or G
  MOD_RES (19)..(20)..(21)..(22): Xaa is A or G or is absent

SEQ ID NO: 41595 - protein, 37 aa, Artificial Sequence; identical to SEQ ID NO: 23592
  GFR-binding peptide
  MOD_RES (2)..(4)..(36)..(37): Xaa is C or S

SEQ ID NO: 41596 - protein, 38 aa, Artificial Sequence; identical to SEQ ID NO: 25602
  GFR-binding peptide
  MOD_RES (1)..(3)..(37)..(38): Xaa is C or S
  MOD_RES (15)..(16)..(17)..(18)..(19): Xaa is A or G
  MOD_RES (20)..(21)..(22)..(23): Xaa is A or G or is absent

SEQ ID NO: 41597 - protein, 36 aa, Artificial Sequence
  GFR-binding peptide
  MOD_RES (1)..(3)..(34)..(35): Xaa is C or S
XGXEEVIMEYQKYLLVRGNDIYLMSIPSTKVPAXXT

SEQ ID NO: 41598 - protein, 38 aa, Artificial Sequence; identical to SEQ ID NO: 26628
  GFR-binding peptide
  MOD_RES (1)..(33)..(34): Xaa is C or S

SEQ ID NO: 41599 - protein, 41 aa, Artificial Sequence; identical to SEQ ID NO: 25604
  GFR-binding peptide
  MOD_RES (1)..(35): Xaa is C or S
  MOD_RES (13)..(14)..(15)..(16)..(17): Xaa is A or G
  MOD_RES (18)..(19)..(20)..(21): Xaa is A or G or is absent

SEQ ID NO: 41600 - protein, 38 aa, Artificial Sequence; identical to SEQ ID NO: 23597
  GFR-binding peptide
  MOD_RES (1)..(35)..(36): Xaa is C or S
  MOD_RES (13)..(14)..(15)..(16)..(17): Xaa is A or G
  MOD_RES (18)..(19)..(20)..(21): Xaa is A or G or is absent

SEQ ID NO: 41601 - protein, 38 aa, Artificial Sequence
  GFR-binding peptide
  MOD_RES (34)..(35): Xaa is C or S
  MOD_RES (12)..(13)..(14)..(15)..(16): Xaa is A or G
  MOD_RES (17)..(18)..(19)..(20): Xaa is A or G or is absent
RDVVMGEYQKYXXXXXXXXXIYLMSIPSMKTPTXXPGA

SEQ ID NO: 41602 - protein, 40 aa, Artificial Sequence
  GFR-binding peptide
  MOD_RES (2)..(4)..(35)..(36): Xaa is C or S
LXGXEEVIMEYQKYLLVRGNDIYLMSIPSTKVPAXXTSPV

SEQ ID NO: 41603 - protein, 36 aa, Artificial Sequence
  GFR-binding peptide
  MOD_RES (31)..(32): Xaa is C or S
DVVMGEYQKYIIQQKDNIYLMSIPSMKTPTXXPGAS

SEQ ID NO: 41604 - protein, 34 aa, Artificial Sequence; identical to SEQ ID NO: 26633
  GFR-binding peptide
  MOD_RES (1)..(33)..(34): Xaa is C or S

SEQ ID NO: 41605 - protein, 39 aa, Artificial Sequence; identical to SEQ ID NO: 23601
  GFR-binding peptide
  MOD_RES (2)..(34)..(35): Xaa is C or S

SEQ ID NO: 41606 - protein, 38 aa, Artificial Sequence; identical to SEQ ID NO: 25607
  GFR-binding peptide
  MOD_RES (2)..(4)..(38): Xaa is C or S
  MOD_RES (16)..(17)..(18)..(19)..(20): Xaa is A or G
  MOD_RES (21)..(22)..(23)..(24): Xaa is A or G or is absent

SEQ ID NO: 41607 - protein, 35 aa, Artificial Sequence; identical to SEQ ID NO: 25609
  GFR-binding peptide
  MOD_RES (2)..(34)..(35): Xaa is C or S

SEQ ID NO: 41608 - protein, 35 aa, Artificial Sequence; identical to SEQ ID NO: 23602
  GFR-binding peptide
  MOD_RES (33)..(34): Xaa is C or S
  MOD_RES (11)..(12)..(13)..(14)..(15): Xaa is A or G
  MOD_RES (16)..(17)..(18)..(19): Xaa is A or G or is absent

SEQ ID NO: 41609 - protein, 44 aa, Artificial Sequence; identical to SEQ ID NO: 24586
  GFR-binding peptide
  MOD_RES (1)..(3)..(38)..(39): Xaa is C or S
  MOD_RES (16)..(17)..(18)..(19)..(20): Xaa is A or G
  MOD_RES (21)..(22)..(23)..(24): Xaa is A or G or is absent

SEQ ID NO: 41610 - protein, 34 aa, Artificial Sequence; identical to SEQ ID NO: 24590
  GFR-binding peptide
  MOD_RES (1)..(3): Xaa is C or S

SEQ ID NO: 41611 - protein, 34 aa, Artificial Sequence; identical to SEQ ID NO: 25611
  GFR-binding peptide
  MOD_RES (1)..(33)..(34): Xaa is C or S

SEQ ID NO: 41612 - protein, 40 aa, Artificial Sequence; identical to SEQ ID NO: 24591
  GFR-binding peptide
  MOD_RES (2)..(34): Xaa is C or S

SEQ ID NO: 41613 - protein, 38 aa, Artificial Sequence; identical to SEQ ID NO: 26636
  GFR-binding peptide
  MOD_RES (2)..(36)..(37): Xaa is C or S
  MOD_RES (14)..(15)..(16)..(17)..(18): Xaa is A or G
  MOD_RES (19)..(20)..(21)..(22): Xaa is A or G or is absent

SEQ ID NO: 41614 - protein, 38 aa, Artificial Sequence; identical to SEQ ID NO: 24594
  GFR-binding peptide
  MOD_RES (32)..(33): Xaa is C or S

SEQ ID NO: 41615 - protein, 36 aa, Artificial Sequence; identical to SEQ ID NO: 23606
  GFR-binding peptide
  MOD_RES (32)..(32): Xaa is C or S

SEQ ID NO: 41616 - protein, 36 aa, Artificial Sequence; identical to SEQ ID NO: 25614
  GFR-binding peptide
  MOD_RES (2)..(36): Xaa is C or S
  MOD_RES (14)..(15)..(16)..(17)..(18): Xaa is A or G
  MOD_RES (19)..(20)..(21)..(22): Xaa is A or G or is absent

SEQ ID NO: 41617 - protein, 36 aa, Artificial Sequence; identical to SEQ ID NO: 24595
  GFR-binding peptide
  MOD_RES (33)..(34): Xaa is C or S

SEQ ID NO: 41618 - protein, 37 aa, Artificial Sequence; identical to SEQ ID NO: 26641
  GFR-binding peptide
  MOD_RES (33)..(34): Xaa is C or S
  MOD_RES (11)..(12)..(13)..(14)..(15): Xaa is A or G
  MOD_RES (16)..(17)..(18)..(19): Xaa is A or G or is absent

SEQ ID NO: 41619 - protein, 38 aa, Artificial Sequence; identical to SEQ ID NO: 25616
  GFR-binding peptide
  MOD_RES (1)..(35): Xaa is C or S
  MOD_RES (13)..(14)..(15)..(16)..(17): Xaa is A or G
  MOD_RES (18)..(19)..(20)..(21): Xaa is A or G or is absent

SEQ ID NO: 41620 - protein, 34 aa, Artificial Sequence; identical to SEQ ID NO: 23611
  GFR-binding peptide
  MOD_RES (32)..(33): Xaa is C or S

SEQ ID NO: 41621 - protein, 39 aa, Artificial Sequence; identical to SEQ ID NO: 24603
  GFR-binding peptide
  MOD_RES (2)..(4)..(37)..(38): Xaa is C or S

SEQ ID NO: 41622 - protein, 44 aa, Artificial Sequence
  GFR-binding peptide
  MOD_RES (2)..(4)..(38)..(39): Xaa is C or S
  MOD_RES (16)..(17)..(18)..(19)..(20): Xaa is A or G
  MOD_RES (21)..(22)..(23)..(24): Xaa is A or G or is absent
SXGXRDVVMGEYQKYXXXXXXXXXIYLMSIPSMKTPTXXPGASG

SEQ ID NO: 41623 - protein, 41 aa, Artificial Sequence; identical to SEQ ID NO: 26644
  GFR-binding peptide
  MOD_RES (2)..(37)..(38): Xaa is C or S
  MOD_RES (15)..(16)..(17)..(18)..(19): Xaa is A or G
  MOD_RES (20)..(21)..(22)..(23): Xaa is A or G or is absent

SEQ ID NO: 41624 - protein, 34 aa, Artificial Sequence; identical to SEQ ID NO: 25619
  GFR-binding peptide
  MOD_RES (34)..(34): Xaa is C or S
  MOD_RES (12)..(13)..(14)..(15)..(16): Xaa is A or G
  MOD_RES (17)..(18)..(19)..(20): Xaa is A or G or is absent

SEQ ID NO: 41625 - protein, 35 aa, Artificial Sequence; identical to SEQ ID NO: 24605
  GFR-binding peptide
  MOD_RES (2)..(34)..(35): Xaa is C or S

SEQ ID NO: 41626 - protein, 38 aa, Artificial Sequence
  GFR-binding peptide
  MOD_RES (1)..(3)..(35)..(36): Xaa is C or S
XGXRDVVMGEYQKYIIQQKDNIYLMSIPSMKTPTXXPG

SEQ ID NO: 41627 - protein, 41 aa, Artificial Sequence; identical to SEQ ID NO: 23614
  GFR-binding peptide
  MOD_RES (2)..(36)..(37): Xaa is C or S
  MOD_RES (14)..(15)..(16)..(17)..(18): Xaa is A or G
  MOD_RES (19)..(20)..(21)..(22): Xaa is A or G or is absent

SEQ ID NO: 41628 - protein, 36 aa, Artificial Sequence
  GFR-binding peptide
  MOD_RES (1)..(35)..(36): Xaa is C or S
  MOD_RES (13)..(14)..(15)..(16)..(17): Xaa is A or G
  MOD_RES (18)..(19)..(20)..(21): Xaa is A or G or is absent
XRDVVMGEYQKYXXXXXXXXXIYLMSIPSMKTPTXX

SEQ ID NO: 41629 - protein, 41 aa, Artificial Sequence; identical to SEQ ID NO: 24606
  GFR-binding peptide
  MOD_RES (1)..(35)..(36): Xaa is C or S
  MOD_RES (13)..(14)..(15)..(16)..(17): Xaa is A or G
  MOD_RES (18)..(19)..(20)..(21): Xaa is A or G or is absent

SEQ ID NO: 41630 - protein, 39 aa, Artificial Sequence; identical to SEQ ID NO: 25622
  GFR-binding peptide
  MOD_RES (33)..(34): Xaa is C or S
  MOD_RES (11)..(12)..(13)..(14)..(15): Xaa is A or G
  MOD_RES (16)..(17)..(18)..(19): Xaa is A or G or is absent

SEQ ID NO: 41631 - protein, 41 aa, Artificial Sequence; identical to SEQ ID NO: 23619
  GFR-binding peptide
  MOD_RES (2)..(4)..(37)..(38): Xaa is C or S

SEQ ID NO: 41632 - protein, 40 aa, Artificial Sequence; identical to SEQ ID NO: 24610
  GFR-binding peptide
  MOD_RES (1)..(3)..(35): Xaa is C or S

SEQ ID NO: 41633 - protein, 31 aa, Artificial Sequence
  GFR-binding peptide
RDVVMGEYQKYIIQQKDNIYLMSIPSMKTPT

SEQ ID NO: 41634 - protein, 44 aa, Artificial Sequence
  GFR-binding peptide
  MOD_RES (2)..(4)..(38)..(39): Xaa is C or S
  MOD_RES (16)..(17)..(18)..(19)..(20): Xaa is A or G
  MOD_RES (21)..(22)..(23)..(24): Xaa is A or G or is absent
RXGXSEVVMDEYQKYXXXXXXXXXIYLISIPSLRTPVXXTPPTS

SEQ ID NO: 41635 - protein, 39 aa, Artificial Sequence; identical to SEQ ID NO: 25630
  GFR-binding peptide
  MOD_RES (33)..(34): Xaa is C or S
  MOD_RES (11)..(12)..(13)..(14)..(15): Xaa is A or G
  MOD_RES (16)..(17)..(18)..(19): Xaa is A or G or is absent

SEQ ID NO: 41636 - protein, 35 aa, Artificial Sequence; identical to SEQ ID NO: 24612
  GFR-binding peptide
  MOD_RES (1)..(3)..(35): Xaa is C or S

SEQ ID NO: 41637 - protein, 43 aa, Artificial Sequence; identical to SEQ ID NO: 26654
  GFR-binding peptide
  MOD_RES (2)..(4)..(38)..(39): Xaa is C or S
  MOD_RES (16)..(17)..(18)..(19)..(20): Xaa is A or G
  MOD_RES (21)..(22)..(23)..(24): Xaa is A or G or is absent

SEQ ID NO: 41638 - protein, 34 aa, Artificial Sequence; identical to SEQ ID NO: 23625
  GFR-binding peptide
  MOD_RES (1)..(1): Xaa is C or S
  MOD_RES (13)..(14)..(15)..(16)..(17): Xaa is A or G
  MOD_RES (18)..(19)..(20)..(21): Xaa is A or G or is absent

SEQ ID NO: 41639 - protein, 42 aa, Artificial Sequence; identical to SEQ ID NO: 23626
  GFR-binding peptide
  MOD_RES (2)..(4)..(37)..(38): Xaa is C or S

SEQ ID NO: 41640 - protein, 42 aa, Artificial Sequence
  GFR-binding peptide
  MOD_RES (2)..(36)..(37): Xaa is C or S
  MOD_RES (14)..(15)..(16)..(17)..(18): Xaa is A or G
  MOD_RES (19)..(20)..(21)..(22): Xaa is A or G or is absent
GXSRVVMNEYQKYXXXXXXXXXIYLVSIPSLKTPAXXPKPVH

SEQ ID NO: 41641 - protein, 34 aa, Artificial Sequence; identical to SEQ ID NO: 25639
  GFR-binding peptide
  MOD_RES (32)..(33): Xaa is C or S

SEQ ID NO: 41642 - protein, 36 aa, Artificial Sequence
  GFR-binding peptide
  MOD_RES (2)..(4)..(35)..(36): Xaa is C or S
LXGXEEVIMEYQKYLLVRGNDIYLMSIPSTKVPAXX

SEQ ID NO: 41643 - protein, 41 aa, Artificial Sequence; identical to SEQ ID NO: 26661
  GFR-binding peptide
  MOD_RES (2)..(4)..(36)..(37): Xaa is C or S

SEQ ID NO: 41644 - protein, 37 aa, Artificial Sequence; identical to SEQ ID NO: 25643
  GFR-binding peptide
  MOD_RES (2)..(4)..(36)..(37): Xaa is C or S

SEQ ID NO: 41645 - protein, 40 aa, Artificial Sequence
  GFR-binding peptide
  MOD_RES (2)..(4)..(36)..(37): Xaa is C or S
SXGXRDVVMGEYQKYIIQQKDNIYLMSIPSMKTPTXXPGA

SEQ ID NO: 41646 - protein, 36 aa, Artificial Sequence
  GFR-binding peptide
  MOD_RES (2)..(34)..(35): Xaa is C or S
GXRDVVMGEYQKYIIQQKDNIYLMSIPSMKTPTXXP

SEQ ID NO: 41647 - protein, 39 aa, Artificial Sequence; identical to SEQ ID NO: 23632
  GFR-binding peptide
  MOD_RES (34)..(35): Xaa is C or S
  MOD_RES (12)..(13)..(14)..(15)..(16): Xaa is A or G
  MOD_RES (17)..(18)..(19)..(20): Xaa is A or G or is absent

SEQ ID NO: 41648 - protein, 36 aa, Artificial Sequence; identical to SEQ ID NO: 25648
  GFR-binding peptide
  MOD_RES (34)..(35): Xaa is C or S
  MOD_RES (12)..(13)..(14)..(15)..(16): Xaa is A or G
  MOD_RES (17)..(18)..(19)..(20): Xaa is A or G or is absent

SEQ ID NO: 41649 - protein, 40 aa, Artificial Sequence; identical to SEQ ID NO: 26667
  GFR-binding peptide
  MOD_RES (2)..(4)..(36)..(37): Xaa is C or S

SEQ ID NO: 41650 - protein, 40 aa, Artificial Sequence; identical to SEQ ID NO: 23633
  GFR-binding peptide
  MOD_RES (1)..(3)..(35)..(36): Xaa is C or S

SEQ ID NO: 41651 - protein, 33 aa, Artificial Sequence; identical to SEQ ID NO: 26670
  GFR-binding peptide
  MOD_RES (12)..(13)..(14)..(15)..(16): Xaa is A or G
  MOD_RES (17)..(18)..(19)..(20): Xaa is A or G or is absent

SEQ ID NO: 41652 - protein, 36 aa, Artificial Sequence; identical to SEQ ID NO: 25650
  GFR-binding peptide
  MOD_RES (1)..(35)..(36): Xaa is C or S
  MOD_RES (13)..(14)..(15)..(16)..(17): Xaa is A or G
  MOD_RES (18)..(19)..(20)..(21): Xaa is A or G or is absent

SEQ ID NO: 41653 - protein, 37 aa, Artificial Sequence; identical to SEQ ID NO: 25652
  GFR-binding peptide
  MOD_RES (33)..(34): Xaa is C or S

SEQ ID NO: 41654 - protein, 37 aa, Artificial Sequence; identical to SEQ ID NO: 23638
  GFR-binding peptide
  MOD_RES (2)..(4)..(36): Xaa is C or S

SEQ ID NO: 41655 - protein, 42 aa, Artificial Sequence; identical to SEQ ID NO: 25653
  GFR-binding peptide
  MOD_RES (1)..(3)..(37)..(38): Xaa is C or S
  MOD_RES (15)..(16)..(17)..(18)..(19): Xaa is A or G
  MOD_RES (20)..(21)..(22)..(23): Xaa is A or G or is absent

SEQ ID NO: 41656 - protein, 37 aa, Artificial Sequence; identical to SEQ ID NO: 23639
  GFR-binding peptide
  MOD_RES (1)..(3)..(37): Xaa is C or S
  MOD_RES (15)..(16)..(17)..(18)..(19): Xaa is A or G
  MOD_RES (20)..(21)..(22)..(23): Xaa is A or G or is absent

SEQ ID NO: 41657 - protein, 39 aa, Artificial Sequence
  GFR-binding peptide
  MOD_RES (2)..(4)..(37)..(38): Xaa is C or S
  MOD_RES (15)..(16)..(17)..(18)..(19): Xaa is A or G
  MOD_RES (20)..(21)..(22)..(23): Xaa is A or G or is absent
LXGXEEVIMEYQKYXXXXXXXXXIYLMSIPSTKVPAXXT

SEQ ID NO: 41658 - protein, 40 aa, Artificial Sequence; identical to SEQ ID NO: 25656
  GFR-binding peptide
  MOD_RES (1)..(35)..(36): Xaa is C or S
  MOD_RES (13)..(14)..(15)..(16)..(17): Xaa is A or G
  MOD_RES (18)..(19)..(20)..(21): Xaa is A or G or is absent

SEQ ID NO: 41659 - protein, 37 aa, Artificial Sequence; identical to SEQ ID NO: 23645
  GFR-binding peptide
  MOD_RES (32)..(33): Xaa is C or S

SEQ ID NO: 41660 - protein, 36 aa, Artificial Sequence
  GFR-binding peptide
  MOD_RES (1)..(34)..(35): Xaa is C or S
  MOD_RES (12)..(13)..(14)..(15)..(16): Xaa is A or G
  MOD_RES (17)..(18)..(19)..(20): Xaa is A or G or is absent
XEEVIMEYQKYXXXXXXXXXIYLMSIPSTKVPAXXT

SEQ ID NO: 41661 - protein, 34 aa, Artificial Sequence
  GFR-binding peptide
  MOD_RES (1)..(32)..(33): Xaa is C or S
XEEVIMEYQKYLLVRGNDIYLMSIPSTKVPAXXT

SEQ ID NO: 41662 - protein, 40 aa, Artificial Sequence; identical to SEQ ID NO: 24634
  GFR-binding peptide
  MOD_RES (1)..(35)..(36): Xaa is C or S
  MOD_RES (13)..(14)..(15)..(16)..(17): Xaa is A or G
  MOD_RES (18)..(19)..(20)..(21): Xaa is A or G or is absent

SEQ ID NO: 41663 - protein, 33 aa, Artificial Sequence; identical to SEQ ID NO: 26679
  GFR-binding peptide
  MOD_RES (32)..(33): Xaa is C or S

SEQ ID NO: 41664 - protein, 35 aa, Artificial Sequence; identical to SEQ ID NO: 25660
  GFR-binding peptide
  MOD_RES (2)..(34)..(35): Xaa is C or S

SEQ ID NO: 41665 - protein, 34 aa, Artificial Sequence; identical to SEQ ID NO: 25661
  GFR-binding peptide
  MOD_RES (33)..(34): Xaa is C or S
  MOD_RES (11)..(12)..(13)..(14)..(15): Xaa is A or G
  MOD_RES (16)..(17)..(18)..(19): Xaa is A or G or is absent

SEQ ID NO: 41666 - protein, 40 aa, Artificial Sequence; identical to SEQ ID NO: 24639
  GFR-binding peptide
  MOD_RES (2)..(36)..(37): Xaa is C or S
  MOD_RES (14)..(15)..(16)..(17)..(18): Xaa is A or G
  MOD_RES (19)..(20)..(21)..(22): Xaa is A or G or is absent

SEQ ID NO: 41667 - protein, 37 aa, Artificial Sequence; identical to SEQ ID NO: 24640
  GFR-binding peptide
  MOD_RES (1)..(33)..(34): Xaa is C or S

SEQ ID NO: 41668 - protein, 33 aa, Artificial Sequence; identical to SEQ ID NO: 26681
  GFR-binding peptide
  MOD_RES (1)..(1): Xaa is C or S

SEQ ID NO: 41669 - protein, 39 aa, Artificial Sequence; identical to SEQ ID NO: 23656
  GFR-binding peptide
  MOD_RES (33)..(33): Xaa is C or S
  MOD_RES (11)..(12)..(13)..(14)..(15): Xaa is A or G
  MOD_RES (16)..(17)..(18)..(19): Xaa is A or G or is absent

SEQ ID NO: 41670 - protein, 36 aa, Artificial Sequence; identical to SEQ ID NO: 26683
  GFR-binding peptide
  MOD_RES (1)..(36): Xaa is C or S
  MOD_RES (14)..(15)..(16)..(17)..(18): Xaa is A or G
  MOD_RES (19)..(20)..(21)..(22): Xaa is A or G or is absent

SEQ ID NO: 41671 - protein, 38 aa, Artificial Sequence; identical to SEQ ID NO: 24644
  GFR-binding peptide
  MOD_RES (33)..(34): Xaa is C or S

SEQ ID NO: 41672 - protein, 42 aa, Artificial Sequence
  GFR-binding peptide
  MOD_RES (2)..(4)..(37)..(38): Xaa is C or S
  MOD_RES (15)..(16)..(17)..(18)..(19): Xaa is A or G
  MOD_RES (20)..(21)..(22)..(23): Xaa is A or G or is absent
LXGXEEVIMEYQKYXXXXXXXXXIYLMSIPSTKVPAXXTSPV

SEQ ID NO: 41673 - protein, 43 aa, Artificial Sequence; identical to SEQ ID NO: 25674
  GFR-binding peptide
  MOD_RES (2)..(4)..(37)..(38): Xaa is C or S

SEQ ID NO: 41674 - protein, 38 aa, Artificial Sequence; identical to SEQ ID NO: 25675
  GFR-binding peptide
  MOD_RES (2)..(4): Xaa is C or S
  MOD_RES (17)..(18)..(19)..(20)..(21): Xaa is A or G
  MOD_RES (22)..(23)..(24)..(25): Xaa is A or G or is absent

SEQ ID NO: 41675 - protein, 36 aa, Artificial Sequence; identical to SEQ ID NO: 23664
  GFR-binding peptide
  MOD_RES (1)..(35)..(36): Xaa is C or S
  MOD_RES (13)..(14)..(15)..(16)..(17): Xaa is A or G
  MOD_RES (18)..(19)..(20)..(21): Xaa is A or G or is absent

SEQ ID NO: 41676 - protein, 35 aa, Artificial Sequence; identical to SEQ ID NO: 26694
  GFR-binding peptide
  MOD_RES (32)..(33): Xaa is C or S

SEQ ID NO: 41677 - protein, 39 aa, Artificial Sequence; identical to SEQ ID NO: 25676
  GFR-binding peptide
  MOD_RES (1)..(3)..(37)..(38): Xaa is C or S
  MOD_RES (15)..(16)..(17)..(18)..(19): Xaa is A or G
  MOD_RES (20)..(21)..(22)..(23): Xaa is A or G or is absent

SEQ ID NO: 41678 - protein, 35 aa, Artificial Sequence; identical to SEQ ID NO: 26695
  GFR-binding peptide
  MOD_RES (33)..(34): Xaa is C or S

SEQ ID NO: 41679 - protein, 37 aa, Artificial Sequence; identical to SEQ ID NO: 24657
  GFR-binding peptide
  MOD_RES (2)..(4)..(37): Xaa is C or S

SEQ ID NO: 41680 - protein, 42 aa, Artificial Sequence; identical to SEQ ID NO: 23666
  GFR-binding peptide
  MOD_RES (2)..(4)..(38)..(39): Xaa is C or S
  MOD_RES (16)..(17)..(18)..(19)..(20): Xaa is A or G
  MOD_RES (21)..(22)..(23)..(24): Xaa is A or G or is absent

SEQ ID NO: 41681 - protein, 38 aa, Artificial Sequence; identical to SEQ ID NO: 25679
  GFR-binding peptide
  MOD_RES (2)..(4)..(36)..(37): Xaa is C or S

SEQ ID NO: 41682 - protein, 43 aa, Artificial Sequence; identical to SEQ ID NO: 25680
  GFR-binding peptide
  MOD_RES (2)..(4)..(38): Xaa is C or S
  MOD_RES (16)..(17)..(18)..(19)..(20): Xaa is A or G
  MOD_RES (21)..(22)..(23)..(24): Xaa is A or G or is absent

SEQ ID NO: 41683 - protein, 35 aa, Artificial Sequence
  GFR-binding peptide
  MOD_RES (1)..(3)..(34)..(35): Xaa is C or S
XGXEEVIMEYQKYLLVRGNDIYLMSIPSTKVPAXX

SEQ ID NO: 41684 - protein, 38 aa, Artificial Sequence; identical to SEQ ID NO: 24660
  GFR-binding peptide
  MOD_RES (32)..(33): Xaa is C or S

SEQ ID NO: 41685 - protein, 41 aa, Artificial Sequence; identical to SEQ ID NO: 24661
  GFR-binding peptide
  MOD_RES (2)..(36)..(37): Xaa is C or S
  MOD_RES (14)..(15)..(16)..(17)..(18): Xaa is A or G
  MOD_RES (19)..(20)..(21)..(22): Xaa is A or G or is absent

SEQ ID NO: 41686 - protein, 35 aa, Artificial Sequence; identical to SEQ ID NO: 23671
  GFR-binding peptide
  MOD_RES (2)..(4): Xaa is C or S

SEQ ID NO: 41687 - protein, 41 aa, Artificial Sequence; identical to SEQ ID NO: 25683
  GFR-binding peptide
  MOD_RES (2)..(36)..(37): Xaa is C or S
  MOD_RES (14)..(15)..(16)..(17)..(18): Xaa is A or G
  MOD_RES (19)..(20)..(21)..(22): Xaa is A or G or is absent

SEQ ID NO: 41688 - protein, 32 aa, Artificial Sequence; identical to SEQ ID NO: 24663
  GFR-binding peptide
  MOD_RES (31)..(32): Xaa is C or S

SEQ ID NO: 41689 - protein, 39 aa, Artificial Sequence; identical to SEQ ID NO: 25684
  GFR-binding peptide
  MOD_RES (2)..(34)..(35): Xaa is C or S

SEQ ID NO: 41690 - protein, 37 aa, Artificial Sequence; identical to SEQ ID NO: 25685
  GFR-binding peptide
  MOD_RES (1)..(33)..(34): Xaa is C or S

SEQ ID NO: 41691 - protein, 32 aa, Artificial Sequence; identical to SEQ ID NO: 24668
  GFR-binding peptide
  MOD_RES (1)..(1): Xaa is C or S

SEQ ID NO: 41692 - protein, 39 aa, Artificial Sequence; identical to SEQ ID NO: 26703
  GFR-binding peptide
  MOD_RES (1)..(35)..(36): Xaa is C or S
  MOD_RES (13)..(14)..(15)..(16)..(17): Xaa is A or G
  MOD_RES (18)..(19)..(20)..(21): Xaa is A or G or is absent

SEQ ID NO: 41693 - protein, 42 aa, Artificial Sequence; identical to SEQ ID NO: 26705
  GFR-binding peptide
  MOD_RES (2)..(4)..(36): Xaa is C or S

SEQ ID NO: 41694 - protein, 30 aa, Artificial Sequence; identical to SEQ ID NO: 26706
  GFR-binding peptide

SEQ ID NO: 41695 - protein, 40 aa, Artificial Sequence; identical to SEQ ID NO: 26707
  GFR-binding peptide
  MOD_RES (1)..(3)..(37)..(38): Xaa is C or S
  MOD_RES (15)..(16)..(17)..(18)..(19): Xaa is A or G
  MOD_RES (20)..(21)..(22)..(23): Xaa is A or G or is absent

SEQ ID NO: 41696 - protein, 37 aa, Artificial Sequence
  GFR-binding peptide
  MOD_RES (2)..(4)..(35)..(36): Xaa is C or S
LXGXEEVIMEYQKYLLVRGNDIYLMSIPSTKVPAXXT

SEQ ID NO: 41697 - protein, 34 aa, Artificial Sequence; identical to SEQ ID NO: 24672
  GFR-binding peptide
  MOD_RES (33)..(34): Xaa is C or S
  MOD_RES (11)..(12)..(13)..(14)..(15): Xaa is A or G
  MOD_RES (16)..(17)..(18)..(19): Xaa is A or G or is absent

SEQ ID NO: 41698 - protein, 37 aa, Artificial Sequence; identical to SEQ ID NO: 23679
  GFR-binding peptide
  MOD_RES (1)..(35)..(36): Xaa is C or S
  MOD_RES (13)..(14)..(15)..(16)..(17): Xaa is A or G
  MOD_RES (18)..(19)..(20)..(21): Xaa is A or G or is absent

SEQ ID NO: 41699 - protein, 38 aa, Artificial Sequence
  GFR-binding peptide
  MOD_RES (2)..(4)..(38): Xaa is C or S
  MOD_RES (16)..(17)..(18)..(19)..(20): Xaa is A or G
  MOD_RES (21)..(22)..(23)..(24): Xaa is A or G or is absent
SXGXRDVVMGEYQKYXXXXXXXXXIYLMSIPSMKTPTX

SEQ ID NO: 41700 - protein, 41 aa, Artificial Sequence
  GFR-binding peptide
  MOD_RES (1)..(35)..(36): Xaa is C or S
  MOD_RES (13)..(14)..(15)..(16)..(17): Xaa is A or G
  MOD_RES (18)..(19)..(20)..(21): Xaa is A or G or is absent
XRDVVMGEYQKYXXXXXXXXXIYLMSIPSMKTPTXXPGASG

SEQ ID NO: 41701 - protein, 37 aa, Artificial Sequence; identical to SEQ ID NO: 25697
  GFR-binding peptide
  MOD_RES (34)..(35): Xaa is C or S
  MOD_RES (12)..(13)..(14)..(15)..(16): Xaa is A or G
  MOD_RES (17)..(18)..(19)..(20): Xaa is A or G or is absent

SEQ ID NO: 41702 - protein, 38 aa, Artificial Sequence; identical to SEQ ID NO: 26715
  GFR-binding peptide
  MOD_RES (1)..(33): Xaa is C or S

SEQ ID NO: 41703 - protein, 37 aa, Artificial Sequence; identical to SEQ ID NO: 25702
  GFR-binding peptide
  MOD_RES (1)..(35)..(36): Xaa is C or S
  MOD_RES (13)..(14)..(15)..(16)..(17): Xaa is A or G
  MOD_RES (18)..(19)..(20)..(21): Xaa is A or G or is absent

SEQ ID NO: 41704 - protein, 30 aa, Artificial Sequence; identical to SEQ ID NO: 26716
  GFR-binding peptide

SEQ ID NO: 41705 - protein, 41 aa, Artificial Sequence; identical to SEQ ID NO: 24680
  GFR-binding peptide
  MOD_RES (2)..(4)..(36)..(37): Xaa is C or S

SEQ ID NO: 41706 - protein, 38 aa, Artificial Sequence; identical to SEQ ID NO: 24681
  GFR-binding peptide
  MOD_RES (33)..(33): Xaa is C or S
  MOD_RES (11)..(12)..(13)..(14)..(15): Xaa is A or G
  MOD_RES (16)..(17)..(18)..(19): Xaa is A or G or is absent

SEQ ID NO: 41707 - protein, 31 aa, Artificial Sequence; identical to SEQ ID NO: 24683
  GFR-binding peptide
  MOD_RES (31)..(31): Xaa is C or S

SEQ ID NO: 41708 - protein, 35 aa, Artificial Sequence; identical to SEQ ID NO: 25709
  GFR-binding peptide
  MOD_RES (2)..(2): Xaa is C or S
  MOD_RES (14)..(15)..(16)..(17)..(18): Xaa is A or G
  MOD_RES (19)..(20)..(21)..(22): Xaa is A or G or is absent

SEQ ID NO: 41709 - protein, 32 aa, Artificial Sequence; identical to SEQ ID NO: 24686
  GFR-binding peptide
  MOD_RES (31)..(32): Xaa is C or S

SEQ ID NO: 41710 - protein, 34 aa, Artificial Sequence; identical to SEQ ID NO: 26729
  GFR-binding peptide
  MOD_RES (1)..(3): Xaa is C or S

SEQ ID NO: 41711 - protein, 31 aa, Artificial Sequence; identical to SEQ ID NO: 25713
  GFR-binding peptide
  MOD_RES (31)..(31): Xaa is C or S

SEQ ID NO: 41712 - protein, 34 aa, Artificial Sequence; identical to SEQ ID NO: 24691
  GFR-binding peptide
  MOD_RES (33)..(34): Xaa is C or S

SEQ ID NO: 41713 - protein, 35 aa, Artificial Sequence; identical to SEQ ID NO: 26730
  GFR-binding peptide
  MOD_RES (1)..(35): Xaa is C or S
  MOD_RES (13)..(14)..(15)..(16)..(17): Xaa is A or G
  MOD_RES (18)..(19)..(20)..(21): Xaa is A or G or is absent

SEQ ID NO: 41714 - protein, 33 aa, Artificial Sequence; identical to SEQ ID NO: 26736
  GFR-binding peptide
  MOD_RES (2)..(2): Xaa is C or S

SEQ ID NO: 41715 - protein, 39 aa, Artificial Sequence; identical to SEQ ID NO: 24696
  GFR-binding peptide
  MOD_RES (2)..(4)..(38)..(39): Xaa is C or S
  MOD_RES (16)..(17)..(18)..(19)..(20): Xaa is A or G
  MOD_RES (21)..(22)..(23)..(24): Xaa is A or G or is absent

SEQ ID NO: 41716 - protein, 34 aa, Artificial Sequence; identical to SEQ ID NO: 26740
  GFR-binding peptide
  MOD_RES (31)..(32): Xaa is C or S

SEQ ID NO: 41717 - protein, 36 aa, Artificial Sequence; identical to SEQ ID NO: 26742
  GFR-binding peptide
  MOD_RES (1)..(33)..(34): Xaa is C or S

SEQ ID NO: 41718 - protein, 37 aa, Artificial Sequence; identical to SEQ ID NO: 24705
  GFR-binding peptide
  MOD_RES (2)..(36)..(37): Xaa is C or S
  MOD_RES (14)..(15)..(16)..(17)..(18): Xaa is A or G
  MOD_RES (19)..(20)..(21)..(22): Xaa is A or G or is absent

SEQ ID NO: 41719 - protein, 33 aa, Artificial Sequence
  GFR-binding peptide
  MOD_RES (31)..(32): Xaa is C or S
DVVMGEYQKYIIQQKDNIYLMSIPSMKTPTXXP

SEQ ID NO: 41720 - protein, 34 aa, Artificial Sequence; identical to SEQ ID NO: 23710
  GFR-binding peptide
  MOD_RES (32)..(33): Xaa is C or S

SEQ ID NO: 41721 - protein, 33 aa, Artificial Sequence; identical to SEQ ID NO: 24707
  GFR-binding peptide
  MOD_RES (31)..(32): Xaa is C or S

SEQ ID NO: 41722 - protein, 36 aa, Artificial Sequence; identical to SEQ ID NO: 24708
  GFR-binding peptide
  MOD_RES (1)..(35)..(36): Xaa is C or S
  MOD_RES (13)..(14)..(15)..(16)..(17): Xaa is A or G
  MOD_RES (18)..(19)..(20)..(21): Xaa is A or G or is absent

SEQ ID NO: 41723 - protein, 39 aa, Artificial Sequence; identical to SEQ ID NO: 25724
  GFR-binding peptide
  MOD_RES (1)..(35)..(36): Xaa is C or S
  MOD_RES (13)..(14)..(15)..(16)..(17): Xaa is A or G
  MOD_RES (18)..(19)..(20)..(21): Xaa is A or G or is absent

SEQ ID NO: 41724 - protein, 36 aa, Artificial Sequence; identical to SEQ ID NO: 26752
  GFR-binding peptide
  MOD_RES (1)..(3): Xaa is C or S
  MOD_RES (15)..(16)..(17)..(18)..(19): Xaa is A or G
  MOD_RES (20)..(21)..(22)..(23): Xaa is A or G or is absent

SEQ ID NO: 41725 - protein, 32 aa, Artificial Sequence
  GFR-binding peptide
  MOD_RES (11)..(12)..(13)..(14)..(15): Xaa is A or G
  MOD_RES (16)..(17)..(18)..(19): Xaa is A or G or is absent
DVVMGEYQKYXXXXXXXXXIYLMSIPSMKTPT

SEQ ID NO: 41726 - protein, 31 aa, Artificial Sequence
  GFR-binding peptide
  MOD_RES (31)..(31): Xaa is C or S
DVVMGEYQKYIIQQKDNIYLMSIPSMKTPTX

SEQ ID NO: 41727 - protein, 40 aa, Artificial Sequence
  GFR-binding peptide
  MOD_RES (2)..(36)..(37): Xaa is C or S
  MOD_RES (14)..(15)..(16)..(17)..(18): Xaa is A or G
  MOD_RES (19)..(20)..(21)..(22): Xaa is A or G or is absent
GXRDVVMGEYQKYXXXXXXXXXIYLMSIPSMKTPTXXPGA

SEQ ID NO: 41728 - protein, 34 aa, Artificial Sequence; identical to SEQ ID NO: 25728
  GFR-binding peptide
  MOD_RES (32)..(33): Xaa is C or S

SEQ ID NO: 41729 - protein, 36 aa, Artificial Sequence; identical to SEQ ID NO: 25731
  GFR-binding peptide
  MOD_RES (2)..(4)..(36): Xaa is C or S

SEQ ID NO: 41730 - protein, 40 aa, Artificial Sequence; identical to SEQ ID NO: 26757
  GFR-binding peptide
  MOD_RES (2)..(4)..(38)..(39): Xaa is C or S
  MOD_RES (16)..(17)..(18)..(19)..(20): Xaa is A or G
  MOD_RES (21)..(22)..(23)..(24): Xaa is A or G or is absent

SEQ ID NO: 41731 - protein, 34 aa, Artificial Sequence
  GFR-binding peptide
  MOD_RES (2)..(34): Xaa is C or S
GXRDVVMGEYQKYIIQQKDNIYLMSIPSMKTPTX

SEQ ID NO: 41732 - protein, 36 aa, Artificial Sequence; identical to SEQ ID NO: 26758
  GFR-binding peptide
  MOD_RES (1)..(3): Xaa is C or S
  MOD_RES (15)..(16)..(17)..(18)..(19): Xaa is A or G
  MOD_RES (20)..(21)..(22)..(23): Xaa is A or G or is absent

SEQ ID NO: 41733 - protein, 33 aa, Artificial Sequence
  GFR-binding peptide
  MOD_RES (1)..(32)..(33): Xaa is C or S
XEEVIMEYQKYLLVRGNDIYLMSIPSTKVPAXX

SEQ ID NO: 41734 - protein, 38 aa, Artificial Sequence; identical to SEQ ID NO: 24723
  GFR-binding peptide
  MOD_RES (1)..(3)..(38): Xaa is C or S
  MOD_RES (16)..(17)..(18)..(19)..(20): Xaa is A or G
  MOD_RES (21)..(22)..(23)..(24): Xaa is A or G or is absent

SEQ ID NO: 41735 - protein, 34 aa, Artificial Sequence
  GFR-binding peptide
  MOD_RES (31)..(32): Xaa is C or S
DVVMGEYQKYIIQQKDNIYLMSIPSMKTPTXXPG

SEQ ID NO: 41736 - protein, 33 aa, Artificial Sequence; identical to SEQ ID NO: 24724
  GFR-binding peptide
  MOD_RES (2)..(2): Xaa is C or S

SEQ ID NO: 41737 - protein, 41 aa, Artificial Sequence; identical to SEQ ID NO: 26765
  GFR-binding peptide
  MOD_RES (1)..(3)..(35)..(36): Xaa is C or S

SEQ ID NO: 41738 - protein, 40 aa, Artificial Sequence; identical to SEQ ID NO: 24726
  GFR-binding peptide
  MOD_RES (2)..(4)..(38)..(39): Xaa is C or S
  MOD_RES (16)..(17)..(18)..(19)..(20): Xaa is A or G
  MOD_RES (21)..(22)..(23)..(24): Xaa is A or G or is absent

SEQ ID NO: 41739 - protein, 31 aa, Artificial Sequence; identical to SEQ ID NO: 25744
  GFR-binding peptide
  MOD_RES (31)..(31): Xaa is C or S

SEQ ID NO: 41740 - protein, 33 aa, Artificial Sequence; identical to SEQ ID NO: 25748
  GFR-binding peptide
  MOD_RES (1)..(33): Xaa is C or S

SEQ ID NO: 41741 - protein, 42 aa, Artificial Sequence
  GFR-binding peptide
  MOD_RES (2)..(4)..(36)..(37): Xaa is C or S
SXGXRDVVMGEYQKYIIQQKDNIYLMSIPSMKTPTXXPGASG

SEQ ID NO: 41742 - protein, 44 aa, Artificial Sequence
  GFR-binding peptide
  MOD_RES (2)..(4)..(38)..(39): Xaa is C or S
  MOD_RES (16)..(17)..(18)..(19)..(20): Xaa is A or G
  MOD_RES (21)..(22)..(23)..(24): Xaa is A or G or is absent
HXGXSRVVMNEYQKYXXXXXXXXXIYLVSIPSLKTPAXXPKPVH

SEQ ID NO: 41743 - protein, 41 aa, Artificial Sequence; identical to SEQ ID NO: 25753
  GFR-binding peptide
  MOD_RES (1)..(3)..(36)..(37): Xaa is C or S

SEQ ID NO: 41744 - protein, 42 aa, Artificial Sequence; identical to SEQ ID NO: 26785
  GFR-binding peptide
  MOD_RES (2)..(37)..(38): Xaa is C or S
  MOD_RES (15)..(16)..(17)..(18)..(19): Xaa is A or G
  MOD_RES (20)..(21)..(22)..(23): Xaa is A or G or is absent

SEQ ID NO: 41745 - protein, 37 aa, Artificial Sequence
  GFR-binding peptide
  MOD_RES (1)..(3)..(35)..(36): Xaa is C or S
XGXRDVVMGEYQKYIIQQKDNIYLMSIPSMKTPTXXP

SEQ ID NO: 41746 - protein, 37 aa, Artificial Sequence; identical to SEQ ID NO: 24741
  GFR-binding peptide
  MOD_RES (33)..(34): Xaa is C or S
  MOD_RES (11)..(12)..(13)..(14)..(15): Xaa is A or G
  MOD_RES (16)..(17)..(18)..(19): Xaa is A or G or is absent

SEQ ID NO: 41747 - protein, 38 aa, Artificial Sequence; identical to SEQ ID NO: 24742
  GFR-binding peptide
  MOD_RES (2)..(4)..(36)..(37): Xaa is C or S

SEQ ID NO: 41748 - protein, 41 aa, Artificial Sequence; identical to SEQ ID NO: 25761
  GFR-binding peptide
  MOD_RES (2)..(4)..(38)..(39): Xaa is C or S
  MOD_RES (16)..(17)..(18)..(19)..(20): Xaa is A or G
  MOD_RES (21)..(22)..(23)..(24): Xaa is A or G or is absent

SEQ ID NO: 41749 - protein, 36 aa, Artificial Sequence; identical to SEQ ID NO: 24747
  GFR-binding peptide
  MOD_RES (31)..(32): Xaa is C or S

SEQ ID NO: 41750 - protein, 40 aa, Artificial Sequence; identical to SEQ ID NO: 26790
  GFR-binding peptide
  MOD_RES (2)..(34)..(35): Xaa is C or S

SEQ ID NO: 41751 - protein, 34 aa, Artificial Sequence; identical to SEQ ID NO: 23732
  GFR-binding peptide
  MOD_RES (31)..(32): Xaa is C or S

SEQ ID NO: 41752 - protein, 36 aa, Artificial Sequence
  GFR-binding peptide
  MOD_RES (34)..(35): Xaa is C or S
  MOD_RES (12)..(13)..(14)..(15)..(16): Xaa is A or G
  MOD_RES (17)..(18)..(19)..(20): Xaa is A or G or is absent
RDVVMGEYQKYXXXXXXXXXIYLMSIPSMKTPTXXP

SEQ ID NO: 41753 - protein, 38 aa, Artificial Sequence; identical to SEQ ID NO: 26795
  GFR-binding peptide
  MOD_RES (32)..(33): Xaa is C or S

SEQ ID NO: 41754 - protein, 36 aa, Artificial Sequence; identical to SEQ ID NO: 25766
  GFR-binding peptide
  MOD_RES (1)..(33)..(34): Xaa is C or S

SEQ ID NO: 41755 - protein, 38 aa, Artificial Sequence; identical to SEQ ID NO: 25768
  GFR-binding peptide
  MOD_RES (2)..(34)..(35): Xaa is C or S

SEQ ID NO: 41756 - protein, 37 aa, Artificial Sequence; identical to SEQ ID NO: 25769
  GFR-binding peptide
  MOD_RES (32)..(32): Xaa is C or S

SEQ ID NO: 41757 - protein, 39 aa, Artificial Sequence
  GFR-binding peptide
  MOD_RES (2)..(4)..(36)..(37): Xaa is C or S
SXGXRDVVMGEYQKYIIQQKDNIYLMSIPSMKTPTXXPG

SEQ ID NO: 41758 - protein, 39 aa, Artificial Sequence
  GFR-binding peptide
  MOD_RES (33)..(34): Xaa is C or S
  MOD_RES (11)..(12)..(13)..(14)..(15): Xaa is A or G
  MOD_RES (16)..(17)..(18)..(19): Xaa is A or G or is absent
EEVIMEYQKYXXXXXXXXXIYLMSIPSTKVPAXXTSPVR

SEQ ID NO: 41759 - protein, 39 aa, Artificial Sequence; identical to SEQ ID NO: 26801
  GFR-binding peptide
  MOD_RES (1)..(3)..(37)..(38): Xaa is C or S
  MOD_RES (15)..(16)..(17)..(18)..(19): Xaa is A or G
  MOD_RES (20)..(21)..(22)..(23): Xaa is A or G or is absent

SEQ ID NO: 41760 - protein, 43 aa, Artificial Sequence; identical to SEQ ID NO: 23745
  GFR-binding peptide
  MOD_RES (2)..(4)..(38)..(39): Xaa is C or S
  MOD_RES (16)..(17)..(18)..(19)..(20): Xaa is A or G
  MOD_RES (21)..(22)..(23)..(24): Xaa is A or G or is absent

SEQ ID NO: 41761 - protein, 42 aa, Artificial Sequence; identical to SEQ ID NO: 23746
  GFR-binding peptide
  MOD_RES (2)..(4)..(38)..(39): Xaa is C or S
  MOD_RES (16)..(17)..(18)..(19)..(20): Xaa is A or G
  MOD_RES (21)..(22)..(23)..(24): Xaa is A or G or is absent

SEQ ID NO: 41762 - protein, 31 aa, Artificial Sequence; identical to SEQ ID NO: 26804
  GFR-binding peptide

SEQ ID NO: 41763 - protein, 36 aa, Artificial Sequence; identical to SEQ ID NO: 25772
  GFR-binding peptide
  MOD_RES (2)..(35)..(36): Xaa is C or S

SEQ ID NO: 41764 - protein, 37 aa, Artificial Sequence; identical to SEQ ID NO: 23750
  GFR-binding peptide
  MOD_RES (34)..(35): Xaa is C or S
  MOD_RES (12)..(13)..(14)..(15)..(16): Xaa is A or G
  MOD_RES (17)..(18)..(19)..(20): Xaa is A or G or is absent

SEQ ID NO: 41765 - protein, 39 aa, Artificial Sequence
  GFR-binding peptide
  MOD_RES (1)..(33)..(34): Xaa is C or S
XSRVVMNEYQKYIVNSSDDIYLVSIPSLKTPAXXPKPVH

SEQ ID NO: 41766 - protein, 32 aa, Artificial Sequence; identical to SEQ ID NO: 25777
  GFR-binding peptide
  MOD_RES (1)..(1): Xaa is C or S

SEQ ID NO: 41767 - protein, 36 aa, Artificial Sequence; identical to SEQ ID NO: 23755
  GFR-binding peptide
  MOD_RES (1)..(3)..(35)..(36): Xaa is C or S

SEQ ID NO: 41768 - protein, 43 aa, Artificial Sequence; identical to SEQ ID NO: 23756
  GFR-binding peptide
  MOD_RES (2)..(4)..(38)..(39): Xaa is C or S
  MOD_RES (16)..(17)..(18)..(19)..(20): Xaa is A or G
  MOD_RES (21)..(22)..(23)..(24): Xaa is A or G or is absent

SEQ ID NO: 41769 - protein, 37 aa, Artificial Sequence; identical to SEQ ID NO: 24773
  GFR-binding peptide
  MOD_RES (1)..(3)..(35)..(36): Xaa is C or S

SEQ ID NO: 41770 - protein, 40 aa, Artificial Sequence; identical to SEQ ID NO: 25780
  GFR-binding peptide
  MOD_RES (2)..(4)..(38)..(39): Xaa is C or S
  MOD_RES (16)..(17)..(18)..(19)..(20): Xaa is A or G
  MOD_RES (21)..(22)..(23)..(24): Xaa is A or G or is absent

SEQ ID NO: 41771 - protein, 41 aa, Artificial Sequence; identical to SEQ ID NO: 26812
  GFR-binding peptide
  MOD_RES (1)..(3)..(37)..(38): Xaa is C or S
  MOD_RES (15)..(16)..(17)..(18)..(19): Xaa is A or G
  MOD_RES (20)..(21)..(22)..(23): Xaa is A or G or is absent

SEQ ID NO: 41772 - protein, 34 aa, Artificial Sequence; identical to SEQ ID NO: 26816
  GFR-binding peptide
  MOD_RES (1)..(33)..(34): Xaa is C or S

SEQ ID NO: 41773 - protein, 40 aa, Artificial Sequence
  GFR-binding peptide
  MOD_RES (2)..(35)..(36): Xaa is C or S
  MOD_RES (13)..(14)..(15)..(16)..(17): Xaa is A or G
  MOD_RES (18)..(19)..(20)..(21): Xaa is A or G or is absent
GXEEVIMEYQKYXXXXXXXXXIYLMSIPSTKVPAXXTSPV

SEQ ID NO: 41774 - protein, 34 aa, Artificial Sequence
  GFR-binding peptide
  MOD_RES (34)..(34): Xaa is C or S
  MOD_RES (12)..(13)..(14)..(15)..(16): Xaa is A or G
  MOD_RES (17)..(18)..(19)..(20): Xaa is A or G or is absent
RDVVMGEYQKYXXXXXXXXXIYLMSIPSMKTPTX

SEQ ID NO: 41775 - protein, 39 aa, Artificial Sequence; identical to SEQ ID NO: 24782
  GFR-binding peptide
  MOD_RES (1)..(3)..(37): Xaa is C or S
  MOD_RES (15)..(16)..(17)..(18)..(19): Xaa is A or G
  MOD_RES (20)..(21)..(22)..(23): Xaa is A or G or is absent

SEQ ID NO: 41776 - protein, 38 aa, Artificial Sequence; identical to SEQ ID NO: 23767
  GFR-binding peptide
  MOD_RES (33)..(34): Xaa is C or S
  MOD_RES (11)..(12)..(13)..(14)..(15): Xaa is A or G
  MOD_RES (16)..(17)..(18)..(19): Xaa is A or G or is absent

SEQ ID NO: 41777 - protein, 33 aa, Artificial Sequence
  GFR-binding peptide
  MOD_RES (2)..(2): Xaa is C or S
GXRDVVMGEYQKYIIQQKDNIYLMSIPSMKTPT

SEQ ID NO: 41778 - protein, 35 aa, Artificial Sequence; identical to SEQ ID NO: 26820
  GFR-binding peptide
  MOD_RES (2)..(2): Xaa is C or S
  MOD_RES (14)..(15)..(16)..(17)..(18): Xaa is A or G
  MOD_RES (19)..(20)..(21)..(22): Xaa is A or G or is absent

SEQ ID NO: 41779 - protein, 39 aa, Artificial Sequence
  GFR-binding peptide
  MOD_RES (2)..(4)..(35)..(36): Xaa is C or S
LXGXEEVIMEYQKYLLVRGNDIYLMSIPSTKVPAXXTSP

SEQ ID NO: 41780 - protein, 36 aa, Artificial Sequence
  GFR-binding peptide
  MOD_RES (2)..(4)..(36): Xaa is C or S
SXGXRDVVMGEYQKYIIQQKDNIYLMSIPSMKTPTX

SEQ ID NO: 41781 - protein, 41 aa, Artificial Sequence; identical to SEQ ID NO: 24790
  GFR-binding peptide
  MOD_RES (1)..(3)..(37)..(38): Xaa is C or S
  MOD_RES (15)..(16)..(17)..(18)..(19): Xaa is A or G
  MOD_RES (20)..(21)..(22)..(23): Xaa is A or G or is absent

SEQ ID NO: 41782 - protein, 34 aa, Artificial Sequence; identical to SEQ ID NO: 23771
  GFR-binding peptide
  MOD_RES (1)..(1): Xaa is C or S
  MOD_RES (13)..(14)..(15)..(16)..(17): Xaa is A or G
  MOD_RES (18)..(19)..(20)..(21): Xaa is A or G or is absent

SEQ ID NO: 41783 - protein, 34 aa, Artificial Sequence; identical to SEQ ID NO: 25787
  GFR-binding peptide
  MOD_RES (2)..(34): Xaa is C or S

SEQ ID NO: 41784 - protein, 38 aa, Artificial Sequence; identical to SEQ ID NO: 26824
  GFR-binding peptide
  MOD_RES (33)..(34): Xaa is C or S
  MOD_RES (11)..(12)..(13)..(14)..(15): Xaa is A or G
  MOD_RES (16)..(17)..(18)..(19): Xaa is A or G or is absent

SEQ ID NO: 41785 - protein, 42 aa, Artificial Sequence; identical to SEQ ID NO: 23773
  GFR-binding peptide
  MOD_RES (2)..(4)..(36)..(37): Xaa is C or S

SEQ ID NO: 41786 - protein, 36 aa, Artificial Sequence; identical to SEQ ID NO: 25790
  GFR-binding peptide
  MOD_RES (2)..(4)..(36): Xaa is C or S

SEQ ID NO: 41787 - protein, 41 aa, Artificial Sequence; identical to SEQ ID NO: 23774
  GFR-binding peptide
  MOD_RES (1)..(35)..(36): Xaa is C or S
  MOD_RES (13)..(14)..(15)..(16)..(17): Xaa is A or G
  MOD_RES (18)..(19)..(20)..(21): Xaa is A or G or is absent

SEQ ID NO: 41788 - protein, 37 aa, Artificial Sequence; identical to SEQ ID NO: 25792
  GFR-binding peptide
  MOD_RES (1)..(33): Xaa is C or S

SEQ ID NO: 41789 - protein, 35 aa, Artificial Sequence; identical to SEQ ID NO: 24794
  GFR-binding peptide
  MOD_RES (35)..(35): Xaa is C or S
  MOD_RES (13)..(14)..(15)..(16)..(17): Xaa is A or G
  MOD_RES (18)..(19)..(20)..(21): Xaa is A or G or is absent

SEQ ID NO: 41790 - protein, 41 aa, Artificial Sequence
  GFR-binding peptide
  MOD_RES (1)..(3)..(37)..(38): Xaa is C or S
  MOD_RES (15)..(16)..(17)..(18)..(19): Xaa is A or G
  MOD_RES (20)..(21)..(22)..(23): Xaa is A or G or is absent
XGXRDVVMGEYQKYXXXXXXXXXIYLMSIPSMKTPTXXPGA

SEQ ID NO: 41791 - protein, 34 aa, Artificial Sequence; identical to SEQ ID NO: 23779
  GFR-binding peptide
  MOD_RES (2)..(34): Xaa is C or S

SEQ ID NO: 41792 - protein, 38 aa, Artificial Sequence; identical to SEQ ID NO: 24802
  GFR-binding peptide
  MOD_RES (2)..(4)..(38): Xaa is C or S
  MOD_RES (16)..(17)..(18)..(19)..(20): Xaa is A or G
  MOD_RES (21)..(22)..(23)..(24): Xaa is A or G or is absent

SEQ ID NO: 41793 - protein, 37 aa, Artificial Sequence; identical to SEQ ID NO: 24804
  GFR-binding peptide
  MOD_RES (1)..(3)..(35)..(36): Xaa is C or S

SEQ ID NO: 41794 - protein, 39 aa, Artificial Sequence; identical to SEQ ID NO: 25800
  GFR-binding peptide
  MOD_RES (1)..(3)..(35)..(36): Xaa is C or S

SEQ ID NO: 41795 - protein, 36 aa, Artificial Sequence; identical to SEQ ID NO: 23782
  GFR-binding peptide
  MOD_RES (2)..(34)..(35): Xaa is C or S

SEQ ID NO: 41796 - protein, 37 aa, Artificial Sequence; identical to SEQ ID NO: 24808
  GFR-binding peptide
  MOD_RES (1)..(3)..(37): Xaa is C or S
  MOD_RES (15)..(16)..(17)..(18)..(19): Xaa is A or G
  MOD_RES (20)..(21)..(22)..(23): Xaa is A or G or is absent

SEQ ID NO: 41797 - protein, 40 aa, Artificial Sequence
  GFR-binding peptide
  MOD_RES (1)..(3)..(37)..(38): Xaa is C or S
  MOD_RES (15)..(16)..(17)..(18)..(19): Xaa is A or G
  MOD_RES (20)..(21)..(22)..(23): Xaa is A or G or is absent
XGXRDVVMGEYQKYXXXXXXXXXIYLMSIPSMKTPTXXPG

SEQ ID NO: 41798 - protein, 39 aa, Artificial Sequence
  GFR-binding peptide
  MOD_RES (1)..(3)..(36)..(37): Xaa is C or S
  MOD_RES (14)..(15)..(16)..(17)..(18): Xaa is A or G
  MOD_RES (19)..(20)..(21)..(22): Xaa is A or G or is absent
XGXEEVIMEYQKYXXXXXXXXXIYLMSIPSTKVPAXXTS

SEQ ID NO: 41799 - protein, 31 aa, Artificial Sequence
  GFR-binding peptide
  MOD_RES (31)..(31): Xaa is C or S
EEVIMEYQKYLLVRGNDIYLMSIPSTKVPAX

SEQ ID NO: 41800 - protein, 40 aa, Artificial Sequence; identical to SEQ ID NO: 25812
  GFR-binding peptide
  MOD_RES (2)..(36)..(37): Xaa is C or S
  MOD_RES (14)..(15)..(16)..(17)..(18): Xaa is A or G
  MOD_RES (19)..(20)..(21)..(22): Xaa is A or G or is absent

SEQ ID NO: 41801 - protein, 40 aa, Artificial Sequence; identical to SEQ ID NO: 23796
  GFR-binding peptide
  MOD_RES (2)..(4)..(36)..(37): Xaa is C or S

SEQ ID NO: 41802 - protein, 31 aa, Artificial Sequence; identical to SEQ ID NO: 24818
  GFR-binding peptide

SEQ ID NO: 41803 - protein, 36 aa, Artificial Sequence; identical to SEQ ID NO: 26845
  GFR-binding peptide
  MOD_RES (2)..(4): Xaa is C or S

SEQ ID NO: 41804 - protein, 36 aa, Artificial Sequence; identical to SEQ ID NO: 23800
  GFR-binding peptide
  MOD_RES (31)..(32): Xaa is C or S

SEQ ID NO: 41805 - protein, 37 aa, Artificial Sequence
  GFR-binding peptide
  MOD_RES (2)..(4): Xaa is C or S
  MOD_RES (16)..(17)..(18)..(19)..(20): Xaa is A or G
  MOD_RES (21)..(22)..(23)..(24): Xaa is A or G or is absent
SXGXRDVVMGEYQKYXXXXXXXXXIYLMSIPSMKTPT

SEQ ID NO: 41806 - protein, 38 aa, Artificial Sequence
  GFR-binding peptide
  MOD_RES (2)..(4)..(35)..(36): Xaa is C or S
LXGXEEVIMEYQKYLLVRGNDIYLMSIPSTKVPAXXTS

SEQ ID NO: 41807 - protein, 39 aa, Artificial Sequence
  GFR-binding peptide
  MOD_RES (1)..(3)..(35)..(36): Xaa is C or S
XGXRDVVMGEYQKYIIQQKDNIYLMSIPSMKTPTXXPGA

SEQ ID NO: 41808 - protein, 39 aa, Artificial Sequence; identical to SEQ ID NO: 25822
  GFR-binding peptide
  MOD_RES (1)..(3)..(35)..(36): Xaa is C or S

SEQ ID NO: 41809 - protein, 36 aa, Artificial Sequence
  GFR-binding peptide
  MOD_RES (2)..(4): Xaa is C or S
  MOD_RES (15)..(16)..(17)..(18)..(19): Xaa is A or G
  MOD_RES (20)..(21)..(22)..(23): Xaa is A or G or is absent
LXGXEEVIMEYQKYXXXXXXXXXIYLMSIPSTKVPA

SEQ ID NO: 41810 - protein, 37 aa, Artificial Sequence
  GFR-binding peptide
  MOD_RES (31)..(32): Xaa is C or S
EEVIMEYQKYLLVRGNDIYLMSIPSTKVPAXXTSPVR

SEQ ID NO: 41811 - protein, 42 aa, Artificial Sequence; identical to SEQ ID NO: 24828
  GFR-binding peptide
  MOD_RES (2)..(4)..(38)..(39): Xaa is C or S
  MOD_RES (16)..(17)..(18)..(19)..(20): Xaa is A or G
  MOD_RES (21)..(22)..(23)..(24): Xaa is A or G or is absent

SEQ ID NO: 41812 - protein, 34 aa, Artificial Sequence; identical to SEQ ID NO: 26857
  GFR-binding peptide
  MOD_RES (1)..(33): Xaa is C or S

SEQ ID NO: 41813 - protein, 41 aa, Artificial Sequence
  GFR-binding peptide
  MOD_RES (2)..(4)..(35)..(36): Xaa is C or S
LXGXEEVIMEYQKYLLVRGNDIYLMSIPSTKVPAXXTSPVR

SEQ ID NO: 41814 - protein, 32 aa, Artificial Sequence
  GFR-binding peptide
  MOD_RES (31)..(32): Xaa is C or S
DVVMGEYQKYIIQQKDNIYLMSIPSMKTPTXX

SEQ ID NO: 41815 - protein, 43 aa, Artificial Sequence; identical to SEQ ID NO: 25826
  GFR-binding peptide
  MOD_RES (1)..(3)..(37)..(38): Xaa is C or S
  MOD_RES (15)..(16)..(17)..(18)..(19): Xaa is A or G
  MOD_RES (20)..(21)..(22)..(23): Xaa is A or G or is absent

SEQ ID NO: 41816 - protein, 35 aa, Artificial Sequence; identical to SEQ ID NO: 24835
  GFR-binding peptide
  MOD_RES (1)..(1): Xaa is C or S
  MOD_RES (14)..(15)..(16)..(17)..(18): Xaa is A or G
  MOD_RES (19)..(20)..(21)..(22): Xaa is A or G or is absent

SEQ ID NO: 41817 - protein, 38 aa, Artificial Sequence; identical to SEQ ID NO: 23814
  GFR-binding peptide
  MOD_RES (33)..(34): Xaa is C or S
  MOD_RES (11)..(12)..(13)..(14)..(15): Xaa is A or G
  MOD_RES (16)..(17)..(18)..(19): Xaa is A or G or is absent

SEQ ID NO: 41818 - protein, 34 aa, Artificial Sequence
  GFR-binding peptide
  MOD_RES (31)..(32): Xaa is C or S
EEVIMEYQKYLLVRGNDIYLMSIPSTKVPAXXTS

SEQ ID NO: 41819 - protein, 35 aa, Artificial Sequence; identical to SEQ ID NO: 23818
  GFR-binding peptide
  MOD_RES (1)..(33)..(34): Xaa is C or S

SEQ ID NO: 41820 - protein, 39 aa, Artificial Sequence
  GFR-binding peptide
  MOD_RES (33)..(34): Xaa is C or S
  MOD_RES (11)..(12)..(13)..(14)..(15): Xaa is A or G
  MOD_RES (16)..(17)..(18)..(19): Xaa is A or G or is absent
RVVMNEYQKYXXXXXXXXXIYLVSIPSLKTPAXXPKPVH

SEQ ID NO: 41821 - protein, 38 aa, Artificial Sequence; identical to SEQ ID NO: 25831
  GFR-binding peptide
  MOD_RES (1)..(3)..(35)..(36): Xaa is C or S

SEQ ID NO: 41822 - protein, 40 aa, Artificial Sequence; identical to SEQ ID NO: 26866
  GFR-binding peptide
  MOD_RES (1)..(3)..(37)..(38): Xaa is C or S
  MOD_RES (15)..(16)..(17)..(18)..(19): Xaa is A or G
  MOD_RES (20)..(21)..(22)..(23): Xaa is A or G or is absent

SEQ ID NO: 41823 - protein, 36 aa, Artificial Sequence
  GFR-binding peptide
  MOD_RES (31)..(32): Xaa is C or S
EEVIMEYQKYLLVRGNDIYLMSIPSTKVPAXXTSPV

SEQ ID NO: 41824 - protein, 38 aa, Artificial Sequence; identical to SEQ ID NO: 23821
  GFR-binding peptide
  MOD_RES (2)..(36)..(37): Xaa is C or S
  MOD_RES (14)..(15)..(16)..(17)..(18): Xaa is A or G
  MOD_RES (19)..(20)..(21)..(22): Xaa is A or G or is absent

SEQ ID NO: 41825 - protein, 40 aa, Artificial Sequence; identical to SEQ ID NO: 23822
  GFR-binding peptide
  MOD_RES (2)..(4)..(36)..(37): Xaa is C or S

SEQ ID NO: 41826 - protein, 37 aa, Artificial Sequence; identical to SEQ ID NO: 26869
  GFR-binding peptide
  MOD_RES (32)..(33): Xaa is C or S

SEQ ID NO: 41827 - protein, 40 aa, Artificial Sequence; identical to SEQ ID NO: 23825
  GFR-binding peptide
  MOD_RES (34)..(34): Xaa is C or S
  MOD_RES (12)..(13)..(14)..(15)..(16): Xaa is A or G
  MOD_RES (17)..(18)..(19)..(20): Xaa is A or G or is absent

SEQ ID NO: 41828 - protein, 35 aa, Artificial Sequence; identical to SEQ ID NO: 25837
  GFR-binding peptide
  MOD_RES (34)..(35): Xaa is C or S
  MOD_RES (12)..(13)..(14)..(15)..(16): Xaa is A or G
  MOD_RES (17)..(18)..(19)..(20): Xaa is A or G or is absent

SEQ ID NO: 41829 - protein, 30 aa, Artificial Sequence
  GFR-binding peptide
EEVIMEYQKYLLVRGNDIYLMSIPSTKVPA

SEQ ID NO: 41830 - protein, 36 aa, Artificial Sequence; identical to SEQ ID NO: 26872
  GFR-binding peptide
  MOD_RES (33)..(34): Xaa is C or S
  MOD_RES (11)..(12)..(13)..(14)..(15): Xaa is A or G
  MOD_RES (16)..(17)..(18)..(19): Xaa is A or G or is absent

SEQ ID NO: 41831 - protein, 43 aa, Artificial Sequence
  GFR-binding peptide
  MOD_RES (1)..(3)..(37)..(38): Xaa is C or S
  MOD_RES (15)..(16)..(17)..(18)..(19): Xaa is A or G
  MOD_RES (20)..(21)..(22)..(23): Xaa is A or G or is absent
XGXRDVVMGEYQKYXXXXXXXXXIYLMSIPSMKTPTXXPGASG

SEQ ID NO: 41832 - protein, 40 aa, Artificial Sequence; identical to SEQ ID NO: 26874
  GFR-binding peptide
  MOD_RES (34)..(35): Xaa is C or S
  MOD_RES (12)..(13)..(14)..(15)..(16): Xaa is A or G
  MOD_RES (17)..(18)..(19)..(20): Xaa is A or G or is absent

SEQ ID NO: 41833 - protein, 41 aa, Artificial Sequence; identical to SEQ ID NO: 24843
  GFR-binding peptide
  MOD_RES (1)..(36)..(37): Xaa is C or S
  MOD_RES (14)..(15)..(16)..(17)..(18): Xaa is A or G
  MOD_RES (19)..(20)..(21)..(22): Xaa is A or G or is absent

SEQ ID NO: 41834 - protein, 43 aa, Artificial Sequence; identical to SEQ ID NO: 23828
  GFR-binding peptide
  MOD_RES (1)..(3)..(37)..(38): Xaa is C or S
  MOD_RES (15)..(16)..(17)..(18)..(19): Xaa is A or G
  MOD_RES (20)..(21)..(22)..(23): Xaa is A or G or is absent

SEQ ID NO: 41835 - protein, 38 aa, Artificial Sequence; identical to SEQ ID NO: 25840
  GFR-binding peptide
  MOD_RES (1)..(3)..(37)..(38): Xaa is C or S
  MOD_RES (15)..(16)..(17)..(18)..(19): Xaa is A or G
  MOD_RES (20)..(21)..(22)..(23): Xaa is A or G or is absent

SEQ ID NO: 41836 - protein, 33 aa, Artificial Sequence; identical to SEQ ID NO: 24845
  GFR-binding peptide
  MOD_RES (2)..(2): Xaa is C or S

SEQ ID NO: 41837 - protein, 37 aa, Artificial Sequence
  GFR-binding peptide
  MOD_RES (33)..(34): Xaa is C or S
  MOD_RES (11)..(12)..(13)..(14)..(15): Xaa is A or G
  MOD_RES (16)..(17)..(18)..(19): Xaa is A or G or is absent
EEVIMEYQKYXXXXXXXXXIYLMSIPSTKVPAXXTSP

SEQ ID NO: 41838 - protein, 38 aa, Artificial Sequence; identical to SEQ ID NO: 26877
  GFR-binding peptide
  MOD_RES (2)..(4)..(38): Xaa is C or S
  MOD_RES (16)..(17)..(18)..(19)..(20): Xaa is A or G
  MOD_RES (21)..(22)..(23)..(24): Xaa is A or G or is absent

SEQ ID NO: 41839 - protein, 35 aa, Artificial Sequence; identical to SEQ ID NO: 23830
  GFR-binding peptide
  MOD_RES (34)..(35): Xaa is C or S
  MOD_RES (12)..(13)..(14)..(15)..(16): Xaa is A or G
  MOD_RES (17)..(18)..(19)..(20): Xaa is A or G or is absent

SEQ ID NO: 41840 - protein, 34 aa, Artificial Sequence; identical to SEQ ID NO: 23831
  GFR-binding peptide
  MOD_RES (13)..(14)..(15)..(16)..(17): Xaa is A or G
  MOD_RES (18)..(19)..(20)..(21): Xaa is A or G or is absent

SEQ ID NO: 41841 - protein, 35 aa, Artificial Sequence
  GFR-binding peptide
  MOD_RES (1)..(33)..(34): Xaa is C or S
XRDVVMGEYQKYIIQQKDNIYLMSIPSMKTPTXXP

SEQ ID NO: 41842 - protein, 37 aa, Artificial Sequence
  GFR-binding peptide
  MOD_RES (2)..(33)..(34): Xaa is C or S
GXEEVIMEYQKYLLVRGNDIYLMSIPSTKVPAXXTSP

SEQ ID NO: 41843 - protein, 40 aa, Artificial Sequence; identical to SEQ ID NO: 24850
  GFR-binding peptide
  MOD_RES (2)..(4)..(36)..(37): Xaa is C or S

SEQ ID NO: 41844 - protein, 35 aa, Artificial Sequence; identical to SEQ ID NO: 25847
  GFR-binding peptide
  MOD_RES (34)..(35): Xaa is C or S
  MOD_RES (12)..(13)..(14)..(15)..(16): Xaa is A or G
  MOD_RES (17)..(18)..(19)..(20): Xaa is A or G or is absent

SEQ ID NO: 41845 - protein, 42 aa, Artificial Sequence; identical to SEQ ID NO: 25848
  GFR-binding peptide
  MOD_RES (2)..(4)..(38)..(39): Xaa is C or S
  MOD_RES (16)..(17)..(18)..(19)..(20): Xaa is A or G
  MOD_RES (21)..(22)..(23)..(24): Xaa is A or G or is absent

SEQ ID NO: 41846 - protein, 38 aa, Artificial Sequence; identical to SEQ ID NO: 25850
  GFR-binding peptide
  MOD_RES (1)..(3)..(35)..(36): Xaa is C or S

SEQ ID NO: 41847 - protein, 35 aa, Artificial Sequence; identical to SEQ ID NO: 23841
  GFR-binding peptide
  MOD_RES (1)..(33)..(34): Xaa is C or S

SEQ ID NO: 41848 - protein, 38 aa, Artificial Sequence; identical to SEQ ID NO: 24862
  GFR-binding peptide
  MOD_RES (1)..(3)..(35)..(36): Xaa is C or S

SEQ ID NO: 41849 - protein, 32 aa, Artificial Sequence; identical to SEQ ID NO: 25856
  GFR-binding peptide
  MOD_RES (32)..(32): Xaa is C or S

SEQ ID NO: 41850 - protein, 36 aa, Artificial Sequence; identical to SEQ ID NO: 24865
  GFR-binding peptide
  MOD_RES (1)..(3): Xaa is C or S
  MOD_RES (15)..(16)..(17)..(18)..(19): Xaa is A or G
  MOD_RES (20)..(21)..(22)..(23): Xaa is A or G or is absent

SEQ ID NO: 41851 - protein, 36 aa, Artificial Sequence; identical to SEQ ID NO: 25857
  GFR-binding peptide
  MOD_RES (1)..(34)..(35): Xaa is C or S

SEQ ID NO: 41852 - protein, 38 aa, Artificial Sequence; identical to SEQ ID NO: 25858
  GFR-binding peptide
  MOD_RES (1)..(33)..(34): Xaa is C or S

SEQ ID NO: 41853 - protein, 39 aa, Artificial Sequence; identical to SEQ ID NO: 26889
  GFR-binding peptide
  MOD_RES (34)..(35): Xaa is C or S
  MOD_RES (12)..(13)..(14)..(15)..(16): Xaa is A or G
  MOD_RES (17)..(18)..(19)..(20): Xaa is A or G or is absent

SEQ ID NO: 41854 - protein, 35 aa, Artificial Sequence; identical to SEQ ID NO: 24866
  GFR-binding peptide
  MOD_RES (31)..(31): Xaa is C or S

SEQ ID NO: 41855 - protein, 37 aa, Artificial Sequence; identical to SEQ ID NO: 23843
  GFR-binding peptide
  MOD_RES (2)..(36)..(37): Xaa is C or S
  MOD_RES (14)..(15)..(16)..(17)..(18): Xaa is A or G
  MOD_RES (19)..(20)..(21)..(22): Xaa is A or G or is absent

SEQ ID NO: 41856 - protein, 35 aa, Artificial Sequence; identical to SEQ ID NO: 26894
  GFR-binding peptide
  MOD_RES (33)..(34): Xaa is C or S
  MOD_RES (11)..(12)..(13)..(14)..(15): Xaa is A or G
  MOD_RES (16)..(17)..(18)..(19): Xaa is A or G or is absent

SEQ ID NO: 41857 - protein, 40 aa, Artificial Sequence; identical to SEQ ID NO: 23848
  GFR-binding peptide
  MOD_RES (1)..(3)..(35)..(36): Xaa is C or S

SEQ ID NO: 41858 - protein, 37 aa, Artificial Sequence; identical to SEQ ID NO: 23849
  GFR-binding peptide
  MOD_RES (2)..(35)..(36): Xaa is C or S

SEQ ID NO: 41859 - protein, 33 aa, Artificial Sequence; identical to SEQ ID NO: 26896
  GFR-binding peptide
  MOD_RES (2)..(2): Xaa is C or S

SEQ ID NO: 41860 - protein, 37 aa, Artificial Sequence; identical to SEQ ID NO: 26897
  GFR-binding peptide
  MOD_RES (2)..(4)..(36)..(37): Xaa is C or S

SEQ ID NO: 41861 - protein, 40 aa, Artificial Sequence; identical to SEQ ID NO: 26898
  GFR-binding peptide
  MOD_RES (2)..(34)..(35): Xaa is C or S

SEQ ID NO: 41862 - protein, 36 aa, Artificial Sequence
  GFR-binding peptide
  MOD_RES (2)..(35)..(36): Xaa is C or S
  MOD_RES (13)..(14)..(15)..(16)..(17): Xaa is A or G
  MOD_RES (18)..(19)..(20)..(21): Xaa is A or G or is absent
GXEEVIMEYQKYXXXXXXXXXIYLMSIPSTKVPAXX

SEQ ID NO: 41863 - protein, 37 aa, Artificial Sequence; identical to SEQ ID NO: 23850
  GFR-binding peptide
  MOD_RES (32)..(33): Xaa is C or S

SEQ ID NO: 41864 - protein, 39 aa, Artificial Sequence; identical to SEQ ID NO: 24873
  GFR-binding peptide
  MOD_RES (34)..(35): Xaa is C or S
  MOD_RES (12)..(13)..(14)..(15)..(16): Xaa is A or G
  MOD_RES (17)..(18)..(19)..(20): Xaa is A or G or is absent

SEQ ID NO: 41865 - protein, 35 aa, Artificial Sequence
  GFR-binding peptide
  MOD_RES (2)..(4)..(35): Xaa is C or S
LXGXEEVIMEYQKYLLVRGNDIYLMSIPSTKVPAX

SEQ ID NO: 41866 - protein, 35 aa, Artificial Sequence
  GFR-binding peptide
  MOD_RES (2)..(4): Xaa is C or S
SXGXRDVVMGEYQKYIIQQKDNIYLMSIPSMKTPT

SEQ ID NO: 41867 - protein, 33 aa, Artificial Sequence; identical to SEQ ID NO: 25866
  GFR-binding peptide
  MOD_RES (32)..(33): Xaa is C or S

SEQ ID NO: 41868 - protein, 37 aa, Artificial Sequence; identical to SEQ ID NO: 26903
  GFR-binding peptide
  MOD_RES (2)..(36)..(37): Xaa is C or S
  MOD_RES (14)..(15)..(16)..(17)..(18): Xaa is A or G
  MOD_RES (19)..(20)..(21)..(22): Xaa is A or G or is absent

SEQ ID NO: 41869 - protein, 41 aa, Artificial Sequence; identical to SEQ ID NO: 23854
  GFR-binding peptide
  MOD_RES (2)..(4)..(36)..(37): Xaa is C or S

SEQ ID NO: 41870 - protein, 40 aa, Artificial Sequence
  GFR-binding peptide
  MOD_RES (1)..(3)..(34)..(35): Xaa is C or S
XGXEEVIMEYQKYLLVRGNDIYLMSIPSTKVPAXXTSPVR

SEQ ID NO: 41871 - protein, 41 aa, Artificial Sequence; identical to SEQ ID NO: 26910
  GFR-binding peptide
  MOD_RES (2)..(4)..(38)..(39): Xaa is C or S
  MOD_RES (16)..(17)..(18)..(19)..(20): Xaa is A or G
  MOD_RES (21)..(22)..(23)..(24): Xaa is A or G or is absent

SEQ ID NO: 41872 - protein, 41 aa, Artificial Sequence; identical to SEQ ID NO: 24883
  GFR-binding peptide
  MOD_RES (2)..(35)..(36): Xaa is C or S

SEQ ID NO: 41873 - protein, 36 aa, Artificial Sequence
  GFR-binding peptide
  MOD_RES (2)..(36): Xaa is C or S
  MOD_RES (14)..(15)..(16)..(17)..(18): Xaa is A or G
  MOD_RES (19)..(20)..(21)..(22): Xaa is A or G or is absent
GXRDVVMGEYQKYXXXXXXXXXIYLMSIPSMKTPTX

SEQ ID NO: 41874 - protein, 38 aa, Artificial Sequence; identical to SEQ ID NO: 25874
  GFR-binding peptide
  MOD_RES (34)..(35): Xaa is C or S
  MOD_RES (12)..(13)..(14)..(15)..(16): Xaa is A or G
  MOD_RES (17)..(18)..(19)..(20): Xaa is A or G or is absent

SEQ ID NO: 41875 - protein, 39 aa, Artificial Sequence; identical to SEQ ID NO: 23860
  GFR-binding peptide
  MOD_RES (2)..(37)..(38): Xaa is C or S
  MOD_RES (15)..(16)..(17)..(18)..(19): Xaa is A or G
  MOD_RES (20)..(21)..(22)..(23): Xaa is A or G or is absent

SEQ ID NO: 41876 - protein, 42 aa, Artificial Sequence; identical to SEQ ID NO: 25875
  GFR-binding peptide
  MOD_RES (2)..(4)..(38): Xaa is C or S
  MOD_RES (16)..(17)..(18)..(19)..(20): Xaa is A or G
  MOD_RES (21)..(22)..(23)..(24): Xaa is A or G or is absent

SEQ ID NO: 41877 - protein, 40 aa, Artificial Sequence; identical to SEQ ID NO: 25878
  GFR-binding peptide
  MOD_RES (1)..(3)..(36)..(37): Xaa is C or S

SEQ ID NO: 41878 - protein, 38 aa, Artificial Sequence; identical to SEQ ID NO: 24889
  GFR-binding peptide
  MOD_RES (2)..(36)..(37): Xaa is C or S
  MOD_RES (14)..(15)..(16)..(17)..(18): Xaa is A or G
  MOD_RES (19)..(20)..(21)..(22): Xaa is A or G or is absent

SEQ ID NO: 41879 - protein, 40 aa, Artificial Sequence; identical to SEQ ID NO: 24891
  GFR-binding peptide
  MOD_RES (1)..(3)..(37): Xaa is C or S
  MOD_RES (15)..(16)..(17)..(18)..(19): Xaa is A or G
  MOD_RES (20)..(21)..(22)..(23): Xaa is A or G or is absent

SEQ ID NO: 41880 - protein, 36 aa, Artificial Sequence; identical to SEQ ID NO: 26914
  GFR-binding peptide
  MOD_RES (1)..(3): Xaa is C or S
  MOD_RES (15)..(16)..(17)..(18)..(19): Xaa is A or G
  MOD_RES (20)..(21)..(22)..(23): Xaa is A or G or is absent

SEQ ID NO: 41881 - protein, 40 aa, Artificial Sequence; identical to SEQ ID NO: 23867
  GFR-binding peptide
  MOD_RES (34)..(35): Xaa is C or S
  MOD_RES (12)..(13)..(14)..(15)..(16): Xaa is A or G
  MOD_RES (17)..(18)..(19)..(20): Xaa is A or G or is absent

SEQ ID NO: 41882 - protein, 35 aa, Artificial Sequence; identical to SEQ ID NO: 26915
  GFR-binding peptide
  MOD_RES (2)..(2): Xaa is C or S
  MOD_RES (14)..(15)..(16)..(17)..(18): Xaa is A or G
  MOD_RES (19)..(20)..(21)..(22): Xaa is A or G or is absent

SEQ ID NO: 41883 - protein, 36 aa, Artificial Sequence; identical to SEQ ID NO: 25883
  GFR-binding peptide
  MOD_RES (34)..(35): Xaa is C or S
  MOD_RES (12)..(13)..(14)..(15)..(16): Xaa is A or G
  MOD_RES (17)..(18)..(19)..(20): Xaa is A or G or is absent

SEQ ID NO: 41884 - protein, 40 aa, Artificial Sequence; identical to SEQ ID NO: 24897
  GFR-binding peptide
  MOD_RES (2)..(34)..(35): Xaa is C or S

SEQ ID NO: 41885 - protein, 39 aa, Artificial Sequence
  GFR-binding peptide
  MOD_RES (2)..(35)..(36): Xaa is C or S
  MOD_RES (13)..(14)..(15)..(16)..(17): Xaa is A or G
  MOD_RES (18)..(19)..(20)..(21): Xaa is A or G or is absent
GXEEVIMEYQKYXXXXXXXXXIYLMSIPSTKVPAXXTSP

SEQ ID NO: 41886 - protein, 40 aa, Artificial Sequence; identical to SEQ ID NO: 24902
  GFR-binding peptide
  MOD_RES (2)..(4)..(36): Xaa is C or S

SEQ ID NO: 41887 - protein, 42 aa, Artificial Sequence
  GFR-binding peptide
  MOD_RES (2)..(36)..(37): Xaa is C or S
  MOD_RES (14)..(15)..(16)..(17)..(18): Xaa is A or G
  MOD_RES (19)..(20)..(21)..(22): Xaa is A or G or is absent
GXRDVVMGEYQKYXXXXXXXXXIYLMSIPSMKTPTXXPGASG

SEQ ID NO: 41888 - protein, 37 aa, Artificial Sequence; identical to SEQ ID NO: 23873
  GFR-binding peptide
  MOD_RES (32)..(33): Xaa is C or S

SEQ ID NO: 41889 - protein, 38 aa, Artificial Sequence; identical to SEQ ID NO: 26922
  GFR-binding peptide
  MOD_RES (1)..(3)..(35)..(36): Xaa is C or S

SEQ ID NO: 41890 - protein, 37 aa, Artificial Sequence; identical to SEQ ID NO: 26923
  GFR-binding peptide
  MOD_RES (31)..(31): Xaa is C or S

SEQ ID NO: 41891 - protein, 39 aa, Artificial Sequence; identical to SEQ ID NO: 25893
  GFR-binding peptide
  MOD_RES (2)..(36)..(37): Xaa is C or S
  MOD_RES (14)..(15)..(16)..(17)..(18): Xaa is A or G
  MOD_RES (19)..(20)..(21)..(22): Xaa is A or G or is absent

SEQ ID NO: 41892 - protein, 36 aa, Artificial Sequence; identical to SEQ ID NO: 23876
  GFR-binding peptide
  MOD_RES (33)..(34): Xaa is C or S
  MOD_RES (11)..(12)..(13)..(14)..(15): Xaa is A or G
  MOD_RES (16)..(17)..(18)..(19): Xaa is A or G or is absent

SEQ ID NO: 41893 - protein, 37 aa, Artificial Sequence
  GFR-binding peptide
  MOD_RES (33)..(34): Xaa is C or S
  MOD_RES (11)..(12)..(13)..(14)..(15): Xaa is A or G
  MOD_RES (16)..(17)..(18)..(19): Xaa is A or G or is absent
DVVMGEYQKYXXXXXXXXXIYLMSIPSMKTPTXXPGA

SEQ ID NO: 41894 - protein, 44 aa, Artificial Sequence; identical to SEQ ID NO: 24911
  GFR-binding peptide
  MOD_RES (2)..(4)..(38)..(39): Xaa is C or S
  MOD_RES (16)..(17)..(18)..(19)..(20): Xaa is A or G
  MOD_RES (21)..(22)..(23)..(24): Xaa is A or G or is absent

SEQ ID NO: 41895 - protein, 38 aa, Artificial Sequence; identical to SEQ ID NO: 24912
  GFR-binding peptide
  MOD_RES (2)..(34)..(35): Xaa is C or S

SEQ ID NO: 41896 - protein, 37 aa, Artificial Sequence; identical to SEQ ID NO: 25894
  GFR-binding peptide
  MOD_RES (35)..(36): Xaa is C or S
  MOD_RES (13)..(14)..(15)..(16)..(17): Xaa is A or G
  MOD_RES (18)..(19)..(20)..(21): Xaa is A or G or is absent

SEQ ID NO: 41897 - protein, 43 aa, Artificial Sequence; identical to SEQ ID NO: 23881
  GFR-binding peptide
  MOD_RES (2)..(4)..(38)..(39): Xaa is C or S
  MOD_RES (16)..(17)..(18)..(19)..(20): Xaa is A or G
  MOD_RES (21)..(22)..(23)..(24): Xaa is A or G or is absent

SEQ ID NO: 41898 - protein, 35 aa, Artificial Sequence; identical to SEQ ID NO: 26926
  GFR-binding peptide
  MOD_RES (1)..(33)..(34): Xaa is C or S

SEQ ID NO: 41899 - protein, 41 aa, Artificial Sequence; identical to SEQ ID NO: 25896
  GFR-binding peptide
  MOD_RES (1)..(35)..(36): Xaa is C or S
  MOD_RES (13)..(14)..(15)..(16)..(17): Xaa is A or G
  MOD_RES (18)..(19)..(20)..(21): Xaa is A or G or is absent

SEQ ID NO: 41900 - protein, 37 aa, Artificial Sequence; identical to SEQ ID NO: 23884
  GFR-binding peptide
  MOD_RES (1)..(35)..(36): Xaa is C or S
  MOD_RES (13)..(14)..(15)..(16)..(17): Xaa is A or G
  MOD_RES (18)..(19)..(20)..(21): Xaa is A or G or is absent

SEQ ID NO: 41901 - protein, 43 aa, Artificial Sequence; identical to SEQ ID NO: 24914
  GFR-binding peptide
  MOD_RES (1)..(3)..(37)..(38): Xaa is C or S
  MOD_RES (15)..(16)..(17)..(18)..(19): Xaa is A or G
  MOD_RES (20)..(21)..(22)..(23): Xaa is A or G or is absent

SEQ ID NO: 41902 - protein, 35 aa, Artificial Sequence; identical to SEQ ID NO: 26930
  GFR-binding peptide
  MOD_RES (1)..(33)..(34): Xaa is C or S

SEQ ID NO: 41903 - protein, 35 aa, Artificial Sequence; identical to SEQ ID NO: 23888
  GFR-binding peptide
  MOD_RES (32)..(33): Xaa is C or S

SEQ ID NO: 41904 - protein, 40 aa, Artificial Sequence; identical to SEQ ID NO: 23891
  GFR-binding peptide
  MOD_RES (2)..(36)..(37): Xaa is C or S
  MOD_RES (14)..(15)..(16)..(17)..(18): Xaa is A or G
  MOD_RES (19)..(20)..(21)..(22): Xaa is A or G or is absent

SEQ ID NO: 41905 - protein, 34 aa, Artificial Sequence; identical to SEQ ID NO: 24921
  GFR-binding peptide
  MOD_RES (2)..(2): Xaa is C or S

SEQ ID NO: 41906 - protein, 39 aa, Artificial Sequence
  GFR-binding peptide
  MOD_RES (1)..(35)..(36): Xaa is C or S
  MOD_RES (13)..(14)..(15)..(16)..(17): Xaa is A or G
  MOD_RES (18)..(19)..(20)..(21): Xaa is A or G or is absent
XRDVVMGEYQKYXXXXXXXXXIYLMSIPSMKTPTXXPGA

SEQ ID NO: 41907 - protein, 35 aa, Artificial Sequence; identical to SEQ ID NO: 24923
  GFR-binding peptide
  MOD_RES (2)..(34)..(35): Xaa is C or S

SEQ ID NO: 41908 - protein, 41 aa, Artificial Sequence; identical to SEQ ID NO: 26935
  GFR-binding peptide
  MOD_RES (1)..(3)..(37)..(38): Xaa is C or S
  MOD_RES (15)..(16)..(17)..(18)..(19): Xaa is A or G
  MOD_RES (20)..(21)..(22)..(23): Xaa is A or G or is absent

SEQ ID NO: 41909 - protein, 32 aa, Artificial Sequence; identical to SEQ ID NO: 26936
  GFR-binding peptide
  MOD_RES (1)..(1): Xaa is C or S

SEQ ID NO: 41910 - protein, 38 aa, Artificial Sequence; identical to SEQ ID NO: 24927
  GFR-binding peptide
  MOD_RES (34)..(35): Xaa is C or S
  MOD_RES (12)..(13)..(14)..(15)..(16): Xaa is A or G
  MOD_RES (17)..(18)..(19)..(20): Xaa is A or G or is absent

SEQ ID NO: 41911 - protein, 32 aa, Artificial Sequence; identical to SEQ ID NO: 25914
  GFR-binding peptide
  MOD_RES (31)..(32): Xaa is C or S

SEQ ID NO: 41912 - protein, 35 aa, Artificial Sequence; identical to SEQ ID NO: 23896
  GFR-binding peptide
  MOD_RES (33)..(34): Xaa is C or S
  MOD_RES (11)..(12)..(13)..(14)..(15): Xaa is A or G
  MOD_RES (16)..(17)..(18)..(19): Xaa is A or G or is absent

SEQ ID NO: 41913 - protein, 42 aa, Artificial Sequence
  GFR-binding peptide
  MOD_RES (1)..(3)..(37)..(38): Xaa is C or S
  MOD_RES (15)..(16)..(17)..(18)..(19): Xaa is A or G
  MOD_RES (20)..(21)..(22)..(23): Xaa is A or G or is absent
XGXRDVVMGEYQKYXXXXXXXXXIYLMSIPSMKTPTXXPGAS

SEQ ID NO: 41914 - protein, 37 aa, Artificial Sequence; identical to SEQ ID NO: 23898
  GFR-binding peptide
  MOD_RES (1)..(3)..(37): Xaa is C or S
  MOD_RES (15)..(16)..(17)..(18)..(19): Xaa is A or G
  MOD_RES (20)..(21)..(22)..(23): Xaa is A or G or is absent

SEQ ID NO: 41915 - protein, 32 aa, Artificial Sequence; identical to SEQ ID NO: 25915
  GFR-binding peptide
  MOD_RES (32)..(32): Xaa is C or S

SEQ ID NO: 41916 - protein, 32 aa, Artificial Sequence; identical to SEQ ID NO: 26938
  GFR-binding peptide
  MOD_RES (32)..(32): Xaa is C or S

SEQ ID NO: 41917 - protein, 37 aa, Artificial Sequence; identical to SEQ ID NO: 26940
  GFR-binding peptide
  MOD_RES (1)..(3)..(37): Xaa is C or S
  MOD_RES (15)..(16)..(17)..(18)..(19): Xaa is A or G
  MOD_RES (20)..(21)..(22)..(23): Xaa is A or G or is absent

SEQ ID NO: 41918 - protein, 38 aa, Artificial Sequence; identical to SEQ ID NO: 24933
  GFR-binding peptide
  MOD_RES (1)..(35)..(36): Xaa is C or S
  MOD_RES (13)..(14)..(15)..(16)..(17): Xaa is A or G
  MOD_RES (18)..(19)..(20)..(21): Xaa is A or G or is absent

SEQ ID NO: 41919 - protein, 39 aa, Artificial Sequence; identical to SEQ ID NO: 25917
  GFR-binding peptide
  MOD_RES (2)..(34)..(35): Xaa is C or S

SEQ ID NO: 41920 - protein, 31 aa, Artificial Sequence; identical to SEQ ID NO: 25920
  GFR-binding peptide

SEQ ID NO: 41921 - protein, 36 aa, Artificial Sequence; identical to SEQ ID NO: 24937
  GFR-binding peptide
  MOD_RES (32)..(33): Xaa is C or S

SEQ ID NO: 41922 - protein, 37 aa, Artificial Sequence; identical to SEQ ID NO: 24940
  GFR-binding peptide
  MOD_RES (33)..(34): Xaa is C or S
  MOD_RES (11)..(12)..(13)..(14)..(15): Xaa is A or G
  MOD_RES (16)..(17)..(18)..(19): Xaa is A or G or is absent

SEQ ID NO: 41923 - protein, 40 aa, Artificial Sequence
  GFR-binding peptide
  MOD_RES (1)..(3)..(35)..(36): Xaa is C or S
XGXRDVVMGEYQKYIIQQKDNIYLMSIPSMKTPTXXPGAS

SEQ ID NO: 41924 - protein, 31 aa, Artificial Sequence; identical to SEQ ID NO: 24944
  GFR-binding peptide

SEQ ID NO: 41925 - protein, 33 aa, Artificial Sequence
  GFR-binding peptide
  MOD_RES (33)..(33): Xaa is C or S
  MOD_RES (11)..(12)..(13)..(14)..(15): Xaa is A or G
  MOD_RES (16)..(17)..(18)..(19): Xaa is A or G or is absent
EEVIMEYQKYXXXXXXXXXIYLMSIPSTKVPAX

SEQ ID NO: 41926 - protein, 38 aa, Artificial Sequence; identical to SEQ ID NO: 26946
  GFR-binding peptide
  MOD_RES (33)..(34): Xaa is C or S
  MOD_RES (11)..(12)..(13)..(14)..(15): Xaa is A or G
  MOD_RES (16)..(17)..(18)..(19): Xaa is A or G or is absent

SEQ ID NO: 41927 - protein, 41 aa, Artificial Sequence
  GFR-binding peptide
  MOD_RES (1)..(3)..(36)..(37): Xaa is C or S
  MOD_RES (14)..(15)..(16)..(17)..(18): Xaa is A or G
  MOD_RES (19)..(20)..(21)..(22): Xaa is A or G or is absent
XGXEEVIMEYQKYXXXXXXXXXIYLMSIPSTKVPAXXTSPV

SEQ ID NO: 41928 - protein, 34 aa, Artificial Sequence; identical to SEQ ID NO: 26949
  GFR-binding peptide
  MOD_RES (1)..(1): Xaa is C or S
  MOD_RES (13)..(14)..(15)..(16)..(17): Xaa is A or G
  MOD_RES (18)..(19)..(20)..(21): Xaa is A or G or is absent

SEQ ID NO: 41929 - protein, 35 aa, Artificial Sequence; identical to SEQ ID NO: 23913
  GFR-binding peptide
  MOD_RES (32)..(33): Xaa is C or S

SEQ ID NO: 41930 - protein, 36 aa, Artificial Sequence; identical to SEQ ID NO: 26950
  GFR-binding peptide
  MOD_RES (32)..(33): Xaa is C or S

SEQ ID NO: 41931 - protein, 37 aa, Artificial Sequence; identical to SEQ ID NO: 25933
  GFR-binding peptide
  MOD_RES (2)..(34)..(35): Xaa is C or S

SEQ ID NO: 41932 - protein, 37 aa, Artificial Sequence; identical to SEQ ID NO: 23917
  GFR-binding peptide
  MOD_RES (1)..(35)..(36): Xaa is C or S
  MOD_RES (13)..(14)..(15)..(16)..(17): Xaa is A or G
  MOD_RES (18)..(19)..(20)..(21): Xaa is A or G or is absent

SEQ ID NO: 41933 - protein, 37 aa, Artificial Sequence; identical to SEQ ID NO: 23922
  GFR-binding peptide
  MOD_RES (2)..(4): Xaa is C or S
  MOD_RES (16)..(17)..(18)..(19)..(20): Xaa is A or G
  MOD_RES (21)..(22)..(23)..(24): Xaa is A or G or is absent

SEQ ID NO: 41934 - protein, 37 aa, Artificial Sequence; identical to SEQ ID NO: 24956
  GFR-binding peptide
  MOD_RES (2)..(4): Xaa is C or S
  MOD_RES (16)..(17)..(18)..(19)..(20): Xaa is A or G
  MOD_RES (21)..(22)..(23)..(24): Xaa is A or G or is absent

SEQ ID NO: 41935 - protein, 38 aa, Artificial Sequence; identical to SEQ ID NO: 25940
  GFR-binding peptide
  MOD_RES (1)..(3)..(37)..(38): Xaa is C or S
  MOD_RES (15)..(16)..(17)..(18)..(19): Xaa is A or G
  MOD_RES (20)..(21)..(22)..(23): Xaa is A or G or is absent

SEQ ID NO: 41936 - protein, 37 aa, Artificial Sequence; identical to SEQ ID NO: 23923
  GFR-binding peptide
  MOD_RES (2)..(34)..(35): Xaa is C or S

SEQ ID NO: 41937 - protein, 35 aa, Artificial Sequence; identical to SEQ ID NO: 23925
  GFR-binding peptide
  MOD_RES (1)..(3)..(35): Xaa is C or S

SEQ ID NO: 41938 - protein, 38 aa, Artificial Sequence; identical to SEQ ID NO: 26959
  GFR-binding peptide
  MOD_RES (2)..(36)..(37): Xaa is C or S
  MOD_RES (14)..(15)..(16)..(17)..(18): Xaa is A or G
  MOD_RES (19)..(20)..(21)..(22): Xaa is A or G or is absent

SEQ ID NO: 41939 - protein, 35 aa, Artificial Sequence; identical to SEQ ID NO: 23927
  GFR-binding peptide
  MOD_RES (31)..(32): Xaa is C or S

SEQ ID NO: 41940 - protein, 39 aa, Artificial Sequence; identical to SEQ ID NO: 26961
  GFR-binding peptide
  MOD_RES (1)..(3)..(35)..(36): Xaa is C or S

SEQ ID NO: 41941 - protein, 35 aa, Artificial Sequence; identical to SEQ ID NO: 24960
  GFR-binding peptide
  MOD_RES (2)..(2): Xaa is C or S
  MOD_RES (14)..(15)..(16)..(17)..(18): Xaa is A or G
  MOD_RES (19)..(20)..(21)..(22): Xaa is A or G or is absent

SEQ ID NO: 41942 - protein, 37 aa, Artificial Sequence
  GFR-binding peptide
  MOD_RES (31)..(32): Xaa is C or S
DVVMGEYQKYIIQQKDNIYLMSIPSMKTPTXXPGASG

SEQ ID NO: 41943 - protein, 30 aa, Artificial Sequence; identical to SEQ ID NO: 24964
  GFR-binding peptide

SEQ ID NO: 41944 - protein, 39 aa, Artificial Sequence; identical to SEQ ID NO: 23932
  GFR-binding peptide
  MOD_RES (1)..(35): Xaa is C or S
  MOD_RES (13)..(14)..(15)..(16)..(17): Xaa is A or G
  MOD_RES (18)..(19)..(20)..(21): Xaa is A or G or is absent

SEQ ID NO: 41945 - protein, 37 aa, Artificial Sequence; identical to SEQ ID NO: 24966
  GFR-binding peptide
  MOD_RES (2)..(34)..(35): Xaa is C or S

SEQ ID NO: 41946 - protein, 36 aa, Artificial Sequence; identical to SEQ ID NO: 23934
  GFR-binding peptide
  MOD_RES (1)..(33)..(34): Xaa is C or S

SEQ ID NO: 41947 - protein, 39 aa, Artificial Sequence
  GFR-binding peptide
  MOD_RES (1)..(3)..(34)..(35): Xaa is C or S
XGXEEVIMEYQKYLLVRGNDIYLMSIPSTKVPAXXTSPV

SEQ ID NO: 41948 - protein, 31 aa, Artificial Sequence; identical to SEQ ID NO: 25948
  GFR-binding peptide
  MOD_RES (31)..(31): Xaa is C or S

SEQ ID NO: 41949 - protein, 36 aa, Artificial Sequence; identical to SEQ ID NO: 23935
  GFR-binding peptide
  MOD_RES (1)..(3)..(35)..(36): Xaa is C or S

SEQ ID NO: 41950 - protein, 35 aa, Artificial Sequence
  GFR-binding peptide
  MOD_RES (1)..(34)..(35): Xaa is C or S
  MOD_RES (12)..(13)..(14)..(15)..(16): Xaa is A or G
  MOD_RES (17)..(18)..(19)..(20): Xaa is A or G or is absent
XEEVIMEYQKYXXXXXXXXXIYLMSIPSTKVPAXX

SEQ ID NO: 41951 - protein, 39 aa, Artificial Sequence; identical to SEQ ID NO: 23937
  GFR-binding peptide
  MOD_RES (1)..(3)..(37)..(38): Xaa is C or S
  MOD_RES (15)..(16)..(17)..(18)..(19): Xaa is A or G
  MOD_RES (20)..(21)..(22)..(23): Xaa is A or G or is absent

SEQ ID NO: 41952 - protein, 35 aa, Artificial Sequence
  GFR-binding peptide
  MOD_RES (2)..(35): Xaa is C or S
  MOD_RES (13)..(14)..(15)..(16)..(17): Xaa is A or G
  MOD_RES (18)..(19)..(20)..(21): Xaa is A or G or is absent
GXEEVIMEYQKYXXXXXXXXXIYLMSIPSTKVPAX

SEQ ID NO: 41953 - protein, 40 aa, Artificial Sequence; identical to SEQ ID NO: 24971
  GFR-binding peptide
  MOD_RES (2)..(4)..(38): Xaa is C or S
  MOD_RES (16)..(17)..(18)..(19)..(20): Xaa is A or G
  MOD_RES (21)..(22)..(23)..(24): Xaa is A or G or is absent

SEQ ID NO: 41954 - protein, 37 aa, Artificial Sequence; identical to SEQ ID NO: 26968
  GFR-binding peptide
  MOD_RES (34)..(34): Xaa is C or S
  MOD_RES (12)..(13)..(14)..(15)..(16): Xaa is A or G
  MOD_RES (17)..(18)..(19)..(20): Xaa is A or G or is absent

SEQ ID NO: 41955 - protein, 44 aa, Artificial Sequence; identical to SEQ ID NO: 23938
  GFR-binding peptide
  MOD_RES (2)..(4)..(38)..(39): Xaa is C or S
  MOD_RES (16)..(17)..(18)..(19)..(20): Xaa is A or G
  MOD_RES (21)..(22)..(23)..(24): Xaa is A or G or is absent

SEQ ID NO: 41956 - protein, 39 aa, Artificial Sequence; identical to SEQ ID NO: 25953
  GFR-binding peptide
  MOD_RES (1)..(33)..(34): Xaa is C or S

SEQ ID NO: 41957 - protein, 38 aa, Artificial Sequence
  GFR-binding peptide
  MOD_RES (32)..(33): Xaa is C or S
SRVVMNEYQKYIVNSSDDIYLVSIPSLKTPAXXPKPVH

SEQ ID NO: 41958 - protein, 35 aa, Artificial Sequence; identical to SEQ ID NO: 24977
  GFR-binding peptide
  MOD_RES (2)..(4): Xaa is C or S

SEQ ID NO: 41959 - protein, 37 aa, Artificial Sequence; identical to SEQ ID NO: 23944
  GFR-binding peptide
  MOD_RES (33)..(33): Xaa is C or S
  MOD_RES (11)..(12)..(13)..(14)..(15): Xaa is A or G
  MOD_RES (16)..(17)..(18)..(19): Xaa is A or G or is absent

SEQ ID NO: 41960 - protein, 37 aa, Artificial Sequence; identical to SEQ ID NO: 23946
  GFR-binding peptide
  MOD_RES (1)..(3)..(35)..(36): Xaa is C or S

SEQ ID NO: 41961 - protein, 37 aa, Artificial Sequence; identical to SEQ ID NO: 25959
  GFR-binding peptide
  MOD_RES (2)..(36): Xaa is C or S
  MOD_RES (14)..(15)..(16)..(17)..(18): Xaa is A or G
  MOD_RES (19)..(20)..(21)..(22): Xaa is A or G or is absent

SEQ ID NO: 41962 - protein, 35 aa, Artificial Sequence; identical to SEQ ID NO: 26979
  GFR-binding peptide
  MOD_RES (1)..(35): Xaa is C or S
  MOD_RES (13)..(14)..(15)..(16)..(17): Xaa is A or G
  MOD_RES (18)..(19)..(20)..(21): Xaa is A or G or is absent

SEQ ID NO: 41963 - protein, 42 aa, Artificial Sequence; identical to SEQ ID NO: 23949
  GFR-binding peptide
  MOD_RES (1)..(36)..(37): Xaa is C or S
  MOD_RES (14)..(15)..(16)..(17)..(18): Xaa is A or G
  MOD_RES (19)..(20)..(21)..(22): Xaa is A or G or is absent

SEQ ID NO: 41964 - protein, 39 aa, Artificial Sequence; identical to SEQ ID NO: 23952
  GFR-binding peptide
  MOD_RES (1)..(3)..(38)..(39): Xaa is C or S
  MOD_RES (16)..(17)..(18)..(19)..(20): Xaa is A or G
  MOD_RES (21)..(22)..(23)..(24): Xaa is A or G or is absent

SEQ ID NO: 41965 - protein, 38 aa, Artificial Sequence; identical to SEQ ID NO: 26985
  GFR-binding peptide
  MOD_RES (1)..(3)..(37)..(38): Xaa is C or S
  MOD_RES (15)..(16)..(17)..(18)..(19): Xaa is A or G
  MOD_RES (20)..(21)..(22)..(23): Xaa is A or G or is absent

SEQ ID NO: 41966 - protein, 40 aa, Artificial Sequence
  GFR-binding peptide
  MOD_RES (2)..(34)..(35): Xaa is C or S
GXRDVVMGEYQKYIIQQKDNIYLMSIPSMKTPTXXPGASG

SEQ ID NO: 41967 - protein, 41 aa, Artificial Sequence; identical to SEQ ID NO: 25962
  GFR-binding peptide
  MOD_RES (1)..(3)..(37)..(38): Xaa is C or S
  MOD_RES (15)..(16)..(17)..(18)..(19): Xaa is A or G
  MOD_RES (20)..(21)..(22)..(23): Xaa is A or G or is absent

SEQ ID NO: 41968 - protein, 35 aa, Artificial Sequence; identical to SEQ ID NO: 25964
  GFR-binding peptide
  MOD_RES (2)..(4): Xaa is C or S

SEQ ID NO: 41969 - protein, 33 aa, Artificial Sequence; identical to SEQ ID NO: 25965
  GFR-binding peptide
  MOD_RES (33)..(33): Xaa is C or S

SEQ ID NO: 41970 - protein, 36 aa, Artificial Sequence; identical to SEQ ID NO: 24987
  GFR-binding peptide
  MOD_RES (31)..(32): Xaa is C or S

SEQ ID NO: 41971 - protein, 34 aa, Artificial Sequence
  GFR-binding peptide
  MOD_RES (1)..(3)..(34): Xaa is C or S
XGXEEVIMEYQKYLLVRGNDIYLMSIPSTKVPAX

SEQ ID NO: 41972 - protein, 39 aa, Artificial Sequence
  GFR-binding peptide
  MOD_RES (2)..(33)..(34): Xaa is C or S
GXEEVIMEYQKYLLVRGNDIYLMSIPSTKVPAXXTSPVR

SEQ ID NO: 41973 - protein, 36 aa, Artificial Sequence
  GFR-binding peptide
  MOD_RES (1)..(3)..(35)..(36): Xaa is C or S
XGXRDVVMGEYQKYIIQQKDNIYLMSIPSMKTPTXX

SEQ ID NO: 41974 - protein, 33 aa, Artificial Sequence; identical to SEQ ID NO: 23959
  GFR-binding peptide
  MOD_RES (32)..(33): Xaa is C or S

SEQ ID NO: 41975 - protein, 33 aa, Artificial Sequence; identical to SEQ ID NO: 25971
  GFR-binding peptide
  MOD_RES (31)..(32): Xaa is C or S

SEQ ID NO: 41976 - protein, 38 aa, Artificial Sequence; identical to SEQ ID NO: 23961
  GFR-binding peptide
  MOD_RES (1)..(35)..(36): Xaa is C or S
  MOD_RES (13)..(14)..(15)..(16)..(17): Xaa is A or G
  MOD_RES (18)..(19)..(20)..(21): Xaa is A or G or is absent

SEQ ID NO: 41977 - protein, 35 aa, Artificial Sequence; identical to SEQ ID NO: 24993
  GFR-binding peptide
  MOD_RES (1)..(35): Xaa is C or S
  MOD_RES (13)..(14)..(15)..(16)..(17): Xaa is A or G
  MOD_RES (18)..(19)..(20)..(21): Xaa is A or G or is absent

SEQ ID NO: 41978 - protein, 41 aa, Artificial Sequence
  GFR-binding peptide
  MOD_RES (1)..(3)..(35)..(36): Xaa is C or S
XGXSRVVMNEYQKYIVNSSDDIYLVSIPSLKTPAXXPKPVH

SEQ ID NO: 41979 - protein, 33 aa, Artificial Sequence; identical to SEQ ID NO: 24997
  GFR-binding peptide
  MOD_RES (12)..(13)..(14)..(15)..(16): Xaa is A or G
  MOD_RES (17)..(18)..(19)..(20): Xaa is A or G or is absent

SEQ ID NO: 41980 - protein, 30 aa, Artificial Sequence; identical to SEQ ID NO: 27001
  GFR-binding peptide

SEQ ID NO: 41981 - protein, 35 aa, Artificial Sequence; identical to SEQ ID NO: 27003
  GFR-binding peptide
  MOD_RES (33)..(34): Xaa is C or S
  MOD_RES (11)..(12)..(13)..(14)..(15): Xaa is A or G
  MOD_RES (16)..(17)..(18)..(19): Xaa is A or G or is absent

SEQ ID NO: 41982 - protein, 35 aa, Artificial Sequence; identical to SEQ ID NO: 25980
  GFR-binding peptide
  MOD_RES (34)..(35): Xaa is C or S
  MOD_RES (12)..(13)..(14)..(15)..(16): Xaa is A or G
  MOD_RES (17)..(18)..(19)..(20): Xaa is A or G or is absent

SEQ ID NO: 41983 - protein, 32 aa, Artificial Sequence
  GFR-binding peptide
  MOD_RES (11)..(12)..(13)..(14)..(15): Xaa is A or G
  MOD_RES (16)..(17)..(18)..(19): Xaa is A or G or is absent
EEVIMEYQKYXXXXXXXXXIYLMSIPSTKVPA

SEQ ID NO: 41984 - protein, 39 aa, Artificial Sequence; identical to SEQ ID NO: 23967
  GFR-binding peptide
  MOD_RES (34)..(35): Xaa is C or S
  MOD_RES (12)..(13)..(14)..(15)..(16): Xaa is A or G
  MOD_RES (17)..(18)..(19)..(20): Xaa is A or G or is absent

SEQ ID NO: 41985 - protein, 37 aa, Artificial Sequence; identical to SEQ ID NO: 27007
  GFR-binding peptide
  MOD_RES (31)..(32): Xaa is C or S

SEQ ID NO: 41986 - protein, 33 aa, Artificial Sequence
  GFR-binding peptide
  MOD_RES (12)..(13)..(14)..(15)..(16): Xaa is A or G
  MOD_RES (17)..(18)..(19)..(20): Xaa is A or G or is absent
RDVVMGEYQKYXXXXXXXXXIYLMSIPSMKTPT

SEQ ID NO: 41987 - protein, 40 aa, Artificial Sequence; identical to SEQ ID NO: 25002
  GFR-binding peptide
  MOD_RES (1)..(35)..(36): Xaa is C or S
  MOD_RES (13)..(14)..(15)..(16)..(17): Xaa is A or G
  MOD_RES (18)..(19)..(20)..(21): Xaa is A or G or is absent

SEQ ID NO: 41988 - protein, 41 aa, Artificial Sequence; identical to SEQ ID NO: 25986
  GFR-binding peptide
  MOD_RES (1)..(35)..(36): Xaa is C or S
  MOD_RES (13)..(14)..(15)..(16)..(17): Xaa is A or G
  MOD_RES (18)..(19)..(20)..(21): Xaa is A or G or is absent

SEQ ID NO: 41989 - protein, 35 aa, Artificial Sequence
  GFR-binding peptide
  MOD_RES (1)..(32)..(33): Xaa is C or S
XEEVIMEYQKYLLVRGNDIYLMSIPSTKVPAXXTS

SEQ ID NO: 41990 - protein, 39 aa, Artificial Sequence; identical to SEQ ID NO: 23970
  GFR-binding peptide
  MOD_RES (1)..(3)..(37)..(38): Xaa is C or S
  MOD_RES (15)..(16)..(17)..(18)..(19): Xaa is A or G
  MOD_RES (20)..(21)..(22)..(23): Xaa is A or G or is absent

SEQ ID NO: 41991 - protein, 38 aa, Artificial Sequence; identical to SEQ ID NO: 25005
  GFR-binding peptide
  MOD_RES (1)..(3)..(37)..(38): Xaa is C or S
  MOD_RES (15)..(16)..(17)..(18)..(19): Xaa is A or G
  MOD_RES (20)..(21)..(22)..(23): Xaa is A or G or is absent

SEQ ID NO: 41992 - protein, 38 aa, Artificial Sequence
  GFR-binding peptide
  MOD_RES (33)..(34): Xaa is C or S
  MOD_RES (11)..(12)..(13)..(14)..(15): Xaa is A or G
  MOD_RES (16)..(17)..(18)..(19): Xaa is A or G or is absent
EEVIMEYQKYXXXXXXXXXIYLMSIPSTKVPAXXTSPV

SEQ ID NO: 41993 - protein, 32 aa, Artificial Sequence; identical to SEQ ID NO: 25006
  GFR-binding peptide
  MOD_RES (11)..(12)..(13)..(14)..(15): Xaa is A or G
  MOD_RES (16)..(17)..(18)..(19): Xaa is A or G or is absent

SEQ ID NO: 41994 - protein, 41 aa, Artificial Sequence
  GFR-binding peptide
  MOD_RES (2)..(4)..(38)..(39): Xaa is C or S
  MOD_RES (16)..(17)..(18)..(19)..(20): Xaa is A or G
  MOD_RES (21)..(22)..(23)..(24): Xaa is A or G or is absent
SXGXRDVVMGEYQKYXXXXXXXXXIYLMSIPSMKTPTXXPG

SEQ ID NO: 41995 - protein, 35 aa, Artificial Sequence
  GFR-binding peptide
  MOD_RES (33)..(34): Xaa is C or S
  MOD_RES (11)..(12)..(13)..(14)..(15): Xaa is A or G
  MOD_RES (16)..(17)..(18)..(19): Xaa is A or G or is absent
DVVMGEYQKYXXXXXXXXXIYLMSIPSMKTPTXXP

SEQ ID NO: 41996 - protein, 33 aa, Artificial Sequence; identical to SEQ ID NO: 25993
  GFR-binding peptide
  MOD_RES (32)..(33): Xaa is C or S

SEQ ID NO: 41997 - protein, 42 aa, Artificial Sequence; identical to SEQ ID NO: 23972
  GFR-binding peptide
  MOD_RES (1)..(3)..(38)..(39): Xaa is C or S
  MOD_RES (16)..(17)..(18)..(19)..(20): Xaa is A or G
  MOD_RES (21)..(22)..(23)..(24): Xaa is A or G or is absent

SEQ ID NO: 41998 - protein, 33 aa, Artificial Sequence; identical to SEQ ID NO: 25012
  GFR-binding peptide
  MOD_RES (33)..(33): Xaa is C or S
  MOD_RES (11)..(12)..(13)..(14)..(15): Xaa is A or G
  MOD_RES (16)..(17)..(18)..(19): Xaa is A or G or is absent

SEQ ID NO: 41999 - protein, 35 aa, Artificial Sequence; identical to SEQ ID NO: 25013
  GFR-binding peptide
  MOD_RES (1)..(3)..(35): Xaa is C or S

SEQ ID NO: 42000 - protein, 31 aa, Artificial Sequence
  GFR-binding peptide
  MOD_RES (1)..(1): Xaa is C or S
XEEVIMEYQKYLLVRGNDIYLMSIPSTKVPA

SEQ ID NO: 42001 - protein, 33 aa, Artificial Sequence
  GFR-binding peptide
  MOD_RES (1)..(1): Xaa is C or S
  MOD_RES (12)..(13)..(14)..(15)..(16): Xaa is A or G
  MOD_RES (17)..(18)..(19)..(20): Xaa is A or G or is absent
XEEVIMEYQKYXXXXXXXXXIYLMSIPSTKVPA

SEQ ID NO: 42002 - protein, 32 aa, Artificial Sequence; identical to SEQ ID NO: 25014
  GFR-binding peptide
  MOD_RES (11)..(12)..(13)..(14)..(15): Xaa is A or G
  MOD_RES (16)..(17)..(18)..(19): Xaa is A or G or is absent

SEQ ID NO: 42003 - protein, 33 aa, Artificial Sequence; identical to SEQ ID NO: 25016
  GFR-binding peptide
  MOD_RES (33)..(33): Xaa is C or S
  MOD_RES (11)..(12)..(13)..(14)..(15): Xaa is A or G
  MOD_RES (16)..(17)..(18)..(19): Xaa is A or G or is absent

SEQ ID NO: 42004 - protein, 37 aa, Artificial Sequence
  GFR-binding peptide
  MOD_RES (34)..(35): Xaa is C or S
  MOD_RES (12)..(13)..(14)..(15)..(16): Xaa is A or G
  MOD_RES (17)..(18)..(19)..(20): Xaa is A or G or is absent
RDVVMGEYQKYXXXXXXXXXIYLMSIPSMKTPTXXPG

SEQ ID NO: 42005 - protein, 37 aa, Artificial Sequence; identical to SEQ ID NO: 23980
  GFR-binding peptide
  MOD_RES (32)..(33): Xaa is C or S

SEQ ID NO: 42006 - protein, 39 aa, Artificial Sequence; identical to SEQ ID NO: 25018
  GFR-binding peptide
  MOD_RES (35)..(36): Xaa is C or S
  MOD_RES (13)..(14)..(15)..(16)..(17): Xaa is A or G
  MOD_RES (18)..(19)..(20)..(21): Xaa is A or G or is absent

SEQ ID NO: 42007 - protein, 39 aa, Artificial Sequence; identical to SEQ ID NO: 27014
  GFR-binding peptide
  MOD_RES (33)..(34): Xaa is C or S
  MOD_RES (11)..(12)..(13)..(14)..(15): Xaa is A or G
  MOD_RES (16)..(17)..(18)..(19): Xaa is A or G or is absent

SEQ ID NO: 42008 - protein, 37 aa, Artificial Sequence; identical to SEQ ID NO: 25021
  GFR-binding peptide
  MOD_RES (32)..(33): Xaa is C or S

SEQ ID NO: 42009 - protein, 40 aa, Artificial Sequence
  GFR-binding peptide
  MOD_RES (2)..(4)..(38)..(39): Xaa is C or S
  MOD_RES (16)..(17)..(18)..(19)..(20): Xaa is A or G
  MOD_RES (21)..(22)..(23)..(24): Xaa is A or G or is absent
SXGXRDVVMGEYQKYXXXXXXXXXIYLMSIPSMKTPTXXP

SEQ ID NO: 42010 - protein, 38 aa, Artificial Sequence; identical to SEQ ID NO: 25024
  GFR-binding peptide
  MOD_RES (2)..(34)..(35): Xaa is C or S

SEQ ID NO: 42011 - protein, 39 aa, Artificial Sequence; identical to SEQ ID NO: 25026
  GFR-binding peptide
  MOD_RES (2)..(34)..(35): Xaa is C or S

SEQ ID NO: 42012 - protein, 33 aa, Artificial Sequence; identical to SEQ ID NO: 26009
  GFR-binding peptide
  MOD_RES (33)..(33): Xaa is C or S
  MOD_RES (11)..(12)..(13)..(14)..(15): Xaa is A or G
  MOD_RES (16)..(17)..(18)..(19): Xaa is A or G or is absent

SEQ ID NO: 42013 - protein, 31 aa, Artificial Sequence; identical to SEQ ID NO: 23990
  GFR-binding peptide
  MOD_RES (31)..(31): Xaa is C or S

SEQ ID NO: 42014 - protein, 40 aa, Artificial Sequence; identical to SEQ ID NO: 23991
  GFR-binding peptide
  MOD_RES (2)..(34)..(35): Xaa is C or S

SEQ ID NO: 42015 - protein, 41 aa, Artificial Sequence
  GFR-binding peptide
  MOD_RES (2)..(35)..(36): Xaa is C or S
  MOD_RES (13)..(14)..(15)..(16)..(17): Xaa is A or G
  MOD_RES (18)..(19)..(20)..(21): Xaa is A or G or is absent
GXEEVIMEYQKYXXXXXXXXXIYLMSIPSTKVPAXXTSPVR

SEQ ID NO: 42016 - protein, 40 aa, Artificial Sequence; identical to SEQ ID NO: 25033
  GFR-binding peptide
  MOD_RES (2)..(37)..(38): Xaa is C or S
  MOD_RES (15)..(16)..(17)..(18)..(19): Xaa is A or G
  MOD_RES (20)..(21)..(22)..(23): Xaa is A or G or is absent

SEQ ID NO: 42017 - protein, 35 aa, Artificial Sequence; identical to SEQ ID NO: 25035
  GFR-binding peptide
  MOD_RES (32)..(33): Xaa is C or S

SEQ ID NO: 42018 - protein, 33 aa, Artificial Sequence; identical to SEQ ID NO: 27032
  GFR-binding peptide
  MOD_RES (1)..(33): Xaa is C or S

SEQ ID NO: 42019 - protein, 38 aa, Artificial Sequence; identical to SEQ ID NO: 27035
  GFR-binding peptide
  MOD_RES (1)..(34)..(35): Xaa is C or S

SEQ ID NO: 42020 - protein, 40 aa, Artificial Sequence; identical to SEQ ID NO: 26025
  GFR-binding peptide
  MOD_RES (34)..(35): Xaa is C or S
  MOD_RES (12)..(13)..(14)..(15)..(16): Xaa is A or G
  MOD_RES (17)..(18)..(19)..(20): Xaa is A or G or is absent

SEQ ID NO: 42021 - protein, 37 aa, Artificial Sequence
  GFR-binding peptide
  MOD_RES (1)..(34)..(35): Xaa is C or S
  MOD_RES (12)..(13)..(14)..(15)..(16): Xaa is A or G
  MOD_RES (17)..(18)..(19)..(20): Xaa is A or G or is absent
XEEVIMEYQKYXXXXXXXXXIYLMSIPSTKVPAXXTS

SEQ ID NO: 42022 - protein, 38 aa, Artificial Sequence
  GFR-binding peptide
  MOD_RES (1)..(33)..(34): Xaa is C or S
XRDVVMGEYQKYIIQQKDNIYLMSIPSMKTPTXXPGAS

SEQ ID NO: 42023 - protein, 37 aa, Artificial Sequence; identical to SEQ ID NO: 26028
  GFR-binding peptide
  MOD_RES (1)..(3)..(37): Xaa is C or S
  MOD_RES (15)..(16)..(17)..(18)..(19): Xaa is A or G
  MOD_RES (20)..(21)..(22)..(23): Xaa is A or G or is absent

SEQ ID NO: 42024 - protein, 42 aa, Artificial Sequence; identical to SEQ ID NO: 27037
  GFR-binding peptide
  MOD_RES (2)..(36)..(37): Xaa is C or S
  MOD_RES (14)..(15)..(16)..(17)..(18): Xaa is A or G
  MOD_RES (19)..(20)..(21)..(22): Xaa is A or G or is absent

SEQ ID NO: 42025 - protein, 42 aa, Artificial Sequence; identical to SEQ ID NO: 24001
  GFR-binding peptide
  MOD_RES (2)..(4)..(36)..(37): Xaa is C or S

SEQ ID NO: 42026 - protein, 41 aa, Artificial Sequence
  GFR-binding peptide
  MOD_RES (2)..(4)..(37)..(38): Xaa is C or S
  MOD_RES (15)..(16)..(17)..(18)..(19): Xaa is A or G
  MOD_RES (20)..(21)..(22)..(23): Xaa is A or G or is absent
LXGXEEVIMEYQKYXXXXXXXXXIYLMSIPSTKVPAXXTSP

SEQ ID NO: 42027 - protein, 39 aa, Artificial Sequence; identical to SEQ ID NO: 25044
  GFR-binding peptide
  MOD_RES (1)..(3)..(37)..(38): Xaa is C or S
  MOD_RES (15)..(16)..(17)..(18)..(19): Xaa is A or G
  MOD_RES (20)..(21)..(22)..(23): Xaa is A or G or is absent

SEQ ID NO: 42028 - protein, 43 aa, Artificial Sequence; identical to SEQ ID NO: 25049
  GFR-binding peptide
  MOD_RES (2)..(4)..(38)..(39): Xaa is C or S
  MOD_RES (16)..(17)..(18)..(19)..(20): Xaa is A or G
  MOD_RES (21)..(22)..(23)..(24): Xaa is A or G or is absent

SEQ ID NO: 42029 - protein, 38 aa, Artificial Sequence
  GFR-binding peptide
  MOD_RES (2)..(34)..(35): Xaa is C or S
GXRDVVMGEYQKYIIQQKDNIYLMSIPSMKTPTXXPGA

SEQ ID NO: 42030 - protein, 40 aa, Artificial Sequence; identical to SEQ ID NO: 24007
  GFR-binding peptide
  MOD_RES (2)..(4)..(38)..(39): Xaa is C or S
  MOD_RES (16)..(17)..(18)..(19)..(20): Xaa is A or G
  MOD_RES (21)..(22)..(23)..(24): Xaa is A or G or is absent

SEQ ID NO: 42031 - protein, 37 aa, Artificial Sequence
  GFR-binding peptide
  MOD_RES (2)..(4)..(36)..(37): Xaa is C or S
SXGXRDVVMGEYQKYIIQQKDNIYLMSIPSMKTPTXX

SEQ ID NO: 42032 - protein, 40 aa, Artificial Sequence; identical to SEQ ID NO: 24010
  GFR-binding peptide
  MOD_RES (1)..(3)..(35)..(36): Xaa is C or S

SEQ ID NO: 42033 - protein, 41 aa, Artificial Sequence; identical to SEQ ID NO: 25055
  GFR-binding peptide
  MOD_RES (2)..(4)..(38)..(39): Xaa is C or S
  MOD_RES (16)..(17)..(18)..(19)..(20): Xaa is A or G
  MOD_RES (21)..(22)..(23)..(24): Xaa is A or G or is absent

SEQ ID NO: 42034 - protein, 36 aa, Artificial Sequence; identical to SEQ ID NO: 27047
  GFR-binding peptide
  MOD_RES (34)..(35): Xaa is C or S
  MOD_RES (12)..(13)..(14)..(15)..(16): Xaa is A or G
  MOD_RES (17)..(18)..(19)..(20): Xaa is A or G or is absent

SEQ ID NO: 42035 - protein, 37 aa, Artificial Sequence; identical to SEQ ID NO: 24012
  GFR-binding peptide
  MOD_RES (1)..(3)..(35)..(36): Xaa is C or S

SEQ ID NO: 42036 - protein, 44 aa, Artificial Sequence; identical to SEQ ID NO: 26043
  GFR-binding peptide
  MOD_RES (2)..(4)..(38)..(39): Xaa is C or S
  MOD_RES (16)..(17)..(18)..(19)..(20): Xaa is A or G
  MOD_RES (21)..(22)..(23)..(24): Xaa is A or G or is absent

SEQ ID NO: 42037 - protein, 39 aa, Artificial Sequence; identical to SEQ ID NO: 25056
  GFR-binding peptide
  MOD_RES (2)..(4)..(38)..(39): Xaa is C or S
  MOD_RES (16)..(17)..(18)..(19)..(20): Xaa is A or G
  MOD_RES (21)..(22)..(23)..(24): Xaa is A or G or is absent

SEQ ID NO: 42038 - protein, 39 aa, Artificial Sequence; identical to SEQ ID NO: 24013
  GFR-binding peptide
  MOD_RES (2)..(4)..(38)..(39): Xaa is C or S
  MOD_RES (16)..(17)..(18)..(19)..(20): Xaa is A or G
  MOD_RES (21)..(22)..(23)..(24): Xaa is A or G or is absent

SEQ ID NO: 42039 - protein, 33 aa, Artificial Sequence; identical to SEQ ID NO: 27048
  GFR-binding peptide
  MOD_RES (2)..(2): Xaa is C or S

SEQ ID NO: 42040 - protein, 43 aa, Artificial Sequence; identical to SEQ ID NO: 27050
  GFR-binding peptide
  MOD_RES (1)..(3)..(37)..(38): Xaa is C or S
  MOD_RES (15)..(16)..(17)..(18)..(19): Xaa is A or G
  MOD_RES (20)..(21)..(22)..(23): Xaa is A or G or is absent

SEQ ID NO: 42041 - protein, 40 aa, Artificial Sequence; identical to SEQ ID NO: 26047
  GFR-binding peptide
  MOD_RES (1)..(3)..(37)..(38): Xaa is C or S
  MOD_RES (15)..(16)..(17)..(18)..(19): Xaa is A or G
  MOD_RES (20)..(21)..(22)..(23): Xaa is A or G or is absent

SEQ ID NO: 42042 - protein, 40 aa, Artificial Sequence; identical to SEQ ID NO: 25057
  GFR-binding peptide
  MOD_RES (1)..(35)..(36): Xaa is C or S
  MOD_RES (13)..(14)..(15)..(16)..(17): Xaa is A or G
  MOD_RES (18)..(19)..(20)..(21): Xaa is A or G or is absent

SEQ ID NO: 42043 - protein, 35 aa, Artificial Sequence
  GFR-binding peptide
  MOD_RES (1)..(35): Xaa is C or S
  MOD_RES (13)..(14)..(15)..(16)..(17): Xaa is A or G
  MOD_RES (18)..(19)..(20)..(21): Xaa is A or G or is absent
XRDVVMGEYQKYXXXXXXXXXIYLMSIPSMKTPTX

SEQ ID NO: 42044 - protein, 38 aa, Artificial Sequence; identical to SEQ ID NO: 25059
  GFR-binding peptide
  MOD_RES (2)..(34)..(35): Xaa is C or S

SEQ ID NO: 42045 - protein, 40 aa, Artificial Sequence; identical to SEQ ID NO: 25060
  GFR-binding peptide
  MOD_RES (1)..(36)..(37): Xaa is C or S
  MOD_RES (14)..(15)..(16)..(17)..(18): Xaa is A or G
  MOD_RES (19)..(20)..(21)..(22): Xaa is A or G or is absent

SEQ ID NO: 42046 - protein, 39 aa, Artificial Sequence; identical to SEQ ID NO: 24018
  GFR-binding peptide
  MOD_RES (1)..(33): Xaa is C or S

SEQ ID NO: 42047 - protein, 34 aa, Artificial Sequence; identical to SEQ ID NO: 26051
  GFR-binding peptide
  MOD_RES (1)..(33)..(34): Xaa is C or S

SEQ ID NO: 42048 - protein, 39 aa, Artificial Sequence
  GFR-binding peptide
  MOD_RES (1)..(34)..(35): Xaa is C or S
  MOD_RES (12)..(13)..(14)..(15)..(16): Xaa is A or G
  MOD_RES (17)..(18)..(19)..(20): Xaa is A or G or is absent
XEEVIMEYQKYXXXXXXXXXIYLMSIPSTKVPAXXTSPV

SEQ ID NO: 42049 - protein, 39 aa, Artificial Sequence; identical to SEQ ID NO: 24019
  GFR-binding peptide
  MOD_RES (34)..(35): Xaa is C or S
  MOD_RES (12)..(13)..(14)..(15)..(16): Xaa is A or G
  MOD_RES (17)..(18)..(19)..(20): Xaa is A or G or is absent

SEQ ID NO: 42050 - protein, 33 aa, Artificial Sequence; identical to SEQ ID NO: 26054
  GFR-binding peptide
  MOD_RES (31)..(32): Xaa is C or S

SEQ ID NO: 42051 - protein, 36 aa, Artificial Sequence; identical to SEQ ID NO: 25064
  GFR-binding peptide
  MOD_RES (32)..(33): Xaa is C or S

SEQ ID NO: 42052 - protein, 34 aa, Artificial Sequence; identical to SEQ ID NO: 27058
  GFR-binding peptide
  MOD_RES (2)..(34): Xaa is C or S

SEQ ID NO: 42053 - protein, 42 aa, Artificial Sequence; identical to SEQ ID NO: 25066
  GFR-binding peptide
  MOD_RES (1)..(3)..(37)..(38): Xaa is C or S
  MOD_RES (15)..(16)..(17)..(18)..(19): Xaa is A or G
  MOD_RES (20)..(21)..(22)..(23): Xaa is A or G or is absent

SEQ ID NO: 42054 - protein, 36 aa, Artificial Sequence; identical to SEQ ID NO: 27061
  GFR-binding peptide
  MOD_RES (34)..(35): Xaa is C or S
  MOD_RES (12)..(13)..(14)..(15)..(16): Xaa is A or G
  MOD_RES (17)..(18)..(19)..(20): Xaa is A or G or is absent

SEQ ID NO: 42055 - protein, 33 aa, Artificial Sequence; identical to SEQ ID NO: 26060
  GFR-binding peptide
  MOD_RES (31)..(32): Xaa is C or S

SEQ ID NO: 42056 - protein, 39 aa, Artificial Sequence; identical to SEQ ID NO: 26061
  GFR-binding peptide
  MOD_RES (2)..(36)..(37): Xaa is C or S
  MOD_RES (14)..(15)..(16)..(17)..(18): Xaa is A or G
  MOD_RES (19)..(20)..(21)..(22): Xaa is A or G or is absent

SEQ ID NO: 42057 - protein, 38 aa, Artificial Sequence; identical to SEQ ID NO: 24026
  GFR-binding peptide
  MOD_RES (1)..(3)..(37): Xaa is C or S
  MOD_RES (15)..(16)..(17)..(18)..(19): Xaa is A or G
  MOD_RES (20)..(21)..(22)..(23): Xaa is A or G or is absent

SEQ ID NO: 42058 - protein, 37 aa, Artificial Sequence; identical to SEQ ID NO: 25071
  GFR-binding peptide
  MOD_RES (1)..(33)..(34): Xaa is C or S

SEQ ID NO: 42059 - protein, 37 aa, Artificial Sequence; identical to SEQ ID NO: 26064
  GFR-binding peptide
  MOD_RES (1)..(3)..(35)..(36): Xaa is C or S

SEQ ID NO: 42060 - protein, 37 aa, Artificial Sequence; identical to SEQ ID NO: 25077
  GFR-binding peptide
  MOD_RES (33)..(34): Xaa is C or S
  MOD_RES (11)..(12)..(13)..(14)..(15): Xaa is A or G
  MOD_RES (16)..(17)..(18)..(19): Xaa is A or G or is absent

SEQ ID NO: 42061 - protein, 36 aa, Artificial Sequence; identical to SEQ ID NO: 24030
  GFR-binding peptide
  MOD_RES (2)..(4)..(36): Xaa is C or S

SEQ ID NO: 42062 - protein, 39 aa, Artificial Sequence; identical to SEQ ID NO: 25081
  GFR-binding peptide
  MOD_RES (33)..(34): Xaa is C or S
  MOD_RES (11)..(12)..(13)..(14)..(15): Xaa is A or G
  MOD_RES (16)..(17)..(18)..(19): Xaa is A or G or is absent

SEQ ID NO: 42063 - protein, 32 aa, Artificial Sequence; identical to SEQ ID NO: 24034
  GFR-binding peptide
  MOD_RES (32)..(32): Xaa is C or S

SEQ ID NO: 42064 - protein, 36 aa, Artificial Sequence; identical to SEQ ID NO: 27073
  GFR-binding peptide
  MOD_RES (1)..(35)..(36): Xaa is C or S
  MOD_RES (13)..(14)..(15)..(16)..(17): Xaa is A or G
  MOD_RES (18)..(19)..(20)..(21): Xaa is A or G or is absent

SEQ ID NO: 42065 - protein, 37 aa, Artificial Sequence; identical to SEQ ID NO: 27074
  GFR-binding peptide
  MOD_RES (33)..(34): Xaa is C or S
  MOD_RES (11)..(12)..(13)..(14)..(15): Xaa is A or G
  MOD_RES (16)..(17)..(18)..(19): Xaa is A or G or is absent

SEQ ID NO: 42066 - protein, 33 aa, Artificial Sequence; identical to SEQ ID NO: 27076
  GFR-binding peptide
  MOD_RES (1)..(33): Xaa is C or S

SEQ ID NO: 42067 - protein, 37 aa, Artificial Sequence
  GFR-binding peptide
  MOD_RES (31)..(32): Xaa is C or S
RVVMNEYQKYIVNSSDDIYLVSIPSLKTPAXXPKPVH

SEQ ID NO: 42068 - protein, 40 aa, Artificial Sequence
  GFR-binding peptide
  MOD_RES (2)..(4)..(37)..(38): Xaa is C or S
  MOD_RES (15)..(16)..(17)..(18)..(19): Xaa is A or G
  MOD_RES (20)..(21)..(22)..(23): Xaa is A or G or is absent
LXGXEEVIMEYQKYXXXXXXXXXIYLMSIPSTKVPAXXTS

SEQ ID NO: 42069 - protein, 35 aa, Artificial Sequence
  GFR-binding peptide
  MOD_RES (33)..(34): Xaa is C or S
  MOD_RES (11)..(12)..(13)..(14)..(15): Xaa is A or G
  MOD_RES (16)..(17)..(18)..(19): Xaa is A or G or is absent
EEVIMEYQKYXXXXXXXXXIYLMSIPSTKVPAXXT

SEQ ID NO: 42070 - protein, 32 aa, Artificial Sequence; identical to SEQ ID NO: 24043
  GFR-binding peptide
  MOD_RES (32)..(32): Xaa is C or S

SEQ ID NO: 42071 - protein, 35 aa, Artificial Sequence; identical to SEQ ID NO: 26078
  GFR-binding peptide
  MOD_RES (1)..(3)..(35): Xaa is C or S

SEQ ID NO: 42072 - protein, 43 aa, Artificial Sequence; identical to SEQ ID NO: 26079
  GFR-binding peptide
  MOD_RES (2)..(4)..(38)..(39): Xaa is C or S
  MOD_RES (16)..(17)..(18)..(19)..(20): Xaa is A or G
  MOD_RES (21)..(22)..(23)..(24): Xaa is A or G or is absent

SEQ ID NO: 42073 - protein, 40 aa, Artificial Sequence
  GFR-binding peptide
  MOD_RES (34)..(35): Xaa is C or S
  MOD_RES (12)..(13)..(14)..(15)..(16): Xaa is A or G
  MOD_RES (17)..(18)..(19)..(20): Xaa is A or G or is absent
SRVVMNEYQKYXXXXXXXXXIYLVSIPSLKTPAXXPKPVH

SEQ ID NO: 42074 - protein, 41 aa, Artificial Sequence
  GFR-binding peptide
  MOD_RES (2)..(36)..(37): Xaa is C or S
  MOD_RES (14)..(15)..(16)..(17)..(18): Xaa is A or G
  MOD_RES (19)..(20)..(21)..(22): Xaa is A or G or is absent
GXRDVVMGEYQKYXXXXXXXXXIYLMSIPSMKTPTXXPGAS

SEQ ID NO: 42075 - protein, 33 aa, Artificial Sequence; identical to SEQ ID NO: 24051
  GFR-binding peptide
  MOD_RES (32)..(33): Xaa is C or S

SEQ ID NO: 42076 - protein, 37 aa, Artificial Sequence; identical to SEQ ID NO: 24052
  GFR-binding peptide
  MOD_RES (1)..(33)..(34): Xaa is C or S

SEQ ID NO: 42077 - protein, 39 aa, Artificial Sequence
  GFR-binding peptide
  MOD_RES (1)..(33)..(34): Xaa is C or S
XRDVVMGEYQKYIIQQKDNIYLMSIPSMKTPTXXPGASG

SEQ ID NO: 42078 - protein, 39 aa, Artificial Sequence; identical to SEQ ID NO: 24053
  GFR-binding peptide
  MOD_RES (1)..(35)..(36): Xaa is C or S
  MOD_RES (13)..(14)..(15)..(16)..(17): Xaa is A or G
  MOD_RES (18)..(19)..(20)..(21): Xaa is A or G or is absent

SEQ ID NO: 42079 - protein, 37 aa, Artificial Sequence; identical to SEQ ID NO: 24057
  GFR-binding peptide
  MOD_RES (2)..(4)..(36)..(37): Xaa is C or S

SEQ ID NO: 42080 - protein, 34 aa, Artificial Sequence; identical to SEQ ID NO: 27095
  GFR-binding peptide
  MOD_RES (34)..(34): Xaa is C or S
  MOD_RES (12)..(13)..(14)..(15)..(16): Xaa is A or G
  MOD_RES (17)..(18)..(19)..(20): Xaa is A or G or is absent

SEQ ID NO: 42081 - protein, 36 aa, Artificial Sequence; identical to SEQ ID NO: 26083
  GFR-binding peptide
  MOD_RES (32)..(33): Xaa is C or S

SEQ ID NO: 42082 - protein, 34 aa, Artificial Sequence; identical to SEQ ID NO: 25093
  GFR-binding peptide
  MOD_RES (34)..(34): Xaa is C or S
  MOD_RES (12)..(13)..(14)..(15)..(16): Xaa is A or G
  MOD_RES (17)..(18)..(19)..(20): Xaa is A or G or is absent

SEQ ID NO: 42083 - protein, 40 aa, Artificial Sequence; identical to SEQ ID NO: 27100
  GFR-binding peptide
  MOD_RES (1)..(3)..(37)..(38): Xaa is C or S
  MOD_RES (15)..(16)..(17)..(18)..(19): Xaa is A or G
  MOD_RES (20)..(21)..(22)..(23): Xaa is A or G or is absent

SEQ ID NO: 42084 - protein, 34 aa, Artificial Sequence; identical to SEQ ID NO: 27101
  GFR-binding peptide
  MOD_RES (1)..(34): Xaa is C or S

SEQ ID NO: 42085 - protein, 36 aa, Artificial Sequence; identical to SEQ ID NO: 24063
  GFR-binding peptide
  MOD_RES (2)..(34)..(35): Xaa is C or S

SEQ ID NO: 42086 - protein, 32 aa, Artificial Sequence; identical to SEQ ID NO: 26091
  GFR-binding peptide
  MOD_RES (32)..(32): Xaa is C or S

SEQ ID NO: 42087 - protein, 42 aa, Artificial Sequence; identical to SEQ ID NO: 24068
  GFR-binding peptide
  MOD_RES (2)..(4)..(38)..(39): Xaa is C or S
  MOD_RES (16)..(17)..(18)..(19)..(20): Xaa is A or G
  MOD_RES (21)..(22)..(23)..(24): Xaa is A or G or is absent

SEQ ID NO: 42088 - protein, 41 aa, Artificial Sequence; identical to SEQ ID NO: 26092
  GFR-binding peptide
  MOD_RES (1)..(3)..(37): Xaa is C or S
  MOD_RES (15)..(16)..(17)..(18)..(19): Xaa is A or G
  MOD_RES (20)..(21)..(22)..(23): Xaa is A or G or is absent

SEQ ID NO: 42089 - protein, 40 aa, Artificial Sequence; identical to SEQ ID NO: 24070
  GFR-binding peptide
  MOD_RES (2)..(4)..(36)..(37): Xaa is C or S

SEQ ID NO: 42090 - protein, 33 aa, Artificial Sequence; identical to SEQ ID NO: 27107
  GFR-binding peptide
  MOD_RES (31)..(32): Xaa is C or S

SEQ ID NO: 42091 - protein, 39 aa, Artificial Sequence; identical to SEQ ID NO: 25100
  GFR-binding peptide
  MOD_RES (2)..(34)..(35): Xaa is C or S

SEQ ID NO: 42092 - protein, 40 aa, Artificial Sequence; identical to SEQ ID NO: 25102
  GFR-binding peptide
  MOD_RES (1)..(3)..(37)..(38): Xaa is C or S
  MOD_RES (15)..(16)..(17)..(18)..(19): Xaa is A or G
  MOD_RES (20)..(21)..(22)..(23): Xaa is A or G or is absent

SEQ ID NO: 42093 - protein, 32 aa, Artificial Sequence; identical to SEQ ID NO: 27111
  GFR-binding peptide
  MOD_RES (1)..(1): Xaa is C or S

SEQ ID NO: 42094 - protein, 38 aa, Artificial Sequence; identical to SEQ ID NO: 24076
  GFR-binding peptide
  MOD_RES (2)..(35)..(36): Xaa is C or S

SEQ ID NO: 42095 - protein, 38 aa, Artificial Sequence; identical to SEQ ID NO: 27112
  GFR-binding peptide
  MOD_RES (1)..(33)..(34): Xaa is C or S

SEQ ID NO: 42096 - protein, 32 aa, Artificial Sequence; identical to SEQ ID NO: 26100
  GFR-binding peptide
  MOD_RES (1)..(1): Xaa is C or S

SEQ ID NO: 42097 - protein, 36 aa, Artificial Sequence; identical to SEQ ID NO: 27118
  GFR-binding peptide
  MOD_RES (32)..(33): Xaa is C or S

SEQ ID NO: 42098 - protein, 40 aa, Artificial Sequence; identical to SEQ ID NO: 27120
  GFR-binding peptide
  MOD_RES (1)..(3)..(37)..(38): Xaa is C or S
  MOD_RES (15)..(16)..(17)..(18)..(19): Xaa is A or G
  MOD_RES (20)..(21)..(22)..(23): Xaa is A or G or is absent

SEQ ID NO: 42099 - protein, 41 aa, Artificial Sequence; identical to SEQ ID NO: 26103
  GFR-binding peptide
  MOD_RES (1)..(3)..(35)..(36): Xaa is C or S

SEQ ID NO: 42100 - protein, 33 aa, Artificial Sequence; identical to SEQ ID NO: 27122
  GFR-binding peptide
  MOD_RES (32)..(32): Xaa is C or S

SEQ ID NO: 42101 - protein, 33 aa, Artificial Sequence; identical to SEQ ID NO: 27124
  GFR-binding peptide
  MOD_RES (33)..(33): Xaa is C or S
  MOD_RES (11)..(12)..(13)..(14)..(15): Xaa is A or G
  MOD_RES (16)..(17)..(18)..(19): Xaa is A or G or is absent

SEQ ID NO: 42102 - protein, 38 aa, Artificial Sequence; identical to SEQ ID NO: 27126
  GFR-binding peptide
  MOD_RES (2)..(4)..(38): Xaa is C or S
  MOD_RES (16)..(17)..(18)..(19)..(20): Xaa is A or G
  MOD_RES (21)..(22)..(23)..(24): Xaa is A or G or is absent

SEQ ID NO: 42103 - protein, 35 aa, Artificial Sequence; identical to SEQ ID NO: 24084
  GFR-binding peptide
  MOD_RES (2)..(4): Xaa is C or S

SEQ ID NO: 42104 - protein, 37 aa, Artificial Sequence; identical to SEQ ID NO: 25116
  GFR-binding peptide
  MOD_RES (2)..(4): Xaa is C or S
  MOD_RES (16)..(17)..(18)..(19)..(20): Xaa is A or G
  MOD_RES (21)..(22)..(23)..(24): Xaa is A or G or is absent

SEQ ID NO: 42105 - protein, 34 aa, Artificial Sequence; identical to SEQ ID NO: 26113
  GFR-binding peptide
  MOD_RES (2)..(34): Xaa is C or S

SEQ ID NO: 42106 - protein, 40 aa, Artificial Sequence
  GFR-binding peptide
  MOD_RES (34)..(35): Xaa is C or S
  MOD_RES (12)..(13)..(14)..(15)..(16): Xaa is A or G
  MOD_RES (17)..(18)..(19)..(20): Xaa is A or G or is absent
RDVVMGEYQKYXXXXXXXXXIYLMSIPSMKTPTXXPGASG

SEQ ID NO: 42107 - protein, 32 aa, Artificial Sequence
  GFR-binding peptide
  MOD_RES (32)..(32): Xaa is C or S
RDVVMGEYQKYIIQQKDNIYLMSIPSMKTPTX

SEQ ID NO: 42108 - protein, 33 aa, Artificial Sequence; identical to SEQ ID NO: 27139
  GFR-binding peptide
  MOD_RES (32)..(33): Xaa is C or S

SEQ ID NO: 42109 - protein, 38 aa, Artificial Sequence; identical to SEQ ID NO: 26115
  GFR-binding peptide
  MOD_RES (34)..(35): Xaa is C or S
  MOD_RES (12)..(13)..(14)..(15)..(16): Xaa is A or G
  MOD_RES (17)..(18)..(19)..(20): Xaa is A or G or is absent

SEQ ID NO: 42110 - protein, 40 aa, Artificial Sequence; identical to SEQ ID NO: 24092
  GFR-binding peptide
  MOD_RES (2)..(34)..(35): Xaa is C or S

SEQ ID NO: 42111 - protein, 36 aa, Artificial Sequence; identical to SEQ ID NO: 24093
  GFR-binding peptide
  MOD_RES (1)..(35)..(36): Xaa is C or S
  MOD_RES (13)..(14)..(15)..(16)..(17): Xaa is A or G
  MOD_RES (18)..(19)..(20)..(21): Xaa is A or G or is absent

SEQ ID NO: 42112 - protein, 39 aa, Artificial Sequence; identical to SEQ ID NO: 26118
  GFR-binding peptide
  MOD_RES (1)..(3)..(35)..(36): Xaa is C or S

SEQ ID NO: 42113 - protein, 38 aa, Artificial Sequence; identical to SEQ ID NO: 26121
  GFR-binding peptide
  MOD_RES (34)..(34): Xaa is C or S
  MOD_RES (12)..(13)..(14)..(15)..(16): Xaa is A or G
  MOD_RES (17)..(18)..(19)..(20): Xaa is A or G or is absent

SEQ ID NO: 42114 - protein, 38 aa, Artificial Sequence; identical to SEQ ID NO: 24095
  GFR-binding peptide
  MOD_RES (2)..(4)..(36)..(37): Xaa is C or S

SEQ ID NO: 42115 - protein, 34 aa, Artificial Sequence; identical to SEQ ID NO: 25125
  GFR-binding peptide
  MOD_RES (33)..(34): Xaa is C or S
  MOD_RES (11)..(12)..(13)..(14)..(15): Xaa is A or G
  MOD_RES (16)..(17)..(18)..(19): Xaa is A or G or is absent

SEQ ID NO: 42116 - protein, 36 aa, Artificial Sequence; identical to SEQ ID NO: 26123
  GFR-binding peptide
  MOD_RES (2)..(4)..(36): Xaa is C or S

SEQ ID NO: 42117 - protein, 34 aa, Artificial Sequence; identical to SEQ ID NO: 26125
  GFR-binding peptide
  MOD_RES (2)..(34): Xaa is C or S

SEQ ID NO: 42118 - protein, 38 aa, Artificial Sequence; identical to SEQ ID NO: 24104
  GFR-binding peptide
  MOD_RES (32)..(33): Xaa is C or S

SEQ ID NO: 42119 - protein, 43 aa, Artificial Sequence; identical to SEQ ID NO: 27148
  GFR-binding peptide
  MOD_RES (1)..(3)..(37): Xaa is C or S
  MOD_RES (15)..(16)..(17)..(18)..(19): Xaa is A or G
  MOD_RES (20)..(21)..(22)..(23): Xaa is A or G or is absent

SEQ ID NO: 42120 - protein, 39 aa, Artificial Sequence; identical to SEQ ID NO: 25132
  GFR-binding peptide
  MOD_RES (1)..(35)..(36): Xaa is C or S
  MOD_RES (13)..(14)..(15)..(16)..(17): Xaa is A or G
  MOD_RES (18)..(19)..(20)..(21): Xaa is A or G or is absent

SEQ ID NO: 42121 - protein, 30 aa, Artificial Sequence; identical to SEQ ID NO: 26127
  GFR-binding peptide

SEQ ID NO: 42122 - protein, 40 aa, Artificial Sequence; identical to SEQ ID NO: 25133
  GFR-binding peptide
  MOD_RES (2)..(4)..(37)..(38): Xaa is C or S

SEQ ID NO: 42123 - protein, 37 aa, Artificial Sequence; identical to SEQ ID NO: 27152
  GFR-binding peptide
  MOD_RES (2)..(34): Xaa is C or S

SEQ ID NO: 42124 - protein, 37 aa, Artificial Sequence; identical to SEQ ID NO: 24106
  GFR-binding peptide
  MOD_RES (2)..(36)..(37): Xaa is C or S
  MOD_RES (14)..(15)..(16)..(17)..(18): Xaa is A or G
  MOD_RES (19)..(20)..(21)..(22): Xaa is A or G or is absent

SEQ ID NO: 42125 - protein, 40 aa, Artificial Sequence; identical to SEQ ID NO: 24108
  GFR-binding peptide
  MOD_RES (2)..(36)..(37): Xaa is C or S
  MOD_RES (14)..(15)..(16)..(17)..(18): Xaa is A or G
  MOD_RES (19)..(20)..(21)..(22): Xaa is A or G or is absent

SEQ ID NO: 42126 - protein, 36 aa, Artificial Sequence; identical to SEQ ID NO: 27156
  GFR-binding peptide
  MOD_RES (2)..(34)..(35): Xaa is C or S

SEQ ID NO: 42127 - protein, 32 aa, Artificial Sequence; identical to SEQ ID NO: 26132
  GFR-binding peptide
  MOD_RES (31)..(31): Xaa is C or S

SEQ ID NO: 42128 - protein, 43 aa, Artificial Sequence
  GFR-binding peptide
  MOD_RES (1)..(3)..(37)..(38): Xaa is C or S
  MOD_RES (15)..(16)..(17)..(18)..(19): Xaa is A or G
  MOD_RES (20)..(21)..(22)..(23): Xaa is A or G or is absent
XGXSRVVMNEYQKYXXXXXXXXXIYLVSIPSLKTPAXXPKPVH

SEQ ID NO: 42129 - protein, 36 aa, Artificial Sequence; identical to SEQ ID NO: 25141
  GFR-binding peptide
  MOD_RES (1)..(3)..(36): Xaa is C or S

SEQ ID NO: 42130 - protein, 41 aa, Artificial Sequence; identical to SEQ ID NO: 27162
  GFR-binding peptide
  MOD_RES (35)..(36): Xaa is C or S
  MOD_RES (13)..(14)..(15)..(16)..(17): Xaa is A or G
  MOD_RES (18)..(19)..(20)..(21): Xaa is A or G or is absent

SEQ ID NO: 42131 - protein, 35 aa, Artificial Sequence; identical to SEQ ID NO: 27163
  GFR-binding peptide
  MOD_RES (1)..(35): Xaa is C or S
  MOD_RES (13)..(14)..(15)..(16)..(17): Xaa is A or G
  MOD_RES (18)..(19)..(20)..(21): Xaa is A or G or is absent

SEQ ID NO: 42132 - protein, 39 aa, Artificial Sequence; identical to SEQ ID NO: 25145
  GFR-binding peptide
  MOD_RES (2)..(4)..(38): Xaa is C or S
  MOD_RES (16)..(17)..(18)..(19)..(20): Xaa is A or G
  MOD_RES (21)..(22)..(23)..(24): Xaa is A or G or is absent

SEQ ID NO: 42133 - protein, 38 aa, Artificial Sequence; identical to SEQ ID NO: 26138
  GFR-binding peptide
  MOD_RES (32)..(33): Xaa is C or S

SEQ ID NO: 42134 - protein, 38 aa, Artificial Sequence; identical to SEQ ID NO: 26141
  GFR-binding peptide
  MOD_RES (1)..(35)..(36): Xaa is C or S
  MOD_RES (13)..(14)..(15)..(16)..(17): Xaa is A or G
  MOD_RES (18)..(19)..(20)..(21): Xaa is A or G or is absent

SEQ ID NO: 42135 - protein, 36 aa, Artificial Sequence; identical to SEQ ID NO: 27166
  GFR-binding peptide
  MOD_RES (2)..(2): Xaa is C or S
  MOD_RES (15)..(16)..(17)..(18)..(19): Xaa is A or G
  MOD_RES (20)..(21)..(22)..(23): Xaa is A or G or is absent

SEQ ID NO: 42136 - protein, 36 aa, Artificial Sequence; identical to SEQ ID NO: 27167
  GFR-binding peptide
  MOD_RES (1)..(33): Xaa is C or S

SEQ ID NO: 42137 - protein, 39 aa, Artificial Sequence; identical to SEQ ID NO: 27168
  GFR-binding peptide
  MOD_RES (1)..(3)..(35)..(36): Xaa is C or S

SEQ ID NO: 42138 - protein, 38 aa, Artificial Sequence
  GFR-binding peptide
  MOD_RES (2)..(36)..(37): Xaa is C or S
  MOD_RES (14)..(15)..(16)..(17)..(18): Xaa is A or G
  MOD_RES (19)..(20)..(21)..(22): Xaa is A or G or is absent
GXRDVVMGEYQKYXXXXXXXXXIYLMSIPSMKTPTXXP

SEQ ID NO: 42139 - protein, 35 aa, Artificial Sequence; identical to SEQ ID NO: 24125
  GFR-binding peptide
  MOD_RES (2)..(2): Xaa is C or S
  MOD_RES (14)..(15)..(16)..(17)..(18): Xaa is A or G
  MOD_RES (19)..(20)..(21)..(22): Xaa is A or G or is absent

SEQ ID NO: 42140 - protein, 39 aa, Artificial Sequence; identical to SEQ ID NO: 27170
  GFR-binding peptide
  MOD_RES (1)..(33)..(34): Xaa is C or S

SEQ ID NO: 42141 - protein, 38 aa, Artificial Sequence; identical to SEQ ID NO: 24128
  GFR-binding peptide
  MOD_RES (2)..(4)..(36)..(37): Xaa is C or S

SEQ ID NO: 42142 - protein, 33 aa, Artificial Sequence
  GFR-binding peptide
  MOD_RES (2)..(33): Xaa is C or S
GXEEVIMEYQKYLLVRGNDIYLMSIPSTKVPAX

SEQ ID NO: 42143 - protein, 34 aa, Artificial Sequence
  GFR-binding peptide
  MOD_RES (1)..(1): Xaa is C or S
  MOD_RES (13)..(14)..(15)..(16)..(17): Xaa is A or G
  MOD_RES (18)..(19)..(20)..(21): Xaa is A or G or is absent
XRDVVMGEYQKYXXXXXXXXXIYLMSIPSMKTPT

SEQ ID NO: 42144 - protein, 33 aa, Artificial Sequence; identical to SEQ ID NO: 26153
  GFR-binding peptide
  MOD_RES (33)..(33): Xaa is C or S
  MOD_RES (11)..(12)..(13)..(14)..(15): Xaa is A or G
  MOD_RES (16)..(17)..(18)..(19): Xaa is A or G or is absent

SEQ ID NO: 42145 - protein, 34 aa, Artificial Sequence; identical to SEQ ID NO: 25158
  GFR-binding peptide
  MOD_RES (32)..(32): Xaa is C or S

SEQ ID NO: 42146 - protein, 38 aa, Artificial Sequence
  GFR-binding peptide
  MOD_RES (1)..(3)..(37)..(38): Xaa is C or S
  MOD_RES (15)..(16)..(17)..(18)..(19): Xaa is A or G
  MOD_RES (20)..(21)..(22)..(23): Xaa is A or G or is absent
XGXRDVVMGEYQKYXXXXXXXXXIYLMSIPSMKTPTXX

SEQ ID NO: 42147 - protein, 36 aa, Artificial Sequence; identical to SEQ ID NO: 26156
  GFR-binding peptide
  MOD_RES (1)..(35): Xaa is C or S
  MOD_RES (13)..(14)..(15)..(16)..(17): Xaa is A or G
  MOD_RES (18)..(19)..(20)..(21): Xaa is A or G or is absent

SEQ ID NO: 42148 - protein, 45 aa, Artificial Sequence; identical to SEQ ID NO: 24131
  GFR-binding peptide
  MOD_RES (2)..(4)..(39)..(40): Xaa is C or S
  MOD_RES (17)..(18)..(19)..(20)..(21): Xaa is A or G
  MOD_RES (22)..(23)..(24)..(25): Xaa is A or G or is absent

SEQ ID NO: 42149 - protein, 40 aa, Artificial Sequence; identical to SEQ ID NO: 24133
  GFR-binding peptide
  MOD_RES (2)..(35)..(36): Xaa is C or S

SEQ ID NO: 42150 - protein, 41 aa, Artificial Sequence; identical to SEQ ID NO: 24135
  GFR-binding peptide
  MOD_RES (1)..(3)..(37)..(38): Xaa is C or S
  MOD_RES (15)..(16)..(17)..(18)..(19): Xaa is A or G
  MOD_RES (20)..(21)..(22)..(23): Xaa is A or G or is absent

SEQ ID NO: 42151 - protein, 34 aa, Artificial Sequence; identical to SEQ ID NO: 26159
  GFR-binding peptide
  MOD_RES (2)..(34): Xaa is C or S

SEQ ID NO: 42152 - protein, 35 aa, Artificial Sequence; identical to SEQ ID NO: 27182
  GFR-binding peptide
  MOD_RES (34)..(34): Xaa is C or S
  MOD_RES (12)..(13)..(14)..(15)..(16): Xaa is A or G
  MOD_RES (17)..(18)..(19)..(20): Xaa is A or G or is absent

SEQ ID NO: 42153 - protein, 35 aa, Artificial Sequence; identical to SEQ ID NO: 27183
  GFR-binding peptide
  MOD_RES (1)..(3): Xaa is C or S

SEQ ID NO: 42154 - protein, 35 aa, Artificial Sequence; identical to SEQ ID NO: 25162
  GFR-binding peptide
  MOD_RES (31)..(32): Xaa is C or S

SEQ ID NO: 42155 - protein, 42 aa, Artificial Sequence; identical to SEQ ID NO: 26164
  GFR-binding peptide
  MOD_RES (2)..(36)..(37): Xaa is C or S
  MOD_RES (14)..(15)..(16)..(17)..(18): Xaa is A or G
  MOD_RES (19)..(20)..(21)..(22): Xaa is A or G or is absent

SEQ ID NO: 42156 - protein, 40 aa, Artificial Sequence; identical to SEQ ID NO: 26165
  GFR-binding peptide
  MOD_RES (1)..(35)..(36): Xaa is C or S
  MOD_RES (13)..(14)..(15)..(16)..(17): Xaa is A or G
  MOD_RES (18)..(19)..(20)..(21): Xaa is A or G or is absent

SEQ ID NO: 42157 - protein, 38 aa, Artificial Sequence; identical to SEQ ID NO: 26166
  GFR-binding peptide
  MOD_RES (34)..(35): Xaa is C or S
  MOD_RES (12)..(13)..(14)..(15)..(16): Xaa is A or G
  MOD_RES (17)..(18)..(19)..(20): Xaa is A or G or is absent

SEQ ID NO: 42158 - protein, 34 aa, Artificial Sequence; identical to SEQ ID NO: 27186
  GFR-binding peptide
  MOD_RES (1)..(1): Xaa is C or S
  MOD_RES (13)..(14)..(15)..(16)..(17): Xaa is A or G
  MOD_RES (18)..(19)..(20)..(21): Xaa is A or G or is absent

SEQ ID NO: 42159 - protein, 42 aa, Artificial Sequence; identical to SEQ ID NO: 26169
  GFR-binding peptide
  MOD_RES (2)..(4)..(36)..(37): Xaa is C or S

SEQ ID NO: 42160 - protein, 38 aa, Artificial Sequence; identical to SEQ ID NO: 24139
  GFR-binding peptide
  MOD_RES (2)..(34)..(35): Xaa is C or S

SEQ ID NO: 42161 - protein, 39 aa, Artificial Sequence; identical to SEQ ID NO: 27190
  GFR-binding peptide
  MOD_RES (1)..(33)..(34): Xaa is C or S

SEQ ID NO: 42162 - protein, 33 aa, Artificial Sequence; identical to SEQ ID NO: 26171
  GFR-binding peptide
  MOD_RES (31)..(32): Xaa is C or S

SEQ ID NO: 42163 - protein, 39 aa, Artificial Sequence; identical to SEQ ID NO: 27191
  GFR-binding peptide
  MOD_RES (1)..(3)..(37)..(38): Xaa is C or S
  MOD_RES (15)..(16)..(17)..(18)..(19): Xaa is A or G
  MOD_RES (20)..(21)..(22)..(23): Xaa is A or G or is absent

SEQ ID NO: 42164 - protein, 36 aa, Artificial Sequence; identical to SEQ ID NO: 27192
  GFR-binding peptide
  MOD_RES (2)..(34)..(35): Xaa is C or S

SEQ ID NO: 42165 - protein, 38 aa, Artificial Sequence
  GFR-binding peptide
  MOD_RES (32)..(33): Xaa is C or S
RDVVMGEYQKYIIQQKDNIYLMSIPSMKTPTXXPGASG

SEQ ID NO: 42166 - protein, 35 aa, Artificial Sequence; identical to SEQ ID NO: 26176
  GFR-binding peptide
  MOD_RES (31)..(32): Xaa is C or S

SEQ ID NO: 42167 - protein, 35 aa, Artificial Sequence
  GFR-binding peptide
  MOD_RES (2)..(2): Xaa is C or S
  MOD_RES (14)..(15)..(16)..(17)..(18): Xaa is A or G
  MOD_RES (19)..(20)..(21)..(22): Xaa is A or G or is absent
GXRDVVMGEYQKYXXXXXXXXXIYLMSIPSMKTPT

SEQ ID NO: 42168 - protein, 44 aa, Artificial Sequence; identical to SEQ ID NO: 25173
  GFR-binding peptide
  MOD_RES (2)..(4)..(38)..(39): Xaa is C or S
  MOD_RES (16)..(17)..(18)..(19)..(20): Xaa is A or G
  MOD_RES (21)..(22)..(23)..(24): Xaa is A or G or is absent

SEQ ID NO: 42169 - protein, 39 aa, Artificial Sequence; identical to SEQ ID NO: 26179
  GFR-binding peptide
  MOD_RES (2)..(4)..(38)..(39): Xaa is C or S
  MOD_RES (16)..(17)..(18)..(19)..(20): Xaa is A or G
  MOD_RES (21)..(22)..(23)..(24): Xaa is A or G or is absent

SEQ ID NO: 42170 - protein, 44 aa, Artificial Sequence; identical to SEQ ID NO: 25174
  GFR-binding peptide
  MOD_RES (2)..(4)..(38)..(39): Xaa is C or S
  MOD_RES (16)..(17)..(18)..(19)..(20): Xaa is A or G
  MOD_RES (21)..(22)..(23)..(24): Xaa is A or G or is absent

SEQ ID NO: 42171 - protein, 37 aa, Artificial Sequence; identical to SEQ ID NO: 24143
  GFR-binding peptide
  MOD_RES (2)..(4): Xaa is C or S
  MOD_RES (16)..(17)..(18)..(19)..(20): Xaa is A or G
  MOD_RES (21)..(22)..(23)..(24): Xaa is A or G or is absent

SEQ ID NO: 42172 - protein, 37 aa, Artificial Sequence; identical to SEQ ID NO: 26182
  GFR-binding peptide
  MOD_RES (2)..(36)..(37): Xaa is C or S
  MOD_RES (14)..(15)..(16)..(17)..(18): Xaa is A or G
  MOD_RES (19)..(20)..(21)..(22): Xaa is A or G or is absent

SEQ ID NO: 42173 - protein, 37 aa, Artificial Sequence; identical to SEQ ID NO: 25177
  GFR-binding peptide
  MOD_RES (2)..(37): Xaa is C or S
  MOD_RES (15)..(16)..(17)..(18)..(19): Xaa is A or G
  MOD_RES (20)..(21)..(22)..(23): Xaa is A or G or is absent

SEQ ID NO: 42174 - protein, 35 aa, Artificial Sequence; identical to SEQ ID NO: 26183
  GFR-binding peptide
  MOD_RES (2)..(2): Xaa is C or S
  MOD_RES (14)..(15)..(16)..(17)..(18): Xaa is A or G
  MOD_RES (19)..(20)..(21)..(22): Xaa is A or G or is absent

SEQ ID NO: 42175 - protein, 35 aa, Artificial Sequence; identical to SEQ ID NO: 25180
  GFR-binding peptide
  MOD_RES (34)..(35): Xaa is C or S
  MOD_RES (12)..(13)..(14)..(15)..(16): Xaa is A or G
  MOD_RES (17)..(18)..(19)..(20): Xaa is A or G or is absent

SEQ ID NO: 42176 - protein, 35 aa, Artificial Sequence; identical to SEQ ID NO: 26184
  GFR-binding peptide
  MOD_RES (2)..(4): Xaa is C or S

SEQ ID NO: 42177 - protein, 40 aa, Artificial Sequence; identical to SEQ ID NO: 25181
  GFR-binding peptide
  MOD_RES (2)..(4)..(38)..(39): Xaa is C or S
  MOD_RES (16)..(17)..(18)..(19)..(20): Xaa is A or G
  MOD_RES (21)..(22)..(23)..(24): Xaa is A or G or is absent

SEQ ID NO: 42178 - protein, 33 aa, Artificial Sequence; identical to SEQ ID NO: 26188
  GFR-binding peptide
  MOD_RES (32)..(33): Xaa is C or S

SEQ ID NO: 42179 - protein, 37 aa, Artificial Sequence; identical to SEQ ID NO: 24155
  GFR-binding peptide
  MOD_RES (1)..(3)..(36)..(37): Xaa is C or S

SEQ ID NO: 42180 - protein, 43 aa, Artificial Sequence
  GFR-binding peptide
  MOD_RES (2)..(4)..(38)..(39): Xaa is C or S
  MOD_RES (16)..(17)..(18)..(19)..(20): Xaa is A or G
  MOD_RES (21)..(22)..(23)..(24): Xaa is A or G or is absent
SXGXRDVVMGEYQKYXXXXXXXXXIYLMSIPSMKTPTXXPGAS

SEQ ID NO: 42181 - protein, 35 aa, Artificial Sequence; identical to SEQ ID NO: 27207
  GFR-binding peptide
  MOD_RES (1)..(3)..(35): Xaa is C or S

SEQ ID NO: 42182 - protein, 38 aa, Artificial Sequence; identical to SEQ ID NO: 24158
  GFR-binding peptide
  MOD_RES (2)..(36)..(37): Xaa is C or S
  MOD_RES (14)..(15)..(16)..(17)..(18): Xaa is A or G
  MOD_RES (19)..(20)..(21)..(22): Xaa is A or G or is absent

SEQ ID NO: 42183 - protein, 37 aa, Artificial Sequence; identical to SEQ ID NO: 25186
  GFR-binding peptide
  MOD_RES (1)..(34)..(35): Xaa is C or S

SEQ ID NO: 42184 - protein, 38 aa, Artificial Sequence; identical to SEQ ID NO: 26198
  GFR-binding peptide
  MOD_RES (1)..(33)..(34): Xaa is C or S

SEQ ID NO: 42185 - protein, 35 aa, Artificial Sequence; identical to SEQ ID NO: 24159
  GFR-binding peptide
  MOD_RES (2)..(34)..(35): Xaa is C or S

SEQ ID NO: 42186 - protein, 35 aa, Artificial Sequence
  GFR-binding peptide
  MOD_RES (32)..(33): Xaa is C or S
RDVVMGEYQKYIIQQKDNIYLMSIPSMKTPTXXPG

SEQ ID NO: 42187 - protein, 38 aa, Artificial Sequence
  GFR-binding peptide
  MOD_RES (2)..(4)..(36)..(37): Xaa is C or S
SXGXRDVVMGEYQKYIIQQKDNIYLMSIPSMKTPTXXP

SEQ ID NO: 42188 - protein, 39 aa, Artificial Sequence; identical to SEQ ID NO: 24162
  GFR-binding peptide
  MOD_RES (33)..(34): Xaa is C or S
  MOD_RES (11)..(12)..(13)..(14)..(15): Xaa is A or G
  MOD_RES (16)..(17)..(18)..(19): Xaa is A or G or is absent

SEQ ID NO: 42189 - protein, 35 aa, Artificial Sequence; identical to SEQ ID NO: 25190
  GFR-binding peptide
  MOD_RES (2)..(34)..(35): Xaa is C or S

SEQ ID NO: 42190 - protein, 34 aa, Artificial Sequence; identical to SEQ ID NO: 27212
  GFR-binding peptide
  MOD_RES (1)..(33)..(34): Xaa is C or S

SEQ ID NO: 42191 - protein, 43 aa, Artificial Sequence; identical to SEQ ID NO: 25193
  GFR-binding peptide
  MOD_RES (2)..(4)..(39)..(40): Xaa is C or S
  MOD_RES (17)..(18)..(19)..(20)..(21): Xaa is A or G
  MOD_RES (22)..(23)..(24)..(25): Xaa is A or G or is absent

SEQ ID NO: 42192 - protein, 41 aa, Artificial Sequence; identical to SEQ ID NO: 27214
  GFR-binding peptide
  MOD_RES (2)..(4)..(38)..(39): Xaa is C or S
  MOD_RES (16)..(17)..(18)..(19)..(20): Xaa is A or G
  MOD_RES (21)..(22)..(23)..(24): Xaa is A or G or is absent

SEQ ID NO: 42193 - protein, 41 aa, Artificial Sequence; identical to SEQ ID NO: 26204
  GFR-binding peptide
  MOD_RES (1)..(35)..(36): Xaa is C or S
  MOD_RES (13)..(14)..(15)..(16)..(17): Xaa is A or G
  MOD_RES (18)..(19)..(20)..(21): Xaa is A or G or is absent

SEQ ID NO: 42194 - protein, 35 aa, Artificial Sequence
  GFR-binding peptide
  MOD_RES (34)..(35): Xaa is C or S
  MOD_RES (12)..(13)..(14)..(15)..(16): Xaa is A or G
  MOD_RES (17)..(18)..(19)..(20): Xaa is A or G or is absent
RDVVMGEYQKYXXXXXXXXXIYLMSIPSMKTPTXX

SEQ ID NO: 42195 - protein, 34 aa, Artificial Sequence
  GFR-binding peptide
  MOD_RES (2)..(33)..(34): Xaa is C or S
GXEEVIMEYQKYLLVRGNDIYLMSIPSTKVPAXX

SEQ ID NO: 42196 - protein, 37 aa, Artificial Sequence; identical to SEQ ID NO: 25201
  GFR-binding peptide
  MOD_RES (2)..(4)..(36)..(37): Xaa is C or S

SEQ ID NO: 42197 - protein, 35 aa, Artificial Sequence; identical to SEQ ID NO: 27221
  GFR-binding peptide
  MOD_RES (2)..(4): Xaa is C or S

SEQ ID NO: 42198 - protein, 35 aa, Artificial Sequence; identical to SEQ ID NO: 26211
  GFR-binding peptide
  MOD_RES (1)..(34)..(35): Xaa is C or S

SEQ ID NO: 42199 - protein, 38 aa, Artificial Sequence; identical to SEQ ID NO: 24178
  GFR-binding peptide
  MOD_RES (1)..(33)..(34): Xaa is C or S

SEQ ID NO: 42200 - protein, 39 aa, Artificial Sequence
  GFR-binding peptide
  MOD_RES (2)..(36)..(37): Xaa is C or S
  MOD_RES (14)..(15)..(16)..(17)..(18): Xaa is A or G
  MOD_RES (19)..(20)..(21)..(22): Xaa is A or G or is absent
GXRDVVMGEYQKYXXXXXXXXXIYLMSIPSMKTPTXXPG

SEQ ID NO: 42201 - protein, 38 aa, Artificial Sequence
  GFR-binding peptide
  MOD_RES (2)..(35)..(36): Xaa is C or S
  MOD_RES (13)..(14)..(15)..(16)..(17): Xaa is A or G
  MOD_RES (18)..(19)..(20)..(21): Xaa is A or G or is absent
GXEEVIMEYQKYXXXXXXXXXIYLMSIPSTKVPAXXTS

SEQ ID NO: 42202 - protein, 42 aa, Artificial Sequence; identical to SEQ ID NO: 25217
  GFR-binding peptide
  MOD_RES (2)..(4)..(36)..(37): Xaa is C or S

SEQ ID NO: 42203 - protein, 33 aa, Artificial Sequence; identical to SEQ ID NO: 24186
  GFR-binding peptide
  MOD_RES (1)..(33): Xaa is C or S

SEQ ID NO: 42204 - protein, 40 aa, Artificial Sequence; identical to SEQ ID NO: 26229
  GFR-binding peptide
  MOD_RES (34)..(35): Xaa is C or S
  MOD_RES (12)..(13)..(14)..(15)..(16): Xaa is A or G
  MOD_RES (17)..(18)..(19)..(20): Xaa is A or G or is absent

SEQ ID NO: 42205 - protein, 39 aa, Artificial Sequence; identical to SEQ ID NO: 24193
  GFR-binding peptide
  MOD_RES (1)..(3)..(35)..(36): Xaa is C or S

SEQ ID NO: 42206 - protein, 37 aa, Artificial Sequence; identical to SEQ ID NO: 26230
  GFR-binding peptide
  MOD_RES (2)..(4): Xaa is C or S
  MOD_RES (16)..(17)..(18)..(19)..(20): Xaa is A or G
  MOD_RES (21)..(22)..(23)..(24): Xaa is A or G or is absent

SEQ ID NO: 42207 - protein, 38 aa, Artificial Sequence; identical to SEQ ID NO: 24195
  GFR-binding peptide
  MOD_RES (2)..(4)..(38): Xaa is C or S
  MOD_RES (16)..(17)..(18)..(19)..(20): Xaa is A or G
  MOD_RES (21)..(22)..(23)..(24): Xaa is A or G or is absent

SEQ ID NO: 42208 - protein, 39 aa, Artificial Sequence; identical to SEQ ID NO: 26232
  GFR-binding peptide
  MOD_RES (1)..(33)..(34): Xaa is C or S

SEQ ID NO: 42209 - protein, 35 aa, Artificial Sequence; identical to SEQ ID NO: 27247
  GFR-binding peptide
  MOD_RES (34)..(35): Xaa is C or S
  MOD_RES (12)..(13)..(14)..(15)..(16): Xaa is A or G
  MOD_RES (17)..(18)..(19)..(20): Xaa is A or G or is absent

SEQ ID NO: 42210 - protein, 39 aa, Artificial Sequence; identical to SEQ ID NO: 26235
  GFR-binding peptide
  MOD_RES (33)..(34): Xaa is C or S
  MOD_RES (11)..(12)..(13)..(14)..(15): Xaa is A or G
  MOD_RES (16)..(17)..(18)..(19): Xaa is A or G or is absent

SEQ ID NO: 42211 - protein, 37 aa, Artificial Sequence; identical to SEQ ID NO: 25226
  GFR-binding peptide
  MOD_RES (2)..(34)..(35): Xaa is C or S

SEQ ID NO: 42212 - protein, 38 aa, Artificial Sequence
  GFR-binding peptide
  MOD_RES (1)..(32)..(33): Xaa is C or S
XEEVIMEYQKYLLVRGNDIYLMSIPSTKVPAXXTSPVR

SEQ ID NO: 42213 - protein, 39 aa, Artificial Sequence; identical to SEQ ID NO: 27251
  GFR-binding peptide
  MOD_RES (2)..(4)..(36): Xaa is C or S

SEQ ID NO: 42214 - protein, 38 aa, Artificial Sequence; identical to SEQ ID NO: 24201
  GFR-binding peptide
  MOD_RES (1)..(3)..(35)..(36): Xaa is C or S

SEQ ID NO: 42215 - protein, 36 aa, Artificial Sequence
  GFR-binding peptide
  MOD_RES (1)..(3): Xaa is C or S
  MOD_RES (15)..(16)..(17)..(18)..(19): Xaa is A or G
  MOD_RES (20)..(21)..(22)..(23): Xaa is A or G or is absent
XGXRDVVMGEYQKYXXXXXXXXXIYLMSIPSMKTPT

SEQ ID NO: 42216 - protein, 38 aa, Artificial Sequence; identical to SEQ ID NO: 24205
  GFR-binding peptide
  MOD_RES (1)..(35)..(36): Xaa is C or S
  MOD_RES (13)..(14)..(15)..(16)..(17): Xaa is A or G
  MOD_RES (18)..(19)..(20)..(21): Xaa is A or G or is absent

SEQ ID NO: 42217 - protein, 38 aa, Artificial Sequence; identical to SEQ ID NO: 27255
  GFR-binding peptide
  MOD_RES (35)..(36): Xaa is C or S
  MOD_RES (13)..(14)..(15)..(16)..(17): Xaa is A or G
  MOD_RES (18)..(19)..(20)..(21): Xaa is A or G or is absent

SEQ ID NO: 42218 - protein, 36 aa, Artificial Sequence
  GFR-binding peptide
  MOD_RES (33)..(34): Xaa is C or S
  MOD_RES (11)..(12)..(13)..(14)..(15): Xaa is A or G
  MOD_RES (16)..(17)..(18)..(19): Xaa is A or G or is absent
DVVMGEYQKYXXXXXXXXXIYLMSIPSMKTPTXXPG

SEQ ID NO: 42219 - protein, 36 aa, Artificial Sequence; identical to SEQ ID NO: 26239
  GFR-binding peptide
  MOD_RES (1)..(33)..(34): Xaa is C or S

SEQ ID NO: 42220 - protein, 36 aa, Artificial Sequence; identical to SEQ ID NO: 26246
  GFR-binding peptide
  MOD_RES (2)..(34)..(35): Xaa is C or S

SEQ ID NO: 42221 - protein, 41 aa, Artificial Sequence; identical to SEQ ID NO: 26247
  GFR-binding peptide
  MOD_RES (1)..(3)..(35): Xaa is C or S

SEQ ID NO: 42222 - protein, 36 aa, Artificial Sequence; identical to SEQ ID NO: 24215
  GFR-binding peptide
  MOD_RES (1)..(35)..(36): Xaa is C or S
  MOD_RES (13)..(14)..(15)..(16)..(17): Xaa is A or G
  MOD_RES (18)..(19)..(20)..(21): Xaa is A or G or is absent

SEQ ID NO: 42223 - protein, 37 aa, Artificial Sequence; identical to SEQ ID NO: 24216
  GFR-binding peptide
  MOD_RES (31)..(32): Xaa is C or S

SEQ ID NO: 42224 - protein, 39 aa, Artificial Sequence; identical to SEQ ID NO: 24217
  GFR-binding peptide
  MOD_RES (33)..(34): Xaa is C or S

SEQ ID NO: 42225 - protein, 32 aa, Artificial Sequence; identical to SEQ ID NO: 24220
  GFR-binding peptide
  MOD_RES (32)..(32): Xaa is C or S

SEQ ID NO: 42226 - protein, 38 aa, Artificial Sequence; identical to SEQ ID NO: 27268
  GFR-binding peptide
  MOD_RES (1)..(35)..(36): Xaa is C or S
  MOD_RES (13)..(14)..(15)..(16)..(17): Xaa is A or G
  MOD_RES (18)..(19)..(20)..(21): Xaa is A or G or is absent

SEQ ID NO: 42227 - protein, 36 aa, Artificial Sequence; identical to SEQ ID NO: 25237
  GFR-binding peptide
  MOD_RES (1)..(33)..(34): Xaa is C or S

SEQ ID NO: 42228 - protein, 42 aa, Artificial Sequence
  GFR-binding peptide
  MOD_RES (2)..(4)..(36)..(37): Xaa is C or S
HXGXSRVVMNEYQKYIVNSSDDIYLVSIPSLKTPAXXPKPVH

SEQ ID NO: 42229 - protein, 39 aa, Artificial Sequence
  GFR-binding peptide
  MOD_RES (1)..(3)..(37)..(38): Xaa is C or S
  MOD_RES (15)..(16)..(17)..(18)..(19): Xaa is A or G
  MOD_RES (20)..(21)..(22)..(23): Xaa is A or G or is absent
XGXRDVVMGEYQKYXXXXXXXXXIYLMSIPSMKTPTXXP

SEQ ID NO: 42230 - protein, 34 aa, Artificial Sequence
  GFR-binding peptide
  MOD_RES (1)..(33)..(34): Xaa is C or S
XRDVVMGEYQKYIIQQKDNIYLMSIPSMKTPTXX

SEQ ID NO: 42231 - protein, 41 aa, Artificial Sequence; identical to SEQ ID NO: 27270
  GFR-binding peptide
  MOD_RES (1)..(3)..(35)..(36): Xaa is C or S

SEQ ID NO: 42232 - protein, 39 aa, Artificial Sequence; identical to SEQ ID NO: 27271
  GFR-binding peptide
  MOD_RES (2)..(35)..(36): Xaa is C or S

SEQ ID NO: 42233 - protein, 36 aa, Artificial Sequence; identical to SEQ ID NO: 26255
  GFR-binding peptide
  MOD_RES (35)..(36): Xaa is C or S
  MOD_RES (13)..(14)..(15)..(16)..(17): Xaa is A or G
  MOD_RES (18)..(19)..(20)..(21): Xaa is A or G or is absent

SEQ ID NO: 42234 - protein, 38 aa, Artificial Sequence; identical to SEQ ID NO: 25243
  GFR-binding peptide
  MOD_RES (1)..(3)..(37)..(38): Xaa is C or S
  MOD_RES (15)..(16)..(17)..(18)..(19): Xaa is A or G
  MOD_RES (20)..(21)..(22)..(23): Xaa is A or G or is absent

SEQ ID NO: 42235 - protein, 35 aa, Artificial Sequence; identical to SEQ ID NO: 24226
  GFR-binding peptide
  MOD_RES (1)..(33)..(34): Xaa is C or S

SEQ ID NO: 42236 - protein, 43 aa, Artificial Sequence; identical to SEQ ID NO: 24229
  GFR-binding peptide
  MOD_RES (2)..(37)..(38): Xaa is C or S
  MOD_RES (15)..(16)..(17)..(18)..(19): Xaa is A or G
  MOD_RES (20)..(21)..(22)..(23): Xaa is A or G or is absent

SEQ ID NO: 42237 - protein, 35 aa, Artificial Sequence; identical to SEQ ID NO: 24230
  GFR-binding peptide
  MOD_RES (33)..(34): Xaa is C or S
  MOD_RES (11)..(12)..(13)..(14)..(15): Xaa is A or G
  MOD_RES (16)..(17)..(18)..(19): Xaa is A or G or is absent

SEQ ID NO: 42238 - protein, 38 aa, Artificial Sequence; identical to SEQ ID NO: 27281
  GFR-binding peptide
  MOD_RES (2)..(4)..(36)..(37): Xaa is C or S

SEQ ID NO: 42239 - protein, 43 aa, Artificial Sequence; identical to SEQ ID NO: 25252
  GFR-binding peptide
  MOD_RES (1)..(3)..(37)..(38): Xaa is C or S
  MOD_RES (15)..(16)..(17)..(18)..(19): Xaa is A or G
  MOD_RES (20)..(21)..(22)..(23): Xaa is A or G or is absent

SEQ ID NO: 42240 - protein, 40 aa, Artificial Sequence; identical to SEQ ID NO: 26265
  GFR-binding peptide
  MOD_RES (34)..(35): Xaa is C or S
  MOD_RES (12)..(13)..(14)..(15)..(16): Xaa is A or G
  MOD_RES (17)..(18)..(19)..(20): Xaa is A or G or is absent

SEQ ID NO: 42241 - protein, 38 aa, Artificial Sequence; identical to SEQ ID NO: 27286
  GFR-binding peptide
  MOD_RES (1)..(3)..(35)..(36): Xaa is C or S

SEQ ID NO: 42242 - protein, 42 aa, Artificial Sequence; identical to SEQ ID NO: 27288
  GFR-binding peptide
  MOD_RES (1)..(3)..(37)..(38): Xaa is C or S
  MOD_RES (15)..(16)..(17)..(18)..(19): Xaa is A or G
  MOD_RES (20)..(21)..(22)..(23): Xaa is A or G or is absent

SEQ ID NO: 42243 - protein, 40 aa, Artificial Sequence; identical to SEQ ID NO: 24233
  GFR-binding peptide
  MOD_RES (1)..(3)..(37)..(38): Xaa is C or S
  MOD_RES (15)..(16)..(17)..(18)..(19): Xaa is A or G
  MOD_RES (20)..(21)..(22)..(23): Xaa is A or G or is absent

SEQ ID NO: 42244 - protein, 36 aa, Artificial Sequence; identical to SEQ ID NO: 25253
  GFR-binding peptide
  MOD_RES (2)..(36): Xaa is C or S
  MOD_RES (14)..(15)..(16)..(17)..(18): Xaa is A or G
  MOD_RES (19)..(20)..(21)..(22): Xaa is A or G or is absent

SEQ ID NO: 42245 - protein, 34 aa, Artificial Sequence; identical to SEQ ID NO: 25255
  GFR-binding peptide
  MOD_RES (1)..(3): Xaa is C or S

SEQ ID NO: 42246 - protein, 38 aa, Artificial Sequence; identical to SEQ ID NO: 26273
  GFR-binding peptide
  MOD_RES (2)..(36)..(37): Xaa is C or S
  MOD_RES (14)..(15)..(16)..(17)..(18): Xaa is A or G
  MOD_RES (19)..(20)..(21)..(22): Xaa is A or G or is absent

SEQ ID NO: 42247 - protein, 37 aa, Artificial Sequence; identical to SEQ ID NO: 27294
  GFR-binding peptide
  MOD_RES (2)..(4)..(36)..(37): Xaa is C or S

SEQ ID NO: 42248 - protein, 38 aa, Artificial Sequence; identical to SEQ ID NO: 27295
  GFR-binding peptide
  MOD_RES (2)..(4)..(37)..(38): Xaa is C or S

SEQ ID NO: 42249 - protein, 34 aa, Artificial Sequence; identical to SEQ ID NO: 26278
  GFR-binding peptide
  MOD_RES (33)..(34): Xaa is C or S
  MOD_RES (11)..(12)..(13)..(14)..(15): Xaa is A or G
  MOD_RES (16)..(17)..(18)..(19): Xaa is A or G or is absent

SEQ ID NO: 42250 - protein, 36 aa, Artificial Sequence; identical to SEQ ID NO: 27297
  GFR-binding peptide
  MOD_RES (32)..(33): Xaa is C or S

SEQ ID NO: 42251 - protein, 42 aa, Artificial Sequence
  GFR-binding peptide
  MOD_RES (1)..(3)..(36)..(37): Xaa is C or S
  MOD_RES (14)..(15)..(16)..(17)..(18): Xaa is A or G
  MOD_RES (19)..(20)..(21)..(22): Xaa is A or G or is absent
XGXEEVIMEYQKYXXXXXXXXXIYLMSIPSTKVPAXXTSPVR

SEQ ID NO: 42252 - protein, 38 aa, Artificial Sequence; identical to SEQ ID NO: 24243
  GFR-binding peptide
  MOD_RES (1)..(36)..(37): Xaa is C or S
  MOD_RES (14)..(15)..(16)..(17)..(18): Xaa is A or G
  MOD_RES (19)..(20)..(21)..(22): Xaa is A or G or is absent

SEQ ID NO: 42253 - protein, 37 aa, Artificial Sequence; identical to SEQ ID NO: 24244
  GFR-binding peptide
  MOD_RES (34)..(35): Xaa is C or S
  MOD_RES (12)..(13)..(14)..(15)..(16): Xaa is A or G
  MOD_RES (17)..(18)..(19)..(20): Xaa is A or G or is absent

SEQ ID NO: 42254 - protein, 40 aa, Artificial Sequence; identical to SEQ ID NO: 25266
  GFR-binding peptide
  MOD_RES (2)..(4)..(36)..(37): Xaa is C or S

SEQ ID NO: 42255 - protein, 42 aa, Artificial Sequence; identical to SEQ ID NO: 24245
  GFR-binding peptide
  MOD_RES (1)..(3)..(36)..(37): Xaa is C or S

SEQ ID NO: 42256 - protein, 34 aa, Artificial Sequence; identical to SEQ ID NO: 26282
  GFR-binding peptide
  MOD_RES (33)..(34): Xaa is C or S
  MOD_RES (11)..(12)..(13)..(14)..(15): Xaa is A or G
  MOD_RES (16)..(17)..(18)..(19): Xaa is A or G or is absent

SEQ ID NO: 42257 - protein, 34 aa, Artificial Sequence; identical to SEQ ID NO: 27300
  GFR-binding peptide
  MOD_RES (31)..(32): Xaa is C or S

SEQ ID NO: 42258 - protein, 30 aa, Artificial Sequence; identical to SEQ ID NO: 27301
  GFR-binding peptide

SEQ ID NO: 42259 - protein, 38 aa, Artificial Sequence; identical to SEQ ID NO: 24248
  GFR-binding peptide
  MOD_RES (1)..(33)..(34): Xaa is C or S

SEQ ID NO: 42260 - protein, 36 aa, Artificial Sequence
  GFR-binding peptide
  MOD_RES (2)..(33)..(34): Xaa is C or S
GXEEVIMEYQKYLLVRGNDIYLMSIPSTKVPAXXTS

SEQ ID NO: 42261 - protein, 38 aa, Artificial Sequence
  GFR-binding peptide
  MOD_RES (1)..(35)..(36): Xaa is C or S
  MOD_RES (13)..(14)..(15)..(16)..(17): Xaa is A or G
  MOD_RES (18)..(19)..(20)..(21): Xaa is A or G or is absent
XRDVVMGEYQKYXXXXXXXXXIYLMSIPSMKTPTXXPG

SEQ ID NO: 42262 - protein, 37 aa, Artificial Sequence; identical to SEQ ID NO: 25271
  GFR-binding peptide
  MOD_RES (2)..(34)..(35): Xaa is C or S

SEQ ID NO: 42263 - protein, 37 aa, Artificial Sequence; identical to SEQ ID NO: 24251
  GFR-binding peptide
  MOD_RES (31)..(32): Xaa is C or S

SEQ ID NO: 42264 - protein, 37 aa, Artificial Sequence; identical to SEQ ID NO: 26287
  GFR-binding peptide
  MOD_RES (1)..(36)..(37): Xaa is C or S
  MOD_RES (14)..(15)..(16)..(17)..(18): Xaa is A or G
  MOD_RES (19)..(20)..(21)..(22): Xaa is A or G or is absent

SEQ ID NO: 42265 - protein, 35 aa, Artificial Sequence; identical to SEQ ID NO: 26288
  GFR-binding peptide
  MOD_RES (31)..(32): Xaa is C or S

SEQ ID NO: 42266 - protein, 37 aa, Artificial Sequence; identical to SEQ ID NO: 26292
  GFR-binding peptide
  MOD_RES (1)..(3)..(37): Xaa is C or S
  MOD_RES (15)..(16)..(17)..(18)..(19): Xaa is A or G
  MOD_RES (20)..(21)..(22)..(23): Xaa is A or G or is absent

SEQ ID NO: 42267 - protein, 39 aa, Artificial Sequence; identical to SEQ ID NO: 25274
  GFR-binding peptide
  MOD_RES (2)..(34): Xaa is C or S

SEQ ID NO: 42268 - protein, 38 aa, Artificial Sequence
  GFR-binding peptide
  MOD_RES (33)..(34): Xaa is C or S
  MOD_RES (11)..(12)..(13)..(14)..(15): Xaa is A or G
  MOD_RES (16)..(17)..(18)..(19): Xaa is A or G or is absent
DVVMGEYQKYXXXXXXXXXIYLMSIPSMKTPTXXPGAS

SEQ ID NO: 42269 - protein, 39 aa, Artificial Sequence; identical to SEQ ID NO: 26293
  GFR-binding peptide
  MOD_RES (2)..(4)..(39): Xaa is C or S
  MOD_RES (17)..(18)..(19)..(20)..(21): Xaa is A or G
  MOD_RES (22)..(23)..(24)..(25): Xaa is A or G or is absent

SEQ ID NO: 42270 - protein, 38 aa, Artificial Sequence; identical to SEQ ID NO: 27306
  GFR-binding peptide
  MOD_RES (2)..(34): Xaa is C or S

SEQ ID NO: 42271 - protein, 36 aa, Artificial Sequence; identical to SEQ ID NO: 24255
  GFR-binding peptide
  MOD_RES (33)..(34): Xaa is C or S
  MOD_RES (11)..(12)..(13)..(14)..(15): Xaa is A or G
  MOD_RES (16)..(17)..(18)..(19): Xaa is A or G or is absent

SEQ ID NO: 42272 - protein, 42 aa, Artificial Sequence; identical to SEQ ID NO: 26296
  GFR-binding peptide
  MOD_RES (1)..(3)..(37)..(38): Xaa is C or S
  MOD_RES (15)..(16)..(17)..(18)..(19): Xaa is A or G
  MOD_RES (20)..(21)..(22)..(23): Xaa is A or G or is absent

SEQ ID NO: 42273 - protein, 35 aa, Artificial Sequence; identical to SEQ ID NO: 24258
  GFR-binding peptide
  MOD_RES (31)..(32): Xaa is C or S

SEQ ID NO: 42274 - protein, 41 aa, Artificial Sequence; identical to SEQ ID NO: 24260
  GFR-binding peptide
  MOD_RES (2)..(36)..(37): Xaa is C or S
  MOD_RES (14)..(15)..(16)..(17)..(18): Xaa is A or G
  MOD_RES (19)..(20)..(21)..(22): Xaa is A or G or is absent

SEQ ID NO: 42275 - protein, 42 aa, Artificial Sequence; identical to SEQ ID NO: 24262
  GFR-binding peptide
  MOD_RES (2)..(4)..(36)..(37): Xaa is C or S

SEQ ID NO: 42276 - protein, 34 aa, Artificial Sequence
  GFR-binding peptide
  MOD_RES (33)..(34): Xaa is C or S
  MOD_RES (11)..(12)..(13)..(14)..(15): Xaa is A or G
  MOD_RES (16)..(17)..(18)..(19): Xaa is A or G or is absent
EEVIMEYQKYXXXXXXXXXIYLMSIPSTKVPAXX

SEQ ID NO: 42277 - protein, 34 aa, Artificial Sequence; identical to SEQ ID NO: 25283
  GFR-binding peptide
  MOD_RES (33)..(34): Xaa is C or S
  MOD_RES (11)..(12)..(13)..(14)..(15): Xaa is A or G
  MOD_RES (16)..(17)..(18)..(19): Xaa is A or G or is absent

SEQ ID NO: 42278 - protein, 37 aa, Artificial Sequence
  GFR-binding peptide
  MOD_RES (32)..(33): Xaa is C or S
RDVVMGEYQKYIIQQKDNIYLMSIPSMKTPTXXPGAS

SEQ ID NO: 42279 - protein, 39 aa, Artificial Sequence; identical to SEQ ID NO: 27319
  GFR-binding peptide
  MOD_RES (2)..(4)..(36)..(37): Xaa is C or S

SEQ ID NO: 42280 - protein, 40 aa, Artificial Sequence; identical to SEQ ID NO: 27321
  GFR-binding peptide
  MOD_RES (2)..(3)..(38)..(40): Xaa is C or S
  MOD_RES (17)..(18)..(19)..(20)..(21): Xaa is A or G
  MOD_RES (22)..(23)..(24)..(25): Xaa is A or G or is absent

SEQ ID NO: 42281 - protein, 36 aa, Artificial Sequence; identical to SEQ ID NO: 27324
  GFR-binding peptide
  MOD_RES (1)..(35): Xaa is C or S
  MOD_RES (15)..(16)..(17)..(18)..(19): Xaa is A or G
  MOD_RES (20)..(21)..(22)..(23): Xaa is A or G or is absent

SEQ ID NO: 42282 - protein, 34 aa, Artificial Sequence
  GFR-binding peptide
  MOD_RES (33)..(33): Xaa is C or S
  MOD_RES (14)..(15)..(16)..(17)..(18): Xaa is A or G
  MOD_RES (19)..(20)..(21)..(22): Xaa is A or G or is absent
APVKTSPISMLYIXXXXXXXXXYKQYEMIVEEXG

SEQ ID NO: 42283 - protein, 35 aa, Artificial Sequence; identical to SEQ ID NO: 27325
  GFR-binding peptide
  MOD_RES (2)..(3)..(35): Xaa is C or S

SEQ ID NO: 42284 - protein, 38 aa, Artificial Sequence
  GFR-binding peptide
  MOD_RES (5)..(6)..(37): Xaa is C or S
VPSTXXAPVKTSPISMLYIDNGRVLLYKQYEMIVEEXG

SEQ ID NO: 42285 - protein, 35 aa, Artificial Sequence
  GFR-binding peptide
  MOD_RES (4)..(5): Xaa is C or S
PSTXXAPVKTSPISMLYIDNGRVLLYKQYEMIVEE

SEQ ID NO: 42286 - protein, 42 aa, Artificial Sequence; identical to SEQ ID NO: 28291
  GFR-binding peptide
  MOD_RES (6)..(7)..(41): Xaa is C or S
  MOD_RES (21)..(22)..(23)..(24)..(25): Xaa is A or G
  MOD_RES (26)..(27)..(28)..(29): Xaa is A or G or is absent

SEQ ID NO: 42287 - protein, 41 aa, Artificial Sequence; identical to SEQ ID NO: 27329
  GFR-binding peptide
  MOD_RES (2)..(3)..(38)..(40): Xaa is C or S
  MOD_RES (17)..(18)..(19)..(20)..(21): Xaa is A or G
  MOD_RES (22)..(23)..(24)..(25): Xaa is A or G or is absent

SEQ ID NO: 42288 - protein, 35 aa, Artificial Sequence; identical to SEQ ID NO: 29259
  GFR-binding peptide
  MOD_RES (4)..(5): Xaa is C or S

SEQ ID NO: 42289 - protein, 39 aa, Artificial Sequence; identical to SEQ ID NO: 30243
  GFR-binding peptide
  MOD_RES (6)..(7)..(39): Xaa is C or S

SEQ ID NO: 42290 - protein, 32 aa, Artificial Sequence; identical to SEQ ID NO: 27332
  GFR-binding peptide
  MOD_RES (1)..(2): Xaa is C or S

SEQ ID NO: 42291 - protein, 41 aa, Artificial Sequence; identical to SEQ ID NO: 30245
  GFR-binding peptide
  MOD_RES (5)..(6)..(40): Xaa is C or S
  MOD_RES (20)..(21)..(22)..(23)..(24): Xaa is A or G
  MOD_RES (25)..(26)..(27)..(28): Xaa is A or G or is absent

SEQ ID NO: 42292 - protein, 32 aa, Artificial Sequence
  GFR-binding peptide
  MOD_RES (31)..(31): Xaa is C or S
APVKTSPISMLYIDNGRVLLYKQYEMIVEEXG

SEQ ID NO: 42293 - protein, 34 aa, Artificial Sequence; identical to SEQ ID NO: 28299
  GFR-binding peptide
  MOD_RES (32)..(34): Xaa is C or S

SEQ ID NO: 42294 - protein, 40 aa, Artificial Sequence; identical to SEQ ID NO: 27333
  GFR-binding peptide
  MOD_RES (1)..(2)..(37)..(39): Xaa is C or S
  MOD_RES (16)..(17)..(18)..(19)..(20): Xaa is A or G
  MOD_RES (21)..(22)..(23)..(24): Xaa is A or G or is absent

SEQ ID NO: 42295 - protein, 40 aa, Artificial Sequence
  GFR-binding peptide
  MOD_RES (4)..(5)..(38)..(40): Xaa is C or S
  MOD_RES (19)..(20)..(21)..(22)..(23): Xaa is A or G
  MOD_RES (24)..(25)..(26)..(27): Xaa is A or G or is absent
PSTXXAPVKTSPISMLYIXXXXXXXXXYKQYEMIVEEXGX

SEQ ID NO: 42296 - protein, 33 aa, Artificial Sequence; identical to SEQ ID NO: 30250
  GFR-binding peptide
  MOD_RES (14)..(15)..(16)..(17)..(18): Xaa is A or G
  MOD_RES (19)..(20)..(21)..(22): Xaa is A or G or is absent

SEQ ID NO: 42297 - protein, 39 aa, Artificial Sequence
  GFR-binding peptide
  MOD_RES (5)..(6): Xaa is C or S
  MOD_RES (20)..(21)..(22)..(23)..(24): Xaa is A or G
  MOD_RES (25)..(26)..(27)..(28): Xaa is A or G or is absent
SAGPXXTPTKMSPISMLYIXXXXXXXXXYKQYEGMVVDR

SEQ ID NO: 42298 - protein, 36 aa, Artificial Sequence; identical to SEQ ID NO: 30253
  GFR-binding peptide
  MOD_RES (5)..(6): Xaa is C or S

SEQ ID NO: 42299 - protein, 39 aa, Artificial Sequence; identical to SEQ ID NO: 27339
  GFR-binding peptide
  MOD_RES (4)..(38): Xaa is C or S
  MOD_RES (18)..(19)..(20)..(21)..(22): Xaa is A or G
  MOD_RES (23)..(24)..(25)..(26): Xaa is A or G or is absent

SEQ ID NO: 42300 - protein, 36 aa, Artificial Sequence; identical to SEQ ID NO: 30260
  GFR-binding peptide
  MOD_RES (1)..(2)..(34)..(36): Xaa is C or S

SEQ ID NO: 42301 - protein, 32 aa, Artificial Sequence
  GFR-binding peptide
  MOD_RES (1)..(32): Xaa is C or S
XAPVKTSPISMLYIDNGRVLLYKQYEMIVEEX

SEQ ID NO: 42302 - protein, 36 aa, Artificial Sequence; identical to SEQ ID NO: 27343
  GFR-binding peptide
  MOD_RES (3)..(4): Xaa is C or S
  MOD_RES (18)..(19)..(20)..(21)..(22): Xaa is A or G
  MOD_RES (23)..(24)..(25)..(26): Xaa is A or G or is absent

SEQ ID NO: 42303 - protein, 42 aa, Artificial Sequence; identical to SEQ ID NO: 27344
  GFR-binding peptide
  MOD_RES (5)..(6)..(40)..(42): Xaa is C or S
  MOD_RES (20)..(21)..(22)..(23)..(24): Xaa is A or G
  MOD_RES (25)..(26)..(27)..(28): Xaa is A or G or is absent

SEQ ID NO: 42304 - protein, 36 aa, Artificial Sequence; identical to SEQ ID NO: 27345
  GFR-binding peptide
  MOD_RES (5)..(6): Xaa is C or S

SEQ ID NO: 42305 - protein, 38 aa, Artificial Sequence; identical to SEQ ID NO: 27346
  GFR-binding peptide
  MOD_RES (5)..(6): Xaa is C or S
  MOD_RES (20)..(21)..(22)..(23)..(24): Xaa is A or G
  MOD_RES (25)..(26)..(27)..(28): Xaa is A or G or is absent

SEQ ID NO: 42306 - protein, 39 aa, Artificial Sequence; identical to SEQ ID NO: 28311
  GFR-binding peptide
  MOD_RES (3)..(4)..(36)..(38): Xaa is C or S

SEQ ID NO: 42307 - protein, 37 aa, Artificial Sequence; identical to SEQ ID NO: 28312
  GFR-binding peptide
  MOD_RES (3)..(4)..(36): Xaa is C or S

SEQ ID NO: 42308 - protein, 34 aa, Artificial Sequence; identical to SEQ ID NO: 28313
  GFR-binding peptide
  MOD_RES (1)..(1): Xaa is C or S
  MOD_RES (15)..(16)..(17)..(18)..(19): Xaa is A or G
  MOD_RES (20)..(21)..(22)..(23): Xaa is A or G or is absent

SEQ ID NO: 42309 - protein, 38 aa, Artificial Sequence; identical to SEQ ID NO: 29275
  GFR-binding peptide
  MOD_RES (7)..(7): Xaa is C or S

SEQ ID NO: 42310 - protein, 37 aa, Artificial Sequence; identical to SEQ ID NO: 29276
  GFR-binding peptide
  MOD_RES (2)..(3)..(37): Xaa is C or S
  MOD_RES (17)..(18)..(19)..(20)..(21): Xaa is A or G
  MOD_RES (22)..(23)..(24)..(25): Xaa is A or G or is absent

SEQ ID NO: 42311 - protein, 41 aa, Artificial Sequence; identical to SEQ ID NO: 30271
  GFR-binding peptide
  MOD_RES (3)..(4)..(38)..(40): Xaa is C or S
  MOD_RES (18)..(19)..(20)..(21)..(22): Xaa is A or G
  MOD_RES (23)..(24)..(25)..(26): Xaa is A or G or is absent

SEQ ID NO: 42312 - protein, 39 aa, Artificial Sequence; identical to SEQ ID NO: 29281
  GFR-binding peptide
  MOD_RES (5)..(6): Xaa is C or S
  MOD_RES (20)..(21)..(22)..(23)..(24): Xaa is A or G
  MOD_RES (25)..(26)..(27)..(28): Xaa is A or G or is absent

SEQ ID NO: 42313 - protein, 35 aa, Artificial Sequence; identical to SEQ ID NO: 30273
  GFR-binding peptide
  MOD_RES (1)..(2)..(34): Xaa is C or S

SEQ ID NO: 42314 - protein, 39 aa, Artificial Sequence; identical to SEQ ID NO: 28323
  GFR-binding peptide
  MOD_RES (5)..(6)..(39): Xaa is C or S

SEQ ID NO: 42315 - protein, 39 aa, Artificial Sequence; identical to SEQ ID NO: 30274
  GFR-binding peptide
  MOD_RES (5)..(6)..(38): Xaa is C or S

SEQ ID NO: 42316 - protein, 33 aa, Artificial Sequence
  GFR-binding peptide
  MOD_RES (1)..(33): Xaa is C or S
XTPTKMSPISMLYINDKQQIIYKQYEGMVVDRX

SEQ ID NO: 42317 - protein, 32 aa, Artificial Sequence; identical to SEQ ID NO: 30278
  GFR-binding peptide

SEQ ID NO: 42318 - protein, 38 aa, Artificial Sequence; identical to SEQ ID NO: 28327
  GFR-binding peptide
  MOD_RES (2)..(3)..(37): Xaa is C or S
  MOD_RES (17)..(18)..(19)..(20)..(21): Xaa is A or G
  MOD_RES (22)..(23)..(24)..(25): Xaa is A or G or is absent

SEQ ID NO: 42319 - protein, 42 aa, Artificial Sequence; identical to SEQ ID NO: 30279
  GFR-binding peptide
  MOD_RES (5)..(6)..(40)..(42): Xaa is C or S
  MOD_RES (20)..(21)..(22)..(23)..(24): Xaa is A or G
  MOD_RES (25)..(26)..(27)..(28): Xaa is A or G or is absent

SEQ ID NO: 42320 - protein, 35 aa, Artificial Sequence
  GFR-binding peptide
  MOD_RES (2)..(3)..(34): Xaa is C or S
TXXAPVKTSPISMLYIDNGRVLLYKQYEMIVEEXG

SEQ ID NO: 42321 - protein, 34 aa, Artificial Sequence; identical to SEQ ID NO: 27362
  GFR-binding peptide
  MOD_RES (1)..(33): Xaa is C or S

SEQ ID NO: 42322 - protein, 37 aa, Artificial Sequence
  GFR-binding peptide
  MOD_RES (3)..(4)..(35)..(37): Xaa is C or S
STXXAPVKTSPISMLYIDNGRVLLYKQYEMIVEEXGX

SEQ ID NO: 42323 - protein, 42 aa, Artificial Sequence; identical to SEQ ID NO: 30280
  GFR-binding peptide
  MOD_RES (3)..(4)..(39)..(41): Xaa is C or S
  MOD_RES (18)..(19)..(20)..(21)..(22): Xaa is A or G
  MOD_RES (23)..(24)..(25)..(26): Xaa is A or G or is absent

SEQ ID NO: 42324 - protein, 36 aa, Artificial Sequence; identical to SEQ ID NO: 28328
  GFR-binding peptide
  MOD_RES (5)..(6): Xaa is C or S

SEQ ID NO: 42325 - protein, 33 aa, Artificial Sequence
  GFR-binding peptide
  MOD_RES (1)..(1): Xaa is C or S
  MOD_RES (15)..(16)..(17)..(18)..(19): Xaa is A or G
  MOD_RES (20)..(21)..(22)..(23): Xaa is A or G or is absent
XTPTKMSPISMLYIXXXXXXXXXYKQYEGMVVD

SEQ ID NO: 42326 - protein, 38 aa, Artificial Sequence; identical to SEQ ID NO: 28331
  GFR-binding peptide
  MOD_RES (1)..(2)..(37): Xaa is C or S
  MOD_RES (16)..(17)..(18)..(19)..(20): Xaa is A or G
  MOD_RES (21)..(22)..(23)..(24): Xaa is A or G or is absent

SEQ ID NO: 42327 - protein, 37 aa, Artificial Sequence; identical to SEQ ID NO: 27366
  GFR-binding peptide
  MOD_RES (3)..(4): Xaa is C or S
  MOD_RES (18)..(19)..(20)..(21)..(22): Xaa is A or G
  MOD_RES (23)..(24)..(25)..(26): Xaa is A or G or is absent

SEQ ID NO: 42328 - protein, 38 aa, Artificial Sequence; identical to SEQ ID NO: 27370
  GFR-binding peptide
  MOD_RES (3)..(35)..(37): Xaa is C or S

SEQ ID NO: 42329 - protein, 37 aa, Artificial Sequence
  GFR-binding peptide
  MOD_RES (1)..(2)..(36): Xaa is C or S
  MOD_RES (16)..(17)..(18)..(19)..(20): Xaa is A or G
  MOD_RES (21)..(22)..(23)..(24): Xaa is A or G or is absent
XXTPTKMSPISMLYIXXXXXXXXXYKQYEGMVVDRXG

SEQ ID NO: 42330 - protein, 37 aa, Artificial Sequence; identical to SEQ ID NO: 29286
  GFR-binding peptide
  MOD_RES (4)..(5): Xaa is C or S
  MOD_RES (19)..(20)..(21)..(22)..(23): Xaa is A or G
  MOD_RES (24)..(25)..(26)..(27): Xaa is A or G or is absent

SEQ ID NO: 42331 - protein, 32 aa, Artificial Sequence; identical to SEQ ID NO: 30288
  GFR-binding peptide
  MOD_RES (1)..(2): Xaa is C or S

SEQ ID NO: 42332 - protein, 33 aa, Artificial Sequence; identical to SEQ ID NO: 29288
  GFR-binding peptide
  MOD_RES (14)..(15)..(16)..(17)..(18): Xaa is A or G
  MOD_RES (19)..(20)..(21)..(22): Xaa is A or G or is absent

SEQ ID NO: 42333 - protein, 38 aa, Artificial Sequence; identical to SEQ ID NO: 27373
  GFR-binding peptide
  MOD_RES (1)..(35)..(37): Xaa is C or S
  MOD_RES (15)..(16)..(17)..(18)..(19): Xaa is A or G
  MOD_RES (20)..(21)..(22)..(23): Xaa is A or G or is absent

SEQ ID NO: 42334 - protein, 41 aa, Artificial Sequence; identical to SEQ ID NO: 27374
  GFR-binding peptide
  MOD_RES (6)..(7)..(39)..(41): Xaa is C or S

SEQ ID NO: 42335 - protein, 36 aa, Artificial Sequence; identical to SEQ ID NO: 30291
  GFR-binding peptide
  MOD_RES (2)..(3)..(35): Xaa is C or S

SEQ ID NO: 42336 - protein, 41 aa, Artificial Sequence; identical to SEQ ID NO: 30292
  GFR-binding peptide
  MOD_RES (5)..(6)..(40): Xaa is C or S
  MOD_RES (20)..(21)..(22)..(23)..(24): Xaa is A or G
  MOD_RES (25)..(26)..(27)..(28): Xaa is A or G or is absent

SEQ ID NO: 42337 - protein, 39 aa, Artificial Sequence; identical to SEQ ID NO: 30293
  GFR-binding peptide
  MOD_RES (1)..(2)..(36)..(38): Xaa is C or S
  MOD_RES (16)..(17)..(18)..(19)..(20): Xaa is A or G
  MOD_RES (21)..(22)..(23)..(24): Xaa is A or G or is absent

SEQ ID NO: 42338 - protein, 36 aa, Artificial Sequence
  GFR-binding peptide
  MOD_RES (3)..(4)..(36): Xaa is C or S
GPXXTPTKMSPISMLYINDKQQIIYKQYEGMVVDRX

SEQ ID NO: 42339 - protein, 33 aa, Artificial Sequence
  GFR-binding peptide
  MOD_RES (1)..(2): Xaa is C or S
XXTPTKMSPISMLYINDKQQIIYKQYEGMVVDR

SEQ ID NO: 42340 - protein, 34 aa, Artificial Sequence
  GFR-binding peptide
  MOD_RES (1)..(2): Xaa is C or S
  MOD_RES (16)..(17)..(18)..(19)..(20): Xaa is A or G
  MOD_RES (21)..(22)..(23)..(24): Xaa is A or G or is absent
XXTPTKMSPISMLYIXXXXXXXXXYKQYEGMVVD

SEQ ID NO: 42341 - protein, 39 aa, Artificial Sequence; identical to SEQ ID NO: 30303
  GFR-binding peptide
  MOD_RES (6)..(7): Xaa is C or S
  MOD_RES (21)..(22)..(23)..(24)..(25): Xaa is A or G
  MOD_RES (26)..(27)..(28)..(29): Xaa is A or G or is absent

SEQ ID NO: 42342 - protein, 35 aa, Artificial Sequence; identical to SEQ ID NO: 30304
  GFR-binding peptide
  MOD_RES (3)..(35): Xaa is C or S

SEQ ID NO: 42343 - protein, 36 aa, Artificial Sequence
  GFR-binding peptide
  MOD_RES (1)..(34)..(36): Xaa is C or S
  MOD_RES (15)..(16)..(17)..(18)..(19): Xaa is A or G
  MOD_RES (20)..(21)..(22)..(23): Xaa is A or G or is absent
XAPVKTSPISMLYIXXXXXXXXXYKQYEMIVEEXGX

SEQ ID NO: 42344 - protein, 36 aa, Artificial Sequence
  GFR-binding peptide
  MOD_RES (3)..(4): Xaa is C or S
  MOD_RES (18)..(19)..(20)..(21)..(22): Xaa is A or G
  MOD_RES (23)..(24)..(25)..(26): Xaa is A or G or is absent
STXXAPVKTSPISMLYIXXXXXXXXXYKQYEMIVEE

SEQ ID NO: 42345 - protein, 37 aa, Artificial Sequence; identical to SEQ ID NO: 28345
  GFR-binding peptide
  MOD_RES (3)..(4)..(36): Xaa is C or S

SEQ ID NO: 42346 - protein, 35 aa, Artificial Sequence; identical to SEQ ID NO: 30307
  GFR-binding peptide
  MOD_RES (1)..(35): Xaa is C or S
  MOD_RES (15)..(16)..(17)..(18)..(19): Xaa is A or G
  MOD_RES (20)..(21)..(22)..(23): Xaa is A or G or is absent

SEQ ID NO: 42347 - protein, 41 aa, Artificial Sequence; identical to SEQ ID NO: 27385
  GFR-binding peptide
  MOD_RES (6)..(7)..(39)..(41): Xaa is C or S

SEQ ID NO: 42348 - protein, 38 aa, Artificial Sequence; identical to SEQ ID NO: 29294
  GFR-binding peptide
  MOD_RES (6)..(7): Xaa is C or S

SEQ ID NO: 42349 - protein, 41 aa, Artificial Sequence; identical to SEQ ID NO: 30309
  GFR-binding peptide
  MOD_RES (4)..(5)..(39)..(41): Xaa is C or S
  MOD_RES (19)..(20)..(21)..(22)..(23): Xaa is A or G
  MOD_RES (24)..(25)..(26)..(27): Xaa is A or G or is absent

SEQ ID NO: 42350 - protein, 36 aa, Artificial Sequence; identical to SEQ ID NO: 27387
  GFR-binding peptide
  MOD_RES (1)..(35): Xaa is C or S
  MOD_RES (15)..(16)..(17)..(18)..(19): Xaa is A or G
  MOD_RES (20)..(21)..(22)..(23): Xaa is A or G or is absent

SEQ ID NO: 42351 - protein, 42 aa, Artificial Sequence; identical to SEQ ID NO: 27388
  GFR-binding peptide
  MOD_RES (6)..(7)..(41): Xaa is C or S
  MOD_RES (21)..(22)..(23)..(24)..(25): Xaa is A or G
  MOD_RES (26)..(27)..(28)..(29): Xaa is A or G or is absent

SEQ ID NO: 42352 - protein, 36 aa, Artificial Sequence; identical to SEQ ID NO: 27389
  GFR-binding peptide
  MOD_RES (6)..(6): Xaa is C or S

SEQ ID NO: 42353 - protein, 39 aa, Artificial Sequence; identical to SEQ ID NO: 28348
  GFR-binding peptide
  MOD_RES (5)..(6): Xaa is C or S
  MOD_RES (20)..(21)..(22)..(23)..(24): Xaa is A or G
  MOD_RES (25)..(26)..(27)..(28): Xaa is A or G or is absent

SEQ ID NO: 42354 - protein, 41 aa, Artificial Sequence; identical to SEQ ID NO: 29298
  GFR-binding peptide
  MOD_RES (6)..(7)..(39)..(41): Xaa is C or S

SEQ ID NO: 42355 - protein, 40 aa, Artificial Sequence; identical to SEQ ID NO: 30314
  GFR-binding peptide
  MOD_RES (6)..(7): Xaa is C or S
  MOD_RES (21)..(22)..(23)..(24)..(25): Xaa is A or G
  MOD_RES (26)..(27)..(28)..(29): Xaa is A or G or is absent

SEQ ID NO: 42356 - protein, 32 aa, Artificial Sequence; identical to SEQ ID NO: 29299
  GFR-binding peptide
  MOD_RES (32)..(32): Xaa is C or S

SEQ ID NO: 42357 - protein, 39 aa, Artificial Sequence; identical to SEQ ID NO: 30317
  GFR-binding peptide
  MOD_RES (3)..(4)..(39): Xaa is C or S
  MOD_RES (18)..(19)..(20)..(21)..(22): Xaa is A or G
  MOD_RES (23)..(24)..(25)..(26): Xaa is A or G or is absent

SEQ ID NO: 42358 - protein, 36 aa, Artificial Sequence; identical to SEQ ID NO: 27396
  GFR-binding peptide
  MOD_RES (2)..(3): Xaa is C or S
  MOD_RES (17)..(18)..(19)..(20)..(21): Xaa is A or G
  MOD_RES (22)..(23)..(24)..(25): Xaa is A or G or is absent

SEQ ID NO: 42359 - protein, 42 aa, Artificial Sequence; identical to SEQ ID NO: 29301
  GFR-binding peptide
  MOD_RES (6)..(7)..(39)..(41): Xaa is C or S

SEQ ID NO: 42360 - protein, 39 aa, Artificial Sequence
  GFR-binding peptide
  MOD_RES (5)..(6)..(38): Xaa is C or S
SAGPXXTPTKMSPISMLYINDKQQIIYKQYEGMVVDRXG

SEQ ID NO: 42361 - protein, 35 aa, Artificial Sequence; identical to SEQ ID NO: 29303
  GFR-binding peptide
  MOD_RES (4)..(4): Xaa is C or S

SEQ ID NO: 42362 - protein, 38 aa, Artificial Sequence; identical to SEQ ID NO: 30319
  GFR-binding peptide
  MOD_RES (5)..(6): Xaa is C or S
  MOD_RES (20)..(21)..(22)..(23)..(24): Xaa is A or G
  MOD_RES (25)..(26)..(27)..(28): Xaa is A or G or is absent

SEQ ID NO: 42363 - protein, 43 aa, Artificial Sequence; identical to SEQ ID NO: 30321
  GFR-binding peptide
  MOD_RES (5)..(6)..(41)..(43): Xaa is C or S
  MOD_RES (20)..(21)..(22)..(23)..(24): Xaa is A or G
  MOD_RES (25)..(26)..(27)..(28): Xaa is A or G or is absent

SEQ ID NO: 42364 - protein, 36 aa, Artificial Sequence; identical to SEQ ID NO: 28361
  GFR-binding peptide
  MOD_RES (34)..(36): Xaa is C or S
  MOD_RES (14)..(15)..(16)..(17)..(18): Xaa is A or G
  MOD_RES (19)..(20)..(21)..(22): Xaa is A or G or is absent

SEQ ID NO: 42365 - protein, 33 aa, Artificial Sequence; identical to SEQ ID NO: 30324
  GFR-binding peptide
  MOD_RES (1)..(33): Xaa is C or S

SEQ ID NO: 42366 - protein, 36 aa, Artificial Sequence; identical to SEQ ID NO: 29311
  GFR-binding peptide
  MOD_RES (4)..(5): Xaa is C or S

SEQ ID NO: 42367 - protein, 34 aa, Artificial Sequence; identical to SEQ ID NO: 30325
  GFR-binding peptide
  MOD_RES (3)..(4): Xaa is C or S

SEQ ID NO: 42368 - protein, 37 aa, Artificial Sequence; identical to SEQ ID NO: 28367
  GFR-binding peptide
  MOD_RES (6)..(7): Xaa is C or S

SEQ ID NO: 42369 - protein, 39 aa, Artificial Sequence; identical to SEQ ID NO: 28369
  GFR-binding peptide
  MOD_RES (4)..(5)..(39): Xaa is C or S
  MOD_RES (19)..(20)..(21)..(22)..(23): Xaa is A or G
  MOD_RES (24)..(25)..(26)..(27): Xaa is A or G or is absent

SEQ ID NO: 42370 - protein, 34 aa, Artificial Sequence; identical to SEQ ID NO: 30328
  GFR-binding peptide
  MOD_RES (2)..(2): Xaa is C or S
  MOD_RES (16)..(17)..(18)..(19)..(20): Xaa is A or G
  MOD_RES (21)..(22)..(23)..(24): Xaa is A or G or is absent

SEQ ID NO: 42371 - protein, 33 aa, Artificial Sequence; identical to SEQ ID NO: 29320
  GFR-binding peptide
  MOD_RES (32)..(32): Xaa is C or S

SEQ ID NO: 42372 - protein, 42 aa, Artificial Sequence; identical to SEQ ID NO: 30337
  GFR-binding peptide
  MOD_RES (6)..(40)..(42): Xaa is C or S
  MOD_RES (20)..(21)..(22)..(23)..(24): Xaa is A or G
  MOD_RES (25)..(26)..(27)..(28): Xaa is A or G or is absent

SEQ ID NO: 42373 - protein, 32 aa, Artificial Sequence; identical to SEQ ID NO: 28377
  GFR-binding peptide
  MOD_RES (14)..(15)..(16)..(17)..(18): Xaa is A or G
  MOD_RES (19)..(20)..(21)..(22): Xaa is A or G or is absent

SEQ ID NO: 42374 - protein, 33 aa, Artificial Sequence; identical to SEQ ID NO: 27410
  GFR-binding peptide
  MOD_RES (32)..(32): Xaa is C or S

SEQ ID NO: 42375 - protein, 37 aa, Artificial Sequence; identical to SEQ ID NO: 28379
  GFR-binding peptide
  MOD_RES (4)..(5): Xaa is C or S
  MOD_RES (19)..(20)..(21)..(22)..(23): Xaa is A or G
  MOD_RES (24)..(25)..(26)..(27): Xaa is A or G or is absent

SEQ ID NO: 42376 - protein, 34 aa, Artificial Sequence; identical to SEQ ID NO: 29329
  GFR-binding peptide
  MOD_RES (1)..(1): Xaa is C or S
  MOD_RES (15)..(16)..(17)..(18)..(19): Xaa is A or G
  MOD_RES (20)..(21)..(22)..(23): Xaa is A or G or is absent

SEQ ID NO: 42377 - protein, 32 aa, Artificial Sequence; identical to SEQ ID NO: 29334
  GFR-binding peptide
  MOD_RES (14)..(15)..(16)..(17)..(18): Xaa is A or G
  MOD_RES (19)..(20)..(21)..(22): Xaa is A or G or is absent

SEQ ID NO: 42378 - protein, 35 aa, Artificial Sequence
  GFR-binding peptide
  MOD_RES (33)..(35): Xaa is C or S
  MOD_RES (14)..(15)..(16)..(17)..(18): Xaa is A or G
  MOD_RES (19)..(20)..(21)..(22): Xaa is A or G or is absent
APVKTSPISMLYIXXXXXXXXXYKQYEMIVEEXGX

SEQ ID NO: 42379 - protein, 36 aa, Artificial Sequence
  GFR-binding peptide
  MOD_RES (4)..(5)..(36): Xaa is C or S
PSTXXAPVKTSPISMLYIDNGRVLLYKQYEMIVEEX

SEQ ID NO: 42380 - protein, 38 aa, Artificial Sequence; identical to SEQ ID NO: 29338
  GFR-binding peptide
  MOD_RES (2)..(3)..(35)..(37): Xaa is C or S

SEQ ID NO: 42381 - protein, 39 aa, Artificial Sequence; identical to SEQ ID NO: 27424
  GFR-binding peptide
  MOD_RES (3)..(4)..(36)..(38): Xaa is C or S

SEQ ID NO: 42382 - protein, 41 aa, Artificial Sequence
  GFR-binding peptide
  MOD_RES (5)..(6)..(38)..(40): Xaa is C or S
SAGPXXTPTKMSPISMLYINDKQQIIYKQYEGMVVDRXGXS

SEQ ID NO: 42383 - protein, 40 aa, Artificial Sequence; identical to SEQ ID NO: 29344
  GFR-binding peptide
  MOD_RES (6)..(7)..(40): Xaa is C or S

SEQ ID NO: 42384 - protein, 39 aa, Artificial Sequence; identical to SEQ ID NO: 29345
  GFR-binding peptide
  MOD_RES (3)..(4)..(38): Xaa is C or S
  MOD_RES (18)..(19)..(20)..(21)..(22): Xaa is A or G
  MOD_RES (23)..(24)..(25)..(26): Xaa is A or G or is absent

SEQ ID NO: 42385 - protein, 38 aa, Artificial Sequence
  GFR-binding peptide
  MOD_RES (2)..(3)..(36)..(38): Xaa is C or S
  MOD_RES (17)..(18)..(19)..(20)..(21): Xaa is A or G
  MOD_RES (22)..(23)..(24)..(25): Xaa is A or G or is absent
TXXAPVKTSPISMLYIXXXXXXXXXYKQYEMIVEEXGX

SEQ ID NO: 42386 - protein, 42 aa, Artificial Sequence
  GFR-binding peptide
  MOD_RES (4)..(5)..(39)..(41): Xaa is C or S
  MOD_RES (19)..(20)..(21)..(22)..(23): Xaa is A or G
  MOD_RES (24)..(25)..(26)..(27): Xaa is A or G or is absent
AGPXXTPTKMSPISMLYIXXXXXXXXXYKQYEGMVVDRXGXS

SEQ ID NO: 42387 - protein, 39 aa, Artificial Sequence; identical to SEQ ID NO: 27432
  GFR-binding peptide
  MOD_RES (4)..(5)..(39): Xaa is C or S
  MOD_RES (19)..(20)..(21)..(22)..(23): Xaa is A or G
  MOD_RES (24)..(25)..(26)..(27): Xaa is A or G or is absent

SEQ ID NO: 42388 - protein, 34 aa, Artificial Sequence; identical to SEQ ID NO: 27433
  GFR-binding peptide
  MOD_RES (32)..(34): Xaa is C or S

SEQ ID NO: 42389 - protein, 39 aa, Artificial Sequence; identical to SEQ ID NO: 30363
  GFR-binding peptide
  MOD_RES (3)..(4)..(36)..(38): Xaa is C or S

SEQ ID NO: 42390 - protein, 41 aa, Artificial Sequence; identical to SEQ ID NO: 28386
  GFR-binding peptide
  MOD_RES (3)..(4)..(38)..(40): Xaa is C or S
  MOD_RES (18)..(19)..(20)..(21)..(22): Xaa is A or G
  MOD_RES (23)..(24)..(25)..(26): Xaa is A or G or is absent

SEQ ID NO: 42391 - protein, 38 aa, Artificial Sequence; identical to SEQ ID NO: 30364
  GFR-binding peptide
  MOD_RES (4)..(36)..(38): Xaa is C or S

SEQ ID NO: 42392 - protein, 31 aa, Artificial Sequence; identical to SEQ ID NO: 30365
  GFR-binding peptide

SEQ ID NO: 42393 - protein, 37 aa, Artificial Sequence
  GFR-binding peptide
  MOD_RES (1)..(34)..(36): Xaa is C or S
  MOD_RES (15)..(16)..(17)..(18)..(19): Xaa is A or G
  MOD_RES (20)..(21)..(22)..(23): Xaa is A or G or is absent
XAPVKTSPISMLYIXXXXXXXXXYKQYEMIVEEXGXL

SEQ ID NO: 42394 - protein, 44 aa, Artificial Sequence; identical to SEQ ID NO: 28388
  GFR-binding peptide
  MOD_RES (7)..(41)..(43): Xaa is C or S
  MOD_RES (21)..(22)..(23)..(24)..(25): Xaa is A or G
  MOD_RES (26)..(27)..(28)..(29): Xaa is A or G or is absent

SEQ ID NO: 42395 - protein, 37 aa, Artificial Sequence; identical to SEQ ID NO: 29352
  GFR-binding peptide
  MOD_RES (6)..(7): Xaa is C or S

SEQ ID NO: 42396 - protein, 36 aa, Artificial Sequence; identical to SEQ ID NO: 27435
  GFR-binding peptide
  MOD_RES (2)..(3)..(35): Xaa is C or S

SEQ ID NO: 42397 - protein, 38 aa, Artificial Sequence; identical to SEQ ID NO: 29357
  GFR-binding peptide
  MOD_RES (4)..(5): Xaa is C or S
  MOD_RES (19)..(20)..(21)..(22)..(23): Xaa is A or G
  MOD_RES (24)..(25)..(26)..(27): Xaa is A or G or is absent

SEQ ID NO: 42398 - protein, 42 aa, Artificial Sequence; identical to SEQ ID NO: 28391
  GFR-binding peptide
  MOD_RES (4)..(5)..(39)..(41): Xaa is C or S
  MOD_RES (19)..(20)..(21)..(22)..(23): Xaa is A or G
  MOD_RES (24)..(25)..(26)..(27): Xaa is A or G or is absent

SEQ ID NO: 42399 - protein, 44 aa, Artificial Sequence; identical to SEQ ID NO: 28392
  GFR-binding peptide
  MOD_RES (6)..(7)..(41)..(43): Xaa is C or S
  MOD_RES (21)..(22)..(23)..(24)..(25): Xaa is A or G
  MOD_RES (26)..(27)..(28)..(29): Xaa is A or G or is absent

SEQ ID NO: 42400 - protein, 33 aa, Artificial Sequence; identical to SEQ ID NO: 30369
  GFR-binding peptide
  MOD_RES (14)..(15)..(16)..(17)..(18): Xaa is A or G
  MOD_RES (19)..(20)..(21)..(22): Xaa is A or G or is absent

SEQ ID NO: 42401 - protein, 40 aa, Artificial Sequence; identical to SEQ ID NO: 30370
  GFR-binding peptide
  MOD_RES (5)..(6)..(40): Xaa is C or S
  MOD_RES (20)..(21)..(22)..(23)..(24): Xaa is A or G
  MOD_RES (25)..(26)..(27)..(28): Xaa is A or G or is absent

SEQ ID NO: 42402 - protein, 38 aa, Artificial Sequence; identical to SEQ ID NO: 30372
  GFR-binding peptide
  MOD_RES (6)..(7): Xaa is C or S

SEQ ID NO: 42403 - protein, 43 aa, Artificial Sequence; identical to SEQ ID NO: 28398
  GFR-binding peptide
  MOD_RES (5)..(6)..(40)..(42): Xaa is C or S
  MOD_RES (20)..(21)..(22)..(23)..(24): Xaa is A or G
  MOD_RES (25)..(26)..(27)..(28): Xaa is A or G or is absent

SEQ ID NO: 42404 - protein, 32 aa, Artificial Sequence; identical to SEQ ID NO: 27443
  GFR-binding peptide
  MOD_RES (14)..(15)..(16)..(17)..(18): Xaa is A or G
  MOD_RES (19)..(20)..(21)..(22): Xaa is A or G or is absent

SEQ ID NO: 42405 - protein, 31 aa, Artificial Sequence; identical to SEQ ID NO: 27445
  GFR-binding peptide

SEQ ID NO: 42406 - protein, 40 aa, Artificial Sequence
  GFR-binding peptide
  MOD_RES (6)..(7)..(40): Xaa is C or S
  MOD_RES (21)..(22)..(23)..(24)..(25): Xaa is A or G
  MOD_RES (26)..(27)..(28)..(29): Xaa is A or G or is absent
RVPSTXXAPVKTSPISMLYIXXXXXXXXXYKQYEMIVEEX

SEQ ID NO: 42407 - protein, 37 aa, Artificial Sequence; identical to SEQ ID NO: 28401
  GFR-binding peptide
  MOD_RES (4)..(5)..(37): Xaa is C or S

SEQ ID NO: 42408 - protein, 39 aa, Artificial Sequence; identical to SEQ ID NO: 27447
  GFR-binding peptide
  MOD_RES (1)..(2)..(36)..(38): Xaa is C or S
  MOD_RES (16)..(17)..(18)..(19)..(20): Xaa is A or G
  MOD_RES (21)..(22)..(23)..(24): Xaa is A or G or is absent

SEQ ID NO: 42409 - protein, 35 aa, Artificial Sequence; identical to SEQ ID NO: 27449
  GFR-binding peptide
  MOD_RES (1)..(35): Xaa is C or S
  MOD_RES (15)..(16)..(17)..(18)..(19): Xaa is A or G
  MOD_RES (20)..(21)..(22)..(23): Xaa is A or G or is absent

SEQ ID NO: 42410 - protein, 34 aa, Artificial Sequence; identical to SEQ ID NO: 27453
  GFR-binding peptide
  MOD_RES (3)..(4): Xaa is C or S

SEQ ID NO: 42411 - protein, 37 aa, Artificial Sequence; identical to SEQ ID NO: 30380
  GFR-binding peptide
  MOD_RES (4)..(5)..(37): Xaa is C or S

SEQ ID NO: 42412 - protein, 35 aa, Artificial Sequence
  GFR-binding peptide
  MOD_RES (1)..(33)..(35): Xaa is C or S
XTPTKMSPISMLYINDKQQIIYKQYEGMVVDRXGX

SEQ ID NO: 42413 - protein, 33 aa, Artificial Sequence; identical to SEQ ID NO: 28408
  GFR-binding peptide
  MOD_RES (2)..(3): Xaa is C or S

SEQ ID NO: 42414 - protein, 36 aa, Artificial Sequence; identical to SEQ ID NO: 30381
  GFR-binding peptide
  MOD_RES (2)..(3): Xaa is C or S
  MOD_RES (17)..(18)..(19)..(20)..(21): Xaa is A or G
  MOD_RES (22)..(23)..(24)..(25): Xaa is A or G or is absent

SEQ ID NO: 42415 - protein, 34 aa, Artificial Sequence; identical to SEQ ID NO: 30382
  GFR-binding peptide
  MOD_RES (1)..(1): Xaa is C or S
  MOD_RES (15)..(16)..(17)..(18)..(19): Xaa is A or G
  MOD_RES (20)..(21)..(22)..(23): Xaa is A or G or is absent

SEQ ID NO: 42416 - protein, 40 aa, Artificial Sequence; identical to SEQ ID NO: 27460
  GFR-binding peptide
  MOD_RES (5)..(39): Xaa is C or S
  MOD_RES (19)..(20)..(21)..(22)..(23): Xaa is A or G
  MOD_RES (24)..(25)..(26)..(27): Xaa is A or G or is absent

SEQ ID NO: 42417 - protein, 38 aa, Artificial Sequence; identical to SEQ ID NO: 28411
  GFR-binding peptide
  MOD_RES (2)..(3)..(36)..(38): Xaa is C or S

SEQ ID NO: 42418 - protein, 31 aa, Artificial Sequence; identical to SEQ ID NO: 28415
  GFR-binding peptide

SEQ ID NO: 42419 - protein, 39 aa, Artificial Sequence; identical to SEQ ID NO: 27464
  GFR-binding peptide
  MOD_RES (2)..(3)..(37)..(39): Xaa is C or S
  MOD_RES (17)..(18)..(19)..(20)..(21): Xaa is A or G
  MOD_RES (22)..(23)..(24)..(25): Xaa is A or G or is absent

SEQ ID NO: 42420 - protein, 42 aa, Artificial Sequence; identical to SEQ ID NO: 30384
  GFR-binding peptide
  MOD_RES (6)..(7)..(41): Xaa is C or S
  MOD_RES (21)..(22)..(23)..(24)..(25): Xaa is A or G
  MOD_RES (26)..(27)..(28)..(29): Xaa is A or G or is absent

SEQ ID NO: 42421 - protein, 40 aa, Artificial Sequence; identical to SEQ ID NO: 28416
  GFR-binding peptide
  MOD_RES (4)..(5)..(39): Xaa is C or S
  MOD_RES (19)..(20)..(21)..(22)..(23): Xaa is A or G
  MOD_RES (24)..(25)..(26)..(27): Xaa is A or G or is absent

SEQ ID NO: 42422 - protein, 37 aa, Artificial Sequence; identical to SEQ ID NO: 27465
  GFR-binding peptide
  MOD_RES (3)..(4): Xaa is C or S
  MOD_RES (18)..(19)..(20)..(21)..(22): Xaa is A or G
  MOD_RES (23)..(24)..(25)..(26): Xaa is A or G or is absent

SEQ ID NO: 42423 - protein, 38 aa, Artificial Sequence; identical to SEQ ID NO: 30386
  GFR-binding peptide
  MOD_RES (4)..(5)..(37): Xaa is C or S

SEQ ID NO: 42424 - protein, 38 aa, Artificial Sequence; identical to SEQ ID NO: 28417
  GFR-binding peptide
  MOD_RES (5)..(6): Xaa is C or S
  MOD_RES (20)..(21)..(22)..(23)..(24): Xaa is A or G
  MOD_RES (25)..(26)..(27)..(28): Xaa is A or G or is absent

SEQ ID NO: 42425 - protein, 38 aa, Artificial Sequence; identical to SEQ ID NO: 27467
  GFR-binding peptide
  MOD_RES (3)..(4)..(36)..(38): Xaa is C or S

SEQ ID NO: 42426 - protein, 33 aa, Artificial Sequence; identical to SEQ ID NO: 30391
  GFR-binding peptide
  MOD_RES (14)..(15)..(16)..(17)..(18): Xaa is A or G
  MOD_RES (19)..(20)..(21)..(22): Xaa is A or G or is absent

SEQ ID NO: 42427 - protein, 38 aa, Artificial Sequence; identical to SEQ ID NO: 29386
  GFR-binding peptide
  MOD_RES (3)..(4)..(38): Xaa is C or S
  MOD_RES (18)..(19)..(20)..(21)..(22): Xaa is A or G
  MOD_RES (23)..(24)..(25)..(26): Xaa is A or G or is absent

SEQ ID NO: 42428 - protein, 39 aa, Artificial Sequence; identical to SEQ ID NO: 28422
  GFR-binding peptide
  MOD_RES (3)..(4)..(38): Xaa is C or S
  MOD_RES (18)..(19)..(20)..(21)..(22): Xaa is A or G
  MOD_RES (23)..(24)..(25)..(26): Xaa is A or G or is absent

SEQ ID NO: 42429 - protein, 38 aa, Artificial Sequence
  GFR-binding peptide
  MOD_RES (1)..(2)..(35)..(37): Xaa is C or S
  MOD_RES (16)..(17)..(18)..(19)..(20): Xaa is A or G
  MOD_RES (21)..(22)..(23)..(24): Xaa is A or G or is absent
XXAPVKTSPISMLYIXXXXXXXXXYKQYEMIVEEXGXL

SEQ ID NO: 42430 - protein, 36 aa, Artificial Sequence; identical to SEQ ID NO: 28423
  GFR-binding peptide
  MOD_RES (1)..(35): Xaa is C or S
  MOD_RES (15)..(16)..(17)..(18)..(19): Xaa is A or G
  MOD_RES (20)..(21)..(22)..(23): Xaa is A or G or is absent

SEQ ID NO: 42431 - protein, 37 aa, Artificial Sequence; identical to SEQ ID NO: 29388
  GFR-binding peptide
  MOD_RES (2)..(3)..(35)..(37): Xaa is C or S

SEQ ID NO: 42432 - protein, 38 aa, Artificial Sequence; identical to SEQ ID NO: 28426
  GFR-binding peptide
  MOD_RES (4)..(5): Xaa is C or S
  MOD_RES (19)..(20)..(21)..(22)..(23): Xaa is A or G
  MOD_RES (24)..(25)..(26)..(27): Xaa is A or G or is absent

SEQ ID NO: 42433 - protein, 43 aa, Artificial Sequence
  GFR-binding peptide
  MOD_RES (6)..(7)..(40)..(42): Xaa is C or S
  MOD_RES (21)..(22)..(23)..(24)..(25): Xaa is A or G
  MOD_RES (26)..(27)..(28)..(29): Xaa is A or G or is absent
RVPSTXXAPVKTSPISMLYIXXXXXXXXXYKQYEMIVEEXGXL

SEQ ID NO: 42434 - protein, 32 aa, Artificial Sequence; identical to SEQ ID NO: 27473
  GFR-binding peptide
  MOD_RES (14)..(15)..(16)..(17)..(18): Xaa is A or G
  MOD_RES (19)..(20)..(21)..(22): Xaa is A or G or is absent

SEQ ID NO: 42435 - protein, 33 aa, Artificial Sequence; identical to SEQ ID NO: 30398
  GFR-binding peptide
  MOD_RES (1)..(33): Xaa is C or S

SEQ ID NO: 42436 - protein, 35 aa, Artificial Sequence; identical to SEQ ID NO: 28429
  GFR-binding peptide
  MOD_RES (1)..(35): Xaa is C or S
  MOD_RES (15)..(16)..(17)..(18)..(19): Xaa is A or G
  MOD_RES (20)..(21)..(22)..(23): Xaa is A or G or is absent

SEQ ID NO: 42437 - protein, 42 aa, Artificial Sequence; identical to SEQ ID NO: 29390
  GFR-binding peptide
  MOD_RES (6)..(7)..(41): Xaa is C or S
  MOD_RES (21)..(22)..(23)..(24)..(25): Xaa is A or G
  MOD_RES (26)..(27)..(28)..(29): Xaa is A or G or is absent

SEQ ID NO: 42438 - protein, 41 aa, Artificial Sequence; identical to SEQ ID NO: 28431
  GFR-binding peptide
  MOD_RES (5)..(6)..(38)..(40): Xaa is C or S

SEQ ID NO: 42439 - protein, 40 aa, Artificial Sequence; identical to SEQ ID NO: 29391
  GFR-binding peptide
  MOD_RES (5)..(6)..(38)..(40): Xaa is C or S

SEQ ID NO: 42440 - protein, 37 aa, Artificial Sequence; identical to SEQ ID NO: 28436
  GFR-binding peptide
  MOD_RES (35)..(37): Xaa is C or S
  MOD_RES (14)..(15)..(16)..(17)..(18): Xaa is A or G
  MOD_RES (19)..(20)..(21)..(22): Xaa is A or G or is absent

SEQ ID NO: 42441 - protein, 31 aa, Artificial Sequence; identical to SEQ ID NO: 29393
  GFR-binding peptide
  MOD_RES (1)..(1): Xaa is C or S

SEQ ID NO: 42442 - protein, 39 aa, Artificial Sequence; identical to SEQ ID NO: 29395
  GFR-binding peptide
  MOD_RES (3)..(4)..(38): Xaa is C or S
  MOD_RES (18)..(19)..(20)..(21)..(22): Xaa is A or G
  MOD_RES (23)..(24)..(25)..(26): Xaa is A or G or is absent

SEQ ID NO: 42443 - protein, 37 aa, Artificial Sequence
  GFR-binding peptide
  MOD_RES (1)..(2)..(35)..(37): Xaa is C or S
  MOD_RES (16)..(17)..(18)..(19)..(20): Xaa is A or G
  MOD_RES (21)..(22)..(23)..(24): Xaa is A or G or is absent
XXAPVKTSPISMLYIXXXXXXXXXYKQYEMIVEEXGX

SEQ ID NO: 42444 - protein, 38 aa, Artificial Sequence; identical to SEQ ID NO: 28440
  GFR-binding peptide
  MOD_RES (4)..(5)..(37): Xaa is C or S

SEQ ID NO: 42445 - protein, 41 aa, Artificial Sequence; identical to SEQ ID NO: 27483
  GFR-binding peptide
  MOD_RES (5)..(6)..(38)..(40): Xaa is C or S

SEQ ID NO: 42446 - protein, 41 aa, Artificial Sequence; identical to SEQ ID NO: 27484
  GFR-binding peptide
  MOD_RES (5)..(6)..(40): Xaa is C or S
  MOD_RES (20)..(21)..(22)..(23)..(24): Xaa is A or G
  MOD_RES (25)..(26)..(27)..(28): Xaa is A or G or is absent

SEQ ID NO: 42447 - protein, 36 aa, Artificial Sequence; identical to SEQ ID NO: 27485
  GFR-binding peptide
  MOD_RES (3)..(4): Xaa is C or S
  MOD_RES (18)..(19)..(20)..(21)..(22): Xaa is A or G
  MOD_RES (23)..(24)..(25)..(26): Xaa is A or G or is absent

SEQ ID NO: 42448 - protein, 33 aa, Artificial Sequence; identical to SEQ ID NO: 29399
  GFR-binding peptide
  MOD_RES (1)..(1): Xaa is C or S
  MOD_RES (15)..(16)..(17)..(18)..(19): Xaa is A or G
  MOD_RES (20)..(21)..(22)..(23): Xaa is A or G or is absent

SEQ ID NO: 42449 - protein, 37 aa, Artificial Sequence; identical to SEQ ID NO: 28442
  GFR-binding peptide
  MOD_RES (2)..(3)..(37): Xaa is C or S
  MOD_RES (17)..(18)..(19)..(20)..(21): Xaa is A or G
  MOD_RES (22)..(23)..(24)..(25): Xaa is A or G or is absent

SEQ ID NO: 42450 - protein, 35 aa, Artificial Sequence; identical to SEQ ID NO: 27487
  GFR-binding peptide
  MOD_RES (2)..(3): Xaa is C or S
  MOD_RES (17)..(18)..(19)..(20)..(21): Xaa is A or G
  MOD_RES (22)..(23)..(24)..(25): Xaa is A or G or is absent

SEQ ID NO: 42451 - protein, 39 aa, Artificial Sequence; identical to SEQ ID NO: 30419
  GFR-binding peptide
  MOD_RES (5)..(6)..(38): Xaa is C or S

SEQ ID NO: 42452 - protein, 41 aa, Artificial Sequence; identical to SEQ ID NO: 29403
  GFR-binding peptide
  MOD_RES (3)..(4)..(39)..(41): Xaa is C or S
  MOD_RES (18)..(19)..(20)..(21)..(22): Xaa is A or G
  MOD_RES (23)..(24)..(25)..(26): Xaa is A or G or is absent

SEQ ID NO: 42453 - protein, 33 aa, Artificial Sequence; identical to SEQ ID NO: 27490
  GFR-binding peptide
  MOD_RES (14)..(15)..(16)..(17)..(18): Xaa is A or G
  MOD_RES (19)..(20)..(21)..(22): Xaa is A or G or is absent

SEQ ID NO: 42454 - protein, 40 aa, Artificial Sequence; identical to SEQ ID NO: 28444
  GFR-binding peptide
  MOD_RES (5)..(6)..(38)..(40): Xaa is C or S

SEQ ID NO: 42455 - protein, 37 aa, Artificial Sequence; identical to SEQ ID NO: 28446
  GFR-binding peptide
  MOD_RES (1)..(35)..(37): Xaa is C or S
  MOD_RES (15)..(16)..(17)..(18)..(19): Xaa is A or G
  MOD_RES (20)..(21)..(22)..(23): Xaa is A or G or is absent

SEQ ID NO: 42456 - protein, 32 aa, Artificial Sequence
  GFR-binding peptide
  MOD_RES (32)..(32): Xaa is C or S
TPTKMSPISMLYINDKQQIIYKQYEGMVVDRX

SEQ ID NO: 42457 - protein, 36 aa, Artificial Sequence; identical to SEQ ID NO: 29408
  GFR-binding peptide
  MOD_RES (1)..(2)..(34)..(36): Xaa is C or S

SEQ ID NO: 42458 - protein, 35 aa, Artificial Sequence; identical to SEQ ID NO: 29413
  GFR-binding peptide
  MOD_RES (2)..(3): Xaa is C or S
  MOD_RES (17)..(18)..(19)..(20)..(21): Xaa is A or G
  MOD_RES (22)..(23)..(24)..(25): Xaa is A or G or is absent

SEQ ID NO: 42459 - protein, 39 aa, Artificial Sequence; identical to SEQ ID NO: 27496
  GFR-binding peptide
  MOD_RES (3)..(4)..(37)..(39): Xaa is C or S

SEQ ID NO: 42460 - protein, 37 aa, Artificial Sequence
  GFR-binding peptide
  MOD_RES (5)..(6)..(37): Xaa is C or S
VPSTXXAPVKTSPISMLYIDNGRVLLYKQYEMIVEEX

SEQ ID NO: 42461 - protein, 30 aa, Artificial Sequence
  GFR-binding peptide
TPTKMSPISMLYINDKQQIIYKQYEGMVVD

SEQ ID NO: 42462 - protein, 35 aa, Artificial Sequence; identical to SEQ ID NO: 29416
  GFR-binding peptide
  MOD_RES (3)..(3): Xaa is C or S
  MOD_RES (17)..(18)..(19)..(20)..(21): Xaa is A or G
  MOD_RES (22)..(23)..(24)..(25): Xaa is A or G or is absent

SEQ ID NO: 42463 - protein, 36 aa, Artificial Sequence; identical to SEQ ID NO: 29417
  GFR-binding peptide
  MOD_RES (34)..(36): Xaa is C or S
  MOD_RES (14)..(15)..(16)..(17)..(18): Xaa is A or G
  MOD_RES (19)..(20)..(21)..(22): Xaa is A or G or is absent

SEQ ID NO: 42464 - protein, 33 aa, Artificial Sequence; identical to SEQ ID NO: 29419
  GFR-binding peptide
  MOD_RES (1)..(33): Xaa is C or S

SEQ ID NO: 42465 - protein, 34 aa, Artificial Sequence; identical to SEQ ID NO: 30431
  GFR-binding peptide
  MOD_RES (34)..(34): Xaa is C or S
  MOD_RES (14)..(15)..(16)..(17)..(18): Xaa is A or G
  MOD_RES (19)..(20)..(21)..(22): Xaa is A or G or is absent

SEQ ID NO: 42466 - protein, 39 aa, Artificial Sequence
  GFR-binding peptide
  MOD_RES (1)..(2)..(36)..(38): Xaa is C or S
  MOD_RES (16)..(17)..(18)..(19)..(20): Xaa is A or G
  MOD_RES (21)..(22)..(23)..(24): Xaa is A or G or is absent
XXTPTKMSPISMLYIXXXXXXXXXYKQYEGMVVDRXGXS

SEQ ID NO: 42467 - protein, 35 aa, Artificial Sequence; identical to SEQ ID NO: 27507
  GFR-binding peptide
  MOD_RES (34)..(34): Xaa is C or S
  MOD_RES (14)..(15)..(16)..(17)..(18): Xaa is A or G
  MOD_RES (19)..(20)..(21)..(22): Xaa is A or G or is absent

SEQ ID NO: 42468 - protein, 36 aa, Artificial Sequence; identical to SEQ ID NO: 28461
  GFR-binding peptide
  MOD_RES (3)..(35): Xaa is C or S

SEQ ID NO: 42469 - protein, 35 aa, Artificial Sequence; identical to SEQ ID NO: 27512
  GFR-binding peptide
  MOD_RES (2)..(34): Xaa is C or S

SEQ ID NO: 42470 - protein, 34 aa, Artificial Sequence; identical to SEQ ID NO: 29426
  GFR-binding peptide
  MOD_RES (2)..(3): Xaa is C or S

SEQ ID NO: 42471 - protein, 40 aa, Artificial Sequence; identical to SEQ ID NO: 29430
  GFR-binding peptide
  MOD_RES (4)..(5)..(39): Xaa is C or S
  MOD_RES (19)..(20)..(21)..(22)..(23): Xaa is A or G
  MOD_RES (24)..(25)..(26)..(27): Xaa is A or G or is absent

SEQ ID NO: 42472 - protein, 39 aa, Artificial Sequence; identical to SEQ ID NO: 30439
  GFR-binding peptide
  MOD_RES (5)..(37)..(39): Xaa is C or S

SEQ ID NO: 42473 - protein, 40 aa, Artificial Sequence
  GFR-binding peptide
  MOD_RES (5)..(6)..(40): Xaa is C or S
  MOD_RES (20)..(21)..(22)..(23)..(24): Xaa is A or G
  MOD_RES (25)..(26)..(27)..(28): Xaa is A or G or is absent
SAGPXXTPTKMSPISMLYIXXXXXXXXXYKQYEGMVVDRX

SEQ ID NO: 42474 - protein, 32 aa, Artificial Sequence
  GFR-binding peptide
  MOD_RES (1)..(2): Xaa is C or S
XXAPVKTSPISMLYIDNGRVLLYKQYEMIVEE

SEQ ID NO: 42475 - protein, 37 aa, Artificial Sequence
  GFR-binding peptide
  MOD_RES (2)..(3)..(36): Xaa is C or S
  MOD_RES (17)..(18)..(19)..(20)..(21): Xaa is A or G
  MOD_RES (22)..(23)..(24)..(25): Xaa is A or G or is absent
TXXAPVKTSPISMLYIXXXXXXXXXYKQYEMIVEEXG

SEQ ID NO: 42476 - protein, 34 aa, Artificial Sequence; identical to SEQ ID NO: 29439
  GFR-binding peptide
  MOD_RES (1)..(2)..(34): Xaa is C or S

SEQ ID NO: 42477 - protein, 40 aa, Artificial Sequence; identical to SEQ ID NO: 29440
  GFR-binding peptide
  MOD_RES (5)..(6)..(40): Xaa is C or S
  MOD_RES (20)..(21)..(22)..(23)..(24): Xaa is A or G
  MOD_RES (25)..(26)..(27)..(28): Xaa is A or G or is absent

SEQ ID NO: 42478 - protein, 36 aa, Artificial Sequence; identical to SEQ ID NO: 28474
  GFR-binding peptide
  MOD_RES (3)..(4)..(36): Xaa is C or S

SEQ ID NO: 42479 - protein, 36 aa, Artificial Sequence; identical to SEQ ID NO: 30445
  GFR-binding peptide
  MOD_RES (1)..(2)..(34)..(36): Xaa is C or S

SEQ ID NO: 42480 - protein, 40 aa, Artificial Sequence
  GFR-binding peptide
  MOD_RES (6)..(7)..(39): Xaa is C or S
HVPKPXXAPTKLSPISVLYIDDSSNVIYKQYENMVVRSXG

SEQ ID NO: 42481 - protein, 38 aa, Artificial Sequence; identical to SEQ ID NO: 29443
  GFR-binding peptide
  MOD_RES (1)..(2)..(36)..(38): Xaa is C or S
  MOD_RES (16)..(17)..(18)..(19)..(20): Xaa is A or G
  MOD_RES (21)..(22)..(23)..(24): Xaa is A or G or is absent

SEQ ID NO: 42482 - protein, 35 aa, Artificial Sequence
  GFR-binding peptide
  MOD_RES (1)..(2)..(34): Xaa is C or S
XXTPTKMSPISMLYINDKQQIIYKQYEGMVVDRXG

SEQ ID NO: 42483 - protein, 35 aa, Artificial Sequence
  GFR-binding peptide
  MOD_RES (4)..(5): Xaa is C or S
AGPXXTPTKMSPISMLYINDKQQIIYKQYEGMVVD

SEQ ID NO: 42484 - protein, 34 aa, Artificial Sequence; identical to SEQ ID NO: 29444
  GFR-binding peptide
  MOD_RES (2)..(3): Xaa is C or S

SEQ ID NO: 42485 - protein, 37 aa, Artificial Sequence; identical to SEQ ID NO: 29446
  GFR-binding peptide
  MOD_RES (6)..(7): Xaa is C or S

SEQ ID NO: 42486 - protein, 32 aa, Artificial Sequence; identical to SEQ ID NO: 27527
  GFR-binding peptide
  MOD_RES (1)..(2): Xaa is C or S

SEQ ID NO: 42487 - protein, 43 aa, Artificial Sequence; identical to SEQ ID NO: 27529
  GFR-binding peptide
  MOD_RES (6)..(7)..(41)..(43): Xaa is C or S
  MOD_RES (21)..(22)..(23)..(24)..(25): Xaa is A or G
  MOD_RES (26)..(27)..(28)..(29): Xaa is A or G or is absent

SEQ ID NO: 42488 - protein, 41 aa, Artificial Sequence
  GFR-binding peptide
  MOD_RES (6)..(7)..(41): Xaa is C or S
  MOD_RES (21)..(22)..(23)..(24)..(25): Xaa is A or G
  MOD_RES (26)..(27)..(28)..(29): Xaa is A or G or is absent
HVPKPXXAPTKLSPISVLYIXXXXXXXXXYKQYENMVVRSX

SEQ ID NO: 42489 - protein, 33 aa, Artificial Sequence
  GFR-binding peptide
  MOD_RES (31)..(33): Xaa is C or S
APVKTSPISMLYIDNGRVLLYKQYEMIVEEXGX

SEQ ID NO: 42490 - protein, 39 aa, Artificial Sequence; identical to SEQ ID NO: 29455
  GFR-binding peptide
  MOD_RES (6)..(6): Xaa is C or S
  MOD_RES (20)..(21)..(22)..(23)..(24): Xaa is A or G
  MOD_RES (25)..(26)..(27)..(28): Xaa is A or G or is absent

SEQ ID NO: 42491 - protein, 35 aa, Artificial Sequence; identical to SEQ ID NO: 29456
  GFR-binding peptide
  MOD_RES (1)..(34): Xaa is C or S

SEQ ID NO: 42492 - protein, 35 aa, Artificial Sequence; identical to SEQ ID NO: 30452
  GFR-binding peptide
  MOD_RES (1)..(33)..(35): Xaa is C or S

SEQ ID NO: 42493 - protein, 34 aa, Artificial Sequence; identical to SEQ ID NO: 29457
  GFR-binding peptide
  MOD_RES (1)..(1): Xaa is C or S
  MOD_RES (15)..(16)..(17)..(18)..(19): Xaa is A or G
  MOD_RES (20)..(21)..(22)..(23): Xaa is A or G or is absent

SEQ ID NO: 42494 - protein, 39 aa, Artificial Sequence; identical to SEQ ID NO: 27533
  GFR-binding peptide
  MOD_RES (4)..(5)..(37)..(39): Xaa is C or S

SEQ ID NO: 42495 - protein, 40 aa, Artificial Sequence; identical to SEQ ID NO: 27535
  GFR-binding peptide
  MOD_RES (5)..(6): Xaa is C or S
  MOD_RES (20)..(21)..(22)..(23)..(24): Xaa is A or G
  MOD_RES (25)..(26)..(27)..(28): Xaa is A or G or is absent

SEQ ID NO: 42496 - protein, 39 aa, Artificial Sequence; identical to SEQ ID NO: 27537
  GFR-binding peptide
  MOD_RES (4)..(5)..(39): Xaa is C or S
  MOD_RES (19)..(20)..(21)..(22)..(23): Xaa is A or G
  MOD_RES (24)..(25)..(26)..(27): Xaa is A or G or is absent

SEQ ID NO: 42497 - protein, 40 aa, Artificial Sequence; identical to SEQ ID NO: 29462
  GFR-binding peptide
  MOD_RES (6)..(7)..(39): Xaa is C or S

SEQ ID NO: 42498 - protein, 41 aa, Artificial Sequence; identical to SEQ ID NO: 28486
  GFR-binding peptide
  MOD_RES (5)..(6)..(38)..(40): Xaa is C or S

SEQ ID NO: 42499 - protein, 42 aa, Artificial Sequence; identical to SEQ ID NO: 28487
  GFR-binding peptide
  MOD_RES (5)..(6)..(40)..(42): Xaa is C or S
  MOD_RES (20)..(21)..(22)..(23)..(24): Xaa is A or G
  MOD_RES (25)..(26)..(27)..(28): Xaa is A or G or is absent

SEQ ID NO: 42500 - protein, 37 aa, Artificial Sequence; identical to SEQ ID NO: 27541
  GFR-binding peptide
  MOD_RES (1)..(2)..(36): Xaa is C or S
  MOD_RES (16)..(17)..(18)..(19)..(20): Xaa is A or G
  MOD_RES (21)..(22)..(23)..(24): Xaa is A or G or is absent

SEQ ID NO: 42501 - protein, 40 aa, Artificial Sequence; identical to SEQ ID NO: 29464
  GFR-binding peptide
  MOD_RES (6)..(7)..(39): Xaa is C or S

SEQ ID NO: 42502 - protein, 37 aa, Artificial Sequence; identical to SEQ ID NO: 30459
  GFR-binding peptide
  MOD_RES (34)..(36): Xaa is C or S
  MOD_RES (14)..(15)..(16)..(17)..(18): Xaa is A or G
  MOD_RES (19)..(20)..(21)..(22): Xaa is A or G or is absent

SEQ ID NO: 42503 - protein, 32 aa, Artificial Sequence; identical to SEQ ID NO: 30463
  GFR-binding peptide
  MOD_RES (14)..(15)..(16)..(17)..(18): Xaa is A or G
  MOD_RES (19)..(20)..(21)..(22): Xaa is A or G or is absent

SEQ ID NO: 42504 - protein, 34 aa, Artificial Sequence; identical to SEQ ID NO: 27545
  GFR-binding peptide
  MOD_RES (3)..(4): Xaa is C or S

SEQ ID NO: 42505 - protein, 34 aa, Artificial Sequence; identical to SEQ ID NO: 29468
  GFR-binding peptide
  MOD_RES (1)..(2)..(34): Xaa is C or S

SEQ ID NO: 42506 - protein, 35 aa, Artificial Sequence; identical to SEQ ID NO: 29472
  GFR-binding peptide
  MOD_RES (32)..(34): Xaa is C or S

SEQ ID NO: 42507 - protein, 36 aa, Artificial Sequence; identical to SEQ ID NO: 28494
  GFR-binding peptide
  MOD_RES (3)..(4)..(36): Xaa is C or S

SEQ ID NO: 42508 - protein, 40 aa, Artificial Sequence; identical to SEQ ID NO: 28499
  GFR-binding peptide
  MOD_RES (4)..(5)..(37)..(39): Xaa is C or S

SEQ ID NO: 42509 - protein, 37 aa, Artificial Sequence; identical to SEQ ID NO: 27552
  GFR-binding peptide
  MOD_RES (3)..(4): Xaa is C or S
  MOD_RES (18)..(19)..(20)..(21)..(22): Xaa is A or G
  MOD_RES (23)..(24)..(25)..(26): Xaa is A or G or is absent

SEQ ID NO: 42510 - protein, 35 aa, Artificial Sequence; identical to SEQ ID NO: 29478
  GFR-binding peptide
  MOD_RES (1)..(33)..(35): Xaa is C or S

SEQ ID NO: 42511 - protein, 39 aa, Artificial Sequence; identical to SEQ ID NO: 27556
  GFR-binding peptide
  MOD_RES (3)..(4)..(38): Xaa is C or S
  MOD_RES (18)..(19)..(20)..(21)..(22): Xaa is A or G
  MOD_RES (23)..(24)..(25)..(26): Xaa is A or G or is absent

SEQ ID NO: 42512 - protein, 44 aa, Artificial Sequence; identical to SEQ ID NO: 29480
  GFR-binding peptide
  MOD_RES (6)..(7)..(41)..(43): Xaa is C or S
  MOD_RES (21)..(22)..(23)..(24)..(25): Xaa is A or G
  MOD_RES (26)..(27)..(28)..(29): Xaa is A or G or is absent

SEQ ID NO: 42513 - protein, 37 aa, Artificial Sequence; identical to SEQ ID NO: 28510
  GFR-binding peptide
  MOD_RES (2)..(3)..(37): Xaa is C or S
  MOD_RES (17)..(18)..(19)..(20)..(21): Xaa is A or G
  MOD_RES (22)..(23)..(24)..(25): Xaa is A or G or is absent

SEQ ID NO: 42514 - protein, 37 aa, Artificial Sequence
  GFR-binding peptide
  MOD_RES (3)..(4)..(36): Xaa is C or S
GPXXTPTKMSPISMLYINDKQQIIYKQYEGMVVDRXG

SEQ ID NO: 42515 - protein, 41 aa, Artificial Sequence; identical to SEQ ID NO: 29486
  GFR-binding peptide
  MOD_RES (6)..(7)..(39)..(41): Xaa is C or S

SEQ ID NO: 42516 - protein, 33 aa, Artificial Sequence; identical to SEQ ID NO: 30470
  GFR-binding peptide
  MOD_RES (1)..(1): Xaa is C or S
  MOD_RES (15)..(16)..(17)..(18)..(19): Xaa is A or G
  MOD_RES (20)..(21)..(22)..(23): Xaa is A or G or is absent

SEQ ID NO: 42517 - protein, 40 aa, Artificial Sequence; identical to SEQ ID NO: 27559
  GFR-binding peptide
  MOD_RES (6)..(40): Xaa is C or S
  MOD_RES (20)..(21)..(22)..(23)..(24): Xaa is A or G
  MOD_RES (25)..(26)..(27)..(28): Xaa is A or G or is absent

SEQ ID NO: 42518 - protein, 39 aa, Artificial Sequence; identical to SEQ ID NO: 30471
  GFR-binding peptide
  MOD_RES (6)..(7)..(39): Xaa is C or S

SEQ ID NO: 42519 - protein, 41 aa, Artificial Sequence; identical to SEQ ID NO: 29488
  GFR-binding peptide
  MOD_RES (6)..(40): Xaa is C or S
  MOD_RES (20)..(21)..(22)..(23)..(24): Xaa is A or G
  MOD_RES (25)..(26)..(27)..(28): Xaa is A or G or is absent

SEQ ID NO: 42520 - protein, 34 aa, Artificial Sequence
  GFR-binding peptide
  MOD_RES (2)..(3): Xaa is C or S
PXXTPTKMSPISMLYINDKQQIIYKQYEGMVVDR

SEQ ID NO: 42521 - protein, 36 aa, Artificial Sequence; identical to SEQ ID NO: 27560
  GFR-binding peptide
  MOD_RES (3)..(3): Xaa is C or S
  MOD_RES (17)..(18)..(19)..(20)..(21): Xaa is A or G
  MOD_RES (22)..(23)..(24)..(25): Xaa is A or G or is absent

SEQ ID NO: 42522 - protein, 38 aa, Artificial Sequence; identical to SEQ ID NO: 29493
  GFR-binding peptide
  MOD_RES (4)..(5): Xaa is C or S
  MOD_RES (19)..(20)..(21)..(22)..(23): Xaa is A or G
  MOD_RES (24)..(25)..(26)..(27): Xaa is A or G or is absent

SEQ ID NO: 42523 - protein, 33 aa, Artificial Sequence; identical to SEQ ID NO: 30476
  GFR-binding peptide
  MOD_RES (3)..(3): Xaa is C or S

SEQ ID NO: 42524 - protein, 37 aa, Artificial Sequence
  GFR-binding peptide
  MOD_RES (2)..(3)..(37): Xaa is C or S
  MOD_RES (17)..(18)..(19)..(20)..(21): Xaa is A or G
  MOD_RES (22)..(23)..(24)..(25): Xaa is A or G or is absent
PXXTPTKMSPISMLYIXXXXXXXXXYKQYEGMVVDRX

SEQ ID NO: 42525 - protein, 40 aa, Artificial Sequence; identical to SEQ ID NO: 27563
  GFR-binding peptide
  MOD_RES (2)..(3)..(37)..(39): Xaa is C or S
  MOD_RES (17)..(18)..(19)..(20)..(21): Xaa is A or G
  MOD_RES (22)..(23)..(24)..(25): Xaa is A or G or is absent

SEQ ID NO: 42526 - protein, 41 aa, Artificial Sequence
  GFR-binding peptide
  MOD_RES (6)..(7)..(39)..(41): Xaa is C or S
GSAGPXXTPTKMSPISMLYINDKQQIIYKQYEGMVVDRXGX

SEQ ID NO: 42527 - protein, 43 aa, Artificial Sequence; identical to SEQ ID NO: 30479
  GFR-binding peptide
  MOD_RES (6)..(7)..(41)..(43): Xaa is C or S
  MOD_RES (21)..(22)..(23)..(24)..(25): Xaa is A or G
  MOD_RES (26)..(27)..(28)..(29): Xaa is A or G or is absent

SEQ ID NO: 42528 - protein, 34 aa, Artificial Sequence; identical to SEQ ID NO: 29497
  GFR-binding peptide
  MOD_RES (4)..(4): Xaa is C or S

SEQ ID NO: 42529 - protein, 40 aa, Artificial Sequence; identical to SEQ ID NO: 27566
  GFR-binding peptide
  MOD_RES (6)..(7): Xaa is C or S
  MOD_RES (21)..(22)..(23)..(24)..(25): Xaa is A or G
  MOD_RES (26)..(27)..(28)..(29): Xaa is A or G or is absent

SEQ ID NO: 42530 - protein, 40 aa, Artificial Sequence; identical to SEQ ID NO: 28525
  GFR-binding peptide
  MOD_RES (2)..(3)..(37)..(39): Xaa is C or S
  MOD_RES (17)..(18)..(19)..(20)..(21): Xaa is A or G
  MOD_RES (22)..(23)..(24)..(25): Xaa is A or G or is absent

SEQ ID NO: 42531 - protein, 39 aa, Artificial Sequence; identical to SEQ ID NO: 30484
  GFR-binding peptide
  MOD_RES (3)..(4)..(36)..(38): Xaa is C or S

SEQ ID NO: 42532 - protein, 38 aa, Artificial Sequence; identical to SEQ ID NO: 30485
  GFR-binding peptide
  MOD_RES (2)..(3)..(35)..(37): Xaa is C or S

SEQ ID NO: 42533 - protein, 35 aa, Artificial Sequence; identical to SEQ ID NO: 29503
  GFR-binding peptide
  MOD_RES (1)..(2): Xaa is C or S
  MOD_RES (16)..(17)..(18)..(19)..(20): Xaa is A or G
  MOD_RES (21)..(22)..(23)..(24): Xaa is A or G or is absent

SEQ ID NO: 42534 - protein, 36 aa, Artificial Sequence; identical to SEQ ID NO: 30487
  GFR-binding peptide
  MOD_RES (4)..(4): Xaa is C or S
  MOD_RES (18)..(19)..(20)..(21)..(22): Xaa is A or G
  MOD_RES (23)..(24)..(25)..(26): Xaa is A or G or is absent

SEQ ID NO: 42535 - protein, 36 aa, Artificial Sequence; identical to SEQ ID NO: 27575
  GFR-binding peptide
  MOD_RES (3)..(4): Xaa is C or S
  MOD_RES (18)..(19)..(20)..(21)..(22): Xaa is A or G
  MOD_RES (23)..(24)..(25)..(26): Xaa is A or G or is absent

SEQ ID NO: 42536 - protein, 41 aa, Artificial Sequence; identical to SEQ ID NO: 29508
  GFR-binding peptide
  MOD_RES (6)..(38)..(40): Xaa is C or S

SEQ ID NO: 42537 - protein, 33 aa, Artificial Sequence
  GFR-binding peptide
  MOD_RES (2)..(3): Xaa is C or S
TXXAPVKTSPISMLYIDNGRVLLYKQYEMIVEE

SEQ ID NO: 42538 - protein, 36 aa, Artificial Sequence; identical to SEQ ID NO: 28535
  GFR-binding peptide
  MOD_RES (1)..(2)..(34)..(36): Xaa is C or S

SEQ ID NO: 42539 - protein, 36 aa, Artificial Sequence; identical to SEQ ID NO: 28536
  GFR-binding peptide
  MOD_RES (2)..(3): Xaa is C or S
  MOD_RES (17)..(18)..(19)..(20)..(21): Xaa is A or G
  MOD_RES (22)..(23)..(24)..(25): Xaa is A or G or is absent

SEQ ID NO: 42540 - protein, 34 aa, Artificial Sequence; identical to SEQ ID NO: 29513
  GFR-binding peptide
  MOD_RES (32)..(34): Xaa is C or S

SEQ ID NO: 42541 - protein, 34 aa, Artificial Sequence; identical to SEQ ID NO: 30497
  GFR-binding peptide
  MOD_RES (34)..(34): Xaa is C or S
  MOD_RES (14)..(15)..(16)..(17)..(18): Xaa is A or G
  MOD_RES (19)..(20)..(21)..(22): Xaa is A or G or is absent

SEQ ID NO: 42542 - protein, 40 aa, Artificial Sequence; identical to SEQ ID NO: 27586
  GFR-binding peptide
  MOD_RES (5)..(6)..(38)..(40): Xaa is C or S

SEQ ID NO: 42543 - protein, 42 aa, Artificial Sequence; identical to SEQ ID NO: 27587
  GFR-binding peptide
  MOD_RES (7)..(41): Xaa is C or S
  MOD_RES (21)..(22)..(23)..(24)..(25): Xaa is A or G
  MOD_RES (26)..(27)..(28)..(29): Xaa is A or G or is absent

SEQ ID NO: 42544 - protein, 34 aa, Artificial Sequence
  GFR-binding peptide
  MOD_RES (32)..(34): Xaa is C or S
TPTKMSPISMLYINDKQQIIYKQYEGMVVDRXGX

SEQ ID NO: 42545 - protein, 41 aa, Artificial Sequence; identical to SEQ ID NO: 28541
  GFR-binding peptide
  MOD_RES (4)..(38)..(40): Xaa is C or S
  MOD_RES (18)..(19)..(20)..(21)..(22): Xaa is A or G
  MOD_RES (23)..(24)..(25)..(26): Xaa is A or G or is absent

SEQ ID NO: 42546 - protein, 38 aa, Artificial Sequence
  GFR-binding peptide
  MOD_RES (4)..(5)..(36)..(38): Xaa is C or S
PSTXXAPVKTSPISMLYIDNGRVLLYKQYEMIVEEXGX

SEQ ID NO: 42547 - protein, 37 aa, Artificial Sequence
  GFR-binding peptide
  MOD_RES (1)..(35)..(37): Xaa is C or S
  MOD_RES (15)..(16)..(17)..(18)..(19): Xaa is A or G
  MOD_RES (20)..(21)..(22)..(23): Xaa is A or G or is absent
XTPTKMSPISMLYIXXXXXXXXXYKQYEGMVVDRXGX

SEQ ID NO: 42548 - protein, 40 aa, Artificial Sequence; identical to SEQ ID NO: 28542
  GFR-binding peptide
  MOD_RES (4)..(5)..(39): Xaa is C or S
  MOD_RES (19)..(20)..(21)..(22)..(23): Xaa is A or G
  MOD_RES (24)..(25)..(26)..(27): Xaa is A or G or is absent

SEQ ID NO: 42549 - protein, 37 aa, Artificial Sequence; identical to SEQ ID NO: 27595
  GFR-binding peptide
  MOD_RES (3)..(35)..(37): Xaa is C or S

SEQ ID NO: 42550 - protein, 34 aa, Artificial Sequence; identical to SEQ ID NO: 27599
  GFR-binding peptide
  MOD_RES (1)..(2): Xaa is C or S
  MOD_RES (16)..(17)..(18)..(19)..(20): Xaa is A or G
  MOD_RES (21)..(22)..(23)..(24): Xaa is A or G or is absent

SEQ ID NO: 42551 - protein, 39 aa, Artificial Sequence
  GFR-binding peptide
  MOD_RES (6)..(7): Xaa is C or S
  MOD_RES (21)..(22)..(23)..(24)..(25): Xaa is A or G
  MOD_RES (26)..(27)..(28)..(29): Xaa is A or G or is absent
GSAGPXXTPTKMSPISMLYIXXXXXXXXXYKQYEGMVVD

SEQ ID NO: 42552 - protein, 36 aa, Artificial Sequence; identical to SEQ ID NO: 30505
  GFR-binding peptide
  MOD_RES (34)..(36): Xaa is C or S
  MOD_RES (14)..(15)..(16)..(17)..(18): Xaa is A or G
  MOD_RES (19)..(20)..(21)..(22): Xaa is A or G or is absent

SEQ ID NO: 42553 - protein, 37 aa, Artificial Sequence; identical to SEQ ID NO: 30508
  GFR-binding peptide
  MOD_RES (4)..(5)..(37): Xaa is C or S

SEQ ID NO: 42554 - protein, 38 aa, Artificial Sequence; identical to SEQ ID NO: 28548
  GFR-binding peptide
  MOD_RES (3)..(37): Xaa is C or S
  MOD_RES (17)..(18)..(19)..(20)..(21): Xaa is A or G
  MOD_RES (22)..(23)..(24)..(25): Xaa is A or G or is absent

SEQ ID NO: 42555 - protein, 36 aa, Artificial Sequence; identical to SEQ ID NO: 27601
  GFR-binding peptide
  MOD_RES (1)..(33)..(35): Xaa is C or S

SEQ ID NO: 42556 - protein, 36 aa, Artificial Sequence; identical to SEQ ID NO: 28551
  GFR-binding peptide
  MOD_RES (2)..(34)..(36): Xaa is C or S

SEQ ID NO: 42557 - protein, 37 aa, Artificial Sequence
  GFR-binding peptide
  MOD_RES (4)..(5)..(37): Xaa is C or S
AGPXXTPTKMSPISMLYINDKQQIIYKQYEGMVVDRX

SEQ ID NO: 42558 - protein, 36 aa, Artificial Sequence; identical to SEQ ID NO: 28554
  GFR-binding peptide
  MOD_RES (1)..(2)..(36): Xaa is C or S
  MOD_RES (16)..(17)..(18)..(19)..(20): Xaa is A or G
  MOD_RES (21)..(22)..(23)..(24): Xaa is A or G or is absent

SEQ ID NO: 42559 - protein, 39 aa, Artificial Sequence; identical to SEQ ID NO: 29533
  GFR-binding peptide
  MOD_RES (3)..(4)..(36)..(38): Xaa is C or S

SEQ ID NO: 42560 - protein, 39 aa, Artificial Sequence; identical to SEQ ID NO: 27603
  GFR-binding peptide
  MOD_RES (3)..(4)..(36)..(38): Xaa is C or S

SEQ ID NO: 42561 - protein, 35 aa, Artificial Sequence; identical to SEQ ID NO: 27605
  GFR-binding peptide
  MOD_RES (2)..(3)..(35): Xaa is C or S

SEQ ID NO: 42562 - protein, 41 aa, Artificial Sequence; identical to SEQ ID NO: 30511
  GFR-binding peptide
  MOD_RES (4)..(5)..(39)..(41): Xaa is C or S
  MOD_RES (19)..(20)..(21)..(22)..(23): Xaa is A or G
  MOD_RES (24)..(25)..(26)..(27): Xaa is A or G or is absent

SEQ ID NO: 42563 - protein, 39 aa, Artificial Sequence; identical to SEQ ID NO: 27609
  GFR-binding peptide
  MOD_RES (1)..(2)..(36)..(38): Xaa is C or S
  MOD_RES (16)..(17)..(18)..(19)..(20): Xaa is A or G
  MOD_RES (21)..(22)..(23)..(24): Xaa is A or G or is absent

SEQ ID NO: 42564 - protein, 35 aa, Artificial Sequence; identical to SEQ ID NO: 29536
  GFR-binding peptide
  MOD_RES (3)..(4): Xaa is C or S

SEQ ID NO: 42565 - protein, 37 aa, Artificial Sequence; identical to SEQ ID NO: 28557
  GFR-binding peptide
  MOD_RES (3)..(4): Xaa is C or S
  MOD_RES (18)..(19)..(20)..(21)..(22): Xaa is A or G
  MOD_RES (23)..(24)..(25)..(26): Xaa is A or G or is absent

SEQ ID NO: 42566 - protein, 34 aa, Artificial Sequence
  GFR-binding peptide
  MOD_RES (31)..(33): Xaa is C or S
APVKTSPISMLYIDNGRVLLYKQYEMIVEEXGXL

SEQ ID NO: 42567 - protein, 34 aa, Artificial Sequence; identical to SEQ ID NO: 28558
  GFR-binding peptide
  MOD_RES (2)..(3): Xaa is C or S

SEQ ID NO: 42568 - protein, 44 aa, Artificial Sequence; identical to SEQ ID NO: 30514
  GFR-binding peptide
  MOD_RES (5)..(6)..(41)..(43): Xaa is C or S
  MOD_RES (20)..(21)..(22)..(23)..(24): Xaa is A or G
  MOD_RES (25)..(26)..(27)..(28): Xaa is A or G or is absent

SEQ ID NO: 42569 - protein, 41 aa, Artificial Sequence; identical to SEQ ID NO: 27613
  GFR-binding peptide
  MOD_RES (6)..(7)..(41): Xaa is C or S
  MOD_RES (21)..(22)..(23)..(24)..(25): Xaa is A or G
  MOD_RES (26)..(27)..(28)..(29): Xaa is A or G or is absent

SEQ ID NO: 42570 - protein, 42 aa, Artificial Sequence; identical to SEQ ID NO: 28560
  GFR-binding peptide
  MOD_RES (6)..(7)..(41): Xaa is C or S
  MOD_RES (21)..(22)..(23)..(24)..(25): Xaa is A or G
  MOD_RES (26)..(27)..(28)..(29): Xaa is A or G or is absent

SEQ ID NO: 42571 - protein, 36 aa, Artificial Sequence
  GFR-binding peptide
  MOD_RES (4)..(5): Xaa is C or S
AGPXXTPTKMSPISMLYINDKQQIIYKQYEGMVVDR

SEQ ID NO: 42572 - protein, 38 aa, Artificial Sequence
  GFR-binding peptide
  MOD_RES (4)..(5)..(38): Xaa is C or S
  MOD_RES (19)..(20)..(21)..(22)..(23): Xaa is A or G
  MOD_RES (24)..(25)..(26)..(27): Xaa is A or G or is absent
PSTXXAPVKTSPISMLYIXXXXXXXXXYKQYEMIVEEX

SEQ ID NO: 42573 - protein, 37 aa, Artificial Sequence; identical to SEQ ID NO: 27614
  GFR-binding peptide
  MOD_RES (3)..(37): Xaa is C or S
  MOD_RES (17)..(18)..(19)..(20)..(21): Xaa is A or G
  MOD_RES (22)..(23)..(24)..(25): Xaa is A or G or is absent

SEQ ID NO: 42574 - protein, 41 aa, Artificial Sequence; identical to SEQ ID NO: 29544
  GFR-binding peptide
  MOD_RES (6)..(7)..(41): Xaa is C or S
  MOD_RES (21)..(22)..(23)..(24)..(25): Xaa is A or G
  MOD_RES (26)..(27)..(28)..(29): Xaa is A or G or is absent

SEQ ID NO: 42575 - protein, 36 aa, Artificial Sequence; identical to SEQ ID NO: 27615
  GFR-binding peptide
  MOD_RES (1)..(33)..(35): Xaa is C or S

SEQ ID NO: 42576 - protein, 37 aa, Artificial Sequence; identical to SEQ ID NO: 29546
  GFR-binding peptide
  MOD_RES (34)..(36): Xaa is C or S
  MOD_RES (14)..(15)..(16)..(17)..(18): Xaa is A or G
  MOD_RES (19)..(20)..(21)..(22): Xaa is A or G or is absent

SEQ ID NO: 42577 - protein, 37 aa, Artificial Sequence; identical to SEQ ID NO: 29548
  GFR-binding peptide
  MOD_RES (1)..(2)..(36): Xaa is C or S
  MOD_RES (16)..(17)..(18)..(19)..(20): Xaa is A or G
  MOD_RES (21)..(22)..(23)..(24): Xaa is A or G or is absent

SEQ ID NO: 42578 - protein, 36 aa, Artificial Sequence; identical to SEQ ID NO: 27619
  GFR-binding peptide
  MOD_RES (3)..(4): Xaa is C or S
  MOD_RES (18)..(19)..(20)..(21)..(22): Xaa is A or G
  MOD_RES (23)..(24)..(25)..(26): Xaa is A or G or is absent

SEQ ID NO: 42579 - protein, 36 aa, Artificial Sequence; identical to SEQ ID NO: 30522
  GFR-binding peptide
  MOD_RES (1)..(35): Xaa is C or S
  MOD_RES (15)..(16)..(17)..(18)..(19): Xaa is A or G
  MOD_RES (20)..(21)..(22)..(23): Xaa is A or G or is absent

SEQ ID NO: 42580 - protein, 38 aa, Artificial Sequence; identical to SEQ ID NO: 28573
  GFR-binding peptide
  MOD_RES (1)..(35)..(37): Xaa is C or S
  MOD_RES (15)..(16)..(17)..(18)..(19): Xaa is A or G
  MOD_RES (20)..(21)..(22)..(23): Xaa is A or G or is absent

SEQ ID NO: 42581 - protein, 42 aa, Artificial Sequence; identical to SEQ ID NO: 30524
  GFR-binding peptide
  MOD_RES (4)..(5)..(39)..(41): Xaa is C or S
  MOD_RES (19)..(20)..(21)..(22)..(23): Xaa is A or G
  MOD_RES (24)..(25)..(26)..(27): Xaa is A or G or is absent

SEQ ID NO: 42582 - protein, 35 aa, Artificial Sequence; identical to SEQ ID NO: 28576
  GFR-binding peptide
  MOD_RES (3)..(4): Xaa is C or S

SEQ ID NO: 42583 - protein, 37 aa, Artificial Sequence; identical to SEQ ID NO: 29552
  GFR-binding peptide
  MOD_RES (5)..(6): Xaa is C or S

SEQ ID NO: 42584 - protein, 34 aa, Artificial Sequence
  GFR-binding peptide
  MOD_RES (1)..(34): Xaa is C or S
  MOD_RES (15)..(16)..(17)..(18)..(19): Xaa is A or G
  MOD_RES (20)..(21)..(22)..(23): Xaa is A or G or is absent
XAPVKTSPISMLYIXXXXXXXXXYKQYEMIVEEX

SEQ ID NO: 42585 - protein, 39 aa, Artificial Sequence; identical to SEQ ID NO: 27628
  GFR-binding peptide
  MOD_RES (3)..(4)..(38): Xaa is C or S
  MOD_RES (18)..(19)..(20)..(21)..(22): Xaa is A or G
  MOD_RES (23)..(24)..(25)..(26): Xaa is A or G or is absent

SEQ ID NO: 42586 - protein, 36 aa, Artificial Sequence; identical to SEQ ID NO: 30533
  GFR-binding peptide
  MOD_RES (1)..(2)..(34)..(36): Xaa is C or S

SEQ ID NO: 42587 - protein, 34 aa, Artificial Sequence; identical to SEQ ID NO: 28579
  GFR-binding peptide
  MOD_RES (34)..(34): Xaa is C or S
  MOD_RES (14)..(15)..(16)..(17)..(18): Xaa is A or G
  MOD_RES (19)..(20)..(21)..(22): Xaa is A or G or is absent

SEQ ID NO: 42588 - protein, 41 aa, Artificial Sequence; identical to SEQ ID NO: 28580
  GFR-binding peptide
  MOD_RES (3)..(4)..(38)..(40): Xaa is C or S
  MOD_RES (18)..(19)..(20)..(21)..(22): Xaa is A or G
  MOD_RES (23)..(24)..(25)..(26): Xaa is A or G or is absent

SEQ ID NO: 42589 - protein, 36 aa, Artificial Sequence; identical to SEQ ID NO: 27637
  GFR-binding peptide
  MOD_RES (1)..(35): Xaa is C or S
  MOD_RES (15)..(16)..(17)..(18)..(19): Xaa is A or G
  MOD_RES (20)..(21)..(22)..(23): Xaa is A or G or is absent

SEQ ID NO: 42590 - protein, 37 aa, Artificial Sequence; identical to SEQ ID NO: 27638
  GFR-binding peptide
  MOD_RES (1)..(2)..(34)..(36): Xaa is C or S

SEQ ID NO: 42591 - protein, 38 aa, Artificial Sequence; identical to SEQ ID NO: 29555
  GFR-binding peptide
  MOD_RES (1)..(2)..(36)..(38): Xaa is C or S
  MOD_RES (16)..(17)..(18)..(19)..(20): Xaa is A or G
  MOD_RES (21)..(22)..(23)..(24): Xaa is A or G or is absent

SEQ ID NO: 42592 - protein, 36 aa, Artificial Sequence
  GFR-binding peptide
  MOD_RES (2)..(3)..(34)..(36): Xaa is C or S
TXXAPVKTSPISMLYIDNGRVLLYKQYEMIVEEXGX

SEQ ID NO: 42593 - protein, 38 aa, Artificial Sequence; identical to SEQ ID NO: 30538
  GFR-binding peptide
  MOD_RES (5)..(6)..(38): Xaa is C or S

SEQ ID NO: 42594 - protein, 41 aa, Artificial Sequence; identical to SEQ ID NO: 29557
  GFR-binding peptide
  MOD_RES (7)..(41): Xaa is C or S
  MOD_RES (21)..(22)..(23)..(24)..(25): Xaa is A or G
  MOD_RES (26)..(27)..(28)..(29): Xaa is A or G or is absent

SEQ ID NO: 42595 - protein, 38 aa, Artificial Sequence; identical to SEQ ID NO: 27642
  GFR-binding peptide
  MOD_RES (3)..(4)..(38): Xaa is C or S
  MOD_RES (18)..(19)..(20)..(21)..(22): Xaa is A or G
  MOD_RES (23)..(24)..(25)..(26): Xaa is A or G or is absent

SEQ ID NO: 42596 - protein, 38 aa, Artificial Sequence
  GFR-binding peptide
  MOD_RES (4)..(5): Xaa is C or S
  MOD_RES (19)..(20)..(21)..(22)..(23): Xaa is A or G
  MOD_RES (24)..(25)..(26)..(27): Xaa is A or G or is absent
AGPXXTPTKMSPISMLYIXXXXXXXXXYKQYEGMVVDR

SEQ ID NO: 42597 - protein, 40 aa, Artificial Sequence
  GFR-binding peptide
  MOD_RES (5)..(6)..(37)..(39): Xaa is C or S
VPSTXXAPVKTSPISMLYIDNGRVLLYKQYEMIVEEXGXL

SEQ ID NO: 42598 - protein, 36 aa, Artificial Sequence
  GFR-binding peptide
  MOD_RES (5)..(6): Xaa is C or S
SAGPXXTPTKMSPISMLYINDKQQIIYKQYEGMVVD

SEQ ID NO: 42599 - protein, 34 aa, Artificial Sequence; identical to SEQ ID NO: 30543
  GFR-binding peptide
  MOD_RES (1)..(2)..(34): Xaa is C or S

SEQ ID NO: 42600 - protein, 39 aa, Artificial Sequence; identical to SEQ ID NO: 27646
  GFR-binding peptide
  MOD_RES (5)..(6)..(38): Xaa is C or S

SEQ ID NO: 42601 - protein, 38 aa, Artificial Sequence; identical to SEQ ID NO: 29560
  GFR-binding peptide
  MOD_RES (1)..(35)..(37): Xaa is C or S
  MOD_RES (15)..(16)..(17)..(18)..(19): Xaa is A or G
  MOD_RES (20)..(21)..(22)..(23): Xaa is A or G or is absent

SEQ ID NO: 42602 - protein, 35 aa, Artificial Sequence; identical to SEQ ID NO: 29562
  GFR-binding peptide
  MOD_RES (1)..(2)..(34): Xaa is C or S

SEQ ID NO: 42603 - protein, 35 aa, Artificial Sequence; identical to SEQ ID NO: 27647
  GFR-binding peptide
  MOD_RES (2)..(3): Xaa is C or S
  MOD_RES (17)..(18)..(19)..(20)..(21): Xaa is A or G
  MOD_RES (22)..(23)..(24)..(25): Xaa is A or G or is absent

SEQ ID NO: 42604 - protein, 44 aa, Artificial Sequence; identical to SEQ ID NO: 28589
  GFR-binding peptide
  MOD_RES (6)..(7)..(42)..(44): Xaa is C or S
  MOD_RES (21)..(22)..(23)..(24)..(25): Xaa is A or G
  MOD_RES (26)..(27)..(28)..(29): Xaa is A or G or is absent

SEQ ID NO: 42605 - protein, 34 aa, Artificial Sequence; identical to SEQ ID NO: 28593
  GFR-binding peptide
  MOD_RES (32)..(34): Xaa is C or S

SEQ ID NO: 42606 - protein, 34 aa, Artificial Sequence; identical to SEQ ID NO: 29564
  GFR-binding peptide
  MOD_RES (1)..(2)..(34): Xaa is C or S

SEQ ID NO: 42607 - protein, 40 aa, Artificial Sequence; identical to SEQ ID NO: 28594
  GFR-binding peptide
  MOD_RES (7)..(39): Xaa is C or S

SEQ ID NO: 42608 - protein, 38 aa, Artificial Sequence; identical to SEQ ID NO: 30546
  GFR-binding peptide
  MOD_RES (2)..(3)..(37): Xaa is C or S
  MOD_RES (17)..(18)..(19)..(20)..(21): Xaa is A or G
  MOD_RES (22)..(23)..(24)..(25): Xaa is A or G or is absent

SEQ ID NO: 42609 - protein, 38 aa, Artificial Sequence; identical to SEQ ID NO: 28597
  GFR-binding peptide
  MOD_RES (6)..(7): Xaa is C or S

SEQ ID NO: 42610 - protein, 36 aa, Artificial Sequence; identical to SEQ ID NO: 27650
  GFR-binding peptide
  MOD_RES (5)..(5): Xaa is C or S

SEQ ID NO: 42611 - protein, 36 aa, Artificial Sequence; identical to SEQ ID NO: 29566
  GFR-binding peptide
  MOD_RES (1)..(35): Xaa is C or S
  MOD_RES (15)..(16)..(17)..(18)..(19): Xaa is A or G
  MOD_RES (20)..(21)..(22)..(23): Xaa is A or G or is absent

SEQ ID NO: 42612 - protein, 36 aa, Artificial Sequence; identical to SEQ ID NO: 28598
  GFR-binding peptide
  MOD_RES (3)..(4): Xaa is C or S

SEQ ID NO: 42613 - protein, 37 aa, Artificial Sequence; identical to SEQ ID NO: 30551
  GFR-binding peptide
  MOD_RES (4)..(5): Xaa is C or S
  MOD_RES (19)..(20)..(21)..(22)..(23): Xaa is A or G
  MOD_RES (24)..(25)..(26)..(27): Xaa is A or G or is absent

SEQ ID NO: 42614 - protein, 38 aa, Artificial Sequence; identical to SEQ ID NO: 29568
  GFR-binding peptide
  MOD_RES (4)..(38): Xaa is C or S
  MOD_RES (18)..(19)..(20)..(21)..(22): Xaa is A or G
  MOD_RES (23)..(24)..(25)..(26): Xaa is A or G or is absent

SEQ ID NO: 42615 - protein, 34 aa, Artificial Sequence; identical to SEQ ID NO: 27655
  GFR-binding peptide
  MOD_RES (2)..(3): Xaa is C or S

SEQ ID NO: 42616 - protein, 39 aa, Artificial Sequence; identical to SEQ ID NO: 28605
  GFR-binding peptide
  MOD_RES (2)..(3)..(36)..(38): Xaa is C or S

SEQ ID NO: 42617 - protein, 44 aa, Artificial Sequence
  GFR-binding peptide
  MOD_RES (6)..(7)..(41)..(43): Xaa is C or S
  MOD_RES (21)..(22)..(23)..(24)..(25): Xaa is A or G
  MOD_RES (26)..(27)..(28)..(29): Xaa is A or G or is absent
GSAGPXXTPTKMSPISMLYIXXXXXXXXXYKQYEGMVVDRXGXS

SEQ ID NO: 42618 - protein, 41 aa, Artificial Sequence; identical to SEQ ID NO: 30554
  GFR-binding peptide
  MOD_RES (4)..(5)..(40): Xaa is C or S
  MOD_RES (19)..(20)..(21)..(22)..(23): Xaa is A or G
  MOD_RES (24)..(25)..(26)..(27): Xaa is A or G or is absent

SEQ ID NO: 42619 - protein, 34 aa, Artificial Sequence; identical to SEQ ID NO: 29571
  GFR-binding peptide
  MOD_RES (1)..(1): Xaa is C or S
  MOD_RES (15)..(16)..(17)..(18)..(19): Xaa is A or G
  MOD_RES (20)..(21)..(22)..(23): Xaa is A or G or is absent

SEQ ID NO: 42620 - protein, 35 aa, Artificial Sequence; identical to SEQ ID NO: 28607
  GFR-binding peptide
  MOD_RES (1)..(2)..(34): Xaa is C or S

SEQ ID NO: 42621 - protein, 38 aa, Artificial Sequence
  GFR-binding peptide
  MOD_RES (3)..(4)..(36)..(38): Xaa is C or S
GPXXTPTKMSPISMLYINDKQQIIYKQYEGMVVDRXGX

SEQ ID NO: 42622 - protein, 41 aa, Artificial Sequence; identical to SEQ ID NO: 27658
  GFR-binding peptide
  MOD_RES (5)..(6)..(40): Xaa is C or S
  MOD_RES (20)..(21)..(22)..(23)..(24): Xaa is A or G
  MOD_RES (25)..(26)..(27)..(28): Xaa is A or G or is absent

SEQ ID NO: 42623 - protein, 36 aa, Artificial Sequence
  GFR-binding peptide
  MOD_RES (1)..(2)..(36): Xaa is C or S
  MOD_RES (16)..(17)..(18)..(19)..(20): Xaa is A or G
  MOD_RES (21)..(22)..(23)..(24): Xaa is A or G or is absent
XXTPTKMSPISMLYIXXXXXXXXXYKQYEGMVVDRX

SEQ ID NO: 42624 - protein, 41 aa, Artificial Sequence; identical to SEQ ID NO: 28608
  GFR-binding peptide
  MOD_RES (6)..(7)..(41): Xaa is C or S
  MOD_RES (21)..(22)..(23)..(24)..(25): Xaa is A or G
  MOD_RES (26)..(27)..(28)..(29): Xaa is A or G or is absent

SEQ ID NO: 42625 - protein, 39 aa, Artificial Sequence; identical to SEQ ID NO: 29574
  GFR-binding peptide
  MOD_RES (6)..(7): Xaa is C or S
  MOD_RES (21)..(22)..(23)..(24)..(25): Xaa is A or G
  MOD_RES (26)..(27)..(28)..(29): Xaa is A or G or is absent

SEQ ID NO: 42626 - protein, 41 aa, Artificial Sequence; identical to SEQ ID NO: 27663
  GFR-binding peptide
  MOD_RES (4)..(5)..(38)..(40): Xaa is C or S

SEQ ID NO: 42627 - protein, 40 aa, Artificial Sequence; identical to SEQ ID NO: 28612
  GFR-binding peptide
  MOD_RES (6)..(38)..(40): Xaa is C or S

SEQ ID NO: 42628 - protein, 31 aa, Artificial Sequence
  GFR-binding peptide
TPTKMSPISMLYINDKQQIIYKQYEGMVVDR

SEQ ID NO: 42629 - protein, 44 aa, Artificial Sequence
  GFR-binding peptide
  MOD_RES (6)..(7)..(41)..(43): Xaa is C or S
  MOD_RES (21)..(22)..(23)..(24)..(25): Xaa is A or G
  MOD_RES (26)..(27)..(28)..(29): Xaa is A or G or is absent
STPPTXXVPTRLSPISILYIXXXXXXXXXYKQYEDMVVESXGXR

SEQ ID NO: 42630 - protein, 39 aa, Artificial Sequence; identical to SEQ ID NO: 29581
  GFR-binding peptide
  MOD_RES (6)..(7): Xaa is C or S
  MOD_RES (21)..(22)..(23)..(24)..(25): Xaa is A or G
  MOD_RES (26)..(27)..(28)..(29): Xaa is A or G or is absent

SEQ ID NO: 42631 - protein, 35 aa, Artificial Sequence; identical to SEQ ID NO: 28614
  GFR-binding peptide
  MOD_RES (1)..(33)..(35): Xaa is C or S

SEQ ID NO: 42632 - protein, 43 aa, Artificial Sequence; identical to SEQ ID NO: 30564
  GFR-binding peptide
  MOD_RES (5)..(6)..(40)..(42): Xaa is C or S
  MOD_RES (20)..(21)..(22)..(23)..(24): Xaa is A or G
  MOD_RES (25)..(26)..(27)..(28): Xaa is A or G or is absent

SEQ ID NO: 42633 - protein, 34 aa, Artificial Sequence; identical to SEQ ID NO: 27668
  GFR-binding peptide
  MOD_RES (34)..(34): Xaa is C or S
  MOD_RES (14)..(15)..(16)..(17)..(18): Xaa is A or G
  MOD_RES (19)..(20)..(21)..(22): Xaa is A or G or is absent

SEQ ID NO: 42634 - protein, 42 aa, Artificial Sequence; identical to SEQ ID NO: 27669
  GFR-binding peptide
  MOD_RES (5)..(6)..(39)..(41): Xaa is C or S

SEQ ID NO: 42635 - protein, 42 aa, Artificial Sequence
  GFR-binding peptide
  MOD_RES (6)..(7)..(41): Xaa is C or S
  MOD_RES (21)..(22)..(23)..(24)..(25): Xaa is A or G
  MOD_RES (26)..(27)..(28)..(29): Xaa is A or G or is absent
HVPKPXXAPTKLSPISVLYIXXXXXXXXXYKQYENMVVRSXG

SEQ ID NO: 42636 - protein, 34 aa, Artificial Sequence; identical to SEQ ID NO: 29590
  GFR-binding peptide
  MOD_RES (2)..(3): Xaa is C or S

SEQ ID NO: 42637 - protein, 36 aa, Artificial Sequence
  GFR-binding peptide
  MOD_RES (1)..(2)..(33)..(35): Xaa is C or S
XXAPVKTSPISMLYIDNGRVLLYKQYEMIVEEXGXL

SEQ ID NO: 42638 - protein, 41 aa, Artificial Sequence; identical to SEQ ID NO: 30571
  GFR-binding peptide
  MOD_RES (5)..(6)..(38)..(40): Xaa is C or S

SEQ ID NO: 42639 - protein, 37 aa, Artificial Sequence; identical to SEQ ID NO: 29594
  GFR-binding peptide
  MOD_RES (1)..(2)..(34)..(36): Xaa is C or S

SEQ ID NO: 42640 - protein, 40 aa, Artificial Sequence
  GFR-binding peptide
  MOD_RES (4)..(5)..(37)..(39): Xaa is C or S
AGPXXTPTKMSPISMLYINDKQQIIYKQYEGMVVDRXGXS

SEQ ID NO: 42641 - protein, 36 aa, Artificial Sequence
  GFR-binding peptide
  MOD_RES (2)..(3)..(35): Xaa is C or S
PXXTPTKMSPISMLYINDKQQIIYKQYEGMVVDRXG

SEQ ID NO: 42642 - protein, 39 aa, Artificial Sequence; identical to SEQ ID NO: 27675
  GFR-binding peptide
  MOD_RES (5)..(6): Xaa is C or S
  MOD_RES (20)..(21)..(22)..(23)..(24): Xaa is A or G
  MOD_RES (25)..(26)..(27)..(28): Xaa is A or G or is absent

SEQ ID NO: 42643 - protein, 36 aa, Artificial Sequence; identical to SEQ ID NO: 29598
  GFR-binding peptide
  MOD_RES (2)..(3): Xaa is C or S
  MOD_RES (17)..(18)..(19)..(20)..(21): Xaa is A or G
  MOD_RES (22)..(23)..(24)..(25): Xaa is A or G or is absent

SEQ ID NO: 42644 - protein, 40 aa, Artificial Sequence; identical to SEQ ID NO: 30577
  GFR-binding peptide
  MOD_RES (4)..(5)..(37)..(39): Xaa is C or S

SEQ ID NO: 42645 - protein, 40 aa, Artificial Sequence; identical to SEQ ID NO: 27676
  GFR-binding peptide
  MOD_RES (5)..(6)..(38)..(40): Xaa is C or S

SEQ ID NO: 42646 - protein, 33 aa, Artificial Sequence; identical to SEQ ID NO: 30580
  GFR-binding peptide
  MOD_RES (14)..(15)..(16)..(17)..(18): Xaa is A or G
  MOD_RES (19)..(20)..(21)..(22): Xaa is A or G or is absent

SEQ ID NO: 42647 - protein, 36 aa, Artificial Sequence; identical to SEQ ID NO: 29599
  GFR-binding peptide
  MOD_RES (1)..(2)..(36): Xaa is C or S
  MOD_RES (16)..(17)..(18)..(19)..(20): Xaa is A or G
  MOD_RES (21)..(22)..(23)..(24): Xaa is A or G or is absent

SEQ ID NO: 42648 - protein, 37 aa, Artificial Sequence; identical to SEQ ID NO: 29601
  GFR-binding peptide
  MOD_RES (4)..(5): Xaa is C or S

SEQ ID NO: 42649 - protein, 37 aa, Artificial Sequence; identical to SEQ ID NO: 27681
  GFR-binding peptide
  MOD_RES (2)..(34)..(36): Xaa is C or S

SEQ ID NO: 42650 - protein, 42 aa, Artificial Sequence; identical to SEQ ID NO: 29602
  GFR-binding peptide
  MOD_RES (5)..(6)..(40)..(42): Xaa is C or S
  MOD_RES (20)..(21)..(22)..(23)..(24): Xaa is A or G
  MOD_RES (25)..(26)..(27)..(28): Xaa is A or G or is absent

SEQ ID NO: 42651 - protein, 37 aa, Artificial Sequence; identical to SEQ ID NO: 27682
  GFR-binding peptide
  MOD_RES (1)..(35)..(37): Xaa is C or S
  MOD_RES (15)..(16)..(17)..(18)..(19): Xaa is A or G
  MOD_RES (20)..(21)..(22)..(23): Xaa is A or G or is absent

SEQ ID NO: 42652 - protein, 39 aa, Artificial Sequence
  GFR-binding peptide
  MOD_RES (2)..(3)..(36)..(38): Xaa is C or S
  MOD_RES (17)..(18)..(19)..(20)..(21): Xaa is A or G
  MOD_RES (22)..(23)..(24)..(25): Xaa is A or G or is absent
TXXAPVKTSPISMLYIXXXXXXXXXYKQYEMIVEEXGXL

SEQ ID NO: 42653 - protein, 40 aa, Artificial Sequence; identical to SEQ ID NO: 29605
  GFR-binding peptide
  MOD_RES (5)..(6)..(40): Xaa is C or S
  MOD_RES (20)..(21)..(22)..(23)..(24): Xaa is A or G
  MOD_RES (25)..(26)..(27)..(28): Xaa is A or G or is absent

SEQ ID NO: 42654 - protein, 37 aa, Artificial Sequence; identical to SEQ ID NO: 27688
  GFR-binding peptide
  MOD_RES (5)..(6): Xaa is C or S

SEQ ID NO: 42655 - protein, 36 aa, Artificial Sequence
  GFR-binding peptide
  MOD_RES (2)..(3)..(36): Xaa is C or S
  MOD_RES (17)..(18)..(19)..(20)..(21): Xaa is A or G
  MOD_RES (22)..(23)..(24)..(25): Xaa is A or G or is absent
TXXAPVKTSPISMLYIXXXXXXXXXYKQYEMIVEEX

SEQ ID NO: 42656 - protein, 34 aa, Artificial Sequence
  GFR-binding peptide
  MOD_RES (2)..(3)..(34): Xaa is C or S
TXXAPVKTSPISMLYIDNGRVLLYKQYEMIVEEX

SEQ ID NO: 42657 - protein, 40 aa, Artificial Sequence; identical to SEQ ID NO: 28635
  GFR-binding peptide
  MOD_RES (5)..(6)..(40): Xaa is C or S
  MOD_RES (20)..(21)..(22)..(23)..(24): Xaa is A or G
  MOD_RES (25)..(26)..(27)..(28): Xaa is A or G or is absent

SEQ ID NO: 42658 - protein, 34 aa, Artificial Sequence; identical to SEQ ID NO: 29609
  GFR-binding peptide
  MOD_RES (1)..(2): Xaa is C or S
  MOD_RES (16)..(17)..(18)..(19)..(20): Xaa is A or G
  MOD_RES (21)..(22)..(23)..(24): Xaa is A or G or is absent

SEQ ID NO: 42659 - protein, 40 aa, Artificial Sequence; identical to SEQ ID NO: 28640
  GFR-binding peptide
  MOD_RES (4)..(5)..(39): Xaa is C or S
  MOD_RES (19)..(20)..(21)..(22)..(23): Xaa is A or G
  MOD_RES (24)..(25)..(26)..(27): Xaa is A or G or is absent

SEQ ID NO: 42660 - protein, 37 aa, Artificial Sequence; identical to SEQ ID NO: 28641
  GFR-binding peptide
  MOD_RES (4)..(5)..(37): Xaa is C or S

SEQ ID NO: 42661 - protein, 33 aa, Artificial Sequence; identical to SEQ ID NO: 30590
  GFR-binding peptide
  MOD_RES (33)..(33): Xaa is C or S

SEQ ID NO: 42662 - protein, 39 aa, Artificial Sequence; identical to SEQ ID NO: 27699
  GFR-binding peptide
  MOD_RES (7)..(7): Xaa is C or S
  MOD_RES (21)..(22)..(23)..(24)..(25): Xaa is A or G
  MOD_RES (26)..(27)..(28)..(29): Xaa is A or G or is absent

SEQ ID NO: 42663 - protein, 36 aa, Artificial Sequence; identical to SEQ ID NO: 30592
  GFR-binding peptide
  MOD_RES (1)..(36): Xaa is C or S
  MOD_RES (15)..(16)..(17)..(18)..(19): Xaa is A or G
  MOD_RES (20)..(21)..(22)..(23): Xaa is A or G or is absent

SEQ ID NO: 42664 - protein, 38 aa, Artificial Sequence; identical to SEQ ID NO: 28645
  GFR-binding peptide
  MOD_RES (5)..(6): Xaa is C or S

SEQ ID NO: 42665 - protein, 42 aa, Artificial Sequence
  GFR-binding peptide
  MOD_RES (5)..(6)..(39)..(41): Xaa is C or S
  MOD_RES (20)..(21)..(22)..(23)..(24): Xaa is A or G
  MOD_RES (25)..(26)..(27)..(28): Xaa is A or G or is absent
VPSTXXAPVKTSPISMLYIXXXXXXXXXYKQYEMIVEEXGXL

SEQ ID NO: 42666 - protein, 43 aa, Artificial Sequence; identical to SEQ ID NO: 29622
  GFR-binding peptide
  MOD_RES (6)..(7)..(40)..(42): Xaa is C or S

SEQ ID NO: 42667 - protein, 38 aa, Artificial Sequence; identical to SEQ ID NO: 29623
  GFR-binding peptide
  MOD_RES (35)..(37): Xaa is C or S
  MOD_RES (14)..(15)..(16)..(17)..(18): Xaa is A or G
  MOD_RES (19)..(20)..(21)..(22): Xaa is A or G or is absent

SEQ ID NO: 42668 - protein, 36 aa, Artificial Sequence; identical to SEQ ID NO: 27707
  GFR-binding peptide
  MOD_RES (1)..(2)..(36): Xaa is C or S
  MOD_RES (16)..(17)..(18)..(19)..(20): Xaa is A or G
  MOD_RES (21)..(22)..(23)..(24): Xaa is A or G or is absent

SEQ ID NO: 42669 - protein, 35 aa, Artificial Sequence; identical to SEQ ID NO: 30603
  GFR-binding peptide
  MOD_RES (3)..(4): Xaa is C or S

SEQ ID NO: 42670 - protein, 39 aa, Artificial Sequence; identical to SEQ ID NO: 29624
  GFR-binding peptide
  MOD_RES (2)..(3)..(37)..(39): Xaa is C or S
  MOD_RES (17)..(18)..(19)..(20)..(21): Xaa is A or G
  MOD_RES (22)..(23)..(24)..(25): Xaa is A or G or is absent

SEQ ID NO: 42671 - protein, 35 aa, Artificial Sequence; identical to SEQ ID NO: 30604
  GFR-binding peptide
  MOD_RES (2)..(3): Xaa is C or S

SEQ ID NO: 42672 - protein, 37 aa, Artificial Sequence; identical to SEQ ID NO: 28657
  GFR-binding peptide
  MOD_RES (1)..(34)..(36): Xaa is C or S

SEQ ID NO: 42673 - protein, 42 aa, Artificial Sequence; identical to SEQ ID NO: 27709
  GFR-binding peptide
  MOD_RES (4)..(5)..(39)..(41): Xaa is C or S
  MOD_RES (19)..(20)..(21)..(22)..(23): Xaa is A or G
  MOD_RES (24)..(25)..(26)..(27): Xaa is A or G or is absent

SEQ ID NO: 42674 - protein, 43 aa, Artificial Sequence; identical to SEQ ID NO: 29627
  GFR-binding peptide
  MOD_RES (6)..(40)..(42): Xaa is C or S
  MOD_RES (20)..(21)..(22)..(23)..(24): Xaa is A or G
  MOD_RES (25)..(26)..(27)..(28): Xaa is A or G or is absent

SEQ ID NO: 42675 - protein, 35 aa, Artificial Sequence
  GFR-binding peptide
  MOD_RES (1)..(2)..(33)..(35): Xaa is C or S
XXAPVKTSPISMLYIDNGRVLLYKQYEMIVEEXGX

SEQ ID NO: 42676 - protein, 38 aa, Artificial Sequence; identical to SEQ ID NO: 28660
  GFR-binding peptide
  MOD_RES (6)..(7): Xaa is C or S

SEQ ID NO: 42677 - protein, 41 aa, Artificial Sequence; identical to SEQ ID NO: 28661
  GFR-binding peptide
  MOD_RES (5)..(6)..(40): Xaa is C or S
  MOD_RES (20)..(21)..(22)..(23)..(24): Xaa is A or G
  MOD_RES (25)..(26)..(27)..(28): Xaa is A or G or is absent

SEQ ID NO: 42678 - protein, 41 aa, Artificial Sequence; identical to SEQ ID NO: 29630
  GFR-binding peptide
  MOD_RES (5)..(6)..(40): Xaa is C or S
  MOD_RES (20)..(21)..(22)..(23)..(24): Xaa is A or G
  MOD_RES (25)..(26)..(27)..(28): Xaa is A or G or is absent

SEQ ID NO: 42679 - protein, 32 aa, Artificial Sequence; identical to SEQ ID NO: 28663
  GFR-binding peptide
  MOD_RES (1)..(2): Xaa is C or S

SEQ ID NO: 42680 - protein, 39 aa, Artificial Sequence; identical to SEQ ID NO: 29631
  GFR-binding peptide
  MOD_RES (5)..(6)..(38): Xaa is C or S

SEQ ID NO: 42681 - protein, 32 aa, Artificial Sequence; identical to SEQ ID NO: 28668
  GFR-binding peptide
  MOD_RES (32)..(32): Xaa is C or S

SEQ ID NO: 42682 - protein, 39 aa, Artificial Sequence; identical to SEQ ID NO: 30612
  GFR-binding peptide
  MOD_RES (4)..(5)..(39): Xaa is C or S
  MOD_RES (19)..(20)..(21)..(22)..(23): Xaa is A or G
  MOD_RES (24)..(25)..(26)..(27): Xaa is A or G or is absent

SEQ ID NO: 42683 - protein, 42 aa, Artificial Sequence; identical to SEQ ID NO: 30614
  GFR-binding peptide
  MOD_RES (7)..(39)..(41): Xaa is C or S

SEQ ID NO: 42684 - protein, 40 aa, Artificial Sequence; identical to SEQ ID NO: 30615
  GFR-binding peptide
  MOD_RES (3)..(4)..(38)..(40): Xaa is C or S
  MOD_RES (18)..(19)..(20)..(21)..(22): Xaa is A or G
  MOD_RES (23)..(24)..(25)..(26): Xaa is A or G or is absent

SEQ ID NO: 42685 - protein, 37 aa, Artificial Sequence
  GFR-binding peptide
  MOD_RES (2)..(3)..(34)..(36): Xaa is C or S
TXXAPVKTSPISMLYIDNGRVLLYKQYEMIVEEXGXL

SEQ ID NO: 42686 - protein, 34 aa, Artificial Sequence; identical to SEQ ID NO: 28672
  GFR-binding peptide
  MOD_RES (1)..(2): Xaa is C or S
  MOD_RES (16)..(17)..(18)..(19)..(20): Xaa is A or G
  MOD_RES (21)..(22)..(23)..(24): Xaa is A or G or is absent

SEQ ID NO: 42687 - protein, 37 aa, Artificial Sequence; identical to SEQ ID NO: 27720
  GFR-binding peptide
  MOD_RES (2)..(3)..(37): Xaa is C or S
  MOD_RES (17)..(18)..(19)..(20)..(21): Xaa is A or G
  MOD_RES (22)..(23)..(24)..(25): Xaa is A or G or is absent

SEQ ID NO: 42688 - protein, 38 aa, Artificial Sequence
  GFR-binding peptide
  MOD_RES (1)..(35)..(37): Xaa is C or S
  MOD_RES (15)..(16)..(17)..(18)..(19): Xaa is A or G
  MOD_RES (20)..(21)..(22)..(23): Xaa is A or G or is absent
XTPTKMSPISMLYIXXXXXXXXXYKQYEGMVVDRXGXS

SEQ ID NO: 42689 - protein, 41 aa, Artificial Sequence
  GFR-binding peptide
  MOD_RES (6)..(7)..(41): Xaa is C or S
  MOD_RES (21)..(22)..(23)..(24)..(25): Xaa is A or G
  MOD_RES (26)..(27)..(28)..(29): Xaa is A or G or is absent
GSAGPXXTPTKMSPISMLYIXXXXXXXXXYKQYEGMVVDRX

SEQ ID NO: 42690 - protein, 37 aa, Artificial Sequence; identical to SEQ ID NO: 29643
  GFR-binding peptide
  MOD_RES (3)..(4): Xaa is C or S
  MOD_RES (18)..(19)..(20)..(21)..(22): Xaa is A or G
  MOD_RES (23)..(24)..(25)..(26): Xaa is A or G or is absent

SEQ ID NO: 42691 - protein, 38 aa, Artificial Sequence; identical to SEQ ID NO: 30623
  GFR-binding peptide
  MOD_RES (6)..(38): Xaa is C or S

SEQ ID NO: 42692 - protein, 37 aa, Artificial Sequence; identical to SEQ ID NO: 29647
  GFR-binding peptide
  MOD_RES (2)..(3)..(37): Xaa is C or S
  MOD_RES (17)..(18)..(19)..(20)..(21): Xaa is A or G
  MOD_RES (22)..(23)..(24)..(25): Xaa is A or G or is absent

SEQ ID NO: 42693 - protein, 30 aa, Artificial Sequence; identical to SEQ ID NO: 30624
  GFR-binding peptide

SEQ ID NO: 42694 - protein, 41 aa, Artificial Sequence; identical to SEQ ID NO: 28680
  GFR-binding peptide
  MOD_RES (5)..(6)..(38)..(40): Xaa is C or S

SEQ ID NO: 42695 - protein, 38 aa, Artificial Sequence; identical to SEQ ID NO: 28681
  GFR-binding peptide
  MOD_RES (6)..(6): Xaa is C or S
  MOD_RES (20)..(21)..(22)..(23)..(24): Xaa is A or G
  MOD_RES (25)..(26)..(27)..(28): Xaa is A or G or is absent

SEQ ID NO: 42696 - protein, 31 aa, Artificial Sequence; identical to SEQ ID NO: 28683
  GFR-binding peptide
  MOD_RES (1)..(1): Xaa is C or S

SEQ ID NO: 42697 - protein, 35 aa, Artificial Sequence; identical to SEQ ID NO: 29654
  GFR-binding peptide
  MOD_RES (34)..(34): Xaa is C or S
  MOD_RES (14)..(15)..(16)..(17)..(18): Xaa is A or G
  MOD_RES (19)..(20)..(21)..(22): Xaa is A or G or is absent

SEQ ID NO: 42698 - protein, 32 aa, Artificial Sequence; identical to SEQ ID NO: 28686
  GFR-binding peptide
  MOD_RES (1)..(2): Xaa is C or S

SEQ ID NO: 42699 - protein, 34 aa, Artificial Sequence; identical to SEQ ID NO: 30636
  GFR-binding peptide
  MOD_RES (32)..(34): Xaa is C or S

SEQ ID NO: 42700 - protein, 31 aa, Artificial Sequence; identical to SEQ ID NO: 29658
  GFR-binding peptide
  MOD_RES (1)..(1): Xaa is C or S

SEQ ID NO: 42701 - protein, 34 aa, Artificial Sequence; identical to SEQ ID NO: 28691
  GFR-binding peptide
  MOD_RES (1)..(2): Xaa is C or S

SEQ ID NO: 42702 - protein, 35 aa, Artificial Sequence; identical to SEQ ID NO: 30637
  GFR-binding peptide
  MOD_RES (1)..(35): Xaa is C or S
  MOD_RES (15)..(16)..(17)..(18)..(19): Xaa is A or G
  MOD_RES (20)..(21)..(22)..(23): Xaa is A or G or is absent

SEQ ID NO: 42703 - protein, 33 aa, Artificial Sequence; identical to SEQ ID NO: 30643
  GFR-binding peptide
  MOD_RES (32)..(32): Xaa is C or S

SEQ ID NO: 42704 - protein, 39 aa, Artificial Sequence; identical to SEQ ID NO: 28696
  GFR-binding peptide
  MOD_RES (1)..(2)..(36)..(38): Xaa is C or S
  MOD_RES (16)..(17)..(18)..(19)..(20): Xaa is A or G
  MOD_RES (21)..(22)..(23)..(24): Xaa is A or G or is absent

SEQ ID NO: 42705 - protein, 34 aa, Artificial Sequence; identical to SEQ ID NO: 30647
  GFR-binding peptide
  MOD_RES (3)..(4): Xaa is C or S

SEQ ID NO: 42706 - protein, 36 aa, Artificial Sequence; identical to SEQ ID NO: 30649
  GFR-binding peptide
  MOD_RES (3)..(4)..(36): Xaa is C or S

SEQ ID NO: 42707 - protein, 37 aa, Artificial Sequence; identical to SEQ ID NO: 28705
  GFR-binding peptide
  MOD_RES (1)..(2)..(36): Xaa is C or S
  MOD_RES (16)..(17)..(18)..(19)..(20): Xaa is A or G
  MOD_RES (21)..(22)..(23)..(24): Xaa is A or G or is absent

SEQ ID NO: 42708 - protein, 33 aa, Artificial Sequence
  GFR-binding peptide
  MOD_RES (2)..(3): Xaa is C or S
PXXTPTKMSPISMLYINDKQQIIYKQYEGMVVD

SEQ ID NO: 42709 - protein, 34 aa, Artificial Sequence; identical to SEQ ID NO: 27750
  GFR-binding peptide
  MOD_RES (2)..(3): Xaa is C or S

SEQ ID NO: 42710 - protein, 33 aa, Artificial Sequence; identical to SEQ ID NO: 28707
  GFR-binding peptide
  MOD_RES (2)..(3): Xaa is C or S

SEQ ID NO: 42711 - protein, 36 aa, Artificial Sequence; identical to SEQ ID NO: 28708
  GFR-binding peptide
  MOD_RES (1)..(2)..(36): Xaa is C or S
  MOD_RES (16)..(17)..(18)..(19)..(20): Xaa is A or G
  MOD_RES (21)..(22)..(23)..(24): Xaa is A or G or is absent

SEQ ID NO: 42712 - protein, 39 aa, Artificial Sequence; identical to SEQ ID NO: 29669
  GFR-binding peptide
  MOD_RES (4)..(5)..(39): Xaa is C or S
  MOD_RES (19)..(20)..(21)..(22)..(23): Xaa is A or G
  MOD_RES (24)..(25)..(26)..(27): Xaa is A or G or is absent

SEQ ID NO: 42713 - protein, 36 aa, Artificial Sequence; identical to SEQ ID NO: 30659
  GFR-binding peptide
  MOD_RES (34)..(36): Xaa is C or S
  MOD_RES (14)..(15)..(16)..(17)..(18): Xaa is A or G
  MOD_RES (19)..(20)..(21)..(22): Xaa is A or G or is absent

SEQ ID NO: 42714 - protein, 32 aa, Artificial Sequence
  GFR-binding peptide
  MOD_RES (14)..(15)..(16)..(17)..(18): Xaa is A or G
  MOD_RES (19)..(20)..(21)..(22): Xaa is A or G or is absent
TPTKMSPISMLYIXXXXXXXXXYKQYEGMVVD

SEQ ID NO: 42715 - protein, 31 aa, Artificial Sequence
  GFR-binding peptide
  MOD_RES (1)..(1): Xaa is C or S
XTPTKMSPISMLYINDKQQIIYKQYEGMVVD

SEQ ID NO: 42716 - protein, 40 aa, Artificial Sequence
  GFR-binding peptide
  MOD_RES (4)..(5)..(39): Xaa is C or S
  MOD_RES (19)..(20)..(21)..(22)..(23): Xaa is A or G
  MOD_RES (24)..(25)..(26)..(27): Xaa is A or G or is absent
AGPXXTPTKMSPISMLYIXXXXXXXXXYKQYEGMVVDRXG

SEQ ID NO: 42717 - protein, 36 aa, Artificial Sequence; identical to SEQ ID NO: 29675
  GFR-binding peptide
  MOD_RES (1)..(33)..(35): Xaa is C or S

SEQ ID NO: 42718 - protein, 40 aa, Artificial Sequence; identical to SEQ ID NO: 30664
  GFR-binding peptide
  MOD_RES (2)..(3)..(37)..(39): Xaa is C or S
  MOD_RES (17)..(18)..(19)..(20)..(21): Xaa is A or G
  MOD_RES (22)..(23)..(24)..(25): Xaa is A or G or is absent

SEQ ID NO: 42719 - protein, 34 aa, Artificial Sequence
  GFR-binding peptide
  MOD_RES (1)..(33): Xaa is C or S
XTPTKMSPISMLYINDKQQIIYKQYEGMVVDRXG

SEQ ID NO: 42720 - protein, 36 aa, Artificial Sequence; identical to SEQ ID NO: 30665
  GFR-binding peptide
  MOD_RES (34)..(36): Xaa is C or S
  MOD_RES (14)..(15)..(16)..(17)..(18): Xaa is A or G
  MOD_RES (19)..(20)..(21)..(22): Xaa is A or G or is absent

SEQ ID NO: 42721 - protein, 33 aa, Artificial Sequence
  GFR-binding peptide
  MOD_RES (1)..(2)..(33): Xaa is C or S
XXAPVKTSPISMLYIDNGRVLLYKQYEMIVEEX

SEQ ID NO: 42722 - protein, 38 aa, Artificial Sequence; identical to SEQ ID NO: 28722
  GFR-binding peptide
  MOD_RES (1)..(36)..(38): Xaa is C or S
  MOD_RES (15)..(16)..(17)..(18)..(19): Xaa is A or G
  MOD_RES (20)..(21)..(22)..(23): Xaa is A or G or is absent

SEQ ID NO: 42723 - protein, 34 aa, Artificial Sequence
  GFR-binding peptide
  MOD_RES (3)..(4): Xaa is C or S
GPXXTPTKMSPISMLYINDKQQIIYKQYEGMVVD

SEQ ID NO: 42724 - protein, 33 aa, Artificial Sequence; identical to SEQ ID NO: 28723
  GFR-binding peptide
  MOD_RES (32)..(32): Xaa is C or S

SEQ ID NO: 42725 - protein, 41 aa, Artificial Sequence; identical to SEQ ID NO: 30672
  GFR-binding peptide
  MOD_RES (6)..(7)..(39)..(41): Xaa is C or S

SEQ ID NO: 42726 - protein, 40 aa, Artificial Sequence; identical to SEQ ID NO: 28725
  GFR-binding peptide
  MOD_RES (2)..(3)..(37)..(39): Xaa is C or S
  MOD_RES (17)..(18)..(19)..(20)..(21): Xaa is A or G
  MOD_RES (22)..(23)..(24)..(25): Xaa is A or G or is absent

SEQ ID NO: 42727 - protein, 31 aa, Artificial Sequence; identical to SEQ ID NO: 29688
  GFR-binding peptide
  MOD_RES (1)..(1): Xaa is C or S

SEQ ID NO: 42728 - protein, 33 aa, Artificial Sequence; identical to SEQ ID NO: 29692
  GFR-binding peptide
  MOD_RES (1)..(33): Xaa is C or S

SEQ ID NO: 42729 - protein, 42 aa, Artificial Sequence
  GFR-binding peptide
  MOD_RES (6)..(7)..(39)..(41): Xaa is C or S
GSAGPXXTPTKMSPISMLYINDKQQIIYKQYEGMVVDRXGXS

SEQ ID NO: 42730 - protein, 44 aa, Artificial Sequence
  GFR-binding peptide
  MOD_RES (6)..(7)..(41)..(43): Xaa is C or S
  MOD_RES (21)..(22)..(23)..(24)..(25): Xaa is A or G
  MOD_RES (26)..(27)..(28)..(29): Xaa is A or G or is absent
HVPKPXXAPTKLSPISVLYIXXXXXXXXXYKQYENMVVRSXGXH

SEQ ID NO: 42731 - protein, 41 aa, Artificial Sequence; identical to SEQ ID NO: 29697
  GFR-binding peptide
  MOD_RES (5)..(6)..(39)..(41): Xaa is C or S

SEQ ID NO: 42732 - protein, 42 aa, Artificial Sequence; identical to SEQ ID NO: 30692
  GFR-binding peptide
  MOD_RES (5)..(6)..(41): Xaa is C or S
  MOD_RES (20)..(21)..(22)..(23)..(24): Xaa is A or G
  MOD_RES (25)..(26)..(27)..(28): Xaa is A or G or is absent

SEQ ID NO: 42733 - protein, 37 aa, Artificial Sequence
  GFR-binding peptide
  MOD_RES (2)..(3)..(35)..(37): Xaa is C or S
PXXTPTKMSPISMLYINDKQQIIYKQYEGMVVDRXGX

SEQ ID NO: 42734 - protein, 37 aa, Artificial Sequence; identical to SEQ ID NO: 28740
  GFR-binding peptide
  MOD_RES (4)..(5): Xaa is C or S
  MOD_RES (19)..(20)..(21)..(22)..(23): Xaa is A or G
  MOD_RES (24)..(25)..(26)..(27): Xaa is A or G or is absent

SEQ ID NO: 42735 - protein, 38 aa, Artificial Sequence; identical to SEQ ID NO: 28741
  GFR-binding peptide
  MOD_RES (2)..(3)..(35)..(37): Xaa is C or S

SEQ ID NO: 42736 - protein, 41 aa, Artificial Sequence; identical to SEQ ID NO: 29705
  GFR-binding peptide
  MOD_RES (3)..(4)..(38)..(40): Xaa is C or S
  MOD_RES (18)..(19)..(20)..(21)..(22): Xaa is A or G
  MOD_RES (23)..(24)..(25)..(26): Xaa is A or G or is absent

SEQ ID NO: 42737 - protein, 36 aa, Artificial Sequence; identical to SEQ ID NO: 28746
  GFR-binding peptide
  MOD_RES (5)..(6): Xaa is C or S

SEQ ID NO: 42738 - protein, 34 aa, Artificial Sequence; identical to SEQ ID NO: 27772
  GFR-binding peptide
  MOD_RES (3)..(4): Xaa is C or S

SEQ ID NO: 42739 - protein, 36 aa, Artificial Sequence
  GFR-binding peptide
  MOD_RES (2)..(3): Xaa is C or S
  MOD_RES (17)..(18)..(19)..(20)..(21): Xaa is A or G
  MOD_RES (22)..(23)..(24)..(25): Xaa is A or G or is absent
PXXTPTKMSPISMLYIXXXXXXXXXYKQYEGMVVDR

SEQ ID NO: 42740 - protein, 38 aa, Artificial Sequence; identical to SEQ ID NO: 30701
  GFR-binding peptide
  MOD_RES (6)..(7): Xaa is C or S

SEQ ID NO: 42741 - protein, 36 aa, Artificial Sequence; identical to SEQ ID NO: 29710
  GFR-binding peptide
  MOD_RES (3)..(4)..(36): Xaa is C or S

SEQ ID NO: 42742 - protein, 38 aa, Artificial Sequence; identical to SEQ ID NO: 29712
  GFR-binding peptide
  MOD_RES (4)..(5)..(37): Xaa is C or S

SEQ ID NO: 42743 - protein, 37 aa, Artificial Sequence; identical to SEQ ID NO: 29713
  GFR-binding peptide
  MOD_RES (6)..(6): Xaa is C or S

SEQ ID NO: 42744 - protein, 39 aa, Artificial Sequence
  GFR-binding peptide
  MOD_RES (3)..(4)..(36)..(38): Xaa is C or S
GPXXTPTKMSPISMLYINDKQQIIYKQYEGMVVDRXGXS

SEQ ID NO: 42745 - protein, 39 aa, Artificial Sequence
  GFR-binding peptide
  MOD_RES (6)..(7): Xaa is C or S
  MOD_RES (21)..(22)..(23)..(24)..(25): Xaa is A or G
  MOD_RES (26)..(27)..(28)..(29): Xaa is A or G or is absent
RVPSTXXAPVKTSPISMLYIXXXXXXXXXYKQYEMIVEE

SEQ ID NO: 42746 - protein, 39 aa, Artificial Sequence; identical to SEQ ID NO: 30707
  GFR-binding peptide
  MOD_RES (2)..(3)..(37)..(39): Xaa is C or S
  MOD_RES (17)..(18)..(19)..(20)..(21): Xaa is A or G
  MOD_RES (22)..(23)..(24)..(25): Xaa is A or G or is absent

SEQ ID NO: 42747 - protein, 43 aa, Artificial Sequence; identical to SEQ ID NO: 27784
  GFR-binding peptide
  MOD_RES (5)..(6)..(40)..(42): Xaa is C or S
  MOD_RES (20)..(21)..(22)..(23)..(24): Xaa is A or G
  MOD_RES (25)..(26)..(27)..(28): Xaa is A or G or is absent

SEQ ID NO: 42748 - protein, 42 aa, Artificial Sequence; identical to SEQ ID NO: 27785
  GFR-binding peptide
  MOD_RES (4)..(5)..(39)..(41): Xaa is C or S
  MOD_RES (19)..(20)..(21)..(22)..(23): Xaa is A or G
  MOD_RES (24)..(25)..(26)..(27): Xaa is A or G or is absent

SEQ ID NO: 42749 - protein, 31 aa, Artificial Sequence; identical to SEQ ID NO: 30710
  GFR-binding peptide

SEQ ID NO: 42750 - protein, 36 aa, Artificial Sequence; identical to SEQ ID NO: 29716
  GFR-binding peptide
  MOD_RES (1)..(2)..(35): Xaa is C or S

SEQ ID NO: 42751 - protein, 37 aa, Artificial Sequence; identical to SEQ ID NO: 27789
  GFR-binding peptide
  MOD_RES (3)..(4): Xaa is C or S
  MOD_RES (18)..(19)..(20)..(21)..(22): Xaa is A or G
  MOD_RES (23)..(24)..(25)..(26): Xaa is A or G or is absent

SEQ ID NO: 42752 - protein, 39 aa, Artificial Sequence
  GFR-binding peptide
  MOD_RES (6)..(7)..(39): Xaa is C or S
HVPKPXXAPTKLSPISVLYIDDSSNVIYKQYENMVVRSX

SEQ ID NO: 42753 - protein, 32 aa, Artificial Sequence; identical to SEQ ID NO: 29721
  GFR-binding peptide
  MOD_RES (32)..(32): Xaa is C or S

SEQ ID NO: 42754 - protein, 43 aa, Artificial Sequence; identical to SEQ ID NO: 27794
  GFR-binding peptide
  MOD_RES (5)..(6)..(40)..(42): Xaa is C or S
  MOD_RES (20)..(21)..(22)..(23)..(24): Xaa is A or G
  MOD_RES (25)..(26)..(27)..(28): Xaa is A or G or is absent

SEQ ID NO: 42755 - protein, 37 aa, Artificial Sequence; identical to SEQ ID NO: 28770
  GFR-binding peptide
  MOD_RES (2)..(3)..(35)..(37): Xaa is C or S

SEQ ID NO: 42756 - protein, 40 aa, Artificial Sequence; identical to SEQ ID NO: 29724
  GFR-binding peptide
  MOD_RES (2)..(3)..(37)..(39): Xaa is C or S
  MOD_RES (17)..(18)..(19)..(20)..(21): Xaa is A or G
  MOD_RES (22)..(23)..(24)..(25): Xaa is A or G or is absent

SEQ ID NO: 42757 - protein, 41 aa, Artificial Sequence; identical to SEQ ID NO: 30718
  GFR-binding peptide
  MOD_RES (4)..(5)..(39)..(41): Xaa is C or S
  MOD_RES (19)..(20)..(21)..(22)..(23): Xaa is A or G
  MOD_RES (24)..(25)..(26)..(27): Xaa is A or G or is absent

SEQ ID NO: 42758 - protein, 34 aa, Artificial Sequence; identical to SEQ ID NO: 30722
  GFR-binding peptide
  MOD_RES (1)..(2)..(34): Xaa is C or S

SEQ ID NO: 42759 - protein, 40 aa, Artificial Sequence
  GFR-binding peptide
  MOD_RES (5)..(6)..(39): Xaa is C or S
  MOD_RES (20)..(21)..(22)..(23)..(24): Xaa is A or G
  MOD_RES (25)..(26)..(27)..(28): Xaa is A or G or is absent
VPSTXXAPVKTSPISMLYIXXXXXXXXXYKQYEMIVEEXG

SEQ ID NO: 42760 - protein, 34 aa, Artificial Sequence
  GFR-binding peptide
  MOD_RES (1)..(1): Xaa is C or S
  MOD_RES (15)..(16)..(17)..(18)..(19): Xaa is A or G
  MOD_RES (20)..(21)..(22)..(23): Xaa is A or G or is absent
XTPTKMSPISMLYIXXXXXXXXXYKQYEGMVVDR

SEQ ID NO: 42761 - protein, 39 aa, Artificial Sequence; identical to SEQ ID NO: 28779
  GFR-binding peptide
  MOD_RES (3)..(37)..(39): Xaa is C or S
  MOD_RES (17)..(18)..(19)..(20)..(21): Xaa is A or G
  MOD_RES (22)..(23)..(24)..(25): Xaa is A or G or is absent

SEQ ID NO: 42762 - protein, 38 aa, Artificial Sequence; identical to SEQ ID NO: 27805
  GFR-binding peptide
  MOD_RES (5)..(6): Xaa is C or S
  MOD_RES (20)..(21)..(22)..(23)..(24): Xaa is A or G
  MOD_RES (25)..(26)..(27)..(28): Xaa is A or G or is absent

SEQ ID NO: 42763 - protein, 33 aa, Artificial Sequence
  GFR-binding peptide
  MOD_RES (32)..(32): Xaa is C or S
TPTKMSPISMLYINDKQQIIYKQYEGMVVDRXG

SEQ ID NO: 42764 - protein, 35 aa, Artificial Sequence; identical to SEQ ID NO: 30726
  GFR-binding peptide
  MOD_RES (34)..(34): Xaa is C or S
  MOD_RES (14)..(15)..(16)..(17)..(18): Xaa is A or G
  MOD_RES (19)..(20)..(21)..(22): Xaa is A or G or is absent

SEQ ID NO: 42765 - protein, 39 aa, Artificial Sequence
  GFR-binding peptide
  MOD_RES (4)..(5)..(36)..(38): Xaa is C or S
PSTXXAPVKTSPISMLYIDNGRVLLYKQYEMIVEEXGXL

SEQ ID NO: 42766 - protein, 36 aa, Artificial Sequence
  GFR-binding peptide
  MOD_RES (1)..(33)..(35): Xaa is C or S
XTPTKMSPISMLYINDKQQIIYKQYEGMVVDRXGXS

SEQ ID NO: 42767 - protein, 41 aa, Artificial Sequence; identical to SEQ ID NO: 28787
  GFR-binding peptide
  MOD_RES (4)..(5)..(39)..(41): Xaa is C or S
  MOD_RES (19)..(20)..(21)..(22)..(23): Xaa is A or G
  MOD_RES (24)..(25)..(26)..(27): Xaa is A or G or is absent

SEQ ID NO: 42768 - protein, 34 aa, Artificial Sequence; identical to SEQ ID NO: 27809
  GFR-binding peptide
  MOD_RES (34)..(34): Xaa is C or S
  MOD_RES (14)..(15)..(16)..(17)..(18): Xaa is A or G
  MOD_RES (19)..(20)..(21)..(22): Xaa is A or G or is absent

SEQ ID NO: 42769 - protein, 38 aa, Artificial Sequence; identical to SEQ ID NO: 30730
  GFR-binding peptide
  MOD_RES (5)..(6): Xaa is C or S
  MOD_RES (20)..(21)..(22)..(23)..(24): Xaa is A or G
  MOD_RES (25)..(26)..(27)..(28): Xaa is A or G or is absent

SEQ ID NO: 42770 - protein, 36 aa, Artificial Sequence; identical to SEQ ID NO: 29732
  GFR-binding peptide
  MOD_RES (1)..(33)..(35): Xaa is C or S

SEQ ID NO: 42771 - protein, 41 aa, Artificial Sequence; identical to SEQ ID NO: 27811
  GFR-binding peptide
  MOD_RES (6)..(7)..(41): Xaa is C or S
  MOD_RES (21)..(22)..(23)..(24)..(25): Xaa is A or G
  MOD_RES (26)..(27)..(28)..(29): Xaa is A or G or is absent

SEQ ID NO: 42772 - protein, 37 aa, Artificial Sequence; identical to SEQ ID NO: 29734
  GFR-binding peptide
  MOD_RES (5)..(37): Xaa is C or S

SEQ ID NO: 42773 - protein, 35 aa, Artificial Sequence; identical to SEQ ID NO: 28791
  GFR-binding peptide
  MOD_RES (1)..(1): Xaa is C or S
  MOD_RES (15)..(16)..(17)..(18)..(19): Xaa is A or G
  MOD_RES (20)..(21)..(22)..(23): Xaa is A or G or is absent

SEQ ID NO: 42774 - protein, 41 aa, Artificial Sequence
  GFR-binding peptide
  MOD_RES (4)..(5)..(39)..(41): Xaa is C or S
  MOD_RES (19)..(20)..(21)..(22)..(23): Xaa is A or G
  MOD_RES (24)..(25)..(26)..(27): Xaa is A or G or is absent
AGPXXTPTKMSPISMLYIXXXXXXXXXYKQYEGMVVDRXGX

SEQ ID NO: 42775 - protein, 34 aa, Artificial Sequence; identical to SEQ ID NO: 27815
  GFR-binding peptide
  MOD_RES (1)..(33): Xaa is C or S

SEQ ID NO: 42776 - protein, 38 aa, Artificial Sequence; identical to SEQ ID NO: 28798
  GFR-binding peptide
  MOD_RES (1)..(35)..(37): Xaa is C or S
  MOD_RES (15)..(16)..(17)..(18)..(19): Xaa is A or G
  MOD_RES (20)..(21)..(22)..(23): Xaa is A or G or is absent

SEQ ID NO: 42777 - protein, 37 aa, Artificial Sequence; identical to SEQ ID NO: 28800
  GFR-binding peptide
  MOD_RES (2)..(3)..(35)..(37): Xaa is C or S

SEQ ID NO: 42778 - protein, 39 aa, Artificial Sequence; identical to SEQ ID NO: 29742
  GFR-binding peptide
  MOD_RES (4)..(5)..(37)..(39): Xaa is C or S

SEQ ID NO: 42779 - protein, 36 aa, Artificial Sequence; identical to SEQ ID NO: 27818
  GFR-binding peptide
  MOD_RES (2)..(3)..(35): Xaa is C or S

SEQ ID NO: 42780 - protein, 37 aa, Artificial Sequence; identical to SEQ ID NO: 28804
  GFR-binding peptide
  MOD_RES (1)..(35)..(37): Xaa is C or S
  MOD_RES (15)..(16)..(17)..(18)..(19): Xaa is A or G
  MOD_RES (20)..(21)..(22)..(23): Xaa is A or G or is absent

SEQ ID NO: 42781 - protein, 40 aa, Artificial Sequence
  GFR-binding peptide
  MOD_RES (3)..(4)..(38)..(40): Xaa is C or S
  MOD_RES (18)..(19)..(20)..(21)..(22): Xaa is A or G
  MOD_RES (23)..(24)..(25)..(26): Xaa is A or G or is absent
GPXXTPTKMSPISMLYIXXXXXXXXXYKQYEGMVVDRXGX

SEQ ID NO: 42782 - protein, 39 aa, Artificial Sequence
  GFR-binding peptide
  MOD_RES (3)..(4)..(37)..(39): Xaa is C or S
  MOD_RES (18)..(19)..(20)..(21)..(22): Xaa is A or G
  MOD_RES (23)..(24)..(25)..(26): Xaa is A or G or is absent
STXXAPVKTSPISMLYIXXXXXXXXXYKQYEMIVEEXGX

SEQ ID NO: 42783 - protein, 31 aa, Artificial Sequence
  GFR-binding peptide
  MOD_RES (1)..(1): Xaa is C or S
XAPVKTSPISMLYIDNGRVLLYKQYEMIVEE

SEQ ID NO: 42784 - protein, 40 aa, Artificial Sequence; identical to SEQ ID NO: 29754
  GFR-binding peptide
  MOD_RES (4)..(5)..(39): Xaa is C or S
  MOD_RES (19)..(20)..(21)..(22)..(23): Xaa is A or G
  MOD_RES (24)..(25)..(26)..(27): Xaa is A or G or is absent

SEQ ID NO: 42785 - protein, 40 aa, Artificial Sequence; identical to SEQ ID NO: 27831
  GFR-binding peptide
  MOD_RES (4)..(5)..(37)..(39): Xaa is C or S

SEQ ID NO: 42786 - protein, 31 aa, Artificial Sequence; identical to SEQ ID NO: 28814
  GFR-binding peptide

SEQ ID NO: 42787 - protein, 36 aa, Artificial Sequence; identical to SEQ ID NO: 30751
  GFR-binding peptide
  MOD_RES (33)..(35): Xaa is C or S

SEQ ID NO: 42788 - protein, 36 aa, Artificial Sequence; identical to SEQ ID NO: 27835
  GFR-binding peptide
  MOD_RES (5)..(6): Xaa is C or S

SEQ ID NO: 42789 - protein, 37 aa, Artificial Sequence
  GFR-binding peptide
  MOD_RES (34)..(36): Xaa is C or S
  MOD_RES (14)..(15)..(16)..(17)..(18): Xaa is A or G
  MOD_RES (19)..(20)..(21)..(22): Xaa is A or G or is absent
TPTKMSPISMLYIXXXXXXXXXYKQYEGMVVDRXGXS

SEQ ID NO: 42790 - protein, 38 aa, Artificial Sequence
  GFR-binding peptide
  MOD_RES (3)..(4)..(35)..(37): Xaa is C or S
STXXAPVKTSPISMLYIDNGRVLLYKQYEMIVEEXGXL

SEQ ID NO: 42791 - protein, 39 aa, Artificial Sequence
  GFR-binding peptide
  MOD_RES (4)..(5)..(37)..(39): Xaa is C or S
AGPXXTPTKMSPISMLYINDKQQIIYKQYEGMVVDRXGX

SEQ ID NO: 42792 - protein, 36 aa, Artificial Sequence
  GFR-binding peptide
  MOD_RES (33)..(35): Xaa is C or S
  MOD_RES (14)..(15)..(16)..(17)..(18): Xaa is A or G
  MOD_RES (19)..(20)..(21)..(22): Xaa is A or G or is absent
APVKTSPISMLYIXXXXXXXXXYKQYEMIVEEXGXL

SEQ ID NO: 42793 - protein, 37 aa, Artificial Sequence
  GFR-binding peptide
  MOD_RES (6)..(7): Xaa is C or S
RVPSTXXAPVKTSPISMLYIDNGRVLLYKQYEMIVEE

SEQ ID NO: 42794 - protein, 42 aa, Artificial Sequence; identical to SEQ ID NO: 28824
  GFR-binding peptide
  MOD_RES (4)..(5)..(39)..(41): Xaa is C or S
  MOD_RES (19)..(20)..(21)..(22)..(23): Xaa is A or G
  MOD_RES (24)..(25)..(26)..(27): Xaa is A or G or is absent

SEQ ID NO: 42795 - protein, 34 aa, Artificial Sequence; identical to SEQ ID NO: 30763
  GFR-binding peptide
  MOD_RES (2)..(34): Xaa is C or S

SEQ ID NO: 42796 - protein, 41 aa, Artificial Sequence
  GFR-binding peptide
  MOD_RES (6)..(7)..(38)..(40): Xaa is C or S
RVPSTXXAPVKTSPISMLYIDNGRVLLYKQYEMIVEEXGXL

SEQ ID NO: 42797 - protein, 32 aa, Artificial Sequence
  GFR-binding peptide
  MOD_RES (1)..(2): Xaa is C or S
XXTPTKMSPISMLYINDKQQIIYKQYEGMVVD

SEQ ID NO: 42798 - protein, 43 aa, Artificial Sequence; identical to SEQ ID NO: 29766
  GFR-binding peptide
  MOD_RES (6)..(7)..(41)..(43): Xaa is C or S
  MOD_RES (21)..(22)..(23)..(24)..(25): Xaa is A or G
  MOD_RES (26)..(27)..(28)..(29): Xaa is A or G or is absent

SEQ ID NO: 42799 - protein, 35 aa, Artificial Sequence; identical to SEQ ID NO: 28831
  GFR-binding peptide
  MOD_RES (35)..(35): Xaa is C or S
  MOD_RES (14)..(15)..(16)..(17)..(18): Xaa is A or G
  MOD_RES (19)..(20)..(21)..(22): Xaa is A or G or is absent

SEQ ID NO: 42800 - protein, 38 aa, Artificial Sequence; identical to SEQ ID NO: 27848
  GFR-binding peptide
  MOD_RES (5)..(6): Xaa is C or S
  MOD_RES (20)..(21)..(22)..(23)..(24): Xaa is A or G
  MOD_RES (25)..(26)..(27)..(28): Xaa is A or G or is absent

SEQ ID NO: 42801 - protein, 34 aa, Artificial Sequence
  GFR-binding peptide
  MOD_RES (3)..(4): Xaa is C or S
STXXAPVKTSPISMLYIDNGRVLLYKQYEMIVEE

SEQ ID NO: 42802 - protein, 35 aa, Artificial Sequence; identical to SEQ ID NO: 27852
  GFR-binding peptide
  MOD_RES (2)..(3)..(35): Xaa is C or S

SEQ ID NO: 42803 - protein, 39 aa, Artificial Sequence
  GFR-binding peptide
  MOD_RES (6)..(7): Xaa is C or S
  MOD_RES (21)..(22)..(23)..(24)..(25): Xaa is A or G
  MOD_RES (26)..(27)..(28)..(29): Xaa is A or G or is absent
HVPKPXXAPTKLSPISVLYIXXXXXXXXXYKQYENMVVR

SEQ ID NO: 42804 - protein, 38 aa, Artificial Sequence; identical to SEQ ID NO: 29771
  GFR-binding peptide
  MOD_RES (3)..(4)..(36)..(38): Xaa is C or S

SEQ ID NO: 42805 - protein, 40 aa, Artificial Sequence; identical to SEQ ID NO: 30771
  GFR-binding peptide
  MOD_RES (3)..(4)..(38)..(40): Xaa is C or S
  MOD_RES (18)..(19)..(20)..(21)..(22): Xaa is A or G
  MOD_RES (23)..(24)..(25)..(26): Xaa is A or G or is absent

SEQ ID NO: 42806 - protein, 36 aa, Artificial Sequence
  GFR-binding peptide
  MOD_RES (5)..(6): Xaa is C or S
VPSTXXAPVKTSPISMLYIDNGRVLLYKQYEMIVEE

SEQ ID NO: 42807 - protein, 38 aa, Artificial Sequence; identical to SEQ ID NO: 27855
  GFR-binding peptide
  MOD_RES (2)..(3)..(37): Xaa is C or S
  MOD_RES (17)..(18)..(19)..(20)..(21): Xaa is A or G
  MOD_RES (22)..(23)..(24)..(25): Xaa is A or G or is absent

SEQ ID NO: 42808 - protein, 40 aa, Artificial Sequence; identical to SEQ ID NO: 27856
  GFR-binding peptide
  MOD_RES (4)..(5)..(37)..(39): Xaa is C or S

SEQ ID NO: 42809 - protein, 37 aa, Artificial Sequence; identical to SEQ ID NO: 30774
  GFR-binding peptide
  MOD_RES (5)..(6): Xaa is C or S

SEQ ID NO: 42810 - protein, 40 aa, Artificial Sequence; identical to SEQ ID NO: 27859
  GFR-binding peptide
  MOD_RES (7)..(7): Xaa is C or S
  MOD_RES (21)..(22)..(23)..(24)..(25): Xaa is A or G
  MOD_RES (26)..(27)..(28)..(29): Xaa is A or G or is absent

SEQ ID NO: 42811 - protein, 35 aa, Artificial Sequence; identical to SEQ ID NO: 29777
  GFR-binding peptide
  MOD_RES (1)..(2): Xaa is C or S
  MOD_RES (16)..(17)..(18)..(19)..(20): Xaa is A or G
  MOD_RES (21)..(22)..(23)..(24): Xaa is A or G or is absent

SEQ ID NO: 42812 - protein, 30 aa, Artificial Sequence
  GFR-binding peptide
APVKTSPISMLYIDNGRVLLYKQYEMIVEE

SEQ ID NO: 42813 - protein, 36 aa, Artificial Sequence; identical to SEQ ID NO: 30776
  GFR-binding peptide
  MOD_RES (3)..(4): Xaa is C or S
  MOD_RES (18)..(19)..(20)..(21)..(22): Xaa is A or G
  MOD_RES (23)..(24)..(25)..(26): Xaa is A or G or is absent

SEQ ID NO: 42814 - protein, 43 aa, Artificial Sequence
  GFR-binding peptide
  MOD_RES (6)..(7)..(41)..(43): Xaa is C or S
  MOD_RES (21)..(22)..(23)..(24)..(25): Xaa is A or G
  MOD_RES (26)..(27)..(28)..(29): Xaa is A or G or is absent
GSAGPXXTPTKMSPISMLYIXXXXXXXXXYKQYEGMVVDRXGX

SEQ ID NO: 42815 - protein, 40 aa, Artificial Sequence; identical to SEQ ID NO: 30778
  GFR-binding peptide
  MOD_RES (6)..(7): Xaa is C or S
  MOD_RES (21)..(22)..(23)..(24)..(25): Xaa is A or G
  MOD_RES (26)..(27)..(28)..(29): Xaa is A or G or is absent

SEQ ID NO: 42816 - protein, 41 aa, Artificial Sequence; identical to SEQ ID NO: 28839
  GFR-binding peptide
  MOD_RES (5)..(6)..(41): Xaa is C or S
  MOD_RES (20)..(21)..(22)..(23)..(24): Xaa is A or G
  MOD_RES (25)..(26)..(27)..(28): Xaa is A or G or is absent

SEQ ID NO: 42817 - protein, 43 aa, Artificial Sequence; identical to SEQ ID NO: 27862
  GFR-binding peptide
  MOD_RES (6)..(7)..(41)..(43): Xaa is C or S
  MOD_RES (21)..(22)..(23)..(24)..(25): Xaa is A or G
  MOD_RES (26)..(27)..(28)..(29): Xaa is A or G or is absent

SEQ ID NO: 42818 - protein, 38 aa, Artificial Sequence; identical to SEQ ID NO: 29780
  GFR-binding peptide
  MOD_RES (1)..(2)..(36)..(38): Xaa is C or S
  MOD_RES (16)..(17)..(18)..(19)..(20): Xaa is A or G
  MOD_RES (21)..(22)..(23)..(24): Xaa is A or G or is absent

SEQ ID NO: 42819 - protein, 37 aa, Artificial Sequence
  GFR-binding peptide
  MOD_RES (4)..(5): Xaa is C or S
  MOD_RES (19)..(20)..(21)..(22)..(23): Xaa is A or G
  MOD_RES (24)..(25)..(26)..(27): Xaa is A or G or is absent
PSTXXAPVKTSPISMLYIXXXXXXXXXYKQYEMIVEE

SEQ ID NO: 42820 - protein, 38 aa, Artificial Sequence; identical to SEQ ID NO: 30780
  GFR-binding peptide
  MOD_RES (1)..(35)..(37): Xaa is C or S
  MOD_RES (15)..(16)..(17)..(18)..(19): Xaa is A or G
  MOD_RES (20)..(21)..(22)..(23): Xaa is A or G or is absent

SEQ ID NO: 42821 - protein, 35 aa, Artificial Sequence; identical to SEQ ID NO: 27863
  GFR-binding peptide
  MOD_RES (1)..(2): Xaa is C or S
  MOD_RES (16)..(17)..(18)..(19)..(20): Xaa is A or G
  MOD_RES (21)..(22)..(23)..(24): Xaa is A or G or is absent

SEQ ID NO: 42822 - protein, 34 aa, Artificial Sequence; identical to SEQ ID NO: 27864
  GFR-binding peptide
  MOD_RES (14)..(15)..(16)..(17)..(18): Xaa is A or G
  MOD_RES (19)..(20)..(21)..(22): Xaa is A or G or is absent

SEQ ID NO: 42823 - protein, 35 aa, Artificial Sequence
  GFR-binding peptide
  MOD_RES (2)..(3)..(35): Xaa is C or S
PXXTPTKMSPISMLYINDKQQIIYKQYEGMVVDRX

SEQ ID NO: 42824 - protein, 37 aa, Artificial Sequence
  GFR-binding peptide
  MOD_RES (4)..(5)..(36): Xaa is C or S
PSTXXAPVKTSPISMLYIDNGRVLLYKQYEMIVEEXG

SEQ ID NO: 42825 - protein, 40 aa, Artificial Sequence; identical to SEQ ID NO: 28845
  GFR-binding peptide
  MOD_RES (4)..(5)..(37)..(39): Xaa is C or S

SEQ ID NO: 42826 - protein, 35 aa, Artificial Sequence; identical to SEQ ID NO: 29787
  GFR-binding peptide
  MOD_RES (1)..(2): Xaa is C or S
  MOD_RES (16)..(17)..(18)..(19)..(20): Xaa is A or G
  MOD_RES (21)..(22)..(23)..(24): Xaa is A or G or is absent

SEQ ID NO: 42827 - protein, 42 aa, Artificial Sequence; identical to SEQ ID NO: 29788
  GFR-binding peptide
  MOD_RES (4)..(5)..(39)..(41): Xaa is C or S
  MOD_RES (19)..(20)..(21)..(22)..(23): Xaa is A or G
  MOD_RES (24)..(25)..(26)..(27): Xaa is A or G or is absent

SEQ ID NO: 42828 - protein, 38 aa, Artificial Sequence; identical to SEQ ID NO: 28856
  GFR-binding peptide
  MOD_RES (3)..(4)..(36)..(38): Xaa is C or S

SEQ ID NO: 42829 - protein, 36 aa, Artificial Sequence; identical to SEQ ID NO: 28859
  GFR-binding peptide
  MOD_RES (34)..(36): Xaa is C or S
  MOD_RES (14)..(15)..(16)..(17)..(18): Xaa is A or G
  MOD_RES (19)..(20)..(21)..(22): Xaa is A or G or is absent

SEQ ID NO: 42830 - protein, 36 aa, Artificial Sequence; identical to SEQ ID NO: 29795
  GFR-binding peptide
  MOD_RES (2)..(3)..(36): Xaa is C or S

SEQ ID NO: 42831 - protein, 38 aa, Artificial Sequence; identical to SEQ ID NO: 29796
  GFR-binding peptide
  MOD_RES (5)..(6)..(38): Xaa is C or S

SEQ ID NO: 42832 - protein, 39 aa, Artificial Sequence; identical to SEQ ID NO: 30792
  GFR-binding peptide
  MOD_RES (5)..(6): Xaa is C or S
  MOD_RES (20)..(21)..(22)..(23)..(24): Xaa is A or G
  MOD_RES (25)..(26)..(27)..(28): Xaa is A or G or is absent

SEQ ID NO: 42833 - protein, 35 aa, Artificial Sequence; identical to SEQ ID NO: 28860
  GFR-binding peptide
  MOD_RES (5)..(5): Xaa is C or S

SEQ ID NO: 42834 - protein, 37 aa, Artificial Sequence; identical to SEQ ID NO: 27875
  GFR-binding peptide
  MOD_RES (1)..(2)..(36): Xaa is C or S
  MOD_RES (16)..(17)..(18)..(19)..(20): Xaa is A or G
  MOD_RES (21)..(22)..(23)..(24): Xaa is A or G or is absent

SEQ ID NO: 42835 - protein, 35 aa, Artificial Sequence; identical to SEQ ID NO: 30797
  GFR-binding peptide
  MOD_RES (2)..(3): Xaa is C or S
  MOD_RES (17)..(18)..(19)..(20)..(21): Xaa is A or G
  MOD_RES (22)..(23)..(24)..(25): Xaa is A or G or is absent

SEQ ID NO: 42836 - protein, 40 aa, Artificial Sequence; identical to SEQ ID NO: 27879
  GFR-binding peptide
  MOD_RES (5)..(6)..(38)..(40): Xaa is C or S

SEQ ID NO: 42837 - protein, 37 aa, Artificial Sequence; identical to SEQ ID NO: 27880
  GFR-binding peptide
  MOD_RES (2)..(3)..(36): Xaa is C or S

SEQ ID NO: 42838 - protein, 33 aa, Artificial Sequence; identical to SEQ ID NO: 30799
  GFR-binding peptide
  MOD_RES (32)..(32): Xaa is C or S

SEQ ID NO: 42839 - protein, 37 aa, Artificial Sequence; identical to SEQ ID NO: 30800
  GFR-binding peptide
  MOD_RES (1)..(2)..(34)..(36): Xaa is C or S

SEQ ID NO: 42840 - protein, 40 aa, Artificial Sequence; identical to SEQ ID NO: 30801
  GFR-binding peptide
  MOD_RES (6)..(7)..(39): Xaa is C or S

SEQ ID NO: 42841 - protein, 36 aa, Artificial Sequence
  GFR-binding peptide
  MOD_RES (1)..(2)..(35): Xaa is C or S
  MOD_RES (16)..(17)..(18)..(19)..(20): Xaa is A or G
  MOD_RES (21)..(22)..(23)..(24): Xaa is A or G or is absent
XXAPVKTSPISMLYIXXXXXXXXXYKQYEMIVEEXG

SEQ ID NO: 42842 - protein, 37 aa, Artificial Sequence; identical to SEQ ID NO: 27881
  GFR-binding peptide
  MOD_RES (5)..(6): Xaa is C or S

SEQ ID NO: 42843 - protein, 39 aa, Artificial Sequence; identical to SEQ ID NO: 28867
  GFR-binding peptide
  MOD_RES (5)..(6): Xaa is C or S
  MOD_RES (20)..(21)..(22)..(23)..(24): Xaa is A or G
  MOD_RES (25)..(26)..(27)..(28): Xaa is A or G or is absent

SEQ ID NO: 42844 - protein, 35 aa, Artificial Sequence
  GFR-binding peptide
  MOD_RES (1)..(32)..(34): Xaa is C or S
XAPVKTSPISMLYIDNGRVLLYKQYEMIVEEXGXL

SEQ ID NO: 42845 - protein, 35 aa, Artificial Sequence
  GFR-binding peptide
  MOD_RES (32)..(34): Xaa is C or S
TPTKMSPISMLYINDKQQIIYKQYEGMVVDRXGXS

SEQ ID NO: 42846 - protein, 33 aa, Artificial Sequence; identical to SEQ ID NO: 29804
  GFR-binding peptide
  MOD_RES (1)..(2): Xaa is C or S

SEQ ID NO: 42847 - protein, 37 aa, Artificial Sequence; identical to SEQ ID NO: 30806
  GFR-binding peptide
  MOD_RES (1)..(2)..(36): Xaa is C or S
  MOD_RES (16)..(17)..(18)..(19)..(20): Xaa is A or G
  MOD_RES (21)..(22)..(23)..(24): Xaa is A or G or is absent

SEQ ID NO: 42848 - protein, 41 aa, Artificial Sequence; identical to SEQ ID NO: 27885
  GFR-binding peptide
  MOD_RES (5)..(6)..(38)..(40): Xaa is C or S

SEQ ID NO: 42849 - protein, 40 aa, Artificial Sequence
  GFR-binding peptide
  MOD_RES (6)..(7)..(38)..(40): Xaa is C or S
RVPSTXXAPVKTSPISMLYIDNGRVLLYKQYEMIVEEXGX

SEQ ID NO: 42850 - protein, 41 aa, Artificial Sequence; identical to SEQ ID NO: 30813
  GFR-binding peptide
  MOD_RES (3)..(4)..(38)..(40): Xaa is C or S
  MOD_RES (18)..(19)..(20)..(21)..(22): Xaa is A or G
  MOD_RES (23)..(24)..(25)..(26): Xaa is A or G or is absent

SEQ ID NO: 42851 - protein, 41 aa, Artificial Sequence; identical to SEQ ID NO: 28876
  GFR-binding peptide
  MOD_RES (6)..(7)..(40): Xaa is C or S

SEQ ID NO: 42852 - protein, 36 aa, Artificial Sequence
  GFR-binding peptide
  MOD_RES (1)..(35): Xaa is C or S
  MOD_RES (15)..(16)..(17)..(18)..(19): Xaa is A or G
  MOD_RES (20)..(21)..(22)..(23): Xaa is A or G or is absent
XTPTKMSPISMLYIXXXXXXXXXYKQYEGMVVDRXG

SEQ ID NO: 42853 - protein, 38 aa, Artificial Sequence; identical to SEQ ID NO: 29812
  GFR-binding peptide
  MOD_RES (4)..(5): Xaa is C or S
  MOD_RES (19)..(20)..(21)..(22)..(23): Xaa is A or G
  MOD_RES (24)..(25)..(26)..(27): Xaa is A or G or is absent

SEQ ID NO: 42854 - protein, 39 aa, Artificial Sequence; identical to SEQ ID NO: 27891
  GFR-binding peptide
  MOD_RES (2)..(3)..(38): Xaa is C or S
  MOD_RES (17)..(18)..(19)..(20)..(21): Xaa is A or G
  MOD_RES (22)..(23)..(24)..(25): Xaa is A or G or is absent

SEQ ID NO: 42855 - protein, 42 aa, Artificial Sequence; identical to SEQ ID NO: 29813
  GFR-binding peptide
  MOD_RES (5)..(39)..(41): Xaa is C or S
  MOD_RES (19)..(20)..(21)..(22)..(23): Xaa is A or G
  MOD_RES (24)..(25)..(26)..(27): Xaa is A or G or is absent

SEQ ID NO: 42856 - protein, 40 aa, Artificial Sequence; identical to SEQ ID NO: 29816
  GFR-binding peptide
  MOD_RES (4)..(5)..(38)..(40): Xaa is C or S

SEQ ID NO: 42857 - protein, 38 aa, Artificial Sequence; identical to SEQ ID NO: 28882
  GFR-binding peptide
  MOD_RES (2)..(3)..(37): Xaa is C or S
  MOD_RES (17)..(18)..(19)..(20)..(21): Xaa is A or G
  MOD_RES (22)..(23)..(24)..(25): Xaa is A or G or is absent

SEQ ID NO: 42858 - protein, 40 aa, Artificial Sequence; identical to SEQ ID NO: 28884
  GFR-binding peptide
  MOD_RES (4)..(38)..(40): Xaa is C or S
  MOD_RES (18)..(19)..(20)..(21)..(22): Xaa is A or G
  MOD_RES (23)..(24)..(25)..(26): Xaa is A or G or is absent

SEQ ID NO: 42859 - protein, 36 aa, Artificial Sequence; identical to SEQ ID NO: 30816
  GFR-binding peptide
  MOD_RES (34)..(36): Xaa is C or S
  MOD_RES (14)..(15)..(16)..(17)..(18): Xaa is A or G
  MOD_RES (19)..(20)..(21)..(22): Xaa is A or G or is absent

SEQ ID NO: 42860 - protein, 40 aa, Artificial Sequence; identical to SEQ ID NO: 27898
  GFR-binding peptide
  MOD_RES (6)..(7): Xaa is C or S
  MOD_RES (21)..(22)..(23)..(24)..(25): Xaa is A or G
  MOD_RES (26)..(27)..(28)..(29): Xaa is A or G or is absent

SEQ ID NO: 42861 - protein, 35 aa, Artificial Sequence; identical to SEQ ID NO: 30817
  GFR-binding peptide
  MOD_RES (34)..(34): Xaa is C or S
  MOD_RES (14)..(15)..(16)..(17)..(18): Xaa is A or G
  MOD_RES (19)..(20)..(21)..(22): Xaa is A or G or is absent

SEQ ID NO: 42862 - protein, 36 aa, Artificial Sequence; identical to SEQ ID NO: 29821
  GFR-binding peptide
  MOD_RES (2)..(3): Xaa is C or S
  MOD_RES (17)..(18)..(19)..(20)..(21): Xaa is A or G
  MOD_RES (22)..(23)..(24)..(25): Xaa is A or G or is absent

SEQ ID NO: 42863 - protein, 40 aa, Artificial Sequence; identical to SEQ ID NO: 28890
  GFR-binding peptide
  MOD_RES (6)..(7)..(39): Xaa is C or S

SEQ ID NO: 42864 - protein, 39 aa, Artificial Sequence
  GFR-binding peptide
  MOD_RES (4)..(5)..(38): Xaa is C or S
  MOD_RES (19)..(20)..(21)..(22)..(23): Xaa is A or G
  MOD_RES (24)..(25)..(26)..(27): Xaa is A or G or is absent
PSTXXAPVKTSPISMLYIXXXXXXXXXYKQYEMIVEEXG

SEQ ID NO: 42865 - protein, 40 aa, Artificial Sequence; identical to SEQ ID NO: 28895
  GFR-binding peptide
  MOD_RES (5)..(37)..(39): Xaa is C or S

SEQ ID NO: 42866 - protein, 42 aa, Artificial Sequence
  GFR-binding peptide
  MOD_RES (6)..(7)..(41): Xaa is C or S
  MOD_RES (21)..(22)..(23)..(24)..(25): Xaa is A or G
  MOD_RES (26)..(27)..(28)..(29): Xaa is A or G or is absent
GSAGPXXTPTKMSPISMLYIXXXXXXXXXYKQYEGMVVDRXG

SEQ ID NO: 42867 - protein, 37 aa, Artificial Sequence; identical to SEQ ID NO: 27904
  GFR-binding peptide
  MOD_RES (5)..(6): Xaa is C or S

SEQ ID NO: 42868 - protein, 38 aa, Artificial Sequence; identical to SEQ ID NO: 30824
  GFR-binding peptide
  MOD_RES (3)..(4)..(36)..(38): Xaa is C or S

SEQ ID NO: 42869 - protein, 37 aa, Artificial Sequence; identical to SEQ ID NO: 30825
  GFR-binding peptide
  MOD_RES (7)..(7): Xaa is C or S

SEQ ID NO: 42870 - protein, 39 aa, Artificial Sequence; identical to SEQ ID NO: 29831
  GFR-binding peptide
  MOD_RES (3)..(4)..(38): Xaa is C or S
  MOD_RES (18)..(19)..(20)..(21)..(22): Xaa is A or G
  MOD_RES (23)..(24)..(25)..(26): Xaa is A or G or is absent

SEQ ID NO: 42871 - protein, 36 aa, Artificial Sequence; identical to SEQ ID NO: 27907
  GFR-binding peptide
  MOD_RES (3)..(4): Xaa is C or S
  MOD_RES (18)..(19)..(20)..(21)..(22): Xaa is A or G
  MOD_RES (23)..(24)..(25)..(26): Xaa is A or G or is absent

SEQ ID NO: 42872 - protein, 37 aa, Artificial Sequence
  GFR-binding peptide
  MOD_RES (4)..(5): Xaa is C or S
  MOD_RES (19)..(20)..(21)..(22)..(23): Xaa is A or G
  MOD_RES (24)..(25)..(26)..(27): Xaa is A or G or is absent
AGPXXTPTKMSPISMLYIXXXXXXXXXYKQYEGMVVD

SEQ ID NO: 42873 - protein, 44 aa, Artificial Sequence; identical to SEQ ID NO: 28904
  GFR-binding peptide
  MOD_RES (6)..(7)..(41)..(43): Xaa is C or S
  MOD_RES (21)..(22)..(23)..(24)..(25): Xaa is A or G
  MOD_RES (26)..(27)..(28)..(29): Xaa is A or G or is absent

SEQ ID NO: 42874 - protein, 38 aa, Artificial Sequence; identical to SEQ ID NO: 28905
  GFR-binding peptide
  MOD_RES (4)..(5)..(37): Xaa is C or S

SEQ ID NO: 42875 - protein, 37 aa, Artificial Sequence; identical to SEQ ID NO: 29832
  GFR-binding peptide
  MOD_RES (2)..(3): Xaa is C or S
  MOD_RES (17)..(18)..(19)..(20)..(21): Xaa is A or G
  MOD_RES (22)..(23)..(24)..(25): Xaa is A or G or is absent

SEQ ID NO: 42876 - protein, 43 aa, Artificial Sequence; identical to SEQ ID NO: 27912
  GFR-binding peptide
  MOD_RES (5)..(6)..(40)..(42): Xaa is C or S
  MOD_RES (20)..(21)..(22)..(23)..(24): Xaa is A or G
  MOD_RES (25)..(26)..(27)..(28): Xaa is A or G or is absent

SEQ ID NO: 42877 - protein, 35 aa, Artificial Sequence; identical to SEQ ID NO: 30828
  GFR-binding peptide
  MOD_RES (2)..(3)..(35): Xaa is C or S

SEQ ID NO: 42878 - protein, 41 aa, Artificial Sequence; identical to SEQ ID NO: 29834
  GFR-binding peptide
  MOD_RES (6)..(7)..(41): Xaa is C or S
  MOD_RES (21)..(22)..(23)..(24)..(25): Xaa is A or G
  MOD_RES (26)..(27)..(28)..(29): Xaa is A or G or is absent

SEQ ID NO: 42879 - protein, 37 aa, Artificial Sequence; identical to SEQ ID NO: 27915
  GFR-binding peptide
  MOD_RES (2)..(3)..(37): Xaa is C or S
  MOD_RES (17)..(18)..(19)..(20)..(21): Xaa is A or G
  MOD_RES (22)..(23)..(24)..(25): Xaa is A or G or is absent

SEQ ID NO: 42880 - protein, 43 aa, Artificial Sequence; identical to SEQ ID NO: 28907
  GFR-binding peptide
  MOD_RES (6)..(7)..(41)..(43): Xaa is C or S
  MOD_RES (21)..(22)..(23)..(24)..(25): Xaa is A or G
  MOD_RES (26)..(27)..(28)..(29): Xaa is A or G or is absent

SEQ ID NO: 42881 - protein, 35 aa, Artificial Sequence; identical to SEQ ID NO: 30831
  GFR-binding peptide
  MOD_RES (2)..(3)..(35): Xaa is C or S

SEQ ID NO: 42882 - protein, 35 aa, Artificial Sequence; identical to SEQ ID NO: 27919
  GFR-binding peptide
  MOD_RES (3)..(4): Xaa is C or S

SEQ ID NO: 42883 - protein, 40 aa, Artificial Sequence; identical to SEQ ID NO: 27922
  GFR-binding peptide
  MOD_RES (4)..(5)..(39): Xaa is C or S
  MOD_RES (19)..(20)..(21)..(22)..(23): Xaa is A or G
  MOD_RES (24)..(25)..(26)..(27): Xaa is A or G or is absent

SEQ ID NO: 42884 - protein, 34 aa, Artificial Sequence; identical to SEQ ID NO: 28914
  GFR-binding peptide
  MOD_RES (33)..(33): Xaa is C or S

SEQ ID NO: 42885 - protein, 39 aa, Artificial Sequence
  GFR-binding peptide
  MOD_RES (4)..(5)..(39): Xaa is C or S
  MOD_RES (19)..(20)..(21)..(22)..(23): Xaa is A or G
  MOD_RES (24)..(25)..(26)..(27): Xaa is A or G or is absent
AGPXXTPTKMSPISMLYIXXXXXXXXXYKQYEGMVVDRX

SEQ ID NO: 42886 - protein, 35 aa, Artificial Sequence; identical to SEQ ID NO: 28916
  GFR-binding peptide
  MOD_RES (1)..(2)..(34): Xaa is C or S

SEQ ID NO: 42887 - protein, 41 aa, Artificial Sequence; identical to SEQ ID NO: 30836
  GFR-binding peptide
  MOD_RES (4)..(5)..(39)..(41): Xaa is C or S
  MOD_RES (19)..(20)..(21)..(22)..(23): Xaa is A or G
  MOD_RES (24)..(25)..(26)..(27): Xaa is A or G or is absent

SEQ ID NO: 42888 - protein, 32 aa, Artificial Sequence; identical to SEQ ID NO: 30837
  GFR-binding peptide
  MOD_RES (32)..(32): Xaa is C or S

SEQ ID NO: 42889 - protein, 38 aa, Artificial Sequence; identical to SEQ ID NO: 28920
  GFR-binding peptide
  MOD_RES (4)..(5): Xaa is C or S
  MOD_RES (19)..(20)..(21)..(22)..(23): Xaa is A or G
  MOD_RES (24)..(25)..(26)..(27): Xaa is A or G or is absent

SEQ ID NO: 42890 - protein, 32 aa, Artificial Sequence; identical to SEQ ID NO: 29851
  GFR-binding peptide
  MOD_RES (1)..(2): Xaa is C or S

SEQ ID NO: 42891 - protein, 35 aa, Artificial Sequence; identical to SEQ ID NO: 27927
  GFR-binding peptide
  MOD_RES (2)..(3): Xaa is C or S
  MOD_RES (17)..(18)..(19)..(20)..(21): Xaa is A or G
  MOD_RES (22)..(23)..(24)..(25): Xaa is A or G or is absent

SEQ ID NO: 42892 - protein, 42 aa, Artificial Sequence
  GFR-binding peptide
  MOD_RES (5)..(6)..(40)..(42): Xaa is C or S
  MOD_RES (20)..(21)..(22)..(23)..(24): Xaa is A or G
  MOD_RES (25)..(26)..(27)..(28): Xaa is A or G or is absent
SAGPXXTPTKMSPISMLYIXXXXXXXXXYKQYEGMVVDRXGX

SEQ ID NO: 42893 - protein, 37 aa, Artificial Sequence; identical to SEQ ID NO: 27929
  GFR-binding peptide
  MOD_RES (1)..(35)..(37): Xaa is C or S
  MOD_RES (15)..(16)..(17)..(18)..(19): Xaa is A or G
  MOD_RES (20)..(21)..(22)..(23): Xaa is A or G or is absent

SEQ ID NO: 42894 - protein, 32 aa, Artificial Sequence; identical to SEQ ID NO: 29852
  GFR-binding peptide
  MOD_RES (1)..(1): Xaa is C or S

SEQ ID NO: 42895 - protein, 32 aa, Artificial Sequence; identical to SEQ ID NO: 30839
  GFR-binding peptide
  MOD_RES (1)..(1): Xaa is C or S

SEQ ID NO: 42896 - protein, 37 aa, Artificial Sequence; identical to SEQ ID NO: 30841
  GFR-binding peptide
  MOD_RES (1)..(35)..(37): Xaa is C or S
  MOD_RES (15)..(16)..(17)..(18)..(19): Xaa is A or G
  MOD_RES (20)..(21)..(22)..(23): Xaa is A or G or is absent

SEQ ID NO: 42897 - protein, 38 aa, Artificial Sequence; identical to SEQ ID NO: 28925
  GFR-binding peptide
  MOD_RES (3)..(4)..(38): Xaa is C or S
  MOD_RES (18)..(19)..(20)..(21)..(22): Xaa is A or G
  MOD_RES (23)..(24)..(25)..(26): Xaa is A or G or is absent

SEQ ID NO: 42898 - protein, 39 aa, Artificial Sequence; identical to SEQ ID NO: 29854
  GFR-binding peptide
  MOD_RES (5)..(6)..(38): Xaa is C or S

SEQ ID NO: 42899 - protein, 31 aa, Artificial Sequence; identical to SEQ ID NO: 29857
  GFR-binding peptide

SEQ ID NO: 42900 - protein, 36 aa, Artificial Sequence; identical to SEQ ID NO: 28929
  GFR-binding peptide
  MOD_RES (4)..(5): Xaa is C or S

SEQ ID NO: 42901 - protein, 37 aa, Artificial Sequence; identical to SEQ ID NO: 28932
  GFR-binding peptide
  MOD_RES (4)..(5): Xaa is C or S
  MOD_RES (19)..(20)..(21)..(22)..(23): Xaa is A or G
  MOD_RES (24)..(25)..(26)..(27): Xaa is A or G or is absent

SEQ ID NO: 42902 - protein, 40 aa, Artificial Sequence
  GFR-binding peptide
  MOD_RES (5)..(6)..(38)..(40): Xaa is C or S
SAGPXXTPTKMSPISMLYINDKQQIIYKQYEGMVVDRXGX

SEQ ID NO: 42903 - protein, 33 aa, Artificial Sequence
  GFR-binding peptide
  MOD_RES (1)..(1): Xaa is C or S
  MOD_RES (15)..(16)..(17)..(18)..(19): Xaa is A or G
  MOD_RES (20)..(21)..(22)..(23): Xaa is A or G or is absent
XAPVKTSPISMLYIXXXXXXXXXYKQYEMIVEE

SEQ ID NO: 42904 - protein, 38 aa, Artificial Sequence; identical to SEQ ID NO: 30847
  GFR-binding peptide
  MOD_RES (5)..(6): Xaa is C or S
  MOD_RES (20)..(21)..(22)..(23)..(24): Xaa is A or G
  MOD_RES (25)..(26)..(27)..(28): Xaa is A or G or is absent

SEQ ID NO: 42905 - protein, 41 aa, Artificial Sequence
  GFR-binding peptide
  MOD_RES (5)..(6)..(39)..(41): Xaa is C or S
  MOD_RES (20)..(21)..(22)..(23)..(24): Xaa is A or G
  MOD_RES (25)..(26)..(27)..(28): Xaa is A or G or is absent
VPSTXXAPVKTSPISMLYIXXXXXXXXXYKQYEMIVEEXGX

SEQ ID NO: 42906 - protein, 34 aa, Artificial Sequence; identical to SEQ ID NO: 30850
  GFR-binding peptide
  MOD_RES (34)..(34): Xaa is C or S
  MOD_RES (14)..(15)..(16)..(17)..(18): Xaa is A or G
  MOD_RES (19)..(20)..(21)..(22): Xaa is A or G or is absent

SEQ ID NO: 42907 - protein, 35 aa, Artificial Sequence; identical to SEQ ID NO: 27944
  GFR-binding peptide
  MOD_RES (3)..(4): Xaa is C or S

SEQ ID NO: 42908 - protein, 36 aa, Artificial Sequence; identical to SEQ ID NO: 30851
  GFR-binding peptide
  MOD_RES (4)..(5): Xaa is C or S

SEQ ID NO: 42909 - protein, 37 aa, Artificial Sequence; identical to SEQ ID NO: 29870
  GFR-binding peptide
  MOD_RES (3)..(4)..(36): Xaa is C or S

SEQ ID NO: 42910 - protein, 37 aa, Artificial Sequence; identical to SEQ ID NO: 27948
  GFR-binding peptide
  MOD_RES (2)..(3)..(37): Xaa is C or S
  MOD_RES (17)..(18)..(19)..(20)..(21): Xaa is A or G
  MOD_RES (22)..(23)..(24)..(25): Xaa is A or G or is absent

SEQ ID NO: 42911 - protein, 37 aa, Artificial Sequence; identical to SEQ ID NO: 27952
  GFR-binding peptide
  MOD_RES (34)..(36): Xaa is C or S
  MOD_RES (14)..(15)..(16)..(17)..(18): Xaa is A or G
  MOD_RES (19)..(20)..(21)..(22): Xaa is A or G or is absent

SEQ ID NO: 42912 - protein, 37 aa, Artificial Sequence; identical to SEQ ID NO: 28945
  GFR-binding peptide
  MOD_RES (34)..(36): Xaa is C or S
  MOD_RES (14)..(15)..(16)..(17)..(18): Xaa is A or G
  MOD_RES (19)..(20)..(21)..(22): Xaa is A or G or is absent

SEQ ID NO: 42913 - protein, 38 aa, Artificial Sequence; identical to SEQ ID NO: 29877
  GFR-binding peptide
  MOD_RES (1)..(2)..(36)..(38): Xaa is C or S
  MOD_RES (16)..(17)..(18)..(19)..(20): Xaa is A or G
  MOD_RES (21)..(22)..(23)..(24): Xaa is A or G or is absent

SEQ ID NO: 42914 - protein, 37 aa, Artificial Sequence; identical to SEQ ID NO: 27953
  GFR-binding peptide
  MOD_RES (3)..(4)..(36): Xaa is C or S

SEQ ID NO: 42915 - protein, 35 aa, Artificial Sequence; identical to SEQ ID NO: 27955
  GFR-binding peptide
  MOD_RES (1)..(33)..(35): Xaa is C or S

SEQ ID NO: 42916 - protein, 38 aa, Artificial Sequence; identical to SEQ ID NO: 30859
  GFR-binding peptide
  MOD_RES (2)..(3)..(37): Xaa is C or S
  MOD_RES (17)..(18)..(19)..(20)..(21): Xaa is A or G
  MOD_RES (22)..(23)..(24)..(25): Xaa is A or G or is absent

SEQ ID NO: 42917 - protein, 35 aa, Artificial Sequence; identical to SEQ ID NO: 27957
  GFR-binding peptide
  MOD_RES (4)..(5): Xaa is C or S

SEQ ID NO: 42918 - protein, 39 aa, Artificial Sequence; identical to SEQ ID NO: 30861
  GFR-binding peptide
  MOD_RES (4)..(5)..(37)..(39): Xaa is C or S

SEQ ID NO: 42919 - protein, 35 aa, Artificial Sequence; identical to SEQ ID NO: 28948
  GFR-binding peptide
  MOD_RES (34)..(34): Xaa is C or S
  MOD_RES (14)..(15)..(16)..(17)..(18): Xaa is A or G
  MOD_RES (19)..(20)..(21)..(22): Xaa is A or G or is absent

SEQ ID NO: 42920 - protein, 37 aa, Artificial Sequence
  GFR-binding peptide
  MOD_RES (6)..(7): Xaa is C or S
GSAGPXXTPTKMSPISMLYINDKQQIIYKQYEGMVVD

SEQ ID NO: 42921 - protein, 30 aa, Artificial Sequence; identical to SEQ ID NO: 28952
  GFR-binding peptide

SEQ ID NO: 42922 - protein, 39 aa, Artificial Sequence; identical to SEQ ID NO: 27962
  GFR-binding peptide
  MOD_RES (5)..(39): Xaa is C or S
  MOD_RES (19)..(20)..(21)..(22)..(23): Xaa is A or G
  MOD_RES (24)..(25)..(26)..(27): Xaa is A or G or is absent

SEQ ID NO: 42923 - protein, 37 aa, Artificial Sequence; identical to SEQ ID NO: 28954
  GFR-binding peptide
  MOD_RES (3)..(4)..(36): Xaa is C or S

SEQ ID NO: 42924 - protein, 39 aa, Artificial Sequence
  GFR-binding peptide
  MOD_RES (5)..(6)..(37)..(39): Xaa is C or S
VPSTXXAPVKTSPISMLYIDNGRVLLYKQYEMIVEEXGX

SEQ ID NO: 42925 - protein, 31 aa, Artificial Sequence; identical to SEQ ID NO: 29885
  GFR-binding peptide
  MOD_RES (1)..(1): Xaa is C or S

SEQ ID NO: 42926 - protein, 36 aa, Artificial Sequence; identical to SEQ ID NO: 27964
  GFR-binding peptide
  MOD_RES (1)..(2)..(34)..(36): Xaa is C or S

SEQ ID NO: 42927 - protein, 35 aa, Artificial Sequence
  GFR-binding peptide
  MOD_RES (1)..(2)..(35): Xaa is C or S
  MOD_RES (16)..(17)..(18)..(19)..(20): Xaa is A or G
  MOD_RES (21)..(22)..(23)..(24): Xaa is A or G or is absent
XXAPVKTSPISMLYIXXXXXXXXXYKQYEMIVEEX

SEQ ID NO: 42928 - protein, 39 aa, Artificial Sequence; identical to SEQ ID NO: 27966
  GFR-binding peptide
  MOD_RES (2)..(3)..(37)..(39): Xaa is C or S
  MOD_RES (17)..(18)..(19)..(20)..(21): Xaa is A or G
  MOD_RES (22)..(23)..(24)..(25): Xaa is A or G or is absent

SEQ ID NO: 42929 - protein, 35 aa, Artificial Sequence
  GFR-binding peptide
  MOD_RES (1)..(34): Xaa is C or S
  MOD_RES (15)..(16)..(17)..(18)..(19): Xaa is A or G
  MOD_RES (20)..(21)..(22)..(23): Xaa is A or G or is absent
XAPVKTSPISMLYIXXXXXXXXXYKQYEMIVEEXG

SEQ ID NO: 42930 - protein, 40 aa, Artificial Sequence; identical to SEQ ID NO: 28959
  GFR-binding peptide
  MOD_RES (3)..(37)..(39): Xaa is C or S
  MOD_RES (17)..(18)..(19)..(20)..(21): Xaa is A or G
  MOD_RES (22)..(23)..(24)..(25): Xaa is A or G or is absent

SEQ ID NO: 42931 - protein, 37 aa, Artificial Sequence; identical to SEQ ID NO: 30868
  GFR-binding peptide
  MOD_RES (4)..(4): Xaa is C or S
  MOD_RES (18)..(19)..(20)..(21)..(22): Xaa is A or G
  MOD_RES (23)..(24)..(25)..(26): Xaa is A or G or is absent

SEQ ID NO: 42932 - protein, 44 aa, Artificial Sequence; identical to SEQ ID NO: 27967
  GFR-binding peptide
  MOD_RES (6)..(7)..(41)..(43): Xaa is C or S
  MOD_RES (21)..(22)..(23)..(24)..(25): Xaa is A or G
  MOD_RES (26)..(27)..(28)..(29): Xaa is A or G or is absent

SEQ ID NO: 42933 - protein, 39 aa, Artificial Sequence; identical to SEQ ID NO: 29890
  GFR-binding peptide
  MOD_RES (6)..(7)..(39): Xaa is C or S

SEQ ID NO: 42934 - protein, 38 aa, Artificial Sequence
  GFR-binding peptide
  MOD_RES (6)..(7): Xaa is C or S
HVPKPXXAPTKLSPISVLYIDDSSNVIYKQYENMVVRS

SEQ ID NO: 42935 - protein, 35 aa, Artificial Sequence; identical to SEQ ID NO: 28964
  GFR-binding peptide
  MOD_RES (32)..(34): Xaa is C or S

SEQ ID NO: 42936 - protein, 37 aa, Artificial Sequence; identical to SEQ ID NO: 27973
  GFR-binding peptide
  MOD_RES (5)..(5): Xaa is C or S
  MOD_RES (19)..(20)..(21)..(22)..(23): Xaa is A or G
  MOD_RES (24)..(25)..(26)..(27): Xaa is A or G or is absent

SEQ ID NO: 42937 - protein, 37 aa, Artificial Sequence; identical to SEQ ID NO: 27975
  GFR-binding peptide
  MOD_RES (2)..(3)..(35)..(37): Xaa is C or S

SEQ ID NO: 42938 - protein, 37 aa, Artificial Sequence; identical to SEQ ID NO: 29896
  GFR-binding peptide
  MOD_RES (2)..(36): Xaa is C or S
  MOD_RES (16)..(17)..(18)..(19)..(20): Xaa is A or G
  MOD_RES (21)..(22)..(23)..(24): Xaa is A or G or is absent

SEQ ID NO: 42939 - protein, 35 aa, Artificial Sequence; identical to SEQ ID NO: 30879
  GFR-binding peptide
  MOD_RES (1)..(35): Xaa is C or S
  MOD_RES (15)..(16)..(17)..(18)..(19): Xaa is A or G
  MOD_RES (20)..(21)..(22)..(23): Xaa is A or G or is absent

SEQ ID NO: 42940 - protein, 42 aa, Artificial Sequence; identical to SEQ ID NO: 27978
  GFR-binding peptide
  MOD_RES (6)..(7)..(42): Xaa is C or S
  MOD_RES (21)..(22)..(23)..(24)..(25): Xaa is A or G
  MOD_RES (26)..(27)..(28)..(29): Xaa is A or G or is absent

SEQ ID NO: 42941 - protein, 39 aa, Artificial Sequence; identical to SEQ ID NO: 27981
  GFR-binding peptide
  MOD_RES (1)..(2)..(37)..(39): Xaa is C or S
  MOD_RES (16)..(17)..(18)..(19)..(20): Xaa is A or G
  MOD_RES (21)..(22)..(23)..(24): Xaa is A or G or is absent

SEQ ID NO: 42942 - protein, 38 aa, Artificial Sequence; identical to SEQ ID NO: 30884
  GFR-binding peptide
  MOD_RES (1)..(2)..(36)..(38): Xaa is C or S
  MOD_RES (16)..(17)..(18)..(19)..(20): Xaa is A or G
  MOD_RES (21)..(22)..(23)..(24): Xaa is A or G or is absent

SEQ ID NO: 42943 - protein, 40 aa, Artificial Sequence
  GFR-binding peptide
  MOD_RES (6)..(7)..(39): Xaa is C or S
GSAGPXXTPTKMSPISMLYINDKQQIIYKQYEGMVVDRXG

SEQ ID NO: 42944 - protein, 41 aa, Artificial Sequence; identical to SEQ ID NO: 29899
  GFR-binding peptide
  MOD_RES (4)..(5)..(39)..(41): Xaa is C or S
  MOD_RES (19)..(20)..(21)..(22)..(23): Xaa is A or G
  MOD_RES (24)..(25)..(26)..(27): Xaa is A or G or is absent

SEQ ID NO: 42945 - protein, 35 aa, Artificial Sequence; identical to SEQ ID NO: 29901
  GFR-binding peptide
  MOD_RES (32)..(34): Xaa is C or S

SEQ ID NO: 42946 - protein, 33 aa, Artificial Sequence; identical to SEQ ID NO: 29902
  GFR-binding peptide
  MOD_RES (1)..(1): Xaa is C or S

SEQ ID NO: 42947 - protein, 36 aa, Artificial Sequence; identical to SEQ ID NO: 28974
  GFR-binding peptide
  MOD_RES (5)..(6): Xaa is C or S

SEQ ID NO: 42948 - protein, 34 aa, Artificial Sequence
  GFR-binding peptide
  MOD_RES (1)..(32)..(34): Xaa is C or S
XAPVKTSPISMLYIDNGRVLLYKQYEMIVEEXGX

SEQ ID NO: 42949 - protein, 39 aa, Artificial Sequence
  GFR-binding peptide
  MOD_RES (6)..(7)..(38): Xaa is C or S
RVPSTXXAPVKTSPISMLYIDNGRVLLYKQYEMIVEEXG

SEQ ID NO: 42950 - protein, 36 aa, Artificial Sequence
  GFR-binding peptide
  MOD_RES (1)..(2)..(34)..(36): Xaa is C or S
XXTPTKMSPISMLYINDKQQIIYKQYEGMVVDRXGX

SEQ ID NO: 42951 - protein, 33 aa, Artificial Sequence; identical to SEQ ID NO: 27988
  GFR-binding peptide
  MOD_RES (1)..(2): Xaa is C or S

SEQ ID NO: 42952 - protein, 33 aa, Artificial Sequence; identical to SEQ ID NO: 29908
  GFR-binding peptide
  MOD_RES (2)..(3): Xaa is C or S

SEQ ID NO: 42953 - protein, 38 aa, Artificial Sequence; identical to SEQ ID NO: 27990
  GFR-binding peptide
  MOD_RES (3)..(4)..(38): Xaa is C or S
  MOD_RES (18)..(19)..(20)..(21)..(22): Xaa is A or G
  MOD_RES (23)..(24)..(25)..(26): Xaa is A or G or is absent

SEQ ID NO: 42954 - protein, 35 aa, Artificial Sequence; identical to SEQ ID NO: 28980
  GFR-binding peptide
  MOD_RES (1)..(35): Xaa is C or S
  MOD_RES (15)..(16)..(17)..(18)..(19): Xaa is A or G
  MOD_RES (20)..(21)..(22)..(23): Xaa is A or G or is absent

SEQ ID NO: 42955 - protein, 41 aa, Artificial Sequence
  GFR-binding peptide
  MOD_RES (6)..(7)..(39)..(41): Xaa is C or S
HVPKPXXAPTKLSPISVLYIDDSSNVIYKQYENMVVRSXGX

SEQ ID NO: 42956 - protein, 33 aa, Artificial Sequence; identical to SEQ ID NO: 28984
  GFR-binding peptide
  MOD_RES (14)..(15)..(16)..(17)..(18): Xaa is A or G
  MOD_RES (19)..(20)..(21)..(22): Xaa is A or G or is absent

SEQ ID NO: 42957 - protein, 30 aa, Artificial Sequence; identical to SEQ ID NO: 30898
  GFR-binding peptide

SEQ ID NO: 42958 - protein, 35 aa, Artificial Sequence; identical to SEQ ID NO: 30900
  GFR-binding peptide
  MOD_RES (2)..(3): Xaa is C or S
  MOD_RES (17)..(18)..(19)..(20)..(21): Xaa is A or G
  MOD_RES (22)..(23)..(24)..(25): Xaa is A or G or is absent

SEQ ID NO: 42959 - protein, 35 aa, Artificial Sequence; identical to SEQ ID NO: 29917
  GFR-binding peptide
  MOD_RES (1)..(2): Xaa is C or S
  MOD_RES (16)..(17)..(18)..(19)..(20): Xaa is A or G
  MOD_RES (21)..(22)..(23)..(24): Xaa is A or G or is absent

SEQ ID NO: 42960 - protein, 32 aa, Artificial Sequence
  GFR-binding peptide
  MOD_RES (14)..(15)..(16)..(17)..(18): Xaa is A or G
  MOD_RES (19)..(20)..(21)..(22): Xaa is A or G or is absent
APVKTSPISMLYIXXXXXXXXXYKQYEMIVEE

SEQ ID NO: 42961 - protein, 39 aa, Artificial Sequence; identical to SEQ ID NO: 27996
  GFR-binding peptide
  MOD_RES (5)..(6): Xaa is C or S
  MOD_RES (20)..(21)..(22)..(23)..(24): Xaa is A or G
  MOD_RES (25)..(26)..(27)..(28): Xaa is A or G or is absent

SEQ ID NO: 42962 - protein, 37 aa, Artificial Sequence; identical to SEQ ID NO: 30904
  GFR-binding peptide
  MOD_RES (6)..(7): Xaa is C or S

SEQ ID NO: 42963 - protein, 33 aa, Artificial Sequence
  GFR-binding peptide
  MOD_RES (14)..(15)..(16)..(17)..(18): Xaa is A or G
  MOD_RES (19)..(20)..(21)..(22): Xaa is A or G or is absent
TPTKMSPISMLYIXXXXXXXXXYKQYEGMVVDR

SEQ ID NO: 42964 - protein, 40 aa, Artificial Sequence; identical to SEQ ID NO: 28989
  GFR-binding peptide
  MOD_RES (5)..(6)..(40): Xaa is C or S
  MOD_RES (20)..(21)..(22)..(23)..(24): Xaa is A or G
  MOD_RES (25)..(26)..(27)..(28): Xaa is A or G or is absent

SEQ ID NO: 42965 - protein, 41 aa, Artificial Sequence; identical to SEQ ID NO: 29923
  GFR-binding peptide
  MOD_RES (6)..(7)..(41): Xaa is C or S
  MOD_RES (21)..(22)..(23)..(24)..(25): Xaa is A or G
  MOD_RES (26)..(27)..(28)..(29): Xaa is A or G or is absent

SEQ ID NO: 42966 - protein, 35 aa, Artificial Sequence
  GFR-binding peptide
  MOD_RES (3)..(4)..(35): Xaa is C or S
STXXAPVKTSPISMLYIDNGRVLLYKQYEMIVEEX

SEQ ID NO: 42967 - protein, 39 aa, Artificial Sequence; identical to SEQ ID NO: 27999
  GFR-binding peptide
  MOD_RES (2)..(3)..(37)..(39): Xaa is C or S
  MOD_RES (17)..(18)..(19)..(20)..(21): Xaa is A or G
  MOD_RES (22)..(23)..(24)..(25): Xaa is A or G or is absent

SEQ ID NO: 42968 - protein, 38 aa, Artificial Sequence; identical to SEQ ID NO: 28992
  GFR-binding peptide
  MOD_RES (1)..(2)..(36)..(38): Xaa is C or S
  MOD_RES (16)..(17)..(18)..(19)..(20): Xaa is A or G
  MOD_RES (21)..(22)..(23)..(24): Xaa is A or G or is absent

SEQ ID NO: 42969 - protein, 38 aa, Artificial Sequence
  GFR-binding peptide
  MOD_RES (5)..(6): Xaa is C or S
  MOD_RES (20)..(21)..(22)..(23)..(24): Xaa is A or G
  MOD_RES (25)..(26)..(27)..(28): Xaa is A or G or is absent
VPSTXXAPVKTSPISMLYIXXXXXXXXXYKQYEMIVEE

SEQ ID NO: 42970 - protein, 32 aa, Artificial Sequence; identical to SEQ ID NO: 28993
  GFR-binding peptide
  MOD_RES (14)..(15)..(16)..(17)..(18): Xaa is A or G
  MOD_RES (19)..(20)..(21)..(22): Xaa is A or G or is absent

SEQ ID NO: 42971 - protein, 41 aa, Artificial Sequence
  GFR-binding peptide
  MOD_RES (3)..(4)..(38)..(40): Xaa is C or S
  MOD_RES (18)..(19)..(20)..(21)..(22): Xaa is A or G
  MOD_RES (23)..(24)..(25)..(26): Xaa is A or G or is absent
GPXXTPTKMSPISMLYIXXXXXXXXXYKQYEGMVVDRXGXS

SEQ ID NO: 42972 - protein, 35 aa, Artificial Sequence
  GFR-binding peptide
  MOD_RES (2)..(3): Xaa is C or S
  MOD_RES (17)..(18)..(19)..(20)..(21): Xaa is A or G
  MOD_RES (22)..(23)..(24)..(25): Xaa is A or G or is absent
PXXTPTKMSPISMLYIXXXXXXXXXYKQYEGMVVD

SEQ ID NO: 42973 - protein, 33 aa, Artificial Sequence; identical to SEQ ID NO: 29930
  GFR-binding peptide
  MOD_RES (1)..(2): Xaa is C or S

SEQ ID NO: 42974 - protein, 42 aa, Artificial Sequence; identical to SEQ ID NO: 28001
  GFR-binding peptide
  MOD_RES (4)..(5)..(40)..(42): Xaa is C or S
  MOD_RES (19)..(20)..(21)..(22)..(23): Xaa is A or G
  MOD_RES (24)..(25)..(26)..(27): Xaa is A or G or is absent

SEQ ID NO: 42975 - protein, 33 aa, Artificial Sequence; identical to SEQ ID NO: 28999
  GFR-binding peptide
  MOD_RES (1)..(1): Xaa is C or S
  MOD_RES (15)..(16)..(17)..(18)..(19): Xaa is A or G
  MOD_RES (20)..(21)..(22)..(23): Xaa is A or G or is absent

SEQ ID NO: 42976 - protein, 35 aa, Artificial Sequence; identical to SEQ ID NO: 29000
  GFR-binding peptide
  MOD_RES (1)..(33)..(35): Xaa is C or S

SEQ ID NO: 42977 - protein, 31 aa, Artificial Sequence
  GFR-binding peptide
  MOD_RES (31)..(31): Xaa is C or S
APVKTSPISMLYIDNGRVLLYKQYEMIVEEX

SEQ ID NO: 42978 - protein, 33 aa, Artificial Sequence
  GFR-binding peptide
  MOD_RES (33)..(33): Xaa is C or S
  MOD_RES (14)..(15)..(16)..(17)..(18): Xaa is A or G
  MOD_RES (19)..(20)..(21)..(22): Xaa is A or G or is absent
APVKTSPISMLYIXXXXXXXXXYKQYEMIVEEX

SEQ ID NO: 42979 - protein, 32 aa, Artificial Sequence; identical to SEQ ID NO: 29001
  GFR-binding peptide
  MOD_RES (14)..(15)..(16)..(17)..(18): Xaa is A or G
  MOD_RES (19)..(20)..(21)..(22): Xaa is A or G or is absent

SEQ ID NO: 42980 - protein, 33 aa, Artificial Sequence; identical to SEQ ID NO: 29003
  GFR-binding peptide
  MOD_RES (1)..(1): Xaa is C or S
  MOD_RES (15)..(16)..(17)..(18)..(19): Xaa is A or G
  MOD_RES (20)..(21)..(22)..(23): Xaa is A or G or is absent

SEQ ID NO: 42981 - protein, 37 aa, Artificial Sequence
  GFR-binding peptide
  MOD_RES (3)..(4): Xaa is C or S
  MOD_RES (18)..(19)..(20)..(21)..(22): Xaa is A or G
  MOD_RES (23)..(24)..(25)..(26): Xaa is A or G or is absent
GPXXTPTKMSPISMLYIXXXXXXXXXYKQYEGMVVDR

SEQ ID NO: 42982 - protein, 37 aa, Artificial Sequence; identical to SEQ ID NO: 28008
  GFR-binding peptide
  MOD_RES (5)..(6): Xaa is C or S

SEQ ID NO: 42983 - protein, 39 aa, Artificial Sequence; identical to SEQ ID NO: 29005
  GFR-binding peptide
  MOD_RES (4)..(5): Xaa is C or S
  MOD_RES (19)..(20)..(21)..(22)..(23): Xaa is A or G
  MOD_RES (24)..(25)..(26)..(27): Xaa is A or G or is absent

SEQ ID NO: 42984 - protein, 39 aa, Artificial Sequence; identical to SEQ ID NO: 30911
  GFR-binding peptide
  MOD_RES (6)..(7): Xaa is C or S
  MOD_RES (21)..(22)..(23)..(24)..(25): Xaa is A or G
  MOD_RES (26)..(27)..(28)..(29): Xaa is A or G or is absent

SEQ ID NO: 42985 - protein, 40 aa, Artificial Sequence
  GFR-binding peptide
  MOD_RES (2)..(3)..(37)..(39): Xaa is C or S
  MOD_RES (17)..(18)..(19)..(20)..(21): Xaa is A or G
  MOD_RES (22)..(23)..(24)..(25): Xaa is A or G or is absent
PXXTPTKMSPISMLYIXXXXXXXXXYKQYEGMVVDRXGXS

SEQ ID NO: 42986 - protein, 39 aa, Artificial Sequence; identical to SEQ ID NO: 29011
  GFR-binding peptide
  MOD_RES (5)..(6)..(38): Xaa is C or S

SEQ ID NO: 42987 - protein, 33 aa, Artificial Sequence; identical to SEQ ID NO: 29946
  GFR-binding peptide
  MOD_RES (1)..(1): Xaa is C or S
  MOD_RES (15)..(16)..(17)..(18)..(19): Xaa is A or G
  MOD_RES (20)..(21)..(22)..(23): Xaa is A or G or is absent

SEQ ID NO: 42988 - protein, 31 aa, Artificial Sequence; identical to SEQ ID NO: 28016
  GFR-binding peptide
  MOD_RES (1)..(1): Xaa is C or S

SEQ ID NO: 42989 - protein, 40 aa, Artificial Sequence; identical to SEQ ID NO: 28017
  GFR-binding peptide
  MOD_RES (6)..(7)..(39): Xaa is C or S

SEQ ID NO: 42990 - protein, 41 aa, Artificial Sequence
  GFR-binding peptide
  MOD_RES (6)..(7)..(40): Xaa is C or S
  MOD_RES (21)..(22)..(23)..(24)..(25): Xaa is A or G
  MOD_RES (26)..(27)..(28)..(29): Xaa is A or G or is absent
RVPSTXXAPVKTSPISMLYIXXXXXXXXXYKQYEMIVEEXG

SEQ ID NO: 42991 - protein, 40 aa, Artificial Sequence; identical to SEQ ID NO: 29018
  GFR-binding peptide
  MOD_RES (3)..(4)..(39): Xaa is C or S
  MOD_RES (18)..(19)..(20)..(21)..(22): Xaa is A or G
  MOD_RES (23)..(24)..(25)..(26): Xaa is A or G or is absent

SEQ ID NO: 42992 - protein, 35 aa, Artificial Sequence; identical to SEQ ID NO: 29020
  GFR-binding peptide
  MOD_RES (3)..(4): Xaa is C or S

SEQ ID NO: 42993 - protein, 33 aa, Artificial Sequence; identical to SEQ ID NO: 30928
  GFR-binding peptide
  MOD_RES (1)..(33): Xaa is C or S

SEQ ID NO: 42994 - protein, 38 aa, Artificial Sequence; identical to SEQ ID NO: 30931
  GFR-binding peptide
  MOD_RES (4)..(5)..(38): Xaa is C or S

SEQ ID NO: 42995 - protein, 40 aa, Artificial Sequence; identical to SEQ ID NO: 29962
  GFR-binding peptide
  MOD_RES (6)..(7): Xaa is C or S
  MOD_RES (21)..(22)..(23)..(24)..(25): Xaa is A or G
  MOD_RES (26)..(27)..(28)..(29): Xaa is A or G or is absent

SEQ ID NO: 42996 - protein, 37 aa, Artificial Sequence
  GFR-binding peptide
  MOD_RES (3)..(4)..(37): Xaa is C or S
  MOD_RES (18)..(19)..(20)..(21)..(22): Xaa is A or G
  MOD_RES (23)..(24)..(25)..(26): Xaa is A or G or is absent
STXXAPVKTSPISMLYIXXXXXXXXXYKQYEMIVEEX

SEQ ID NO: 42997 - protein, 38 aa, Artificial Sequence
  GFR-binding peptide
  MOD_RES (5)..(6)..(38): Xaa is C or S
SAGPXXTPTKMSPISMLYINDKQQIIYKQYEGMVVDRX

SEQ ID NO: 42998 - protein, 37 aa, Artificial Sequence; identical to SEQ ID NO: 29965
  GFR-binding peptide
  MOD_RES (1)..(35)..(37): Xaa is C or S
  MOD_RES (15)..(16)..(17)..(18)..(19): Xaa is A or G
  MOD_RES (20)..(21)..(22)..(23): Xaa is A or G or is absent

SEQ ID NO: 42999 - protein, 42 aa, Artificial Sequence; identical to SEQ ID NO: 30933
  GFR-binding peptide
  MOD_RES (6)..(7)..(41): Xaa is C or S
  MOD_RES (21)..(22)..(23)..(24)..(25): Xaa is A or G
  MOD_RES (26)..(27)..(28)..(29): Xaa is A or G or is absent

SEQ ID NO: 43000 - protein, 42 aa, Artificial Sequence; identical to SEQ ID NO: 28027
  GFR-binding peptide
  MOD_RES (6)..(7)..(39)..(41): Xaa is C or S

SEQ ID NO: 43001 - protein, 41 aa, Artificial Sequence
  GFR-binding peptide
  MOD_RES (4)..(5)..(38)..(40): Xaa is C or S
  MOD_RES (19)..(20)..(21)..(22)..(23): Xaa is A or G
  MOD_RES (24)..(25)..(26)..(27): Xaa is A or G or is absent
PSTXXAPVKTSPISMLYIXXXXXXXXXYKQYEMIVEEXGXL

SEQ ID NO: 43002 - protein, 39 aa, Artificial Sequence; identical to SEQ ID NO: 29028
  GFR-binding peptide
  MOD_RES (2)..(3)..(37)..(39): Xaa is C or S
  MOD_RES (17)..(18)..(19)..(20)..(21): Xaa is A or G
  MOD_RES (22)..(23)..(24)..(25): Xaa is A or G or is absent

SEQ ID NO: 43003 - protein, 43 aa, Artificial Sequence; identical to SEQ ID NO: 29033
  GFR-binding peptide
  MOD_RES (5)..(6)..(40)..(42): Xaa is C or S
  MOD_RES (20)..(21)..(22)..(23)..(24): Xaa is A or G
  MOD_RES (25)..(26)..(27)..(28): Xaa is A or G or is absent

SEQ ID NO: 43004 - protein, 38 aa, Artificial Sequence
  GFR-binding peptide
  MOD_RES (4)..(5)..(37): Xaa is C or S
AGPXXTPTKMSPISMLYINDKQQIIYKQYEGMVVDRXG

SEQ ID NO: 43005 - protein, 40 aa, Artificial Sequence; identical to SEQ ID NO: 28033
  GFR-binding peptide
  MOD_RES (2)..(3)..(37)..(39): Xaa is C or S
  MOD_RES (17)..(18)..(19)..(20)..(21): Xaa is A or G
  MOD_RES (22)..(23)..(24)..(25): Xaa is A or G or is absent

SEQ ID NO: 43006 - protein, 37 aa, Artificial Sequence
  GFR-binding peptide
  MOD_RES (1)..(2)..(34)..(36): Xaa is C or S
XXTPTKMSPISMLYINDKQQIIYKQYEGMVVDRXGXS

SEQ ID NO: 43007 - protein, 40 aa, Artificial Sequence; identical to SEQ ID NO: 28036
  GFR-binding peptide
  MOD_RES (5)..(6)..(38)..(40): Xaa is C or S

SEQ ID NO: 43008 - protein, 41 aa, Artificial Sequence; identical to SEQ ID NO: 29039
  GFR-binding peptide
  MOD_RES (3)..(4)..(38)..(40): Xaa is C or S
  MOD_RES (18)..(19)..(20)..(21)..(22): Xaa is A or G
  MOD_RES (23)..(24)..(25)..(26): Xaa is A or G or is absent

SEQ ID NO: 43009 - protein, 36 aa, Artificial Sequence; identical to SEQ ID NO: 30943
  GFR-binding peptide
  MOD_RES (2)..(3): Xaa is C or S
  MOD_RES (17)..(18)..(19)..(20)..(21): Xaa is A or G
  MOD_RES (22)..(23)..(24)..(25): Xaa is A or G or is absent

SEQ ID NO: 43010 - protein, 37 aa, Artificial Sequence; identical to SEQ ID NO: 28038
  GFR-binding peptide
  MOD_RES (2)..(3)..(35)..(37): Xaa is C or S

SEQ ID NO: 43011 - protein, 44 aa, Artificial Sequence; identical to SEQ ID NO: 29980
  GFR-binding peptide
  MOD_RES (6)..(7)..(41)..(43): Xaa is C or S
  MOD_RES (21)..(22)..(23)..(24)..(25): Xaa is A or G
  MOD_RES (26)..(27)..(28)..(29): Xaa is A or G or is absent

SEQ ID NO: 43012 - protein, 39 aa, Artificial Sequence; identical to SEQ ID NO: 29040
  GFR-binding peptide
  MOD_RES (1)..(2)..(36)..(38): Xaa is C or S
  MOD_RES (16)..(17)..(18)..(19)..(20): Xaa is A or G
  MOD_RES (21)..(22)..(23)..(24): Xaa is A or G or is absent

SEQ ID NO: 43013 - protein, 39 aa, Artificial Sequence; identical to SEQ ID NO: 28039
  GFR-binding peptide
  MOD_RES (1)..(2)..(36)..(38): Xaa is C or S
  MOD_RES (16)..(17)..(18)..(19)..(20): Xaa is A or G
  MOD_RES (21)..(22)..(23)..(24): Xaa is A or G or is absent

SEQ ID NO: 43014 - protein, 33 aa, Artificial Sequence; identical to SEQ ID NO: 30944
  GFR-binding peptide
  MOD_RES (32)..(32): Xaa is C or S

SEQ ID NO: 43015 - protein, 43 aa, Artificial Sequence; identical to SEQ ID NO: 30946
  GFR-binding peptide
  MOD_RES (6)..(7)..(41)..(43): Xaa is C or S
  MOD_RES (21)..(22)..(23)..(24)..(25): Xaa is A or G
  MOD_RES (26)..(27)..(28)..(29): Xaa is A or G or is absent

SEQ ID NO: 43016 - protein, 40 aa, Artificial Sequence; identical to SEQ ID NO: 29984
  GFR-binding peptide
  MOD_RES (3)..(4)..(38)..(40): Xaa is C or S
  MOD_RES (18)..(19)..(20)..(21)..(22): Xaa is A or G
  MOD_RES (23)..(24)..(25)..(26): Xaa is A or G or is absent

SEQ ID NO: 43017 - protein, 40 aa, Artificial Sequence; identical to SEQ ID NO: 29041
  GFR-binding peptide
  MOD_RES (5)..(6)..(40): Xaa is C or S
  MOD_RES (20)..(21)..(22)..(23)..(24): Xaa is A or G
  MOD_RES (25)..(26)..(27)..(28): Xaa is A or G or is absent

SEQ ID NO: 43018 - protein, 35 aa, Artificial Sequence
  GFR-binding peptide
  MOD_RES (1)..(35): Xaa is C or S
  MOD_RES (15)..(16)..(17)..(18)..(19): Xaa is A or G
  MOD_RES (20)..(21)..(22)..(23): Xaa is A or G or is absent
XTPTKMSPISMLYIXXXXXXXXXYKQYEGMVVDRX

SEQ ID NO: 43019 - protein, 38 aa, Artificial Sequence; identical to SEQ ID NO: 29043
  GFR-binding peptide
  MOD_RES (4)..(5)..(37): Xaa is C or S

SEQ ID NO: 43020 - protein, 40 aa, Artificial Sequence; identical to SEQ ID NO: 29044
  GFR-binding peptide
  MOD_RES (4)..(5)..(40): Xaa is C or S
  MOD_RES (19)..(20)..(21)..(22)..(23): Xaa is A or G
  MOD_RES (24)..(25)..(26)..(27): Xaa is A or G or is absent

SEQ ID NO: 43021 - protein, 39 aa, Artificial Sequence; identical to SEQ ID NO: 28044
  GFR-binding peptide
  MOD_RES (7)..(39): Xaa is C or S

SEQ ID NO: 43022 - protein, 34 aa, Artificial Sequence; identical to SEQ ID NO: 29988
  GFR-binding peptide
  MOD_RES (1)..(2)..(34): Xaa is C or S

SEQ ID NO: 43023 - protein, 39 aa, Artificial Sequence
  GFR-binding peptide
  MOD_RES (5)..(6)..(39): Xaa is C or S
  MOD_RES (20)..(21)..(22)..(23)..(24): Xaa is A or G
  MOD_RES (25)..(26)..(27)..(28): Xaa is A or G or is absent
VPSTXXAPVKTSPISMLYIXXXXXXXXXYKQYEMIVEEX

SEQ ID NO: 43024 - protein, 39 aa, Artificial Sequence; identical to SEQ ID NO: 28045
  GFR-binding peptide
  MOD_RES (5)..(6): Xaa is C or S
  MOD_RES (20)..(21)..(22)..(23)..(24): Xaa is A or G
  MOD_RES (25)..(26)..(27)..(28): Xaa is A or G or is absent

SEQ ID NO: 43025 - protein, 36 aa, Artificial Sequence; identical to SEQ ID NO: 29048
  GFR-binding peptide
  MOD_RES (4)..(5): Xaa is C or S

SEQ ID NO: 43026 - protein, 34 aa, Artificial Sequence; identical to SEQ ID NO: 30953
  GFR-binding peptide
  MOD_RES (1)..(33): Xaa is C or S

SEQ ID NO: 43027 - protein, 42 aa, Artificial Sequence; identical to SEQ ID NO: 29050
  GFR-binding peptide
  MOD_RES (5)..(6)..(40)..(42): Xaa is C or S
  MOD_RES (20)..(21)..(22)..(23)..(24): Xaa is A or G
  MOD_RES (25)..(26)..(27)..(28): Xaa is A or G or is absent

SEQ ID NO: 43028 - protein, 36 aa, Artificial Sequence; identical to SEQ ID NO: 30956
  GFR-binding peptide
  MOD_RES (2)..(3): Xaa is C or S
  MOD_RES (17)..(18)..(19)..(20)..(21): Xaa is A or G
  MOD_RES (22)..(23)..(24)..(25): Xaa is A or G or is absent

SEQ ID NO: 43029 - protein, 33 aa, Artificial Sequence; identical to SEQ ID NO: 29996
  GFR-binding peptide
  MOD_RES (2)..(3): Xaa is C or S

SEQ ID NO: 43030 - protein, 39 aa, Artificial Sequence; identical to SEQ ID NO: 29997
  GFR-binding peptide
  MOD_RES (3)..(4)..(38): Xaa is C or S
  MOD_RES (18)..(19)..(20)..(21)..(22): Xaa is A or G
  MOD_RES (23)..(24)..(25)..(26): Xaa is A or G or is absent

SEQ ID NO: 43031 - protein, 38 aa, Artificial Sequence; identical to SEQ ID NO: 28052
  GFR-binding peptide
  MOD_RES (2)..(36)..(38): Xaa is C or S
  MOD_RES (16)..(17)..(18)..(19)..(20): Xaa is A or G
  MOD_RES (21)..(22)..(23)..(24): Xaa is A or G or is absent

SEQ ID NO: 43032 - protein, 37 aa, Artificial Sequence; identical to SEQ ID NO: 29055
  GFR-binding peptide
  MOD_RES (4)..(5)..(37): Xaa is C or S

SEQ ID NO: 43033 - protein, 37 aa, Artificial Sequence; identical to SEQ ID NO: 30000
  GFR-binding peptide
  MOD_RES (2)..(3)..(35)..(37): Xaa is C or S

SEQ ID NO: 43034 - protein, 37 aa, Artificial Sequence; identical to SEQ ID NO: 29061
  GFR-binding peptide
  MOD_RES (4)..(5): Xaa is C or S
  MOD_RES (19)..(20)..(21)..(22)..(23): Xaa is A or G
  MOD_RES (24)..(25)..(26)..(27): Xaa is A or G or is absent

SEQ ID NO: 43035 - protein, 36 aa, Artificial Sequence; identical to SEQ ID NO: 28056
  GFR-binding peptide
  MOD_RES (1)..(33)..(35): Xaa is C or S

SEQ ID NO: 43036 - protein, 39 aa, Artificial Sequence; identical to SEQ ID NO: 29065
  GFR-binding peptide
  MOD_RES (6)..(7): Xaa is C or S
  MOD_RES (21)..(22)..(23)..(24)..(25): Xaa is A or G
  MOD_RES (26)..(27)..(28)..(29): Xaa is A or G or is absent

SEQ ID NO: 43037 - protein, 32 aa, Artificial Sequence; identical to SEQ ID NO: 28060
  GFR-binding peptide
  MOD_RES (1)..(1): Xaa is C or S

SEQ ID NO: 43038 - protein, 36 aa, Artificial Sequence; identical to SEQ ID NO: 30967
  GFR-binding peptide
  MOD_RES (1)..(2)..(36): Xaa is C or S
  MOD_RES (16)..(17)..(18)..(19)..(20): Xaa is A or G
  MOD_RES (21)..(22)..(23)..(24): Xaa is A or G or is absent

SEQ ID NO: 43039 - protein, 37 aa, Artificial Sequence; identical to SEQ ID NO: 30968
  GFR-binding peptide
  MOD_RES (4)..(5): Xaa is C or S
  MOD_RES (19)..(20)..(21)..(22)..(23): Xaa is A or G
  MOD_RES (24)..(25)..(26)..(27): Xaa is A or G or is absent

SEQ ID NO: 43040 - protein, 37 aa, Artificial Sequence
  GFR-binding peptide
  MOD_RES (6)..(7): Xaa is C or S
HVPKPXXAPTKLSPISVLYIDDSSNVIYKQYENMVVR

SEQ ID NO: 43041 - protein, 40 aa, Artificial Sequence
  GFR-binding peptide
  MOD_RES (3)..(4)..(37)..(39): Xaa is C or S
  MOD_RES (18)..(19)..(20)..(21)..(22): Xaa is A or G
  MOD_RES (23)..(24)..(25)..(26): Xaa is A or G or is absent
STXXAPVKTSPISMLYIXXXXXXXXXYKQYEMIVEEXGXL

SEQ ID NO: 43042 - protein, 35 aa, Artificial Sequence
  GFR-binding peptide
  MOD_RES (2)..(3): Xaa is C or S
  MOD_RES (17)..(18)..(19)..(20)..(21): Xaa is A or G
  MOD_RES (22)..(23)..(24)..(25): Xaa is A or G or is absent
TXXAPVKTSPISMLYIXXXXXXXXXYKQYEMIVEE

SEQ ID NO: 43043 - protein, 32 aa, Artificial Sequence; identical to SEQ ID NO: 28069
  GFR-binding peptide
  MOD_RES (1)..(1): Xaa is C or S

SEQ ID NO: 43044 - protein, 43 aa, Artificial Sequence; identical to SEQ ID NO: 30013
  GFR-binding peptide
  MOD_RES (5)..(6)..(40)..(42): Xaa is C or S
  MOD_RES (20)..(21)..(22)..(23)..(24): Xaa is A or G
  MOD_RES (25)..(26)..(27)..(28): Xaa is A or G or is absent

SEQ ID NO: 43045 - protein, 40 aa, Artificial Sequence
  GFR-binding peptide
  MOD_RES (6)..(7): Xaa is C or S
  MOD_RES (21)..(22)..(23)..(24)..(25): Xaa is A or G
  MOD_RES (26)..(27)..(28)..(29): Xaa is A or G or is absent
HVPKPXXAPTKLSPISVLYIXXXXXXXXXYKQYENMVVRS

SEQ ID NO: 43046 - protein, 41 aa, Artificial Sequence
  GFR-binding peptide
  MOD_RES (5)..(6)..(40): Xaa is C or S
  MOD_RES (20)..(21)..(22)..(23)..(24): Xaa is A or G
  MOD_RES (25)..(26)..(27)..(28): Xaa is A or G or is absent
SAGPXXTPTKMSPISMLYIXXXXXXXXXYKQYEGMVVDRXG

SEQ ID NO: 43047 - protein, 33 aa, Artificial Sequence; identical to SEQ ID NO: 28077
  GFR-binding peptide
  MOD_RES (1)..(2): Xaa is C or S

SEQ ID NO: 43048 - protein, 37 aa, Artificial Sequence; identical to SEQ ID NO: 28078
  GFR-binding peptide
  MOD_RES (4)..(5)..(37): Xaa is C or S

SEQ ID NO: 43049 - protein, 39 aa, Artificial Sequence
  GFR-binding peptide
  MOD_RES (6)..(7)..(39): Xaa is C or S
GSAGPXXTPTKMSPISMLYINDKQQIIYKQYEGMVVDRX

SEQ ID NO: 43050 - protein, 39 aa, Artificial Sequence; identical to SEQ ID NO: 28079
  GFR-binding peptide
  MOD_RES (4)..(5)..(39): Xaa is C or S
  MOD_RES (19)..(20)..(21)..(22)..(23): Xaa is A or G
  MOD_RES (24)..(25)..(26)..(27): Xaa is A or G or is absent

SEQ ID NO: 43051 - protein, 37 aa, Artificial Sequence; identical to SEQ ID NO: 28083
  GFR-binding peptide
  MOD_RES (1)..(2)..(34)..(36): Xaa is C or S

SEQ ID NO: 43052 - protein, 34 aa, Artificial Sequence; identical to SEQ ID NO: 30988
  GFR-binding peptide
  MOD_RES (1)..(1): Xaa is C or S
  MOD_RES (15)..(16)..(17)..(18)..(19): Xaa is A or G
  MOD_RES (20)..(21)..(22)..(23): Xaa is A or G or is absent

SEQ ID NO: 43053 - protein, 36 aa, Artificial Sequence; identical to SEQ ID NO: 30017
  GFR-binding peptide
  MOD_RES (4)..(5): Xaa is C or S

SEQ ID NO: 43054 - protein, 34 aa, Artificial Sequence; identical to SEQ ID NO: 29076
  GFR-binding peptide
  MOD_RES (1)..(1): Xaa is C or S
  MOD_RES (15)..(16)..(17)..(18)..(19): Xaa is A or G
  MOD_RES (20)..(21)..(22)..(23): Xaa is A or G or is absent

SEQ ID NO: 43055 - protein, 40 aa, Artificial Sequence; identical to SEQ ID NO: 30993
  GFR-binding peptide
  MOD_RES (3)..(4)..(38)..(40): Xaa is C or S
  MOD_RES (18)..(19)..(20)..(21)..(22): Xaa is A or G
  MOD_RES (23)..(24)..(25)..(26): Xaa is A or G or is absent

SEQ ID NO: 43056 - protein, 34 aa, Artificial Sequence; identical to SEQ ID NO: 30994
  GFR-binding peptide
  MOD_RES (1)..(34): Xaa is C or S

SEQ ID NO: 43057 - protein, 36 aa, Artificial Sequence; identical to SEQ ID NO: 28089
  GFR-binding peptide
  MOD_RES (2)..(3)..(35): Xaa is C or S

SEQ ID NO: 43058 - protein, 32 aa, Artificial Sequence; identical to SEQ ID NO: 30025
  GFR-binding peptide
  MOD_RES (1)..(1): Xaa is C or S

SEQ ID NO: 43059 - protein, 42 aa, Artificial Sequence; identical to SEQ ID NO: 28094
  GFR-binding peptide
  MOD_RES (4)..(5)..(39)..(41): Xaa is C or S
  MOD_RES (19)..(20)..(21)..(22)..(23): Xaa is A or G
  MOD_RES (24)..(25)..(26)..(27): Xaa is A or G or is absent

SEQ ID NO: 43060 - protein, 41 aa, Artificial Sequence; identical to SEQ ID NO: 30026
  GFR-binding peptide
  MOD_RES (5)..(39)..(41): Xaa is C or S
  MOD_RES (19)..(20)..(21)..(22)..(23): Xaa is A or G
  MOD_RES (24)..(25)..(26)..(27): Xaa is A or G or is absent

SEQ ID NO: 43061 - protein, 33 aa, Artificial Sequence; identical to SEQ ID NO: 30999
  GFR-binding peptide
  MOD_RES (2)..(3): Xaa is C or S

SEQ ID NO: 43062 - protein, 40 aa, Artificial Sequence; identical to SEQ ID NO: 29082
  GFR-binding peptide
  MOD_RES (3)..(4)..(38)..(40): Xaa is C or S
  MOD_RES (18)..(19)..(20)..(21)..(22): Xaa is A or G
  MOD_RES (23)..(24)..(25)..(26): Xaa is A or G or is absent

SEQ ID NO: 43063 - protein, 32 aa, Artificial Sequence; identical to SEQ ID NO: 31003
  GFR-binding peptide
  MOD_RES (32)..(32): Xaa is C or S

SEQ ID NO: 43064 - protein, 38 aa, Artificial Sequence; identical to SEQ ID NO: 28100
  GFR-binding peptide
  MOD_RES (3)..(4)..(37): Xaa is C or S

SEQ ID NO: 43065 - protein, 38 aa, Artificial Sequence; identical to SEQ ID NO: 31004
  GFR-binding peptide
  MOD_RES (5)..(6)..(38): Xaa is C or S

SEQ ID NO: 43066 - protein, 32 aa, Artificial Sequence; identical to SEQ ID NO: 30033
  GFR-binding peptide
  MOD_RES (32)..(32): Xaa is C or S

SEQ ID NO: 43067 - protein, 40 aa, Artificial Sequence; identical to SEQ ID NO: 31011
  GFR-binding peptide
  MOD_RES (3)..(4)..(38)..(40): Xaa is C or S
  MOD_RES (18)..(19)..(20)..(21)..(22): Xaa is A or G
  MOD_RES (23)..(24)..(25)..(26): Xaa is A or G or is absent

SEQ ID NO: 43068 - protein, 41 aa, Artificial Sequence; identical to SEQ ID NO: 30036
  GFR-binding peptide
  MOD_RES (6)..(7)..(39)..(41): Xaa is C or S

SEQ ID NO: 43069 - protein, 33 aa, Artificial Sequence; identical to SEQ ID NO: 31013
  GFR-binding peptide
  MOD_RES (2)..(2): Xaa is C or S

SEQ ID NO: 43070 - protein, 33 aa, Artificial Sequence; identical to SEQ ID NO: 31015
  GFR-binding peptide
  MOD_RES (1)..(1): Xaa is C or S
  MOD_RES (15)..(16)..(17)..(18)..(19): Xaa is A or G
  MOD_RES (20)..(21)..(22)..(23): Xaa is A or G or is absent

SEQ ID NO: 43071 - protein, 38 aa, Artificial Sequence; identical to SEQ ID NO: 31017
  GFR-binding peptide
  MOD_RES (1)..(35)..(37): Xaa is C or S
  MOD_RES (15)..(16)..(17)..(18)..(19): Xaa is A or G
  MOD_RES (20)..(21)..(22)..(23): Xaa is A or G or is absent

SEQ ID NO: 43072 - protein, 35 aa, Artificial Sequence; identical to SEQ ID NO: 28108
  GFR-binding peptide
  MOD_RES (32)..(34): Xaa is C or S

SEQ ID NO: 43073 - protein, 37 aa, Artificial Sequence; identical to SEQ ID NO: 29094
  GFR-binding peptide
  MOD_RES (34)..(36): Xaa is C or S
  MOD_RES (14)..(15)..(16)..(17)..(18): Xaa is A or G
  MOD_RES (19)..(20)..(21)..(22): Xaa is A or G or is absent

SEQ ID NO: 43074 - protein, 34 aa, Artificial Sequence; identical to SEQ ID NO: 30046
  GFR-binding peptide
  MOD_RES (1)..(33): Xaa is C or S

SEQ ID NO: 43075 - protein, 40 aa, Artificial Sequence
  GFR-binding peptide
  MOD_RES (6)..(7): Xaa is C or S
  MOD_RES (21)..(22)..(23)..(24)..(25): Xaa is A or G
  MOD_RES (26)..(27)..(28)..(29): Xaa is A or G or is absent
GSAGPXXTPTKMSPISMLYIXXXXXXXXXYKQYEGMVVDR

SEQ ID NO: 43076 - protein, 32 aa, Artificial Sequence
  GFR-binding peptide
  MOD_RES (1)..(1): Xaa is C or S
XTPTKMSPISMLYINDKQQIIYKQYEGMVVDR

SEQ ID NO: 43077 - protein, 33 aa, Artificial Sequence; identical to SEQ ID NO: 31030
  GFR-binding peptide
  MOD_RES (1)..(2): Xaa is C or S

SEQ ID NO: 43078 - protein, 38 aa, Artificial Sequence; identical to SEQ ID NO: 30048
  GFR-binding peptide
  MOD_RES (4)..(5): Xaa is C or S
  MOD_RES (19)..(20)..(21)..(22)..(23): Xaa is A or G
  MOD_RES (24)..(25)..(26)..(27): Xaa is A or G or is absent

SEQ ID NO: 43079 - protein, 40 aa, Artificial Sequence; identical to SEQ ID NO: 28116
  GFR-binding peptide
  MOD_RES (6)..(7)..(39): Xaa is C or S

SEQ ID NO: 43080 - protein, 36 aa, Artificial Sequence; identical to SEQ ID NO: 28117
  GFR-binding peptide
  MOD_RES (1)..(2)..(36): Xaa is C or S
  MOD_RES (16)..(17)..(18)..(19)..(20): Xaa is A or G
  MOD_RES (21)..(22)..(23)..(24): Xaa is A or G or is absent

SEQ ID NO: 43081 - protein, 39 aa, Artificial Sequence; identical to SEQ ID NO: 30051
  GFR-binding peptide
  MOD_RES (4)..(5)..(37)..(39): Xaa is C or S

SEQ ID NO: 43082 - protein, 38 aa, Artificial Sequence; identical to SEQ ID NO: 30054
  GFR-binding peptide
  MOD_RES (5)..(5): Xaa is C or S
  MOD_RES (19)..(20)..(21)..(22)..(23): Xaa is A or G
  MOD_RES (24)..(25)..(26)..(27): Xaa is A or G or is absent

SEQ ID NO: 43083 - protein, 38 aa, Artificial Sequence; identical to SEQ ID NO: 28119
  GFR-binding peptide
  MOD_RES (2)..(3)..(35)..(37): Xaa is C or S

SEQ ID NO: 43084 - protein, 34 aa, Artificial Sequence; identical to SEQ ID NO: 29102
  GFR-binding peptide
  MOD_RES (1)..(2): Xaa is C or S
  MOD_RES (16)..(17)..(18)..(19)..(20): Xaa is A or G
  MOD_RES (21)..(22)..(23)..(24): Xaa is A or G or is absent

SEQ ID NO: 43085 - protein, 36 aa, Artificial Sequence; identical to SEQ ID NO: 30055
  GFR-binding peptide
  MOD_RES (1)..(33)..(35): Xaa is C or S

SEQ ID NO: 43086 - protein, 34 aa, Artificial Sequence; identical to SEQ ID NO: 30057
  GFR-binding peptide
  MOD_RES (1)..(33): Xaa is C or S

SEQ ID NO: 43087 - protein, 38 aa, Artificial Sequence; identical to SEQ ID NO: 28128
  GFR-binding peptide
  MOD_RES (6)..(7): Xaa is C or S

SEQ ID NO: 43088 - protein, 43 aa, Artificial Sequence; identical to SEQ ID NO: 31038
  GFR-binding peptide
  MOD_RES (7)..(41)..(43): Xaa is C or S
  MOD_RES (21)..(22)..(23)..(24)..(25): Xaa is A or G
  MOD_RES (26)..(27)..(28)..(29): Xaa is A or G or is absent

SEQ ID NO: 43089 - protein, 39 aa, Artificial Sequence; identical to SEQ ID NO: 29108
  GFR-binding peptide
  MOD_RES (4)..(5)..(39): Xaa is C or S
  MOD_RES (19)..(20)..(21)..(22)..(23): Xaa is A or G
  MOD_RES (24)..(25)..(26)..(27): Xaa is A or G or is absent

SEQ ID NO: 43090 - protein, 30 aa, Artificial Sequence; identical to SEQ ID NO: 30059
  GFR-binding peptide

SEQ ID NO: 43091 - protein, 40 aa, Artificial Sequence; identical to SEQ ID NO: 29109
  GFR-binding peptide
  MOD_RES (3)..(4)..(37)..(39): Xaa is C or S

SEQ ID NO: 43092 - protein, 37 aa, Artificial Sequence; identical to SEQ ID NO: 31042
  GFR-binding peptide
  MOD_RES (4)..(36): Xaa is C or S

SEQ ID NO: 43093 - protein, 37 aa, Artificial Sequence; identical to SEQ ID NO: 28130
  GFR-binding peptide
  MOD_RES (1)..(2)..(36): Xaa is C or S
  MOD_RES (16)..(17)..(18)..(19)..(20): Xaa is A or G
  MOD_RES (21)..(22)..(23)..(24): Xaa is A or G or is absent

SEQ ID NO: 43094 - protein, 40 aa, Artificial Sequence; identical to SEQ ID NO: 28132
  GFR-binding peptide
  MOD_RES (4)..(5)..(39): Xaa is C or S
  MOD_RES (19)..(20)..(21)..(22)..(23): Xaa is A or G
  MOD_RES (24)..(25)..(26)..(27): Xaa is A or G or is absent

SEQ ID NO: 43095 - protein, 36 aa, Artificial Sequence; identical to SEQ ID NO: 31046
  GFR-binding peptide
  MOD_RES (2)..(3)..(35): Xaa is C or S

SEQ ID NO: 43096 - protein, 32 aa, Artificial Sequence; identical to SEQ ID NO: 30064
  GFR-binding peptide
  MOD_RES (2)..(2): Xaa is C or S

SEQ ID NO: 43097 - protein, 43 aa, Artificial Sequence
  GFR-binding peptide
  MOD_RES (6)..(7)..(41)..(43): Xaa is C or S
  MOD_RES (21)..(22)..(23)..(24)..(25): Xaa is A or G
  MOD_RES (26)..(27)..(28)..(29): Xaa is A or G or is absent
HVPKPXXAPTKLSPISVLYIXXXXXXXXXYKQYENMVVRSXGX

SEQ ID NO: 43098 - protein, 36 aa, Artificial Sequence; identical to SEQ ID NO: 29117
  GFR-binding peptide
  MOD_RES (1)..(34)..(36): Xaa is C or S

SEQ ID NO: 43099 - protein, 41 aa, Artificial Sequence; identical to SEQ ID NO: 31052
  GFR-binding peptide
  MOD_RES (6)..(7): Xaa is C or S
  MOD_RES (21)..(22)..(23)..(24)..(25): Xaa is A or G
  MOD_RES (26)..(27)..(28)..(29): Xaa is A or G or is absent

SEQ ID NO: 43100 - protein, 35 aa, Artificial Sequence; identical to SEQ ID NO: 31053
  GFR-binding peptide
  MOD_RES (1)..(35): Xaa is C or S
  MOD_RES (15)..(16)..(17)..(18)..(19): Xaa is A or G
  MOD_RES (20)..(21)..(22)..(23): Xaa is A or G or is absent

SEQ ID NO: 43101 - protein, 39 aa, Artificial Sequence; identical to SEQ ID NO: 29121
  GFR-binding peptide
  MOD_RES (2)..(36)..(38): Xaa is C or S
  MOD_RES (16)..(17)..(18)..(19)..(20): Xaa is A or G
  MOD_RES (21)..(22)..(23)..(24): Xaa is A or G or is absent

SEQ ID NO: 43102 - protein, 38 aa, Artificial Sequence; identical to SEQ ID NO: 30072
  GFR-binding peptide
  MOD_RES (3)..(4)..(38): Xaa is C or S
  MOD_RES (18)..(19)..(20)..(21)..(22): Xaa is A or G
  MOD_RES (23)..(24)..(25)..(26): Xaa is A or G or is absent

SEQ ID NO: 43103 - protein, 36 aa, Artificial Sequence; identical to SEQ ID NO: 31056
  GFR-binding peptide
  MOD_RES (35)..(35): Xaa is C or S
  MOD_RES (14)..(15)..(16)..(17)..(18): Xaa is A or G
  MOD_RES (19)..(20)..(21)..(22): Xaa is A or G or is absent

SEQ ID NO: 43104 - protein, 36 aa, Artificial Sequence; identical to SEQ ID NO: 31057
  GFR-binding peptide
  MOD_RES (4)..(36): Xaa is C or S

SEQ ID NO: 43105 - protein, 39 aa, Artificial Sequence; identical to SEQ ID NO: 31058
  GFR-binding peptide
  MOD_RES (4)..(5)..(37)..(39): Xaa is C or S

SEQ ID NO: 43106 - protein, 38 aa, Artificial Sequence
  GFR-binding peptide
  MOD_RES (2)..(3)..(37): Xaa is C or S
  MOD_RES (17)..(18)..(19)..(20)..(21): Xaa is A or G
  MOD_RES (22)..(23)..(24)..(25): Xaa is A or G or is absent
PXXTPTKMSPISMLYIXXXXXXXXXYKQYEGMVVDRXG

SEQ ID NO: 43107 - protein, 35 aa, Artificial Sequence; identical to SEQ ID NO: 28148
  GFR-binding peptide
  MOD_RES (34)..(34): Xaa is C or S
  MOD_RES (14)..(15)..(16)..(17)..(18): Xaa is A or G
  MOD_RES (19)..(20)..(21)..(22): Xaa is A or G or is absent

SEQ ID NO: 43108 - protein, 39 aa, Artificial Sequence; identical to SEQ ID NO: 31060
  GFR-binding peptide
  MOD_RES (6)..(7)..(39): Xaa is C or S

SEQ ID NO: 43109 - protein, 38 aa, Artificial Sequence; identical to SEQ ID NO: 28151
  GFR-binding peptide
  MOD_RES (2)..(3)..(35)..(37): Xaa is C or S

SEQ ID NO: 43110 - protein, 33 aa, Artificial Sequence
  GFR-binding peptide
  MOD_RES (1)..(32): Xaa is C or S
XAPVKTSPISMLYIDNGRVLLYKQYEMIVEEXG

SEQ ID NO: 43111 - protein, 34 aa, Artificial Sequence
  GFR-binding peptide
  MOD_RES (34)..(34): Xaa is C or S
  MOD_RES (14)..(15)..(16)..(17)..(18): Xaa is A or G
  MOD_RES (19)..(20)..(21)..(22): Xaa is A or G or is absent
TPTKMSPISMLYIXXXXXXXXXYKQYEGMVVDRX

SEQ ID NO: 43112 - protein, 33 aa, Artificial Sequence; identical to SEQ ID NO: 30084
  GFR-binding peptide
  MOD_RES (1)..(1): Xaa is C or S
  MOD_RES (15)..(16)..(17)..(18)..(19): Xaa is A or G
  MOD_RES (20)..(21)..(22)..(23): Xaa is A or G or is absent

SEQ ID NO: 43113 - protein, 34 aa, Artificial Sequence; identical to SEQ ID NO: 29134
  GFR-binding peptide
  MOD_RES (3)..(3): Xaa is C or S

SEQ ID NO: 43114 - protein, 38 aa, Artificial Sequence
  GFR-binding peptide
  MOD_RES (1)..(2)..(36)..(38): Xaa is C or S
  MOD_RES (16)..(17)..(18)..(19)..(20): Xaa is A or G
  MOD_RES (21)..(22)..(23)..(24): Xaa is A or G or is absent
XXTPTKMSPISMLYIXXXXXXXXXYKQYEGMVVDRXGX

SEQ ID NO: 43115 - protein, 36 aa, Artificial Sequence; identical to SEQ ID NO: 30087
  GFR-binding peptide
  MOD_RES (2)..(36): Xaa is C or S
  MOD_RES (16)..(17)..(18)..(19)..(20): Xaa is A or G
  MOD_RES (21)..(22)..(23)..(24): Xaa is A or G or is absent

SEQ ID NO: 43116 - protein, 45 aa, Artificial Sequence; identical to SEQ ID NO: 28154
  GFR-binding peptide
  MOD_RES (6)..(7)..(42)..(44): Xaa is C or S
  MOD_RES (21)..(22)..(23)..(24)..(25): Xaa is A or G
  MOD_RES (26)..(27)..(28)..(29): Xaa is A or G or is absent

SEQ ID NO: 43117 - protein, 40 aa, Artificial Sequence; identical to SEQ ID NO: 28156
  GFR-binding peptide
  MOD_RES (5)..(6)..(39): Xaa is C or S

SEQ ID NO: 43118 - protein, 41 aa, Artificial Sequence; identical to SEQ ID NO: 28158
  GFR-binding peptide
  MOD_RES (4)..(5)..(39)..(41): Xaa is C or S
  MOD_RES (19)..(20)..(21)..(22)..(23): Xaa is A or G
  MOD_RES (24)..(25)..(26)..(27): Xaa is A or G or is absent

SEQ ID NO: 43119 - protein, 34 aa, Artificial Sequence; identical to SEQ ID NO: 30090
  GFR-binding peptide
  MOD_RES (1)..(33): Xaa is C or S

SEQ ID NO: 43120 - protein, 35 aa, Artificial Sequence; identical to SEQ ID NO: 31072
  GFR-binding peptide
  MOD_RES (2)..(2): Xaa is C or S
  MOD_RES (16)..(17)..(18)..(19)..(20): Xaa is A or G
  MOD_RES (21)..(22)..(23)..(24): Xaa is A or G or is absent

SEQ ID NO: 43121 - protein, 35 aa, Artificial Sequence; identical to SEQ ID NO: 31073
  GFR-binding peptide
  MOD_RES (33)..(35): Xaa is C or S

SEQ ID NO: 43122 - protein, 35 aa, Artificial Sequence; identical to SEQ ID NO: 29138
  GFR-binding peptide
  MOD_RES (4)..(5): Xaa is C or S

SEQ ID NO: 43123 - protein, 42 aa, Artificial Sequence; identical to SEQ ID NO: 30094
  GFR-binding peptide
  MOD_RES (6)..(7)..(41): Xaa is C or S
  MOD_RES (21)..(22)..(23)..(24)..(25): Xaa is A or G
  MOD_RES (26)..(27)..(28)..(29): Xaa is A or G or is absent

SEQ ID NO: 43124 - protein, 40 aa, Artificial Sequence; identical to SEQ ID NO: 30095
  GFR-binding peptide
  MOD_RES (5)..(6)..(40): Xaa is C or S
  MOD_RES (20)..(21)..(22)..(23)..(24): Xaa is A or G
  MOD_RES (25)..(26)..(27)..(28): Xaa is A or G or is absent

SEQ ID NO: 43125 - protein, 38 aa, Artificial Sequence; identical to SEQ ID NO: 30096
  GFR-binding peptide
  MOD_RES (4)..(5): Xaa is C or S
  MOD_RES (19)..(20)..(21)..(22)..(23): Xaa is A or G
  MOD_RES (24)..(25)..(26)..(27): Xaa is A or G or is absent

SEQ ID NO: 43126 - protein, 34 aa, Artificial Sequence; identical to SEQ ID NO: 31076
  GFR-binding peptide
  MOD_RES (34)..(34): Xaa is C or S
  MOD_RES (14)..(15)..(16)..(17)..(18): Xaa is A or G
  MOD_RES (19)..(20)..(21)..(22): Xaa is A or G or is absent

SEQ ID NO: 43127 - protein, 42 aa, Artificial Sequence; identical to SEQ ID NO: 30099
  GFR-binding peptide
  MOD_RES (6)..(7)..(39)..(41): Xaa is C or S

SEQ ID NO: 43128 - protein, 38 aa, Artificial Sequence; identical to SEQ ID NO: 28161
  GFR-binding peptide
  MOD_RES (4)..(5)..(37): Xaa is C or S

SEQ ID NO: 43129 - protein, 39 aa, Artificial Sequence; identical to SEQ ID NO: 31077
  GFR-binding peptide
  MOD_RES (6)..(7)..(39): Xaa is C or S

SEQ ID NO: 43130 - protein, 33 aa, Artificial Sequence; identical to SEQ ID NO: 30101
  GFR-binding peptide
  MOD_RES (2)..(3): Xaa is C or S

SEQ ID NO: 43131 - protein, 39 aa, Artificial Sequence; identical to SEQ ID NO: 31078
  GFR-binding peptide
  MOD_RES (2)..(3)..(37)..(39): Xaa is C or S
  MOD_RES (17)..(18)..(19)..(20)..(21): Xaa is A or G
  MOD_RES (22)..(23)..(24)..(25): Xaa is A or G or is absent

SEQ ID NO: 43132 - protein, 36 aa, Artificial Sequence; identical to SEQ ID NO: 31079
  GFR-binding peptide
  MOD_RES (2)..(3)..(35): Xaa is C or S

SEQ ID NO: 43133 - protein, 38 aa, Artificial Sequence
  GFR-binding peptide
  MOD_RES (6)..(7): Xaa is C or S
GSAGPXXTPTKMSPISMLYINDKQQIIYKQYEGMVVDR

SEQ ID NO: 43134 - protein, 35 aa, Artificial Sequence; identical to SEQ ID NO: 30106
  GFR-binding peptide
  MOD_RES (4)..(5): Xaa is C or S

SEQ ID NO: 43135 - protein, 35 aa, Artificial Sequence
  GFR-binding peptide
  MOD_RES (34)..(34): Xaa is C or S
  MOD_RES (14)..(15)..(16)..(17)..(18): Xaa is A or G
  MOD_RES (19)..(20)..(21)..(22): Xaa is A or G or is absent
TPTKMSPISMLYIXXXXXXXXXYKQYEGMVVDRXG

SEQ ID NO: 43136 - protein, 44 aa, Artificial Sequence; identical to SEQ ID NO: 29149
  GFR-binding peptide
  MOD_RES (6)..(7)..(41)..(43): Xaa is C or S
  MOD_RES (21)..(22)..(23)..(24)..(25): Xaa is A or G
  MOD_RES (26)..(27)..(28)..(29): Xaa is A or G or is absent

SEQ ID NO: 43137 - protein, 39 aa, Artificial Sequence; identical to SEQ ID NO: 30109
  GFR-binding peptide
  MOD_RES (1)..(2)..(36)..(38): Xaa is C or S
  MOD_RES (16)..(17)..(18)..(19)..(20): Xaa is A or G
  MOD_RES (21)..(22)..(23)..(24): Xaa is A or G or is absent

SEQ ID NO: 43138 - protein, 44 aa, Artificial Sequence; identical to SEQ ID NO: 29150
  GFR-binding peptide
  MOD_RES (6)..(7)..(41)..(43): Xaa is C or S
  MOD_RES (21)..(22)..(23)..(24)..(25): Xaa is A or G
  MOD_RES (26)..(27)..(28)..(29): Xaa is A or G or is absent

SEQ ID NO: 43139 - protein, 37 aa, Artificial Sequence; identical to SEQ ID NO: 28165
  GFR-binding peptide
  MOD_RES (34)..(36): Xaa is C or S
  MOD_RES (14)..(15)..(16)..(17)..(18): Xaa is A or G
  MOD_RES (19)..(20)..(21)..(22): Xaa is A or G or is absent

SEQ ID NO: 43140 - protein, 37 aa, Artificial Sequence; identical to SEQ ID NO: 30112
  GFR-binding peptide
  MOD_RES (1)..(2)..(36): Xaa is C or S
  MOD_RES (16)..(17)..(18)..(19)..(20): Xaa is A or G
  MOD_RES (21)..(22)..(23)..(24): Xaa is A or G or is absent

SEQ ID NO: 43141 - protein, 37 aa, Artificial Sequence; identical to SEQ ID NO: 29152
  GFR-binding peptide
  MOD_RES (1)..(36): Xaa is C or S
  MOD_RES (15)..(16)..(17)..(18)..(19): Xaa is A or G
  MOD_RES (20)..(21)..(22)..(23): Xaa is A or G or is absent

SEQ ID NO: 43142 - protein, 35 aa, Artificial Sequence; identical to SEQ ID NO: 30113
  GFR-binding peptide
  MOD_RES (34)..(34): Xaa is C or S
  MOD_RES (14)..(15)..(16)..(17)..(18): Xaa is A or G
  MOD_RES (19)..(20)..(21)..(22): Xaa is A or G or is absent

SEQ ID NO: 43143 - protein, 35 aa, Artificial Sequence; identical to SEQ ID NO: 29155
  GFR-binding peptide
  MOD_RES (1)..(2): Xaa is C or S
  MOD_RES (16)..(17)..(18)..(19)..(20): Xaa is A or G
  MOD_RES (21)..(22)..(23)..(24): Xaa is A or G or is absent

SEQ ID NO: 43144 - protein, 35 aa, Artificial Sequence; identical to SEQ ID NO: 30114
  GFR-binding peptide
  MOD_RES (32)..(34): Xaa is C or S

SEQ ID NO: 43145 - protein, 40 aa, Artificial Sequence; identical to SEQ ID NO: 29156
  GFR-binding peptide
  MOD_RES (2)..(3)..(37)..(39): Xaa is C or S
  MOD_RES (17)..(18)..(19)..(20)..(21): Xaa is A or G
  MOD_RES (22)..(23)..(24)..(25): Xaa is A or G or is absent

SEQ ID NO: 43146 - protein, 33 aa, Artificial Sequence; identical to SEQ ID NO: 30118
  GFR-binding peptide
  MOD_RES (1)..(2): Xaa is C or S

SEQ ID NO: 43147 - protein, 37 aa, Artificial Sequence; identical to SEQ ID NO: 28175
  GFR-binding peptide
  MOD_RES (1)..(2)..(35)..(37): Xaa is C or S

SEQ ID NO: 43148 - protein, 43 aa, Artificial Sequence
  GFR-binding peptide
  MOD_RES (5)..(6)..(40)..(42): Xaa is C or S
  MOD_RES (20)..(21)..(22)..(23)..(24): Xaa is A or G
  MOD_RES (25)..(26)..(27)..(28): Xaa is A or G or is absent
SAGPXXTPTKMSPISMLYIXXXXXXXXXYKQYEGMVVDRXGXS

SEQ ID NO: 43149 - protein, 35 aa, Artificial Sequence; identical to SEQ ID NO: 31093
  GFR-binding peptide
  MOD_RES (1)..(33)..(35): Xaa is C or S

SEQ ID NO: 43150 - protein, 38 aa, Artificial Sequence; identical to SEQ ID NO: 28178
  GFR-binding peptide
  MOD_RES (2)..(3)..(37): Xaa is C or S
  MOD_RES (17)..(18)..(19)..(20)..(21): Xaa is A or G
  MOD_RES (22)..(23)..(24)..(25): Xaa is A or G or is absent

SEQ ID NO: 43151 - protein, 37 aa, Artificial Sequence; identical to SEQ ID NO: 29161
  GFR-binding peptide
  MOD_RES (3)..(4)..(37): Xaa is C or S

SEQ ID NO: 43152 - protein, 38 aa, Artificial Sequence; identical to SEQ ID NO: 30127
  GFR-binding peptide
  MOD_RES (5)..(6)..(38): Xaa is C or S

SEQ ID NO: 43153 - protein, 35 aa, Artificial Sequence; identical to SEQ ID NO: 28179
  GFR-binding peptide
  MOD_RES (1)..(2)..(34): Xaa is C or S

SEQ ID NO: 43154 - protein, 35 aa, Artificial Sequence
  GFR-binding peptide
  MOD_RES (3)..(4): Xaa is C or S
GPXXTPTKMSPISMLYINDKQQIIYKQYEGMVVDR

SEQ ID NO: 43155 - protein, 38 aa, Artificial Sequence
  GFR-binding peptide
  MOD_RES (2)..(3)..(35)..(37): Xaa is C or S
PXXTPTKMSPISMLYINDKQQIIYKQYEGMVVDRXGXS

SEQ ID NO: 43156 - protein, 39 aa, Artificial Sequence; identical to SEQ ID NO: 28182
  GFR-binding peptide
  MOD_RES (6)..(7): Xaa is C or S
  MOD_RES (21)..(22)..(23)..(24)..(25): Xaa is A or G
  MOD_RES (26)..(27)..(28)..(29): Xaa is A or G or is absent

SEQ ID NO: 43157 - protein, 35 aa, Artificial Sequence; identical to SEQ ID NO: 29165
  GFR-binding peptide
  MOD_RES (1)..(2)..(34): Xaa is C or S

SEQ ID NO: 43158 - protein, 43 aa, Artificial Sequence; identical to SEQ ID NO: 29168
  GFR-binding peptide
  MOD_RES (4)..(5)..(40)..(42): Xaa is C or S
  MOD_RES (19)..(20)..(21)..(22)..(23): Xaa is A or G
  MOD_RES (24)..(25)..(26)..(27): Xaa is A or G or is absent

SEQ ID NO: 43159 - protein, 41 aa, Artificial Sequence; identical to SEQ ID NO: 31099
  GFR-binding peptide
  MOD_RES (3)..(4)..(38)..(40): Xaa is C or S
  MOD_RES (18)..(19)..(20)..(21)..(22): Xaa is A or G
  MOD_RES (23)..(24)..(25)..(26): Xaa is A or G or is absent

SEQ ID NO: 43160 - protein, 41 aa, Artificial Sequence; identical to SEQ ID NO: 30133
  GFR-binding peptide
  MOD_RES (6)..(7)..(41): Xaa is C or S
  MOD_RES (21)..(22)..(23)..(24)..(25): Xaa is A or G
  MOD_RES (26)..(27)..(28)..(29): Xaa is A or G or is absent

SEQ ID NO: 43161 - protein, 35 aa, Artificial Sequence
  GFR-binding peptide
  MOD_RES (1)..(2): Xaa is C or S
  MOD_RES (16)..(17)..(18)..(19)..(20): Xaa is A or G
  MOD_RES (21)..(22)..(23)..(24): Xaa is A or G or is absent
XXTPTKMSPISMLYIXXXXXXXXXYKQYEGMVVDR

SEQ ID NO: 43162 - protein, 34 aa, Artificial Sequence
  GFR-binding peptide
  MOD_RES (1)..(2)..(33): Xaa is C or S
XXAPVKTSPISMLYIDNGRVLLYKQYEMIVEEXG

SEQ ID NO: 43163 - protein, 37 aa, Artificial Sequence; identical to SEQ ID NO: 29175
  GFR-binding peptide
  MOD_RES (1)..(2)..(34)..(36): Xaa is C or S

SEQ ID NO: 43164 - protein, 35 aa, Artificial Sequence; identical to SEQ ID NO: 31105
  GFR-binding peptide
  MOD_RES (32)..(34): Xaa is C or S

SEQ ID NO: 43165 - protein, 35 aa, Artificial Sequence; identical to SEQ ID NO: 30140
  GFR-binding peptide
  MOD_RES (1)..(2)..(35): Xaa is C or S

SEQ ID NO: 43166 - protein, 38 aa, Artificial Sequence; identical to SEQ ID NO: 28198
  GFR-binding peptide
  MOD_RES (5)..(6)..(38): Xaa is C or S

SEQ ID NO: 43167 - protein, 39 aa, Artificial Sequence
  GFR-binding peptide
  MOD_RES (3)..(4)..(38): Xaa is C or S
  MOD_RES (18)..(19)..(20)..(21)..(22): Xaa is A or G
  MOD_RES (23)..(24)..(25)..(26): Xaa is A or G or is absent
GPXXTPTKMSPISMLYIXXXXXXXXXYKQYEGMVVDRXG

SEQ ID NO: 43168 - protein, 38 aa, Artificial Sequence
  GFR-binding peptide
  MOD_RES (3)..(4)..(37): Xaa is C or S
  MOD_RES (18)..(19)..(20)..(21)..(22): Xaa is A or G
  MOD_RES (23)..(24)..(25)..(26): Xaa is A or G or is absent
STXXAPVKTSPISMLYIXXXXXXXXXYKQYEMIVEEXG

SEQ ID NO: 43169 - protein, 42 aa, Artificial Sequence; identical to SEQ ID NO: 29191
  GFR-binding peptide
  MOD_RES (6)..(7)..(39)..(41): Xaa is C or S

SEQ ID NO: 43170 - protein, 33 aa, Artificial Sequence; identical to SEQ ID NO: 28206
  GFR-binding peptide
  MOD_RES (1)..(33): Xaa is C or S

SEQ ID NO: 43171 - protein, 40 aa, Artificial Sequence; identical to SEQ ID NO: 30157
  GFR-binding peptide
  MOD_RES (6)..(7): Xaa is C or S
  MOD_RES (21)..(22)..(23)..(24)..(25): Xaa is A or G
  MOD_RES (26)..(27)..(28)..(29): Xaa is A or G or is absent

SEQ ID NO: 43172 - protein, 39 aa, Artificial Sequence; identical to SEQ ID NO: 28213
  GFR-binding peptide
  MOD_RES (4)..(5)..(37)..(39): Xaa is C or S

SEQ ID NO: 43173 - protein, 37 aa, Artificial Sequence; identical to SEQ ID NO: 30158
  GFR-binding peptide
  MOD_RES (34)..(36): Xaa is C or S
  MOD_RES (14)..(15)..(16)..(17)..(18): Xaa is A or G
  MOD_RES (19)..(20)..(21)..(22): Xaa is A or G or is absent

SEQ ID NO: 43174 - protein, 38 aa, Artificial Sequence; identical to SEQ ID NO: 28215
  GFR-binding peptide
  MOD_RES (1)..(35)..(37): Xaa is C or S
  MOD_RES (15)..(16)..(17)..(18)..(19): Xaa is A or G
  MOD_RES (20)..(21)..(22)..(23): Xaa is A or G or is absent

SEQ ID NO: 43175 - protein, 39 aa, Artificial Sequence; identical to SEQ ID NO: 30160
  GFR-binding peptide
  MOD_RES (6)..(7)..(39): Xaa is C or S

SEQ ID NO: 43176 - protein, 35 aa, Artificial Sequence; identical to SEQ ID NO: 31129
  GFR-binding peptide
  MOD_RES (1)..(2): Xaa is C or S
  MOD_RES (16)..(17)..(18)..(19)..(20): Xaa is A or G
  MOD_RES (21)..(22)..(23)..(24): Xaa is A or G or is absent

SEQ ID NO: 43177 - protein, 39 aa, Artificial Sequence; identical to SEQ ID NO: 30163
  GFR-binding peptide
  MOD_RES (6)..(7): Xaa is C or S
  MOD_RES (21)..(22)..(23)..(24)..(25): Xaa is A or G
  MOD_RES (26)..(27)..(28)..(29): Xaa is A or G or is absent

SEQ ID NO: 43178 - protein, 38 aa, Artificial Sequence
  GFR-binding peptide
  MOD_RES (6)..(7)..(38): Xaa is C or S
RVPSTXXAPVKTSPISMLYIDNGRVLLYKQYEMIVEEX

SEQ ID NO: 43179 - protein, 39 aa, Artificial Sequence; identical to SEQ ID NO: 31133
  GFR-binding peptide
  MOD_RES (4)..(36)..(38): Xaa is C or S

SEQ ID NO: 43180 - protein, 38 aa, Artificial Sequence; identical to SEQ ID NO: 28220
  GFR-binding peptide
  MOD_RES (3)..(4)..(36)..(38): Xaa is C or S

SEQ ID NO: 43181 - protein, 36 aa, Artificial Sequence
  GFR-binding peptide
  MOD_RES (34)..(36): Xaa is C or S
  MOD_RES (14)..(15)..(16)..(17)..(18): Xaa is A or G
  MOD_RES (19)..(20)..(21)..(22): Xaa is A or G or is absent
TPTKMSPISMLYIXXXXXXXXXYKQYEGMVVDRXGX

SEQ ID NO: 43182 - protein, 38 aa, Artificial Sequence; identical to SEQ ID NO: 28224
  GFR-binding peptide
  MOD_RES (3)..(4)..(38): Xaa is C or S
  MOD_RES (18)..(19)..(20)..(21)..(22): Xaa is A or G
  MOD_RES (23)..(24)..(25)..(26): Xaa is A or G or is absent

SEQ ID NO: 43183 - protein, 38 aa, Artificial Sequence; identical to SEQ ID NO: 31137
  GFR-binding peptide
  MOD_RES (3)..(4): Xaa is C or S
  MOD_RES (18)..(19)..(20)..(21)..(22): Xaa is A or G
  MOD_RES (23)..(24)..(25)..(26): Xaa is A or G or is absent

SEQ ID NO: 43184 - protein, 36 aa, Artificial Sequence
  GFR-binding peptide
  MOD_RES (3)..(4): Xaa is C or S
  MOD_RES (18)..(19)..(20)..(21)..(22): Xaa is A or G
  MOD_RES (23)..(24)..(25)..(26): Xaa is A or G or is absent
GPXXTPTKMSPISMLYIXXXXXXXXXYKQYEGMVVD

SEQ ID NO: 43185 - protein, 36 aa, Artificial Sequence; identical to SEQ ID NO: 30167
  GFR-binding peptide
  MOD_RES (3)..(4)..(36): Xaa is C or S

SEQ ID NO: 43186 - protein, 41 aa, Artificial Sequence; identical to SEQ ID NO: 30173
  GFR-binding peptide
  MOD_RES (7)..(39)..(41): Xaa is C or S

SEQ ID NO: 43187 - protein, 36 aa, Artificial Sequence; identical to SEQ ID NO: 28233
  GFR-binding peptide
  MOD_RES (1)..(2)..(36): Xaa is C or S
  MOD_RES (16)..(17)..(18)..(19)..(20): Xaa is A or G
  MOD_RES (21)..(22)..(23)..(24): Xaa is A or G or is absent

SEQ ID NO: 43188 - protein, 37 aa, Artificial Sequence; identical to SEQ ID NO: 28234
  GFR-binding peptide
  MOD_RES (6)..(7): Xaa is C or S

SEQ ID NO: 43189 - protein, 39 aa, Artificial Sequence; identical to SEQ ID NO: 28235
  GFR-binding peptide
  MOD_RES (6)..(7): Xaa is C or S

SEQ ID NO: 43190 - protein, 32 aa, Artificial Sequence; identical to SEQ ID NO: 28238
  GFR-binding peptide
  MOD_RES (1)..(1): Xaa is C or S

SEQ ID NO: 43191 - protein, 38 aa, Artificial Sequence; identical to SEQ ID NO: 31150
  GFR-binding peptide
  MOD_RES (3)..(4)..(38): Xaa is C or S
  MOD_RES (18)..(19)..(20)..(21)..(22): Xaa is A or G
  MOD_RES (23)..(24)..(25)..(26): Xaa is A or G or is absent

SEQ ID NO: 43192 - protein, 36 aa, Artificial Sequence; identical to SEQ ID NO: 29206
  GFR-binding peptide
  MOD_RES (3)..(4)..(36): Xaa is C or S

SEQ ID NO: 43193 - protein, 42 aa, Artificial Sequence
  GFR-binding peptide
  MOD_RES (6)..(7)..(39)..(41): Xaa is C or S
HVPKPXXAPTKLSPISVLYIDDSSNVIYKQYENMVVRSXGXH

SEQ ID NO: 43194 - protein, 39 aa, Artificial Sequence
  GFR-binding peptide
  MOD_RES (2)..(3)..(37)..(39): Xaa is C or S
  MOD_RES (17)..(18)..(19)..(20)..(21): Xaa is A or G
  MOD_RES (22)..(23)..(24)..(25): Xaa is A or G or is absent
PXXTPTKMSPISMLYIXXXXXXXXXYKQYEGMVVDRXGX

SEQ ID NO: 43195 - protein, 34 aa, Artificial Sequence
  GFR-binding peptide
  MOD_RES (1)..(2)..(34): Xaa is C or S
XXTPTKMSPISMLYINDKQQIIYKQYEGMVVDRX

SEQ ID NO: 43196 - protein, 39 aa, Artificial Sequence; identical to SEQ ID NO: 31152
  GFR-binding peptide
  MOD_RES (4)..(5)..(38): Xaa is C or S

SEQ ID NO: 43197 - protein, 36 aa, Artificial Sequence; identical to SEQ ID NO: 30181
  GFR-binding peptide
  MOD_RES (1)..(2): Xaa is C or S
  MOD_RES (16)..(17)..(18)..(19)..(20): Xaa is A or G
  MOD_RES (21)..(22)..(23)..(24): Xaa is A or G or is absent

SEQ ID NO: 43198 - protein, 38 aa, Artificial Sequence; identical to SEQ ID NO: 29212
  GFR-binding peptide
  MOD_RES (1)..(2)..(36)..(38): Xaa is C or S
  MOD_RES (16)..(17)..(18)..(19)..(20): Xaa is A or G
  MOD_RES (21)..(22)..(23)..(24): Xaa is A or G or is absent

SEQ ID NO: 43199 - protein, 35 aa, Artificial Sequence; identical to SEQ ID NO: 28244
  GFR-binding peptide
  MOD_RES (2)..(3)..(35): Xaa is C or S

SEQ ID NO: 43200 - protein, 43 aa, Artificial Sequence; identical to SEQ ID NO: 28247
  GFR-binding peptide
  MOD_RES (6)..(7)..(42): Xaa is C or S
  MOD_RES (21)..(22)..(23)..(24)..(25): Xaa is A or G
  MOD_RES (26)..(27)..(28)..(29): Xaa is A or G or is absent

SEQ ID NO: 43201 - protein, 35 aa, Artificial Sequence; identical to SEQ ID NO: 28248
  GFR-binding peptide
  MOD_RES (2)..(3): Xaa is C or S
  MOD_RES (17)..(18)..(19)..(20)..(21): Xaa is A or G
  MOD_RES (22)..(23)..(24)..(25): Xaa is A or G or is absent

SEQ ID NO: 43202 - protein, 38 aa, Artificial Sequence; identical to SEQ ID NO: 31162
  GFR-binding peptide
  MOD_RES (2)..(3)..(35)..(37): Xaa is C or S

SEQ ID NO: 43203 - protein, 43 aa, Artificial Sequence; identical to SEQ ID NO: 29221
  GFR-binding peptide
  MOD_RES (6)..(7)..(41)..(43): Xaa is C or S
  MOD_RES (21)..(22)..(23)..(24)..(25): Xaa is A or G
  MOD_RES (26)..(27)..(28)..(29): Xaa is A or G or is absent

SEQ ID NO: 43204 - protein, 40 aa, Artificial Sequence; identical to SEQ ID NO: 30191
  GFR-binding peptide
  MOD_RES (6)..(7): Xaa is C or S
  MOD_RES (21)..(22)..(23)..(24)..(25): Xaa is A or G
  MOD_RES (26)..(27)..(28)..(29): Xaa is A or G or is absent

SEQ ID NO: 43205 - protein, 38 aa, Artificial Sequence; identical to SEQ ID NO: 31166
  GFR-binding peptide
  MOD_RES (3)..(4)..(36)..(38): Xaa is C or S

SEQ ID NO: 43206 - protein, 42 aa, Artificial Sequence; identical to SEQ ID NO: 31168
  GFR-binding peptide
  MOD_RES (5)..(6)..(40)..(42): Xaa is C or S
  MOD_RES (20)..(21)..(22)..(23)..(24): Xaa is A or G
  MOD_RES (25)..(26)..(27)..(28): Xaa is A or G or is absent

SEQ ID NO: 43207 - protein, 40 aa, Artificial Sequence; identical to SEQ ID NO: 28251
  GFR-binding peptide
  MOD_RES (3)..(4)..(38)..(40): Xaa is C or S
  MOD_RES (18)..(19)..(20)..(21)..(22): Xaa is A or G
  MOD_RES (23)..(24)..(25)..(26): Xaa is A or G or is absent

SEQ ID NO: 43208 - protein, 36 aa, Artificial Sequence; identical to SEQ ID NO: 29222
  GFR-binding peptide
  MOD_RES (1)..(35): Xaa is C or S
  MOD_RES (15)..(16)..(17)..(18)..(19): Xaa is A or G
  MOD_RES (20)..(21)..(22)..(23): Xaa is A or G or is absent

SEQ ID NO: 43209 - protein, 34 aa, Artificial Sequence; identical to SEQ ID NO: 29224
  GFR-binding peptide
  MOD_RES (32)..(34): Xaa is C or S

SEQ ID NO: 43210 - protein, 38 aa, Artificial Sequence; identical to SEQ ID NO: 30199
  GFR-binding peptide
  MOD_RES (2)..(3)..(37): Xaa is C or S
  MOD_RES (17)..(18)..(19)..(20)..(21): Xaa is A or G
  MOD_RES (22)..(23)..(24)..(25): Xaa is A or G or is absent

SEQ ID NO: 43211 - protein, 37 aa, Artificial Sequence; identical to SEQ ID NO: 31174
  GFR-binding peptide
  MOD_RES (1)..(2)..(34)..(36): Xaa is C or S

SEQ ID NO: 43212 - protein, 38 aa, Artificial Sequence; identical to SEQ ID NO: 31175
  GFR-binding peptide
  MOD_RES (1)..(2)..(35)..(37): Xaa is C or S

SEQ ID NO: 43213 - protein, 34 aa, Artificial Sequence; identical to SEQ ID NO: 30204
  GFR-binding peptide
  MOD_RES (1)..(2): Xaa is C or S
  MOD_RES (16)..(17)..(18)..(19)..(20): Xaa is A or G
  MOD_RES (21)..(22)..(23)..(24): Xaa is A or G or is absent

SEQ ID NO: 43214 - protein, 36 aa, Artificial Sequence; identical to SEQ ID NO: 31177
  GFR-binding peptide
  MOD_RES (4)..(5): Xaa is C or S

SEQ ID NO: 43215 - protein, 42 aa, Artificial Sequence
  GFR-binding peptide
  MOD_RES (6)..(7)..(40)..(42): Xaa is C or S
  MOD_RES (21)..(22)..(23)..(24)..(25): Xaa is A or G
  MOD_RES (26)..(27)..(28)..(29): Xaa is A or G or is absent
RVPSTXXAPVKTSPISMLYIXXXXXXXXXYKQYEMIVEEXGX

SEQ ID NO: 43216 - protein, 38 aa, Artificial Sequence; identical to SEQ ID NO: 28261
  GFR-binding peptide
  MOD_RES (2)..(3)..(38): Xaa is C or S
  MOD_RES (17)..(18)..(19)..(20)..(21): Xaa is A or G
  MOD_RES (22)..(23)..(24)..(25): Xaa is A or G or is absent

SEQ ID NO: 43217 - protein, 37 aa, Artificial Sequence; identical to SEQ ID NO: 28262
  GFR-binding peptide
  MOD_RES (3)..(4): Xaa is C or S
  MOD_RES (18)..(19)..(20)..(21)..(22): Xaa is A or G
  MOD_RES (23)..(24)..(25)..(26): Xaa is A or G or is absent

SEQ ID NO: 43218 - protein, 40 aa, Artificial Sequence; identical to SEQ ID NO: 29235
  GFR-binding peptide
  MOD_RES (4)..(5)..(37)..(39): Xaa is C or S

SEQ ID NO: 43219 - protein, 42 aa, Artificial Sequence; identical to SEQ ID NO: 28263
  GFR-binding peptide
  MOD_RES (6)..(7)..(40)..(42): Xaa is C or S

SEQ ID NO: 43220 - protein, 34 aa, Artificial Sequence; identical to SEQ ID NO: 30208
  GFR-binding peptide
  MOD_RES (1)..(2): Xaa is C or S
  MOD_RES (16)..(17)..(18)..(19)..(20): Xaa is A or G
  MOD_RES (21)..(22)..(23)..(24): Xaa is A or G or is absent

SEQ ID NO: 43221 - protein, 34 aa, Artificial Sequence; identical to SEQ ID NO: 31180
  GFR-binding peptide
  MOD_RES (3)..(4): Xaa is C or S

SEQ ID NO: 43222 - protein, 30 aa, Artificial Sequence; identical to SEQ ID NO: 31181
  GFR-binding peptide

SEQ ID NO: 43223 - protein, 38 aa, Artificial Sequence; identical to SEQ ID NO: 28265
  GFR-binding peptide
  MOD_RES (5)..(6)..(38): Xaa is C or S

SEQ ID NO: 43224 - protein, 36 aa, Artificial Sequence
  GFR-binding peptide
  MOD_RES (3)..(4)..(35): Xaa is C or S
STXXAPVKTSPISMLYIDNGRVLLYKQYEMIVEEXG

SEQ ID NO: 43225 - protein, 38 aa, Artificial Sequence
  GFR-binding peptide
  MOD_RES (3)..(4)..(38): Xaa is C or S
  MOD_RES (18)..(19)..(20)..(21)..(22): Xaa is A or G
  MOD_RES (23)..(24)..(25)..(26): Xaa is A or G or is absent
GPXXTPTKMSPISMLYIXXXXXXXXXYKQYEGMVVDRX

SEQ ID NO: 43226 - protein, 37 aa, Artificial Sequence; identical to SEQ ID NO: 29240
  GFR-binding peptide
  MOD_RES (3)..(4)..(36): Xaa is C or S

SEQ ID NO: 43227 - protein, 37 aa, Artificial Sequence; identical to SEQ ID NO: 28268
  GFR-binding peptide
  MOD_RES (6)..(7): Xaa is C or S

SEQ ID NO: 43228 - protein, 37 aa, Artificial Sequence; identical to SEQ ID NO: 30213
  GFR-binding peptide
  MOD_RES (1)..(2)..(37): Xaa is C or S
  MOD_RES (16)..(17)..(18)..(19)..(20): Xaa is A or G
  MOD_RES (21)..(22)..(23)..(24): Xaa is A or G or is absent

SEQ ID NO: 43229 - protein, 35 aa, Artificial Sequence; identical to SEQ ID NO: 30214
  GFR-binding peptide
  MOD_RES (4)..(5): Xaa is C or S

SEQ ID NO: 43230 - protein, 37 aa, Artificial Sequence; identical to SEQ ID NO: 30218
  GFR-binding peptide
  MOD_RES (1)..(35)..(37): Xaa is C or S
  MOD_RES (15)..(16)..(17)..(18)..(19): Xaa is A or G
  MOD_RES (20)..(21)..(22)..(23): Xaa is A or G or is absent

SEQ ID NO: 43231 - protein, 39 aa, Artificial Sequence; identical to SEQ ID NO: 29243
  GFR-binding peptide
  MOD_RES (6)..(38): Xaa is C or S

SEQ ID NO: 43232 - protein, 38 aa, Artificial Sequence
  GFR-binding peptide
  MOD_RES (5)..(6): Xaa is C or S
  MOD_RES (20)..(21)..(22)..(23)..(24): Xaa is A or G
  MOD_RES (25)..(26)..(27)..(28): Xaa is A or G or is absent
SAGPXXTPTKMSPISMLYIXXXXXXXXXYKQYEGMVVD

SEQ ID NO: 43233 - protein, 39 aa, Artificial Sequence; identical to SEQ ID NO: 30219
  GFR-binding peptide
  MOD_RES (1)..(36)..(38): Xaa is C or S
  MOD_RES (15)..(16)..(17)..(18)..(19): Xaa is A or G
  MOD_RES (20)..(21)..(22)..(23): Xaa is A or G or is absent

SEQ ID NO: 43234 - protein, 38 aa, Artificial Sequence; identical to SEQ ID NO: 31186
  GFR-binding peptide
  MOD_RES (5)..(37): Xaa is C or S

SEQ ID NO: 43235 - protein, 36 aa, Artificial Sequence; identical to SEQ ID NO: 28272
  GFR-binding peptide
  MOD_RES (3)..(4): Xaa is C or S
  MOD_RES (18)..(19)..(20)..(21)..(22): Xaa is A or G
  MOD_RES (23)..(24)..(25)..(26): Xaa is A or G or is absent

SEQ ID NO: 43236 - protein, 42 aa, Artificial Sequence; identical to SEQ ID NO: 30222
  GFR-binding peptide
  MOD_RES (5)..(6)..(40)..(42): Xaa is C or S
  MOD_RES (20)..(21)..(22)..(23)..(24): Xaa is A or G
  MOD_RES (25)..(26)..(27)..(28): Xaa is A or G or is absent

SEQ ID NO: 43237 - protein, 35 aa, Artificial Sequence; identical to SEQ ID NO: 28275
  GFR-binding peptide
  MOD_RES (4)..(5): Xaa is C or S

SEQ ID NO: 43238 - protein, 41 aa, Artificial Sequence; identical to SEQ ID NO: 28277
  GFR-binding peptide
  MOD_RES (5)..(6)..(40): Xaa is C or S
  MOD_RES (20)..(21)..(22)..(23)..(24): Xaa is A or G
  MOD_RES (25)..(26)..(27)..(28): Xaa is A or G or is absent

SEQ ID NO: 43239 - protein, 42 aa, Artificial Sequence; identical to SEQ ID NO: 28279
  GFR-binding peptide
  MOD_RES (6)..(7)..(39)..(41): Xaa is C or S

SEQ ID NO: 43240 - protein, 34 aa, Artificial Sequence
  GFR-binding peptide
  MOD_RES (1)..(2): Xaa is C or S
  MOD_RES (16)..(17)..(18)..(19)..(20): Xaa is A or G
  MOD_RES (21)..(22)..(23)..(24): Xaa is A or G or is absent
XXAPVKTSPISMLYIXXXXXXXXXYKQYEMIVEE

SEQ ID NO: 43241 - protein, 34 aa, Artificial Sequence; identical to SEQ ID NO: 29252
  GFR-binding peptide
  MOD_RES (1)..(2): Xaa is C or S
  MOD_RES (16)..(17)..(18)..(19)..(20): Xaa is A or G
  MOD_RES (21)..(22)..(23)..(24): Xaa is A or G or is absent

SEQ ID NO: 43242 - protein, 37 aa, Artificial Sequence
  GFR-binding peptide
  MOD_RES (5)..(6): Xaa is C or S
SAGPXXTPTKMSPISMLYINDKQQIIYKQYEGMVVDR

SEQ ID NO: 43243 - protein, 43 aa, Artificial Sequence
  GFR-binding peptide
  MOD_RES (2)..(4)..(38)..(39): Xaa is C or S
  MOD_RES (16)..(17)..(18)..(19)..(20): Xaa is A or G
  MOD_RES (21)..(22)..(23)..(24): Xaa is A or G or is absent
RXGXGEVVMEPYVKLXXXXXXXXXFFLMSLSSLETPVXXAKPI

SEQ ID NO: 43244 - protein, 35 aa, Artificial Sequence
  GFR-binding peptide
  MOD_RES (2)..(4): Xaa is C or S
HXGXARVVMNPYVKLIVNSSDDFFLVSLSSLQTPA

SEQ ID NO: 43245 - protein, 40 aa, Artificial Sequence
  GFR-binding peptide
  MOD_RES (1)..(3)..(36)..(37): Xaa is C or S
  MOD_RES (14)..(15)..(16)..(17)..(18): Xaa is A or G
  MOD_RES (19)..(20)..(21)..(22): Xaa is A or G or is absent
XKXSRVIMPYVKLXXXXXXXXXFFLISLSSLAQPVXXPAA

SEQ ID NO: 43246 - protein, 37 aa, Artificial Sequence
  GFR-binding peptide
  MOD_RES (31)..(32): Xaa is C or S
DVVMGPYVKLIIQQKDNFFLMSLSSMKTPTXXPGASG

SEQ ID NO: 43247 - protein, 38 aa, Artificial Sequence
  GFR-binding peptide
  MOD_RES (1)..(3)..(37)..(38): Xaa is C or S
  MOD_RES (15)..(16)..(17)..(18)..(19): Xaa is A or G
  MOD_RES (20)..(21)..(22)..(23): Xaa is A or G or is absent
XGXSRVVMNPYVKLXXXXXXXXXFFLVSLSSLKTPAXX

SEQ ID NO: 43248 - protein, 39 aa, Artificial Sequence
  GFR-binding peptide
  MOD_RES (1)..(3)..(37)..(38): Xaa is C or S
  MOD_RES (15)..(16)..(17)..(18)..(19): Xaa is A or G
  MOD_RES (20)..(21)..(22)..(23): Xaa is A or G or is absent
XGXRDVVMGPYVKLXXXXXXXXXFFLMSLSSMKTPTXXP

SEQ ID NO: 43249 - protein, 36 aa, Artificial Sequence
  GFR-binding peptide
  MOD_RES (1)..(3): Xaa is C or S
  MOD_RES (15)..(16)..(17)..(18)..(19): Xaa is A or G
  MOD_RES (20)..(21)..(22)..(23): Xaa is A or G or is absent
XGXSEVVMDPYVKLXXXXXXXXXFFLISLSSLRTPV

SEQ ID NO: 43250 - protein, 38 aa, Artificial Sequence
  GFR-binding peptide
  MOD_RES (1)..(3)..(34)..(35): Xaa is C or S
XKXSRVIMPYVKLVKPKRGVLFFISLSSLAQPVXXPAA

SEQ ID NO: 43251 - protein, 37 aa, Artificial Sequence
  GFR-binding peptide
  MOD_RES (33)..(34): Xaa is C or S
  MOD_RES (11)..(12)..(13)..(14)..(15): Xaa is A or G
  MOD_RES (16)..(17)..(18)..(19): Xaa is A or G or is absent
SVAMGPYVKLXXXXXXXXXFFLISLSSLKTPVXXAKS

SEQ ID NO: 43252 - protein, 43 aa, Artificial Sequence
  GFR-binding peptide
  MOD_RES (1)..(3)..(37): Xaa is C or S
  MOD_RES (15)..(16)..(17)..(18)..(19): Xaa is A or G
  MOD_RES (20)..(21)..(22)..(23): Xaa is A or G or is absent
XGXSRVVMNPYVKLXXXXXXXXXFFLVSLSSLKTPAXTPKTVH

SEQ ID NO: 43253 - protein, 39 aa, Artificial Sequence
  GFR-binding peptide
  MOD_RES (34)..(34): Xaa is C or S
KNHQLFPYVKLHQGQHPKIRFFLMSLSSEETPVXELGED

SEQ ID NO: 43254 - protein, 36 aa, Artificial Sequence
  GFR-binding peptide
  MOD_RES (1)..(35)..(36): Xaa is C or S
  MOD_RES (13)..(14)..(15)..(16)..(17): Xaa is A or G
  MOD_RES (18)..(19)..(20)..(21): Xaa is A or G or is absent
XSEVTMNPYVKLXXXXXXXXXFFLISLSSMKEPVXX

SEQ ID NO: 43255 - protein, 40 aa, Artificial Sequence
  GFR-binding peptide
  MOD_RES (1)..(3)..(37): Xaa is C or S
  MOD_RES (15)..(16)..(17)..(18)..(19): Xaa is A or G
  MOD_RES (20)..(21)..(22)..(23): Xaa is A or G or is absent
XEXKNHQLFPYVKLXXXXXXXXXFFLMSLSSEETPVXELG

SEQ ID NO: 43256 - protein, 41 aa, Artificial Sequence
  GFR-binding peptide
  MOD_RES (2)..(36): Xaa is C or S
  MOD_RES (14)..(15)..(16)..(17)..(18): Xaa is A or G
  MOD_RES (19)..(20)..(21)..(22): Xaa is A or G or is absent
EXKNHQLFPYVKLXXXXXXXXXFFLMSLSSEETPVXELGED

SEQ ID NO: 43257 - protein, 44 aa, Artificial Sequence
  GFR-binding peptide
  MOD_RES (2)..(4)..(38)..(39): Xaa is C or S
  MOD_RES (16)..(17)..(18)..(19)..(20): Xaa is A or G
  MOD_RES (21)..(22)..(23)..(24): Xaa is A or G or is absent
HXGXARVVMNPYVKLXXXXXXXXXFFLVSLSSLQTPAXXPKPVT

SEQ ID NO: 43258 - protein, 30 aa, Artificial Sequence
  GFR-binding peptide
EVVMEPYVKLVVKDYEDFFLMSLSSLETPV

SEQ ID NO: 43259 - protein, 39 aa, Artificial Sequence
  GFR-binding peptide
  MOD_RES (1)..(3)..(38)..(39): Xaa is C or S
  MOD_RES (16)..(17)..(18)..(19)..(20): Xaa is A or G
  MOD_RES (21)..(22)..(23)..(24): Xaa is A or G or is absent
XGXEAVSMGEPYVKLXXXXXXXXXFFLVSLSSLKTPVXX

SEQ ID NO: 43260 - protein, 35 aa, Artificial Sequence
  GFR-binding peptide
  MOD_RES (1)..(32)..(33): Xaa is C or S
XSKVIMPYVKLIKPTKGILFFISLSSLDQSVXXPS

SEQ ID NO: 43261 - protein, 33 aa, Artificial Sequence
  GFR-binding peptide
  MOD_RES (1)..(1): Xaa is C or S
  MOD_RES (12)..(13)..(14)..(15)..(16): Xaa is A or G
  MOD_RES (17)..(18)..(19)..(20): Xaa is A or G or is absent
XEEVIMPYVKLXXXXXXXXXFFLMSLSSTKVPA

SEQ ID NO: 43262 - protein, 40 aa, Artificial Sequence
  GFR-binding peptide
  MOD_RES (1)..(3)..(36)..(37): Xaa is C or S
  MOD_RES (14)..(15)..(16)..(17)..(18): Xaa is A or G
  MOD_RES (19)..(20)..(21)..(22): Xaa is A or G or is absent
XKXSKVIMPYVKLXXXXXXXXXFFLISLSSLDQSVXXPSA

SEQ ID NO: 43263 - protein, 38 aa, Artificial Sequence
  GFR-binding peptide
  MOD_RES (2)..(4)..(36)..(37): Xaa is C or S
RXAXSEVTMNPYVKLVVNKNEDFFLISLSSMKEPVXXP

SEQ ID NO: 43264 - protein, 34 aa, Artificial Sequence
  GFR-binding peptide
  MOD_RES (2)..(2): Xaa is C or S
  MOD_RES (13)..(14)..(15)..(16)..(17): Xaa is A or G
  MOD_RES (18)..(19)..(20)..(21): Xaa is A or G or is absent
KXSKVVMPYVKLXXXXXXXXXFFLISLSSLDQPV

SEQ ID NO: 43265 - protein, 35 aa, Artificial Sequence
  GFR-binding peptide
  MOD_RES (2)..(35): Xaa is C or S
GXEAVSMGEPYVKLTPVGMDDFFLVSLSSLKTPVX

SEQ ID NO: 43266 - protein, 39 aa, Artificial Sequence
  GFR-binding peptide
  MOD_RES (33)..(34): Xaa is C or S
  MOD_RES (11)..(12)..(13)..(14)..(15): Xaa is A or G
  MOD_RES (16)..(17)..(18)..(19): Xaa is A or G or is absent
SVAMGPYVKLXXXXXXXXXFFLISLSSLKTPVXXAKSAK

SEQ ID NO: 43267 - protein, 40 aa, Artificial Sequence
  GFR-binding peptide
  MOD_RES (2)..(4)..(38)..(39): Xaa is C or S
  MOD_RES (16)..(17)..(18)..(19)..(20): Xaa is A or G
  MOD_RES (21)..(22)..(23)..(24): Xaa is A or G or is absent
RXGXESVAMGPYVKLXXXXXXXXXFFLISLSSLKTPVXXA

SEQ ID NO: 43268 - protein, 37 aa, Artificial Sequence
  GFR-binding peptide
  MOD_RES (31)..(32): Xaa is C or S
RVVMNPYVKLIVNSSDDFFLVSLSSLQTPAXXPKPVT

SEQ ID NO: 43269 - protein, 44 aa, Artificial Sequence
  GFR-binding peptide
  MOD_RES (2)..(4)..(38)..(39): Xaa is C or S
  MOD_RES (16)..(17)..(18)..(19)..(20): Xaa is A or G
  MOD_RES (21)..(22)..(23)..(24): Xaa is A or G or is absent
RXGXGEVVMDPYVKLXXXXXXXXXFFLMSLSSLETPVXXAKPIK

SEQ ID NO: 43270 - protein, 40 aa, Artificial Sequence
  GFR-binding peptide
  MOD_RES (1)..(35)..(36): Xaa is C or S
  MOD_RES (13)..(14)..(15)..(16)..(17): Xaa is A or G
  MOD_RES (18)..(19)..(20)..(21): Xaa is A or G or is absent
XESVAMGPYVKLXXXXXXXXXFFLISLSSLKTPVXXAKSA

SEQ ID NO: 43271 - protein, 38 aa, Artificial Sequence
  GFR-binding peptide
  MOD_RES (32)..(32): Xaa is C or S
SRVVMNPYVKLIVNSSDDFFLVSLSSLKTPAXTPKTVH

SEQ ID NO: 43272 - protein, 37 aa, Artificial Sequence
  GFR-binding peptide
  MOD_RES (1)..(3)..(37): Xaa is C or S
  MOD_RES (15)..(16)..(17)..(18)..(19): Xaa is A or G
  MOD_RES (20)..(21)..(22)..(23): Xaa is A or G or is absent
XGXRDVVMGPYVKLXXXXXXXXXFFLMSLSSMKTPTX

SEQ ID NO: 43273 - protein, 41 aa, Artificial Sequence
  GFR-binding peptide
  MOD_RES (1)..(3)..(37)..(38): Xaa is C or S
  MOD_RES (15)..(16)..(17)..(18)..(19): Xaa is A or G
  MOD_RES (20)..(21)..(22)..(23): Xaa is A or G or is absent
XGXAEVVMDPYVKLXXXXXXXXXFFLISLSSLRAPVXXSAP

SEQ ID NO: 43274 - protein, 40 aa, Artificial Sequence
  GFR-binding peptide
  MOD_RES (2)..(35)..(36): Xaa is C or S
GXEAVSMGEPYVKLTPVGMDDFFLVSLSSLKTPVXXAKGV

SEQ ID NO: 43275 - protein, 36 aa, Artificial Sequence
  GFR-binding peptide
  MOD_RES (2)..(34)..(35): Xaa is C or S
AXSEVTMNPYVKLVVNKNEDFFLISLSSMKEPVXXP

SEQ ID NO: 43276 - protein, 37 aa, Artificial Sequence
  GFR-binding peptide
  MOD_RES (34)..(34): Xaa is C or S
  MOD_RES (12)..(13)..(14)..(15)..(16): Xaa is A or G
  MOD_RES (17)..(18)..(19)..(20): Xaa is A or G or is absent
SRVVMNPYVKLXXXXXXXXXFFLVSLSSLKTPAXTPK

SEQ ID NO: 43277 - protein, 36 aa, Artificial Sequence
  GFR-binding peptide
  MOD_RES (2)..(33)..(34): Xaa is C or S
KXSRVIMPYVKLVKPKRGVLFFISLSSLAQPVXXPA

SEQ ID NO: 43278 - protein, 36 aa, Artificial Sequence
  GFR-binding peptide
  MOD_RES (2)..(35)..(36): Xaa is C or S
GXEAVSMGEPYVKLTPVGMDDFFLVSLSSLKTPVXX

SEQ ID NO: 43279 - protein, 41 aa, Artificial Sequence
  GFR-binding peptide
  MOD_RES (1)..(3)..(35)..(36): Xaa is C or S
XGXSEVVMDPYVKLVVNNASDFFLISLSSLRTPVXXTPPTS

SEQ ID NO: 43280 - protein, 32 aa, Artificial Sequence
  GFR-binding peptide
HEELRPYVKLLKPKKRVYEFFLVSLSSHHVRS

SEQ ID NO: 43281 - protein, 35 aa, Artificial Sequence
  GFR-binding peptide
  MOD_RES (2)..(4)..(35): Xaa is C or S
SXKXSKVIMPYVKLIKPTKGILFFISLSSLDQSVX

SEQ ID NO: 43282 - protein, 42 aa, Artificial Sequence
  GFR-binding peptide
  MOD_RES (1)..(3)..(37)..(38): Xaa is C or S
  MOD_RES (15)..(16)..(17)..(18)..(19): Xaa is A or G
  MOD_RES (20)..(21)..(22)..(23): Xaa is A or G or is absent
XGXARVVMNPYVKLXXXXXXXXXFFLVSLSSLQTPAXXPKPV

SEQ ID NO: 43283 - protein, 34 aa, Artificial Sequence
  GFR-binding peptide
  MOD_RES (1)..(32)..(33): Xaa is C or S
XSKVVMPYVKLVKPTRGVLFFISLSSLDQPVXXP

SEQ ID NO: 43284 - protein, 33 aa, Artificial Sequence
  GFR-binding peptide
  MOD_RES (32)..(33): Xaa is C or S
RDVVMGPYVKLIIQQKDNFFLMSLSSMKTPTXX

SEQ ID NO: 43285 - protein, 39 aa, Artificial Sequence
  GFR-binding peptide
  MOD_RES (2)..(35)..(36): Xaa is C or S
  MOD_RES (13)..(14)..(15)..(16)..(17): Xaa is A or G
  MOD_RES (18)..(19)..(20)..(21): Xaa is A or G or is absent
KXSKVIMPYVKLXXXXXXXXXFFLISLSSLDQSVXXPSA

SEQ ID NO: 43286 - protein, 37 aa, Artificial Sequence
  GFR-binding peptide
  MOD_RES (1)..(3)..(35)..(36): Xaa is C or S
XGXAKVVMNPYVKLIVNNSSDFFLVSLSSLKTPAXXA

SEQ ID NO: 43287 - protein, 39 aa, Artificial Sequence
  GFR-binding peptide
  MOD_RES (2)..(36)..(37): Xaa is C or S
  MOD_RES (14)..(15)..(16)..(17)..(18): Xaa is A or G
  MOD_RES (19)..(20)..(21)..(22): Xaa is A or G or is absent
GXARVVMNPYVKLXXXXXXXXXFFLVSLSSLQTPAXXPK

SEQ ID NO: 43288 - protein, 39 aa, Artificial Sequence
  GFR-binding peptide
  MOD_RES (1)..(33): Xaa is C or S
XSRVVMNPYVKLIVNSSDDFFLVSLSSLKTPAXTPKTVH

SEQ ID NO: 43289 - protein, 40 aa, Artificial Sequence
  GFR-binding peptide
  MOD_RES (34)..(34): Xaa is C or S
  MOD_RES (12)..(13)..(14)..(15)..(16): Xaa is A or G
  MOD_RES (17)..(18)..(19)..(20): Xaa is A or G or is absent
SRVVMNPYVKLXXXXXXXXXFFLVSLSSLKTPAXTPKTVH

SEQ ID NO: 43290 - protein, 43 aa, Artificial Sequence
  GFR-binding peptide
  MOD_RES (2)..(39): Xaa is C or S
AXELHEELRPYVKLLKPKKRVYEFFLVSLSSHHVRSPQXKVSS

SEQ ID NO: 43291 - protein, 37 aa, Artificial Sequence
  GFR-binding peptide
  MOD_RES (1)..(33)..(34): Xaa is C or S
XARVVMNPYVKLIVNSSDDFFLVSLSSLQTPAXXPKP

SEQ ID NO: 43292 - protein, 35 aa, Artificial Sequence
  GFR-binding peptide
  MOD_RES (33)..(33): Xaa is C or S
NHQLFPYVKLHQGQHPKIRFFLMSLSSEETPVXEL

SEQ ID NO: 43293 - protein, 34 aa, Artificial Sequence
  GFR-binding peptide
  MOD_RES (1)..(34): Xaa is C or S
  MOD_RES (12)..(13)..(14)..(15)..(16): Xaa is A or G
  MOD_RES (17)..(18)..(19)..(20): Xaa is A or G or is absent
XEEVIMPYVKLXXXXXXXXXFFLMSLSSTKVPAX

SEQ ID NO: 43294 - protein, 36 aa, Artificial Sequence
  GFR-binding peptide
  MOD_RES (1)..(33)..(34): Xaa is C or S
XSEVTMNPYVKLVVNKNEDFFLISLSSMKEPVXXPE

SEQ ID NO: 43295 - protein, 40 aa, Artificial Sequence
  GFR-binding peptide
  MOD_RES (1)..(35): Xaa is C or S
  MOD_RES (13)..(14)..(15)..(16)..(17): Xaa is A or G
  MOD_RES (18)..(19)..(20)..(21): Xaa is A or G or is absent
XKNHQLFPYVKLXXXXXXXXXFFLMSLSSEETPVXELGED

SEQ ID NO: 43296 - protein, 41 aa, Artificial Sequence
  GFR-binding peptide
  MOD_RES (1)..(3)..(37): Xaa is C or S
  MOD_RES (15)..(16)..(17)..(18)..(19): Xaa is A or G
  MOD_RES (20)..(21)..(22)..(23): Xaa is A or G or is absent
XGXSRVVMNPYVKLXXXXXXXXXFFLVSLSSLKTPAXTPKT

SEQ ID NO: 43297 - protein, 36 aa, Artificial Sequence
  GFR-binding peptide
  MOD_RES (1)..(1): Xaa is C or S
XELHEELRPYVKLLKPKKRVYEFFLVSLSSHHVRSP

SEQ ID NO: 43298 - protein, 35 aa, Artificial Sequence
  GFR-binding peptide
  MOD_RES (32)..(33): Xaa is C or S
SEVTMNPYVKLVVNKNEDFFLISLSSMKEPVXXPE

SEQ ID NO: 43299 - protein, 34 aa, Artificial Sequence
  GFR-binding peptide
  MOD_RES (31)..(32): Xaa is C or S
SKVIMPYVKLIKPTKGILFFISLSSLDQSVXXPS

SEQ ID NO: 43300 - protein, 41 aa, Artificial Sequence
  GFR-binding peptide
  MOD_RES (2)..(36)..(37): Xaa is C or S
  MOD_RES (14)..(15)..(16)..(17)..(18): Xaa is A or G
  MOD_RES (19)..(20)..(21)..(22): Xaa is A or G or is absent
GXAEVVMDPYVKLXXXXXXXXXFFLISLSSLRAPVXXSAPA

SEQ ID NO: 43301 - protein, 39 aa, Artificial Sequence
  GFR-binding peptide
  MOD_RES (2)..(33)..(34): Xaa is C or S
KXSRVIMPYVKLVKPKRGVLFFISLSSLAQPVXXPAASA

SEQ ID NO: 43302 - protein, 38 aa, Artificial Sequence
  GFR-binding peptide
  MOD_RES (34)..(35): Xaa is C or S
  MOD_RES (12)..(13)..(14)..(15)..(16): Xaa is A or G
  MOD_RES (17)..(18)..(19)..(20): Xaa is A or G or is absent
SRVVMNPYVKLXXXXXXXXXFFLVSLSSLKTPAXXPKP

SEQ ID NO: 43303 - protein, 34 aa, Artificial Sequence
  GFR-binding peptide
  MOD_RES (1)..(32)..(33): Xaa is C or S
XEEVIMPYVKLLLVRGNDFFLMSLSSTKVPAXXT

SEQ ID NO: 43304 - protein, 34 aa, Artificial Sequence
  GFR-binding peptide
  MOD_RES (32)..(33): Xaa is C or S
AEVVMDPYVKLVVNNAADFFLISLSSLRAPVXXS

SEQ ID NO: 43305 - protein, 42 aa, Artificial Sequence
  GFR-binding peptide
  MOD_RES (1)..(3)..(37)..(38): Xaa is C or S
  MOD_RES (15)..(16)..(17)..(18)..(19): Xaa is A or G
  MOD_RES (20)..(21)..(22)..(23): Xaa is A or G or is absent
XGXAKVVMNPYVKLXXXXXXXXXFFLVSLSSLKTPAXXAKPV

SEQ ID NO: 43306 - protein, 37 aa, Artificial Sequence
  GFR-binding peptide
  MOD_RES (1)..(3)..(37): Xaa is C or S
  MOD_RES (15)..(16)..(17)..(18)..(19): Xaa is A or G
  MOD_RES (20)..(21)..(22)..(23): Xaa is A or G or is absent
XGXARVVMNPYVKLXXXXXXXXXFFLVSLSSLQTPAX

SEQ ID NO: 43307 - protein, 38 aa, Artificial Sequence
  GFR-binding peptide
  MOD_RES (33)..(34): Xaa is C or S
  MOD_RES (11)..(12)..(13)..(14)..(15): Xaa is A or G
  MOD_RES (16)..(17)..(18)..(19): Xaa is A or G or is absent
EEVIMPYVKLXXXXXXXXXFFLMSLSSTKVPAXXTSPV

SEQ ID NO: 43308 - protein, 38 aa, Artificial Sequence
  GFR-binding peptide
  MOD_RES (2)..(4)..(38): Xaa is C or S
  MOD_RES (16)..(17)..(18)..(19)..(20): Xaa is A or G
  MOD_RES (21)..(22)..(23)..(24): Xaa is A or G or is absent
RXAXSEVTMNPYVKLXXXXXXXXXFFLISLSSMKEPVX

SEQ ID NO: 43309 - protein, 36 aa, Artificial Sequence
  GFR-binding peptide
  MOD_RES (36)..(36): Xaa is C or S
LHEELRPYVKLLKPKKRVYEFFLVSLSSHHVRSPQX

SEQ ID NO: 43310 - protein, 40 aa, Artificial Sequence
  GFR-binding peptide
  MOD_RES (2)..(4)..(36)..(37): Xaa is C or S
HXGXAKVVMNPYVKLIVNNSSDFFLVSLSSLKTPAXXAKP

SEQ ID NO: 43311 - protein, 35 aa, Artificial Sequence
  GFR-binding peptide
  MOD_RES (2)..(2): Xaa is C or S
  MOD_RES (14)..(15)..(16)..(17)..(18): Xaa is A or G
  MOD_RES (19)..(20)..(21)..(22): Xaa is A or G or is absent
GXAEVVMDPYVKLXXXXXXXXXFFLISLSSLRAPV

SEQ ID NO: 43312 - protein, 34 aa, Artificial Sequence
  GFR-binding peptide
  MOD_RES (1)..(33)..(34): Xaa is C or S
XSRVVMNPYVKLIVNSSDDFFLVSLSSLKTPAXX

SEQ ID NO: 43313 - protein, 41 aa, Artificial Sequence
  GFR-binding peptide
  MOD_RES (2)..(4)..(37)..(38): Xaa is C or S
  MOD_RES (15)..(16)..(17)..(18)..(19): Xaa is A or G
  MOD_RES (20)..(21)..(22)..(23): Xaa is A or G or is absent
SXKXSRVIMPYVKLXXXXXXXXXFFLISLSSLAQPVXXPAA

SEQ ID NO: 43314 - protein, 35 aa, Artificial Sequence
  GFR-binding peptide
  MOD_RES (34)..(35): Xaa is C or S
  MOD_RES (12)..(13)..(14)..(15)..(16): Xaa is A or G
  MOD_RES (17)..(18)..(19)..(20): Xaa is A or G or is absent
SRVVMNPYVKLXXXXXXXXXFFLVSLSSLKTPAXX

SEQ ID NO: 43315 - protein, 38 aa, Artificial Sequence
  GFR-binding peptide
  MOD_RES (1)..(33)..(34): Xaa is C or S
XAEVVMDPYVKLVVNNAADFFLISLSSLRAPVXXSAPA

SEQ ID NO: 43316 - protein, 37 aa, Artificial Sequence
  GFR-binding peptide
  MOD_RES (36)..(36): Xaa is C or S
LHEELRPYVKLLKPKKRVYEFFLVSLSSHHVRSPQXK

SEQ ID NO: 43317 - protein, 38 aa, Artificial Sequence
  GFR-binding peptide
  MOD_RES (1)..(35)..(36): Xaa is C or S
  MOD_RES (13)..(14)..(15)..(16)..(17): Xaa is A or G
  MOD_RES (18)..(19)..(20)..(21): Xaa is A or G or is absent
XSRVVMNPYVKLXXXXXXXXXFFLVSLSSLKTPAXXPK

SEQ ID NO: 43318 - protein, 36 aa, Artificial Sequence
  GFR-binding peptide
  MOD_RES (2)..(4)..(35)..(36): Xaa is C or S
SXKXSKVVMPYVKLVKPTRGVLFFISLSSLDQPVXX

SEQ ID NO: 43319 - protein, 37 aa, Artificial Sequence
  GFR-binding peptide
  MOD_RES (1)..(33)..(34): Xaa is C or S
XGEVVMEPYVKLVVKDYEDFFLMSLSSLETPVXXAKP

SEQ ID NO: 43320 - protein, 42 aa, Artificial Sequence
  GFR-binding peptide
  MOD_RES (2)..(4)..(38)..(39): Xaa is C or S
  MOD_RES (16)..(17)..(18)..(19)..(20): Xaa is A or G
  MOD_RES (21)..(22)..(23)..(24): Xaa is A or G or is absent
HXGXSRVVMNPYVKLXXXXXXXXXFFLVSLSSLKTPAXXPKP

SEQ ID NO: 43321 - protein, 38 aa, Artificial Sequence
  GFR-binding peptide
  MOD_RES (1)..(3)..(37)..(38): Xaa is C or S
  MOD_RES (15)..(16)..(17)..(18)..(19): Xaa is A or G
  MOD_RES (20)..(21)..(22)..(23): Xaa is A or G or is absent
XGXGEVVMEPYVKLXXXXXXXXXFFLMSLSSLETPVXX

SEQ ID NO: 43322 - protein, 33 aa, Artificial Sequence
  GFR-binding peptide
  MOD_RES (33)..(33): Xaa is C or S
  MOD_RES (11)..(12)..(13)..(14)..(15): Xaa is A or G
  MOD_RES (16)..(17)..(18)..(19): Xaa is A or G or is absent
SKVIMPYVKLXXXXXXXXXFFLISLSSLDQSVX

SEQ ID NO: 43323 - protein, 36 aa, Artificial Sequence
  GFR-binding peptide
ELHEELRPYVKLLKPKKRVYEFFLVSLSSHHVRSPQ

SEQ ID NO: 43324 - protein, 34 aa, Artificial Sequence
  GFR-binding peptide
  MOD_RES (33)..(34): Xaa is C or S
  MOD_RES (11)..(12)..(13)..(14)..(15): Xaa is A or G
  MOD_RES (16)..(17)..(18)..(19): Xaa is A or G or is absent
SKVIMPYVKLXXXXXXXXXFFLISLSSLDQSVXX

SEQ ID NO: 43325 - protein, 38 aa, Artificial Sequence
  GFR-binding peptide
  MOD_RES (33)..(34): Xaa is C or S
  MOD_RES (11)..(12)..(13)..(14)..(15): Xaa is A or G
  MOD_RES (16)..(17)..(18)..(19): Xaa is A or G or is absent
RVVMNPYVKLXXXXXXXXXFFLVSLSSLKTPAXXPKPV

SEQ ID NO: 43326 - protein, 38 aa, Artificial Sequence
  GFR-binding peptide
  MOD_RES (1)..(33)..(34): Xaa is C or S
XSEVVMDPYVKLVVNNASDFFLISLSSLRTPVXXTPPT

SEQ ID NO: 43327 - protein, 42 aa, Artificial Sequence
  GFR-binding peptide
  MOD_RES (2)..(36)..(37): Xaa is C or S
  MOD_RES (14)..(15)..(16)..(17)..(18): Xaa is A or G
  MOD_RES (19)..(20)..(21)..(22): Xaa is A or G or is absent
GXAEVVMDPYVKLXXXXXXXXXFFLISLSSLRAPVXXSAPAA

SEQ ID NO: 43328 - protein, 34 aa, Artificial Sequence
  GFR-binding peptide
  MOD_RES (1)..(33)..(34): Xaa is C or S
XESVAMGPYVKLYTVVGKDFFLISLSSLKTPVXX

SEQ ID NO: 43329 - protein, 33 aa, Artificial Sequence
  GFR-binding peptide
  MOD_RES (33)..(33): Xaa is C or S
NHQLFPYVKLHQGQHPKIRFFLMSLSSEETPVX

SEQ ID NO: 43330 - protein, 40 aa, Artificial Sequence
  GFR-binding peptide
  MOD_RES (34)..(35): Xaa is C or S
  MOD_RES (12)..(13)..(14)..(15)..(16): Xaa is A or G
  MOD_RES (17)..(18)..(19)..(20): Xaa is A or G or is absent
AEVVMDPYVKLXXXXXXXXXFFLISLSSLRAPVXXSAPAA

SEQ ID NO: 43331 - protein, 36 aa, Artificial Sequence
  GFR-binding peptide
  MOD_RES (2)..(35)..(36): Xaa is C or S
  MOD_RES (13)..(14)..(15)..(16)..(17): Xaa is A or G
  MOD_RES (18)..(19)..(20)..(21): Xaa is A or G or is absent
GXEEVIMPYVKLXXXXXXXXXFFLMSLSSTKVPAXX

SEQ ID NO: 43332 - protein, 36 aa, Artificial Sequence
  GFR-binding peptide
  MOD_RES (2)..(36): Xaa is C or S
  MOD_RES (14)..(15)..(16)..(17)..(18): Xaa is A or G
  MOD_RES (19)..(20)..(21)..(22): Xaa is A or G or is absent
GXSRVVMNPYVKLXXXXXXXXXFFLVSLSSLKTPAX

SEQ ID NO: 43333 - protein, 35 aa, Artificial Sequence
  GFR-binding peptide
  MOD_RES (1)..(33)..(34): Xaa is C or S
XRDVVMGPYVKLIIQQKDNFFLMSLSSMKTPTXXP

SEQ ID NO: 43334 - protein, 34 aa, Artificial Sequence
  GFR-binding peptide
  MOD_RES (33)..(34): Xaa is C or S
  MOD_RES (11)..(12)..(13)..(14)..(15): Xaa is A or G
  MOD_RES (16)..(17)..(18)..(19): Xaa is A or G or is absent
KVVMNPYVKLXXXXXXXXXFFLVSLSSLKTPAXX

SEQ ID NO: 43335 - protein, 39 aa, Artificial Sequence
  GFR-binding peptide
  MOD_RES (2)..(34)..(35): Xaa is C or S
GXESVAMGPYVKLYTVVGKDFFLISLSSLKTPVXXAKSA

SEQ ID NO: 43336 - protein, 39 aa, Artificial Sequence
  GFR-binding peptide
  MOD_RES (2)..(4)..(38): Xaa is C or S
RXEXKNHQLFPYVKLHQGQHPKIRFFLMSLSSEETPVXE

SEQ ID NO: 43337 - protein, 35 aa, Artificial Sequence
  GFR-binding peptide
  MOD_RES (2)..(2): Xaa is C or S
  MOD_RES (14)..(15)..(16)..(17)..(18): Xaa is A or G
  MOD_RES (19)..(20)..(21)..(22): Xaa is A or G or is absent
GXGEVVMEPYVKLXXXXXXXXXFFLMSLSSLETPV

SEQ ID NO: 43338 - protein, 34 aa, Artificial Sequence
  GFR-binding peptide
  MOD_RES (33)..(34): Xaa is C or S
  MOD_RES (11)..(12)..(13)..(14)..(15): Xaa is A or G
  MOD_RES (16)..(17)..(18)..(19): Xaa is A or G or is absent
RVVMNPYVKLXXXXXXXXXFFLVSLSSLKTPAXX

SEQ ID NO: 43339 - protein, 32 aa, Artificial Sequence
  GFR-binding peptide
  MOD_RES (31)..(31): Xaa is C or S
RVVMNPYVKLIVNSSDDFFLVSLSSLKTPAXT

SEQ ID NO: 43340 - protein, 41 aa, Artificial Sequence
  GFR-binding peptide
  MOD_RES (1)..(3)..(35)..(36): Xaa is C or S
XGXGEVVMEPYVKLVVKDYEDFFLMSLSSLETPVXXAKPIS

SEQ ID NO: 43341 - protein, 37 aa, Artificial Sequence
  GFR-binding peptide
  MOD_RES (1)..(34)..(35): Xaa is C or S
  MOD_RES (12)..(13)..(14)..(15)..(16): Xaa is A or G
  MOD_RES (17)..(18)..(19)..(20): Xaa is A or G or is absent
XEEVIMPYVKLXXXXXXXXXFFLMSLSSTKVPAXXTS

SEQ ID NO: 43342 - protein, 40 aa, Artificial Sequence
  GFR-binding peptide
  MOD_RES (2)..(4)..(38): Xaa is C or S
RXEXKNHQLFPYVKLHQGQHPKIRFFLMSLSSEETPVXEL

SEQ ID NO: 43343 - protein, 37 aa, Artificial Sequence
  GFR-binding peptide
  MOD_RES (2)..(36)..(37): Xaa is C or S
  MOD_RES (14)..(15)..(16)..(17)..(18): Xaa is A or G
  MOD_RES (19)..(20)..(21)..(22): Xaa is A or G or is absent
GXRDVVMGPYVKLXXXXXXXXXFFLMSLSSMKTPTXX

SEQ ID NO: 43344 - protein, 32 aa, Artificial Sequence
  GFR-binding peptide
  MOD_RES (11)..(12)..(13)..(14)..(15): Xaa is A or G
  MOD_RES (16)..(17)..(18)..(19): Xaa is A or G or is absent
SKVVMPYVKLXXXXXXXXXFFLISLSSLDQPV

SEQ ID NO: 43345 - protein, 33 aa, Artificial Sequence
  GFR-binding peptide
  MOD_RES (2)..(33): Xaa is C or S
GXEEVIMPYVKLLLVRGNDFFLMSLSSTKVPAX

SEQ ID NO: 43346 - protein, 35 aa, Artificial Sequence
  GFR-binding peptide
  MOD_RES (32)..(33): Xaa is C or S
RDVVMGPYVKLIIQQKDNFFLMSLSSMKTPTXXPG

SEQ ID NO: 43347 - protein, 38 aa, Artificial Sequence
  GFR-binding peptide
  MOD_RES (1)..(3)..(37)..(38): Xaa is C or S
  MOD_RES (15)..(16)..(17)..(18)..(19): Xaa is A or G
  MOD_RES (20)..(21)..(22)..(23): Xaa is A or G or is absent
XGXESVAMGPYVKLXXXXXXXXXFFLISLSSLKTPVXX

SEQ ID NO: 43348 - protein, 37 aa, Artificial Sequence
  GFR-binding peptide
  MOD_RES (2)..(36)..(37): Xaa is C or S
  MOD_RES (14)..(15)..(16)..(17)..(18): Xaa is A or G
  MOD_RES (19)..(20)..(21)..(22): Xaa is A or G or is absent
GXAEVVMDPYVKLXXXXXXXXXFFLISLSSLRAPVXX

SEQ ID NO: 43349 - protein, 36 aa, Artificial Sequence
  GFR-binding peptide
  MOD_RES (33)..(34): Xaa is C or S
  MOD_RES (11)..(12)..(13)..(14)..(15): Xaa is A or G
  MOD_RES (16)..(17)..(18)..(19): Xaa is A or G or is absent
SVAMGPYVKLXXXXXXXXXFFLISLSSLKTPVXXAK

SEQ ID NO: 43350 - protein, 35 aa, Artificial Sequence
  GFR-binding peptide
  MOD_RES (1)..(35): Xaa is C or S
  MOD_RES (13)..(14)..(15)..(16)..(17): Xaa is A or G
  MOD_RES (18)..(19)..(20)..(21): Xaa is A or G or is absent
XKNHQLFPYVKLXXXXXXXXXFFLMSLSSEETPVX

SEQ ID NO: 43351 - protein, 39 aa, Artificial Sequence
  GFR-binding peptide
  MOD_RES (1)..(3)..(37)..(38): Xaa is C or S
  MOD_RES (15)..(16)..(17)..(18)..(19): Xaa is A or G
  MOD_RES (20)..(21)..(22)..(23): Xaa is A or G or is absent
XGXARVVMNPYVKLXXXXXXXXXFFLVSLSSLQTPAXXP

SEQ ID NO: 43352 - protein, 36 aa, Artificial Sequence
  GFR-binding peptide
  MOD_RES (34)..(34): Xaa is C or S
KNHQLFPYVKLHQGQHPKIRFFLMSLSSEETPVXEL

SEQ ID NO: 43353 - protein, 35 aa, Artificial Sequence
  GFR-binding peptide
  MOD_RES (2)..(35): Xaa is C or S
  MOD_RES (13)..(14)..(15)..(16)..(17): Xaa is A or G
  MOD_RES (18)..(19)..(20)..(21): Xaa is A or G or is absent
KXSKVIMPYVKLXXXXXXXXXFFLISLSSLDQSVX

SEQ ID NO: 43354 - protein, 33 aa, Artificial Sequence
  GFR-binding peptide
  MOD_RES (1)..(1): Xaa is C or S
XEAVSMGEPYVKLTPVGMDDFFLVSLSSLKTPV

SEQ ID NO: 43355 - protein, 39 aa, Artificial Sequence
  GFR-binding peptide
  MOD_RES (2)..(34)..(35): Xaa is C or S
GXRDVVMGPYVKLIIQQKDNFFLMSLSSMKTPTXXPGAS

SEQ ID NO: 43356 - protein, 43 aa, Artificial Sequence
  GFR-binding peptide
  MOD_RES (1)..(3)..(37)..(38): Xaa is C or S
  MOD_RES (15)..(16)..(17)..(18)..(19): Xaa is A or G
  MOD_RES (20)..(21)..(22)..(23): Xaa is A or G or is absent
XGXSRVVMNPYVKLXXXXXXXXXFFLVSLSSLKTPAXXPKPVH

SEQ ID NO: 43357 - protein, 34 aa, Artificial Sequence
  GFR-binding peptide
  MOD_RES (1)..(3)..(34): Xaa is C or S
XKXSRVIMPYVKLVKPKRGVLFFISLSSLAQPVX

SEQ ID NO: 43358 - protein, 39 aa, Artificial Sequence
  GFR-binding peptide
  MOD_RES (2)..(35)..(36): Xaa is C or S
GXEAVSMGEPYVKLTPVGMDDFFLVSLSSLKTPVXXAKG

SEQ ID NO: 43359 - protein, 40 aa, Artificial Sequence
  GFR-binding peptide
  MOD_RES (2)..(4)..(38)..(39): Xaa is C or S
  MOD_RES (16)..(17)..(18)..(19)..(20): Xaa is A or G
  MOD_RES (21)..(22)..(23)..(24): Xaa is A or G or is absent
RXGXSEVVMDPYVKLXXXXXXXXXFFLISLSSLRTPVXXT

SEQ ID NO: 43360 - protein, 32 aa, Artificial Sequence
  GFR-binding peptide
  MOD_RES (11)..(12)..(13)..(14)..(15): Xaa is A or G
  MOD_RES (16)..(17)..(18)..(19): Xaa is A or G or is absent
DVVMGPYVKLXXXXXXXXXFFLMSLSSMKTPT

SEQ ID NO: 43361 - protein, 39 aa, Artificial Sequence
  GFR-binding peptide
  MOD_RES (2)..(36): Xaa is C or S
  MOD_RES (14)..(15)..(16)..(17)..(18): Xaa is A or G
  MOD_RES (19)..(20)..(21)..(22): Xaa is A or G or is absent
GXSRVVMNPYVKLXXXXXXXXXFFLVSLSSLKTPAXTPK

SEQ ID NO: 43362 - protein, 39 aa, Artificial Sequence
  GFR-binding peptide
  MOD_RES (34)..(35): Xaa is C or S
  MOD_RES (12)..(13)..(14)..(15)..(16): Xaa is A or G
  MOD_RES (17)..(18)..(19)..(20): Xaa is A or G or is absent
GEVVMEPYVKLXXXXXXXXXFFLMSLSSLETPVXXAKPI

SEQ ID NO: 43363 - protein, 36 aa, Artificial Sequence
  GFR-binding peptide
  MOD_RES (2)..(34): Xaa is C or S
GXSRVVMNPYVKLIVNSSDDFFLVSLSSLKTPAXTP

SEQ ID NO: 43364 - protein, 39 aa, Artificial Sequence
  GFR-binding peptide
  MOD_RES (1)..(33)..(34): Xaa is C or S
XAKVVMNPYVKLIVNNSSDFFLVSLSSLKTPAXXAKPVA

SEQ ID NO: 43365 - protein, 42 aa, Artificial Sequence
  GFR-binding peptide
  MOD_RES (2)..(4)..(41): Xaa is C or S
AXAXELHEELRPYVKLLKPKKRVYEFFLVSLSSHHVRSPQXK

SEQ ID NO: 43366 - protein, 34 aa, Artificial Sequence
  GFR-binding peptide
  MOD_RES (1)..(33)..(34): Xaa is C or S
XSEVTMNPYVKLVVNKNEDFFLISLSSMKEPVXX

SEQ ID NO: 43367 - protein, 35 aa, Artificial Sequence
  GFR-binding peptide
  MOD_RES (1)..(3): Xaa is C or S
  MOD_RES (14)..(15)..(16)..(17)..(18): Xaa is A or G
  MOD_RES (19)..(20)..(21)..(22): Xaa is A or G or is absent
XKXSKVVMPYVKLXXXXXXXXXFFLISLSSLDQPV

SEQ ID NO: 43368 - protein, 40 aa, Artificial Sequence
  GFR-binding peptide
  MOD_RES (2)..(34)..(35): Xaa is C or S
GXRDVVMGPYVKLIIQQKDNFFLMSLSSMKTPTXXPGASG

SEQ ID NO: 43369 - protein, 41 aa, Artificial Sequence
  GFR-binding peptide
  MOD_RES (2)..(4)..(38)..(39): Xaa is C or S
  MOD_RES (16)..(17)..(18)..(19)..(20): Xaa is A or G
  MOD_RES (21)..(22)..(23)..(24): Xaa is A or G or is absent
RXGXESVAMGPYVKLXXXXXXXXXFFLISLSSLKTPVXXAK

SEQ ID NO: 43370 - protein, 40 aa, Artificial Sequence
  GFR-binding peptide
  MOD_RES (2)..(4)..(38)..(39): Xaa is C or S
  MOD_RES (16)..(17)..(18)..(19)..(20): Xaa is A or G
  MOD_RES (21)..(22)..(23)..(24): Xaa is A or G or is absent
HXGXAKVVMNPYVKLXXXXXXXXXFFLVSLSSLKTPAXXA

SEQ ID NO: 43371 - protein, 35 aa, Artificial Sequence
  GFR-binding peptide
  MOD_RES (1)..(3)..(35): Xaa is C or S
XAXSEVTMNPYVKLVVNKNEDFFLISLSSMKEPVX

SEQ ID NO: 43372 - protein, 39 aa, Artificial Sequence
  GFR-binding peptide
  MOD_RES (37)..(37): Xaa is C or S
  MOD_RES (13)..(14)..(15)..(16)..(17): Xaa is A or G
  MOD_RES (18)..(19)..(20)..(21): Xaa is A or G or is absent
ELHEELRPYVKLXXXXXXXXXFFLVSLSSHHVRSPQXKV

SEQ ID NO: 43373 - protein, 40 aa, Artificial Sequence
  GFR-binding peptide
  MOD_RES (34)..(35): Xaa is C or S
  MOD_RES (12)..(13)..(14)..(15)..(16): Xaa is A or G
  MOD_RES (17)..(18)..(19)..(20): Xaa is A or G or is absent
SRVVMNPYVKLXXXXXXXXXFFLVSLSSLKTPAXXPKPVH

SEQ ID NO: 43374 - protein, 34 aa, Artificial Sequence
  GFR-binding peptide
  MOD_RES (32)..(33): Xaa is C or S
ESVAMGPYVKLYTVVGKDFFLISLSSLKTPVXXA

SEQ ID NO: 43375 - protein, 42 aa, Artificial Sequence
  GFR-binding peptide
  MOD_RES (2)..(4)..(38): Xaa is C or S
  MOD_RES (16)..(17)..(18)..(19)..(20): Xaa is A or G
  MOD_RES (21)..(22)..(23)..(24): Xaa is A or G or is absent
HXGXSRVVMNPYVKLXXXXXXXXXFFLVSLSSLKTPAXTPKT

SEQ ID NO: 43376 - protein, 32 aa, Artificial Sequence
  GFR-binding peptide
  MOD_RES (31)..(32): Xaa is C or S
SKVIMPYVKLIKPTKGILFFISLSSLDQSVXX

SEQ ID NO: 43377 - protein, 33 aa, Artificial Sequence
  GFR-binding peptide
  MOD_RES (32)..(33): Xaa is C or S
AKVVMNPYVKLIVNNSSDFFLVSLSSLKTPAXX

SEQ ID NO: 43378 - protein, 33 aa, Artificial Sequence
  GFR-binding peptide
  MOD_RES (1)..(3): Xaa is C or S
XKXSKVVMPYVKLVKPTRGVLFFISLSSLDQPV

SEQ ID NO: 43379 - protein, 37 aa, Artificial Sequence
  GFR-binding peptide
  MOD_RES (33)..(34): Xaa is C or S
  MOD_RES (11)..(12)..(13)..(14)..(15): Xaa is A or G
  MOD_RES (16)..(17)..(18)..(19): Xaa is A or G or is absent
EVVMDPYVKLXXXXXXXXXFFLISLSSLRTPVXXTPP

SEQ ID NO: 43380 - protein, 38 aa, Artificial Sequence
  GFR-binding peptide
  MOD_RES (1)..(32)..(33): Xaa is C or S
XSRVIMPYVKLVKPKRGVLFFISLSSLAQPVXXPAASA

SEQ ID NO: 43381 - protein, 38 aa, Artificial Sequence
  GFR-binding peptide
  MOD_RES (33)..(34): Xaa is C or S
  MOD_RES (11)..(12)..(13)..(14)..(15): Xaa is A or G
  MOD_RES (16)..(17)..(18)..(19): Xaa is A or G or is absent
SRVIMPYVKLXXXXXXXXXFFLISLSSLAQPVXXPAAS

SEQ ID NO: 43382 - protein, 39 aa, Artificial Sequence
  GFR-binding peptide
  MOD_RES (33)..(34): Xaa is C or S
  MOD_RES (11)..(12)..(13)..(14)..(15): Xaa is A or G
  MOD_RES (16)..(17)..(18)..(19): Xaa is A or G or is absent
EVVMEPYVKLXXXXXXXXXFFLMSLSSLETPVXXAKPIS

SEQ ID NO: 43383 - protein, 33 aa, Artificial Sequence
  GFR-binding peptide
  MOD_RES (33)..(33): Xaa is C or S
  MOD_RES (11)..(12)..(13)..(14)..(15): Xaa is A or G
  MOD_RES (16)..(17)..(18)..(19): Xaa is A or G or is absent
SKVVMPYVKLXXXXXXXXXFFLISLSSLDQPVX

SEQ ID NO: 43384 - protein, 35 aa, Artificial Sequence
  GFR-binding peptide
  MOD_RES (35)..(35): Xaa is C or S
  MOD_RES (13)..(14)..(15)..(16)..(17): Xaa is A or G
  MOD_RES (18)..(19)..(20)..(21): Xaa is A or G or is absent
EAVSMGEPYVKLXXXXXXXXXFFLVSLSSLKTPVX

SEQ ID NO: 43385 - protein, 32 aa, Artificial Sequence
  GFR-binding peptide
  MOD_RES (1)..(32): Xaa is C or S
XSRVIMPYVKLVKPKRGVLFFISLSSLAQPVX

SEQ ID NO: 43386 - protein, 40 aa, Artificial Sequence
  GFR-binding peptide
  MOD_RES (2)..(4)..(38)..(39): Xaa is C or S
  MOD_RES (16)..(17)..(18)..(19)..(20): Xaa is A or G
  MOD_RES (21)..(22)..(23)..(24): Xaa is A or G or is absent
SXGXRDVVMGPYVKLXXXXXXXXXFFLMSLSSMKTPTXXP

SEQ ID NO: 43387 - protein, 35 aa, Artificial Sequence
  GFR-binding peptide
  MOD_RES (34)..(35): Xaa is C or S
  MOD_RES (12)..(13)..(14)..(15)..(16): Xaa is A or G
  MOD_RES (17)..(18)..(19)..(20): Xaa is A or G or is absent
AKVVMNPYVKLXXXXXXXXXFFLVSLSSLKTPAXX

SEQ ID NO: 43388 - protein, 31 aa, Artificial Sequence
  GFR-binding peptide
  MOD_RES (1)..(1): Xaa is C or S
XSKVVMPYVKLVKPTRGVLFFISLSSLDQPV

SEQ ID NO: 43389 - protein, 38 aa, Artificial Sequence
  GFR-binding peptide
  MOD_RES (33)..(34): Xaa is C or S
  MOD_RES (11)..(12)..(13)..(14)..(15): Xaa is A or G
  MOD_RES (16)..(17)..(18)..(19): Xaa is A or G or is absent
KVVMNPYVKLXXXXXXXXXFFLVSLSSLKTPAXXAKPV

SEQ ID NO: 43390 - protein, 36 aa, Artificial Sequence
  GFR-binding peptide
  MOD_RES (32)..(33): Xaa is C or S
AEVVMDPYVKLVVNNAADFFLISLSSLRAPVXXSAP

SEQ ID NO: 43391 - protein, 35 aa, Artificial Sequence
  GFR-binding peptide
  MOD_RES (2)..(33)..(34): Xaa is C or S
KXSRVIMPYVKLVKPKRGVLFFISLSSLAQPVXXP

SEQ ID NO: 43392 - protein, 40 aa, Artificial Sequence
  GFR-binding peptide
  MOD_RES (2)..(4)..(37)..(38): Xaa is C or S
  MOD_RES (15)..(16)..(17)..(18)..(19): Xaa is A or G
  MOD_RES (20)..(21)..(22)..(23): Xaa is A or G or is absent
SXKXSRVIMPYVKLXXXXXXXXXFFLISLSSLAQPVXXPA

SEQ ID NO: 43393 - protein, 38 aa, Artificial Sequence
  GFR-binding peptide
  MOD_RES (32)..(33): Xaa is C or S
SRVVMNPYVKLIVNSSDDFFLVSLSSLKTPAXXPKPVY

SEQ ID NO: 43394 - protein, 35 aa, Artificial Sequence
  GFR-binding peptide
  MOD_RES (1)..(3): Xaa is C or S
  MOD_RES (14)..(15)..(16)..(17)..(18): Xaa is A or G
  MOD_RES (19)..(20)..(21)..(22): Xaa is A or G or is absent
XKXSKVIMPYVKLXXXXXXXXXFFLISLSSLDQSV

SEQ ID NO: 43395 - protein, 33 aa, Artificial Sequence
  GFR-binding peptide
  MOD_RES (31)..(32): Xaa is C or S
SRVIMPYVKLVKPKRGVLFFISLSSLAQPVXXP

SEQ ID NO: 43396 - protein, 40 aa, Artificial Sequence
  GFR-binding peptide
  MOD_RES (35)..(36): Xaa is C or S
  MOD_RES (13)..(14)..(15)..(16)..(17): Xaa is A or G
  MOD_RES (18)..(19)..(20)..(21): Xaa is A or G or is absent
EAVSMGEPYVKLXXXXXXXXXFFLVSLSSLKTPVXXAKGV

SEQ ID NO: 43397 - protein, 32 aa, Artificial Sequence
  GFR-binding peptide
  MOD_RES (11)..(12)..(13)..(14)..(15): Xaa is A or G
  MOD_RES (16)..(17)..(18)..(19): Xaa is A or G or is absent
SVAMGPYVKLXXXXXXXXXFFLISLSSLKTPV

SEQ ID NO: 43398 - protein, 40 aa, Artificial Sequence
  GFR-binding peptide
  MOD_RES (2)..(36): Xaa is C or S
  MOD_RES (14)..(15)..(16)..(17)..(18): Xaa is A or G
  MOD_RES (19)..(20)..(21)..(22): Xaa is A or G or is absent
GXSRVVMNPYVKLXXXXXXXXXFFLVSLSSLKTPAXTPKT

SEQ ID NO: 43399 - protein, 40 aa, Artificial Sequence
  GFR-binding peptide
  MOD_RES (2)..(4)..(36)..(37): Xaa is C or S
RXGXSEVVMDPYVKLVVNNASDFFLISLSSLRTPVXXTPP

SEQ ID NO: 43400 - protein, 40 aa, Artificial Sequence
  GFR-binding peptide
  MOD_RES (2)..(34): Xaa is C or S
GXSRVVMNPYVKLIVNSSDDFFLVSLSSLKTPAXTPKTVH

SEQ ID NO: 43401 - protein, 33 aa, Artificial Sequence
  GFR-binding peptide
  MOD_RES (31)..(32): Xaa is C or S
RVVMNPYVKLIVNSSDDFFLVSLSSLKTPAXXP

SEQ ID NO: 43402 - protein, 39 aa, Artificial Sequence
  GFR-binding peptide
  MOD_RES (33)..(34): Xaa is C or S
  MOD_RES (11)..(12)..(13)..(14)..(15): Xaa is A or G
  MOD_RES (16)..(17)..(18)..(19): Xaa is A or G or is absent
EVVMDPYVKLXXXXXXXXXFFLISLSSLRTPVXXTPPTS

SEQ ID NO: 43403 - protein, 39 aa, Artificial Sequence
  GFR-binding peptide
  MOD_RES (2)..(36)..(37): Xaa is C or S
  MOD_RES (14)..(15)..(16)..(17)..(18): Xaa is A or G
  MOD_RES (19)..(20)..(21)..(22): Xaa is A or G or is absent
GXESVAMGPYVKLXXXXXXXXXFFLISLSSLKTPVXXAK

SEQ ID NO: 43404 - protein, 34 aa, Artificial Sequence
  GFR-binding peptide
  MOD_RES (1)..(3): Xaa is C or S
XGXSRVVMNPYVKLIVNSSDDFFLVSLSSLKTPA

SEQ ID NO: 43405 - protein, 36 aa, Artificial Sequence
  GFR-binding peptide
  MOD_RES (35)..(35): Xaa is C or S
  MOD_RES (11)..(12)..(13)..(14)..(15): Xaa is A or G
  MOD_RES (16)..(17)..(18)..(19): Xaa is A or G or is absent
HEELRPYVKLXXXXXXXXXFFLVSLSSHHVRSPQXK

SEQ ID NO: 43406 - protein, 38 aa, Artificial Sequence
  GFR-binding peptide
  MOD_RES (2)..(4)..(35)..(36): Xaa is C or S
SXKXSKVVMPYVKLVKPTRGVLFFISLSSLDQPVXXPS

SEQ ID NO: 43407 - protein, 38 aa, Artificial Sequence
  GFR-binding peptide
  MOD_RES (1)..(32)..(33): Xaa is C or S
XEEVIMPYVKLLLVRGNDFFLMSLSSTKVPAXXTSPVR

SEQ ID NO: 43408 - protein, 36 aa, Artificial Sequence
  GFR-binding peptide
  MOD_RES (1)..(3)..(35)..(36): Xaa is C or S
XGXAEVVMDPYVKLVVNNAADFFLISLSSLRAPVXX

SEQ ID NO: 43409 - protein, 33 aa, Artificial Sequence
  GFR-binding peptide
  MOD_RES (31)..(32): Xaa is C or S
EVVMDPYVKLVVNNASDFFLISLSSLRTPVXXT

SEQ ID NO: 43410 - protein, 36 aa, Artificial Sequence
  GFR-binding peptide
  MOD_RES (2)..(36): Xaa is C or S
  MOD_RES (14)..(15)..(16)..(17)..(18): Xaa is A or G
  MOD_RES (19)..(20)..(21)..(22): Xaa is A or G or is absent
GXAKVVMNPYVKLXXXXXXXXXFFLVSLSSLKTPAX

SEQ ID NO: 43411 - protein, 37 aa, Artificial Sequence
  GFR-binding peptide
  MOD_RES (33)..(33): Xaa is C or S
NHQLFPYVKLHQGQHPKIRFFLMSLSSEETPVXELGE

SEQ ID NO: 43412 - protein, 41 aa, Artificial Sequence
  GFR-binding peptide
  MOD_RES (1)..(3)..(35)..(36): Xaa is C or S
XGXAEVVMDPYVKLVVNNAADFFLISLSSLRAPVXXSAPAA

SEQ ID NO: 43413 - protein, 41 aa, Artificial Sequence
  GFR-binding peptide
  MOD_RES (2)..(36)..(37): Xaa is C or S
  MOD_RES (14)..(15)..(16)..(17)..(18): Xaa is A or G
  MOD_RES (19)..(20)..(21)..(22): Xaa is A or G or is absent
GXAKVVMNPYVKLXXXXXXXXXFFLVSLSSLKTPAXXAKPV

SEQ ID NO: 43414 - protein, 38 aa, Artificial Sequence
  GFR-binding peptide
  MOD_RES (2)..(35)..(36): Xaa is C or S
GXEAVSMGEPYVKLTPVGMDDFFLVSLSSLKTPVXXAK

SEQ ID NO: 43415 - protein, 38 aa, Artificial Sequence
  GFR-binding peptide
  MOD_RES (2)..(4)..(37)..(38): Xaa is C or S
  MOD_RES (15)..(16)..(17)..(18)..(19): Xaa is A or G
  MOD_RES (20)..(21)..(22)..(23): Xaa is A or G or is absent
LXGXEEVIMPYVKLXXXXXXXXXFFLMSLSSTKVPAXX

SEQ ID NO: 43416 - protein, 35 aa, Artificial Sequence
  GFR-binding peptide
  MOD_RES (1)..(35): Xaa is C or S
  MOD_RES (13)..(14)..(15)..(16)..(17): Xaa is A or G
  MOD_RES (18)..(19)..(20)..(21): Xaa is A or G or is absent
XSEVTMNPYVKLXXXXXXXXXFFLISLSSMKEPVX

SEQ ID NO: 43417 - protein, 42 aa, Artificial Sequence
  GFR-binding peptide
  MOD_RES (1)..(3)..(37)..(38): Xaa is C or S
  MOD_RES (15)..(16)..(17)..(18)..(19): Xaa is A or G
  MOD_RES (20)..(21)..(22)..(23): Xaa is A or G or is absent
XGXSEVVMDPYVKLXXXXXXXXXFFLISLSSLRTPVXXTPPT

SEQ ID NO: 43418 - protein, 33 aa, Artificial Sequence
  GFR-binding peptide
  MOD_RES (32)..(32): Xaa is C or S
SRVVMNPYVKLIVNSSDDFFLVSLSSLKTPAXT

SEQ ID NO: 43419 - protein, 32 aa, Artificial Sequence
  GFR-binding peptide
  MOD_RES (2)..(2): Xaa is C or S
KXSKVIMPYVKLIKPTKGILFFISLSSLDQSV

SEQ ID NO: 43420 - protein, 34 aa, Artificial Sequence
  GFR-binding peptide
  MOD_RES (33)..(34): Xaa is C or S
EAVSMGEPYVKLTPVGMDDFFLVSLSSLKTPVXX

SEQ ID NO: 43421 - protein, 35 aa, Artificial Sequence
  GFR-binding peptide
  MOD_RES (1)..(1): Xaa is C or S
  MOD_RES (14)..(15)..(16)..(17)..(18): Xaa is A or G
  MOD_RES (19)..(20)..(21)..(22): Xaa is A or G or is absent
XELHEELRPYVKLXXXXXXXXXFFLVSLSSHHVRS

SEQ ID NO: 43422 - protein, 34 aa, Artificial Sequence
  GFR-binding peptide
  MOD_RES (1)..(3): Xaa is C or S
XGXRDVVMGPYVKLIIQQKDNFFLMSLSSMKTPT

SEQ ID NO: 43423 - protein, 37 aa, Artificial Sequence
  GFR-binding peptide
  MOD_RES (33)..(34): Xaa is C or S
  MOD_RES (11)..(12)..(13)..(14)..(15): Xaa is A or G
  MOD_RES (16)..(17)..(18)..(19): Xaa is A or G or is absent
EVVMEPYVKLXXXXXXXXXFFLMSLSSLETPVXXAKP

SEQ ID NO: 43424 - protein, 38 aa, Artificial Sequence
  GFR-binding peptide
  MOD_RES (2)..(34)..(35): Xaa is C or S
GXARVVMNPYVKLIVNSSDDFFLVSLSSLQTPAXXPKP

SEQ ID NO: 43425 - protein, 39 aa, Artificial Sequence
  GFR-binding peptide
  MOD_RES (2)..(4)..(35)..(36): Xaa is C or S
SXKXSKVIMPYVKLIKPTKGILFFISLSSLDQSVXXPSA

SEQ ID NO: 43426 - protein, 34 aa, Artificial Sequence
  GFR-binding peptide
  MOD_RES (34)..(34): Xaa is C or S
  MOD_RES (12)..(13)..(14)..(15)..(16): Xaa is A or G
  MOD_RES (17)..(18)..(19)..(20): Xaa is A or G or is absent
AKVVMNPYVKLXXXXXXXXXFFLVSLSSLKTPAX

SEQ ID NO: 43427 - protein, 38 aa, Artificial Sequence
  GFR-binding peptide
  MOD_RES (2)..(34)..(35): Xaa is C or S
AXSEVTMNPYVKLVVNKNEDFFLISLSSMKEPVXXPEP

SEQ ID NO: 43428 - protein, 34 aa, Artificial Sequence
  GFR-binding peptide
  MOD_RES (2)..(34): Xaa is C or S
AXSEVTMNPYVKLVVNKNEDFFLISLSSMKEPVX

SEQ ID NO: 43429 - protein, 39 aa, Artificial Sequence
  GFR-binding peptide
  MOD_RES (1)..(3)..(34)..(35): Xaa is C or S
XKXSKVIMPYVKLIKPTKGILFFISLSSLDQSVXXPSAS

SEQ ID NO: 43430 - protein, 42 aa, Artificial Sequence
  GFR-binding peptide
  MOD_RES (1)..(3)..(37)..(38): Xaa is C or S
  MOD_RES (15)..(16)..(17)..(18)..(19): Xaa is A or G
  MOD_RES (20)..(21)..(22)..(23): Xaa is A or G or is absent
XAXSEVTMNPYVKLXXXXXXXXXFFLISLSSMKEPVXXPEPI

SEQ ID NO: 43431 - protein, 37 aa, Artificial Sequence
  GFR-binding peptide
  MOD_RES (2)..(4)..(36)..(37): Xaa is C or S
RXGXSEVVMDPYVKLVVNNASDFFLISLSSLRTPVXX

SEQ ID NO: 43432 - protein, 37 aa, Artificial Sequence
  GFR-binding peptide
  MOD_RES (2)..(36): Xaa is C or S
  MOD_RES (14)..(15)..(16)..(17)..(18): Xaa is A or G
  MOD_RES (19)..(20)..(21)..(22): Xaa is A or G or is absent
GXSRVVMNPYVKLXXXXXXXXXFFLVSLSSLKTPAXT

SEQ ID NO: 43433 - protein, 38 aa, Artificial Sequence
  GFR-binding peptide
  MOD_RES (1)..(34)..(35): Xaa is C or S
XEAVSMGEPYVKLTPVGMDDFFLVSLSSLKTPVXXAKG

SEQ ID NO: 43434 - protein, 37 aa, Artificial Sequence
  GFR-binding peptide
  MOD_RES (2)..(33)..(34): Xaa is C or S
GXEEVIMPYVKLLLVRGNDFFLMSLSSTKVPAXXTSP

SEQ ID NO: 43435 - protein, 39 aa, Artificial Sequence
  GFR-binding peptide
  MOD_RES (2)..(34)..(35): Xaa is C or S
GXARVVMNPYVKLIVNSSDDFFLVSLSSLQTPAXXPKPV

SEQ ID NO: 43436 - protein, 41 aa, Artificial Sequence
  GFR-binding peptide
  MOD_RES (2)..(36)..(37): Xaa is C or S
  MOD_RES (14)..(15)..(16)..(17)..(18): Xaa is A or G
  MOD_RES (19)..(20)..(21)..(22): Xaa is A or G or is absent
GXARVVMNPYVKLXXXXXXXXXFFLVSLSSLQTPAXXPKPV

SEQ ID NO: 43437 - protein, 41 aa, Artificial Sequence
  GFR-binding peptide
  MOD_RES (2)..(4)..(41): Xaa is C or S
AXAXELHEELRPYVKLLKPKKRVYEFFLVSLSSHHVRSPQX

SEQ ID NO: 43438 - protein, 34 aa, Artificial Sequence
  GFR-binding peptide
  MOD_RES (1)..(1): Xaa is C or S
  MOD_RES (13)..(14)..(15)..(16)..(17): Xaa is A or G
  MOD_RES (18)..(19)..(20)..(21): Xaa is A or G or is absent
XRDVVMGPYVKLXXXXXXXXXFFLMSLSSMKTPT

SEQ ID NO: 43439 - protein, 39 aa, Artificial Sequence
  GFR-binding peptide
  MOD_RES (2)..(4)..(38): Xaa is C or S
  MOD_RES (16)..(17)..(18)..(19)..(20): Xaa is A or G
  MOD_RES (21)..(22)..(23)..(24): Xaa is A or G or is absent
HXGXSRVVMNPYVKLXXXXXXXXXFFLVSLSSLKTPAXT

SEQ ID NO: 43440 - protein, 30 aa, Artificial Sequence; identical to SEQ ID NO: 1734
  GFR-binding peptide

SEQ ID NO: 43441 - protein, 40 aa, Artificial Sequence
  GFR-binding peptide
  MOD_RES (1)..(38): Xaa is C or S
  MOD_RES (14)..(15)..(16)..(17)..(18): Xaa is A or G
  MOD_RES (19)..(20)..(21)..(22): Xaa is A or G or is absent
XELHEELRPYVKLXXXXXXXXXFFLVSLSSHHVRSPQXKV

SEQ ID NO: 43442 - protein, 37 aa, Artificial Sequence
  GFR-binding peptide
  MOD_RES (1)..(3)..(37): Xaa is C or S
  MOD_RES (15)..(16)..(17)..(18)..(19): Xaa is A or G
  MOD_RES (20)..(21)..(22)..(23): Xaa is A or G or is absent
XAXSEVTMNPYVKLXXXXXXXXXFFLISLSSMKEPVX

SEQ ID NO: 43443 - protein, 38 aa, Artificial Sequence
  GFR-binding peptide
  MOD_RES (1)..(34)..(35): Xaa is C or S
  MOD_RES (12)..(13)..(14)..(15)..(16): Xaa is A or G
  MOD_RES (17)..(18)..(19)..(20): Xaa is A or G or is absent
XSKVIMPYVKLXXXXXXXXXFFLISLSSLDQSVXXPSA

SEQ ID NO: 43444 - protein, 34 aa, Artificial Sequence
  GFR-binding peptide
  MOD_RES (13)..(14)..(15)..(16)..(17): Xaa is A or G
  MOD_RES (18)..(19)..(20)..(21): Xaa is A or G or is absent
EAVSMGEPYVKLXXXXXXXXXFFLVSLSSLKTPV

SEQ ID NO: 43445 - protein, 33 aa, Artificial Sequence
  GFR-binding peptide
  MOD_RES (12)..(13)..(14)..(15)..(16): Xaa is A or G
  MOD_RES (17)..(18)..(19)..(20): Xaa is A or G or is absent
KNHQLFPYVKLXXXXXXXXXFFLMSLSSEETPV

SEQ ID NO: 43446 - protein, 40 aa, Artificial Sequence
  GFR-binding peptide
  MOD_RES (2)..(4)..(37)..(38): Xaa is C or S
  MOD_RES (15)..(16)..(17)..(18)..(19): Xaa is A or G
  MOD_RES (20)..(21)..(22)..(23): Xaa is A or G or is absent
SXKXSKVVMPYVKLXXXXXXXXXFFLISLSSLDQPVXXPS

SEQ ID NO: 43447 - protein, 39 aa, Artificial Sequence
  GFR-binding peptide
  MOD_RES (2)..(36)..(37): Xaa is C or S
  MOD_RES (14)..(15)..(16)..(17)..(18): Xaa is A or G
  MOD_RES (19)..(20)..(21)..(22): Xaa is A or G or is absent
AXSEVTMNPYVKLXXXXXXXXXFFLISLSSMKEPVXXPE

SEQ ID NO: 43448 - protein, 34 aa, Artificial Sequence
  GFR-binding peptide
  MOD_RES (31)..(32): Xaa is C or S
EVVMEPYVKLVVKDYEDFFLMSLSSLETPVXXAK

SEQ ID NO: 43449 - protein, 37 aa, Artificial Sequence
  GFR-binding peptide
  MOD_RES (1)..(35): Xaa is C or S
XKNHQLFPYVKLHQGQHPKIRFFLMSLSSEETPVXEL

SEQ ID NO: 43450 - protein, 43 aa, Artificial Sequence
  GFR-binding peptide
  MOD_RES (1)..(3)..(37)..(38): Xaa is C or S
  MOD_RES (15)..(16)..(17)..(18)..(19): Xaa is A or G
  MOD_RES (20)..(21)..(22)..(23): Xaa is A or G or is absent
XGXAKVVMNPYVKLXXXXXXXXXFFLVSLSSLKTPAXXAKPVA

SEQ ID NO: 43451 - protein, 44 aa, Artificial Sequence
  GFR-binding peptide
  MOD_RES (2)..(4)..(38)..(39): Xaa is C or S
  MOD_RES (16)..(17)..(18)..(19)..(20): Xaa is A or G
  MOD_RES (21)..(22)..(23)..(24): Xaa is A or G or is absent
HXGXSRVVMNPYVKLXXXXXXXXXFFLVSLSSLKTPAXXPKPVY

SEQ ID NO: 43452 - protein, 40 aa, Artificial Sequence
  GFR-binding peptide
  MOD_RES (34)..(35): Xaa is C or S
  MOD_RES (12)..(13)..(14)..(15)..(16): Xaa is A or G
  MOD_RES (17)..(18)..(19)..(20): Xaa is A or G or is absent
GEVVMEPYVKLXXXXXXXXXFFLMSLSSLETPVXXAKPIS

SEQ ID NO: 43453 - protein, 41 aa, Artificial Sequence
  GFR-binding peptide
  MOD_RES (2)..(4)..(38)..(39): Xaa is C or S
  MOD_RES (16)..(17)..(18)..(19)..(20): Xaa is A or G
  MOD_RES (21)..(22)..(23)..(24): Xaa is A or G or is absent
HXGXAKVVMNPYVKLXXXXXXXXXFFLVSLSSLKTPAXXAK

SEQ ID NO: 43454 - protein, 42 aa, Artificial Sequence
  GFR-binding peptide
  MOD_RES (1)..(3)..(40): Xaa is C or S
  MOD_RES (16)..(17)..(18)..(19)..(20): Xaa is A or G
  MOD_RES (21)..(22)..(23)..(24): Xaa is A or G or is absent
XAXELHEELRPYVKLXXXXXXXXXFFLVSLSSHHVRSPQXKV

SEQ ID NO: 43455 - protein, 38 aa, Artificial Sequence
  GFR-binding peptide
  MOD_RES (2)..(35)..(36): Xaa is C or S
  MOD_RES (13)..(14)..(15)..(16)..(17): Xaa is A or G
  MOD_RES (18)..(19)..(20)..(21): Xaa is A or G or is absent
KXSKVVMPYVKLXXXXXXXXXFFLISLSSLDQPVXXPS

SEQ ID NO: 43456 - protein, 37 aa, Artificial Sequence
  GFR-binding peptide
  MOD_RES (2)..(34)..(35): Xaa is C or S
GXSRVVMNPYVKLIVNSSDDFFLVSLSSLKTPAXXPK

SEQ ID NO: 43457 - protein, 34 aa, Artificial Sequence
  GFR-binding peptide
  MOD_RES (1)..(1): Xaa is C or S
  MOD_RES (13)..(14)..(15)..(16)..(17): Xaa is A or G
  MOD_RES (18)..(19)..(20)..(21): Xaa is A or G or is absent
XKNHQLFPYVKLXXXXXXXXXFFLMSLSSEETPV

SEQ ID NO: 43458 - protein, 34 aa, Artificial Sequence
  GFR-binding peptide
  MOD_RES (1)..(33): Xaa is C or S
XSRVVMNPYVKLIVNSSDDFFLVSLSSLKTPAXT

SEQ ID NO: 43459 - protein, 34 aa, Artificial Sequence
  GFR-binding peptide
  MOD_RES (2)..(33)..(34): Xaa is C or S
GXEEVIMPYVKLLLVRGNDFFLMSLSSTKVPAXX

SEQ ID NO: 43460 - protein, 34 aa, Artificial Sequence
  GFR-binding peptide
  MOD_RES (33)..(34): Xaa is C or S
  MOD_RES (11)..(12)..(13)..(14)..(15): Xaa is A or G
  MOD_RES (16)..(17)..(18)..(19): Xaa is A or G or is absent
SKVVMPYVKLXXXXXXXXXFFLISLSSLDQPVXX

SEQ ID NO: 43461 - protein, 32 aa, Artificial Sequence
  GFR-binding peptide
  MOD_RES (1)..(1): Xaa is C or S
XAEVVMDPYVKLVVNNAADFFLISLSSLRAPV

SEQ ID NO: 43462 - protein, 36 aa, Artificial Sequence
  GFR-binding peptide
  MOD_RES (1)..(35)..(36): Xaa is C or S
  MOD_RES (13)..(14)..(15)..(16)..(17): Xaa is A or G
  MOD_RES (18)..(19)..(20)..(21): Xaa is A or G or is absent
XAEVVMDPYVKLXXXXXXXXXFFLISLSSLRAPVXX

SEQ ID NO: 43463 - protein, 34 aa, Artificial Sequence
  GFR-binding peptide
  MOD_RES (33)..(34): Xaa is C or S
  MOD_RES (11)..(12)..(13)..(14)..(15): Xaa is A or G
  MOD_RES (16)..(17)..(18)..(19): Xaa is A or G or is absent
DVVMGPYVKLXXXXXXXXXFFLMSLSSMKTPTXX

SEQ ID NO: 43464 - protein, 37 aa, Artificial Sequence
  GFR-binding peptide
  MOD_RES (2)..(4): Xaa is C or S
  MOD_RES (16)..(17)..(18)..(19)..(20): Xaa is A or G
  MOD_RES (21)..(22)..(23)..(24): Xaa is A or G or is absent
HXGXSRVVMNPYVKLXXXXXXXXXFFLVSLSSLKTPA

SEQ ID NO: 43465 - protein, 40 aa, Artificial Sequence
  GFR-binding peptide
  MOD_RES (2)..(36): Xaa is C or S
EXKNHQLFPYVKLHQGQHPKIRFFLMSLSSEETPVXELGE

SEQ ID NO: 43466 - protein, 39 aa, Artificial Sequence
  GFR-binding peptide
  MOD_RES (35)..(35): Xaa is C or S
  MOD_RES (11)..(12)..(13)..(14)..(15): Xaa is A or G
  MOD_RES (16)..(17)..(18)..(19): Xaa is A or G or is absent
HEELRPYVKLXXXXXXXXXFFLVSLSSHHVRSPQXKVSS

SEQ ID NO: 43467 - protein, 36 aa, Artificial Sequence
  GFR-binding peptide
  MOD_RES (2)..(36): Xaa is C or S
EXKNHQLFPYVKLHQGQHPKIRFFLMSLSSEETPVX

SEQ ID NO: 43468 - protein, 38 aa, Artificial Sequence
  GFR-binding peptide
  MOD_RES (33)..(34): Xaa is C or S
EAVSMGEPYVKLTPVGMDDFFLVSLSSLKTPVXXAKGV

SEQ ID NO: 43469 - protein, 34 aa, Artificial Sequence
  GFR-binding peptide
  MOD_RES (2)..(33)..(34): Xaa is C or S
KXSKVIMPYVKLIKPTKGILFFISLSSLDQSVXX

SEQ ID NO: 43470 - protein, 42 aa, Artificial Sequence
  GFR-binding peptide
  MOD_RES (2)..(39): Xaa is C or S
AXELHEELRPYVKLLKPKKRVYEFFLVSLSSHHVRSPQXKVS

SEQ ID NO: 43471 - protein, 41 aa, Artificial Sequence
  GFR-binding peptide
  MOD_RES (1)..(3)..(35)..(36): Xaa is C or S
XGXSRVVMNPYVKLIVNSSDDFFLVSLSSLKTPAXXPKPVY

SEQ ID NO: 43472 - protein, 33 aa, Artificial Sequence
  GFR-binding peptide
  MOD_RES (32)..(33): Xaa is C or S
GEVVMEPYVKLVVKDYEDFFLMSLSSLETPVXX

SEQ ID NO: 43473 - protein, 38 aa, Artificial Sequence
  GFR-binding peptide
  MOD_RES (2)..(36): Xaa is C or S
EXKNHQLFPYVKLHQGQHPKIRFFLMSLSSEETPVXEL

SEQ ID NO: 43474 - protein, 38 aa, Artificial Sequence
  GFR-binding peptide
  MOD_RES (1)..(32)..(33): Xaa is C or S
XSKVIMPYVKLIKPTKGILFFISLSSLDQSVXXPSASA

SEQ ID NO: 43475 - protein, 39 aa, Artificial Sequence
  GFR-binding peptide
  MOD_RES (2)..(39): Xaa is C or S
  MOD_RES (15)..(16)..(17)..(18)..(19): Xaa is A or G
  MOD_RES (20)..(21)..(22)..(23): Xaa is A or G or is absent
AXELHEELRPYVKLXXXXXXXXXFFLVSLSSHHVRSPQX

SEQ ID NO: 43476 - protein, 42 aa, Artificial Sequence
  GFR-binding peptide
  MOD_RES (1)..(3)..(37)..(38): Xaa is C or S
  MOD_RES (15)..(16)..(17)..(18)..(19): Xaa is A or G
  MOD_RES (20)..(21)..(22)..(23): Xaa is A or G or is absent
XGXAEVVMDPYVKLXXXXXXXXXFFLISLSSLRAPVXXSAPA

SEQ ID NO: 43477 - protein, 39 aa, Artificial Sequence
  GFR-binding peptide
  MOD_RES (1)..(33)..(34): Xaa is C or S
XSRVVMNPYVKLIVNSSDDFFLVSLSSLKTPAXXPKPVH

SEQ ID NO: 43478 - protein, 39 aa, Artificial Sequence
  GFR-binding peptide
  MOD_RES (1)..(3)..(35)..(36): Xaa is C or S
XGXAEVVMDPYVKLVVNNAADFFLISLSSLRAPVXXSAP

SEQ ID NO: 43479 - protein, 38 aa, Artificial Sequence
  GFR-binding peptide
  MOD_RES (1)..(3)..(34)..(35): Xaa is C or S
XKXSKVVMPYVKLVKPTRGVLFFISLSSLDQPVXXPSA

SEQ ID NO: 43480 - protein, 39 aa, Artificial Sequence
  GFR-binding peptide
  MOD_RES (1)..(3)..(34)..(35): Xaa is C or S
XKXSKVVMPYVKLVKPTRGVLFFISLSSLDQPVXXPSAS

SEQ ID NO: 43481 - protein, 35 aa, Artificial Sequence
  GFR-binding peptide
  MOD_RES (2)..(4): Xaa is C or S
SXGXRDVVMGPYVKLIIQQKDNFFLMSLSSMKTPT

SEQ ID NO: 43482 - protein, 37 aa, Artificial Sequence
  GFR-binding peptide
  MOD_RES (2)..(34)..(35): Xaa is C or S
GXAEVVMDPYVKLVVNNAADFFLISLSSLRAPVXXSA

SEQ ID NO: 43483 - protein, 33 aa, Artificial Sequence
  GFR-binding peptide
LHEELRPYVKLLKPKKRVYEFFLVSLSSHHVRS

SEQ ID NO: 43484 - protein, 36 aa, Artificial Sequence
  GFR-binding peptide
  MOD_RES (1)..(34)..(35): Xaa is C or S
  MOD_RES (12)..(13)..(14)..(15)..(16): Xaa is A or G
  MOD_RES (17)..(18)..(19)..(20): Xaa is A or G or is absent
XSKVIMPYVKLXXXXXXXXXFFLISLSSLDQSVXXP

SEQ ID NO: 43485 - protein, 40 aa, Artificial Sequence
  GFR-binding peptide
  MOD_RES (2)..(35)..(36): Xaa is C or S
  MOD_RES (13)..(14)..(15)..(16)..(17): Xaa is A or G
  MOD_RES (18)..(19)..(20)..(21): Xaa is A or G or is absent
KXSKVVMPYVKLXXXXXXXXXFFLISLSSLDQPVXXPSAS

SEQ ID NO: 43486 - protein, 36 aa, Artificial Sequence
  GFR-binding peptide
  MOD_RES (2)..(36): Xaa is C or S
  MOD_RES (14)..(15)..(16)..(17)..(18): Xaa is A or G
  MOD_RES (19)..(20)..(21)..(22): Xaa is A or G or is absent
GXSEVVMDPYVKLXXXXXXXXXFFLISLSSLRTPVX

SEQ ID NO: 43487 - protein, 30 aa, Artificial Sequence; identical to SEQ ID NO: 1731
  GFR-binding peptide

SEQ ID NO: 43488 - protein, 41 aa, Artificial Sequence
  GFR-binding peptide
  MOD_RES (1)..(35)..(36): Xaa is C or S
  MOD_RES (13)..(14)..(15)..(16)..(17): Xaa is A or G
  MOD_RES (18)..(19)..(20)..(21): Xaa is A or G or is absent
XRDVVMGPYVKLXXXXXXXXXFFLMSLSSMKTPTXXPGASG

SEQ ID NO: 43489 - protein, 33 aa, Artificial Sequence
  GFR-binding peptide
  MOD_RES (33)..(33): Xaa is C or S
  MOD_RES (11)..(12)..(13)..(14)..(15): Xaa is A or G
  MOD_RES (16)..(17)..(18)..(19): Xaa is A or G or is absent
DVVMGPYVKLXXXXXXXXXFFLMSLSSMKTPTX

SEQ ID NO: 43490 - protein, 40 aa, Artificial Sequence
  GFR-binding peptide
  MOD_RES (2)..(36)..(37): Xaa is C or S
  MOD_RES (14)..(15)..(16)..(17)..(18): Xaa is A or G
  MOD_RES (19)..(20)..(21)..(22): Xaa is A or G or is absent
GXGEVVMEPYVKLXXXXXXXXXFFLMSLSSLETPVXXAKP

SEQ ID NO: 43491 - protein, 36 aa, Artificial Sequence
  GFR-binding peptide
  MOD_RES (1)..(3): Xaa is C or S
  MOD_RES (15)..(16)..(17)..(18)..(19): Xaa is A or G
  MOD_RES (20)..(21)..(22)..(23): Xaa is A or G or is absent
XGXESVAMGPYVKLXXXXXXXXXFFLISLSSLKTPV

SEQ ID NO: 43492 - protein, 36 aa, Artificial Sequence
  GFR-binding peptide
  MOD_RES (1)..(32)..(33): Xaa is C or S
XSKVIMPYVKLIKPTKGILFFISLSSLDQSVXXPSA

SEQ ID NO: 43493 - protein, 38 aa, Artificial Sequence
  GFR-binding peptide
  MOD_RES (35)..(35): Xaa is C or S
HEELRPYVKLLKPKKRVYEFFLVSLSSHHVRSPQXKVS

SEQ ID NO: 43494 - protein, 37 aa, Artificial Sequence
  GFR-binding peptide
  MOD_RES (32)..(33): Xaa is C or S
ESVAMGPYVKLYTVVGKDFFLISLSSLKTPVXXAKSA

SEQ ID NO: 43495 - protein, 37 aa, Artificial Sequence
  GFR-binding peptide
  MOD_RES (2)..(4)..(35)..(36): Xaa is C or S
LXGXEEVIMPYVKLLLVRGNDFFLMSLSSTKVPAXXT

SEQ ID NO: 43496 - protein, 37 aa, Artificial Sequence
  GFR-binding peptide
  MOD_RES (1)..(3)..(36)..(37): Xaa is C or S
  MOD_RES (14)..(15)..(16)..(17)..(18): Xaa is A or G
  MOD_RES (19)..(20)..(21)..(22): Xaa is A or G or is absent
XKXSKVIMPYVKLXXXXXXXXXFFLISLSSLDQSVXX

SEQ ID NO: 43497 - protein, 33 aa, Artificial Sequence
  GFR-binding peptide
  MOD_RES (31)..(32): Xaa is C or S
RVVMNPYVKLIVNSSDDFFLVSLSSLQTPAXXP

SEQ ID NO: 43498 - protein, 35 aa, Artificial Sequence
  GFR-binding peptide
  MOD_RES (12)..(13)..(14)..(15)..(16): Xaa is A or G
  MOD_RES (17)..(18)..(19)..(20): Xaa is A or G or is absent
LHEELRPYVKLXXXXXXXXXFFLVSLSSHHVRSPQ

SEQ ID NO: 43499 - protein, 41 aa, Artificial Sequence
  GFR-binding peptide
  MOD_RES (1)..(38): Xaa is C or S
XELHEELRPYVKLLKPKKRVYEFFLVSLSSHHVRSPQXKVS

SEQ ID NO: 43500 - protein, 37 aa, Artificial Sequence
  GFR-binding peptide
  MOD_RES (2)..(4)..(35)..(36): Xaa is C or S
SXKXSKVVMPYVKLVKPTRGVLFFISLSSLDQPVXXP

SEQ ID NO: 43501 - protein, 39 aa, Artificial Sequence
  GFR-binding peptide
  MOD_RES (1)..(3)..(37): Xaa is C or S
  MOD_RES (15)..(16)..(17)..(18)..(19): Xaa is A or G
  MOD_RES (20)..(21)..(22)..(23): Xaa is A or G or is absent
XEXKNHQLFPYVKLXXXXXXXXXFFLMSLSSEETPVXEL

SEQ ID NO: 43502 - protein, 43 aa, Artificial Sequence
  GFR-binding peptide
  MOD_RES (2)..(4)..(39)..(40): Xaa is C or S
  MOD_RES (17)..(18)..(19)..(20)..(21): Xaa is A or G
  MOD_RES (22)..(23)..(24)..(25): Xaa is A or G or is absent
RXGXEAVSMGEPYVKLXXXXXXXXXFFLVSLSSLKTPVXXAKG

SEQ ID NO: 43503 - protein, 36 aa, Artificial Sequence
  GFR-binding peptide
  MOD_RES (33)..(34): Xaa is C or S
  MOD_RES (11)..(12)..(13)..(14)..(15): Xaa is A or G
  MOD_RES (16)..(17)..(18)..(19): Xaa is A or G or is absent
EVVMDPYVKLXXXXXXXXXFFLISLSSLRTPVXXTP

SEQ ID NO: 43504 - protein, 42 aa, Artificial Sequence
  GFR-binding peptide
  MOD_RES (2)..(4)..(36): Xaa is C or S
HXGXSRVVMNPYVKLIVNSSDDFFLVSLSSLKTPAXTPKTVH

SEQ ID NO: 43505 - protein, 36 aa, Artificial Sequence
  GFR-binding peptide
  MOD_RES (1)..(35): Xaa is C or S
  MOD_RES (13)..(14)..(15)..(16)..(17): Xaa is A or G
  MOD_RES (18)..(19)..(20)..(21): Xaa is A or G or is absent
XSRVVMNPYVKLXXXXXXXXXFFLVSLSSLKTPAXT

SEQ ID NO: 43506 - protein, 41 aa, Artificial Sequence
  GFR-binding peptide
  MOD_RES (2)..(36): Xaa is C or S
  MOD_RES (14)..(15)..(16)..(17)..(18): Xaa is A or G
  MOD_RES (19)..(20)..(21)..(22): Xaa is A or G or is absent
GXSRVVMNPYVKLXXXXXXXXXFFLVSLSSLKTPAXTPKTV

SEQ ID NO: 43507 - protein, 37 aa, Artificial Sequence
  GFR-binding peptide
  MOD_RES (2)..(4): Xaa is C or S
  MOD_RES (16)..(17)..(18)..(19)..(20): Xaa is A or G
  MOD_RES (21)..(22)..(23)..(24): Xaa is A or G or is absent
RXGXAEVVMDPYVKLXXXXXXXXXFFLISLSSLRAPV

SEQ ID NO: 43508 - protein, 34 aa, Artificial Sequence
  GFR-binding peptide
  MOD_RES (1)..(1): Xaa is C or S
  MOD_RES (13)..(14)..(15)..(16)..(17): Xaa is A or G
  MOD_RES (18)..(19)..(20)..(21): Xaa is A or G or is absent
XAKVVMNPYVKLXXXXXXXXXFFLVSLSSLKTPA

SEQ ID NO: 43509 - protein, 34 aa, Artificial Sequence
  GFR-binding peptide
  MOD_RES (1)..(33)..(34): Xaa is C or S
XARVVMNPYVKLIVNSSDDFFLVSLSSLQTPAXX

SEQ ID NO: 43510 - protein, 39 aa, Artificial Sequence
  GFR-binding peptide
  MOD_RES (2)..(4)..(35)..(36): Xaa is C or S
LXGXEEVIMPYVKLLLVRGNDFFLMSLSSTKVPAXXTSP

SEQ ID NO: 43511 - protein, 35 aa, Artificial Sequence
  GFR-binding peptide
  MOD_RES (1)..(33)..(34): Xaa is C or S
XESVAMGPYVKLYTVVGKDFFLISLSSLKTPVXXA

SEQ ID NO: 43512 - protein, 44 aa, Artificial Sequence
  GFR-binding peptide
  MOD_RES (2)..(4)..(38)..(39): Xaa is C or S
  MOD_RES (16)..(17)..(18)..(19)..(20): Xaa is A or G
  MOD_RES (21)..(22)..(23)..(24): Xaa is A or G or is absent
RXGXGEVVMEPYVKLXXXXXXXXXFFLMSLSSLETPVXXAKPIS

SEQ ID NO: 43513 - protein, 36 aa, Artificial Sequence
  GFR-binding peptide
  MOD_RES (31)..(32): Xaa is C or S
EVVMDPYVKLVVNNASDFFLISLSSLRTPVXXTPPT

SEQ ID NO: 43514 - protein, 39 aa, Artificial Sequence
  GFR-binding peptide
  MOD_RES (2)..(4)..(38)..(39): Xaa is C or S
  MOD_RES (16)..(17)..(18)..(19)..(20): Xaa is A or G
  MOD_RES (21)..(22)..(23)..(24): Xaa is A or G or is absent
RXGXSEVVMDPYVKLXXXXXXXXXFFLISLSSLRTPVXX

SEQ ID NO: 43515 - protein, 36 aa, Artificial Sequence
  GFR-binding peptide
  MOD_RES (1)..(33): Xaa is C or S
XSRVVMNPYVKLIVNSSDDFFLVSLSSLKTPAXTPK

SEQ ID NO: 43516 - protein, 36 aa, Artificial Sequence
  GFR-binding peptide
  MOD_RES (1)..(32)..(33): Xaa is C or S
XEEVIMPYVKLLLVRGNDFFLMSLSSTKVPAXXTSP

SEQ ID NO: 43517 - protein, 35 aa, Artificial Sequence
  GFR-binding peptide
  MOD_RES (1)..(35): Xaa is C or S
  MOD_RES (13)..(14)..(15)..(16)..(17): Xaa is A or G
  MOD_RES (18)..(19)..(20)..(21): Xaa is A or G or is absent
XAEVVMDPYVKLXXXXXXXXXFFLISLSSLRAPVX

SEQ ID NO: 43518 - protein, 31 aa, Artificial Sequence
  GFR-binding peptide
  MOD_RES (31)..(31): Xaa is C or S
DVVMGPYVKLIIQQKDNFFLMSLSSMKTPTX

SEQ ID NO: 43519 - protein, 31 aa, Artificial Sequence
  GFR-binding peptide
SEVVMDPYVKLVVNNASDFFLISLSSLRTPV

SEQ ID NO: 43520 - protein, 36 aa, Artificial Sequence
  GFR-binding peptide
  MOD_RES (31)..(32): Xaa is C or S
SVAMGPYVKLYTVVGKDFFLISLSSLKTPVXXAKSA

SEQ ID NO: 43521 - protein, 34 aa, Artificial Sequence
  GFR-binding peptide
  MOD_RES (2)..(4): Xaa is C or S
SXKXSRVIMPYVKLVKPKRGVLFFISLSSLAQPV

SEQ ID NO: 43522 - protein, 42 aa, Artificial Sequence
  GFR-binding peptide
  MOD_RES (2)..(4)..(37)..(38): Xaa is C or S
  MOD_RES (15)..(16)..(17)..(18)..(19): Xaa is A or G
  MOD_RES (20)..(21)..(22)..(23): Xaa is A or G or is absent
LXGXEEVIMPYVKLXXXXXXXXXFFLMSLSSTKVPAXXTSPV

SEQ ID NO: 43523 - protein, 37 aa, Artificial Sequence
  GFR-binding peptide
  MOD_RES (33)..(33): Xaa is C or S
  MOD_RES (11)..(12)..(13)..(14)..(15): Xaa is A or G
  MOD_RES (16)..(17)..(18)..(19): Xaa is A or G or is absent
RVVMNPYVKLXXXXXXXXXFFLVSLSSLKTPAXTPKT

SEQ ID NO: 43524 - protein, 41 aa, Artificial Sequence
  GFR-binding peptide
  MOD_RES (2)..(36)..(37): Xaa is C or S
  MOD_RES (14)..(15)..(16)..(17)..(18): Xaa is A or G
  MOD_RES (19)..(20)..(21)..(22): Xaa is A or G or is absent
GXRDVVMGPYVKLXXXXXXXXXFFLMSLSSMKTPTXXPGAS

SEQ ID NO: 43525 - protein, 40 aa, Artificial Sequence
  GFR-binding peptide
  MOD_RES (2)..(4)..(35)..(36): Xaa is C or S
SXKXSKVVMPYVKLVKPTRGVLFFISLSSLDQPVXXPSAS

SEQ ID NO: 43526 - protein, 34 aa, Artificial Sequence
  GFR-binding peptide
  MOD_RES (1)..(3): Xaa is C or S
XGXESVAMGPYVKLYTVVGKDFFLISLSSLKTPV

SEQ ID NO: 43527 - protein, 43 aa, Artificial Sequence
  GFR-binding peptide
  MOD_RES (2)..(4)..(37)..(38): Xaa is C or S
  MOD_RES (15)..(16)..(17)..(18)..(19): Xaa is A or G
  MOD_RES (20)..(21)..(22)..(23): Xaa is A or G or is absent
LXGXEEVIMPYVKLXXXXXXXXXFFLMSLSSTKVPAXXTSPVR

SEQ ID NO: 43528 - protein, 36 aa, Artificial Sequence
  GFR-binding peptide
  MOD_RES (1)..(34)..(35): Xaa is C or S
  MOD_RES (12)..(13)..(14)..(15)..(16): Xaa is A or G
  MOD_RES (17)..(18)..(19)..(20): Xaa is A or G or is absent
XSKVVMPYVKLXXXXXXXXXFFLISLSSLDQPVXXP

SEQ ID NO: 43529 - protein, 38 aa, Artificial Sequence
  GFR-binding peptide
  MOD_RES (2)..(34): Xaa is C or S
GXSRVVMNPYVKLIVNSSDDFFLVSLSSLKTPAXTPKT

SEQ ID NO: 43530 - protein, 41 aa, Artificial Sequence
  GFR-binding peptide
  MOD_RES (1)..(3)..(35)..(36): Xaa is C or S
XGXARVVMNPYVKLIVNSSDDFFLVSLSSLQTPAXXPKPVT

SEQ ID NO: 43531 - protein, 39 aa, Artificial Sequence
  GFR-binding peptide
  MOD_RES (2)..(4)..(36)..(37): Xaa is C or S
HXGXARVVMNPYVKLIVNSSDDFFLVSLSSLQTPAXXPK

SEQ ID NO: 43532 - protein, 36 aa, Artificial Sequence
  GFR-binding peptide
  MOD_RES (2)..(4)..(36): Xaa is C or S
RXGXGEVVMEPYVKLVVKDYEDFFLMSLSSLETPVX

SEQ ID NO: 43533 - protein, 33 aa, Artificial Sequence
  GFR-binding peptide
  MOD_RES (1)..(33): Xaa is C or S
XARVVMNPYVKLIVNSSDDFFLVSLSSLQTPAX

SEQ ID NO: 43534 - protein, 37 aa, Artificial Sequence
  GFR-binding peptide
  MOD_RES (32)..(32): Xaa is C or S
SRVVMNPYVKLIVNSSDDFFLVSLSSLKTPAXTPKTV

SEQ ID NO: 43535 - protein, 41 aa, Artificial Sequence
  GFR-binding peptide
  MOD_RES (1)..(35): Xaa is C or S
  MOD_RES (13)..(14)..(15)..(16)..(17): Xaa is A or G
  MOD_RES (18)..(19)..(20)..(21): Xaa is A or G or is absent
XSRVVMNPYVKLXXXXXXXXXFFLVSLSSLKTPAXTPKTVH

SEQ ID NO: 43536 - protein, 35 aa, Artificial Sequence
  GFR-binding peptide
  MOD_RES (34)..(34): Xaa is C or S
  MOD_RES (12)..(13)..(14)..(15)..(16): Xaa is A or G
  MOD_RES (17)..(18)..(19)..(20): Xaa is A or G or is absent
SRVVMNPYVKLXXXXXXXXXFFLVSLSSLKTPAXT

SEQ ID NO: 43537 - protein, 35 aa, Artificial Sequence
  GFR-binding peptide
  MOD_RES (2)..(2): Xaa is C or S
  MOD_RES (14)..(15)..(16)..(17)..(18): Xaa is A or G
  MOD_RES (19)..(20)..(21)..(22): Xaa is A or G or is absent
EXKNHQLFPYVKLXXXXXXXXXFFLMSLSSEETPV

SEQ ID NO: 43538 - protein, 33 aa, Artificial Sequence
  GFR-binding peptide
  MOD_RES (33)..(33): Xaa is C or S
  MOD_RES (11)..(12)..(13)..(14)..(15): Xaa is A or G
  MOD_RES (16)..(17)..(18)..(19): Xaa is A or G or is absent
RVVMNPYVKLXXXXXXXXXFFLVSLSSLKTPAX

SEQ ID NO: 43539 - protein, 41 aa, Artificial Sequence
  GFR-binding peptide
  MOD_RES (2)..(35)..(36): Xaa is C or S
  MOD_RES (13)..(14)..(15)..(16)..(17): Xaa is A or G
  MOD_RES (18)..(19)..(20)..(21): Xaa is A or G or is absent
KXSRVIMPYVKLXXXXXXXXXFFLISLSSLAQPVXXPAASA

SEQ ID NO: 43540 - protein, 33 aa, Artificial Sequence
  GFR-binding peptide
  MOD_RES (33)..(33): Xaa is C or S
  MOD_RES (11)..(12)..(13)..(14)..(15): Xaa is A or G
  MOD_RES (16)..(17)..(18)..(19): Xaa is A or G or is absent
KVVMNPYVKLXXXXXXXXXFFLVSLSSLKTPAX

SEQ ID NO: 43541 - protein, 34 aa, Artificial Sequence
  GFR-binding peptide
  MOD_RES (34)..(34): Xaa is C or S
KNHQLFPYVKLHQGQHPKIRFFLMSLSSEETPVX

SEQ ID NO: 43542 - protein, 37 aa, Artificial Sequence
  GFR-binding peptide
  MOD_RES (1)..(33)..(34): Xaa is C or S
XSRVVMNPYVKLIVNSSDDFFLVSLSSLKTPAXXPKP

SEQ ID NO: 43543 - protein, 38 aa, Artificial Sequence
  GFR-binding peptide
  MOD_RES (34)..(34): Xaa is C or S
  MOD_RES (12)..(13)..(14)..(15)..(16): Xaa is A or G
  MOD_RES (17)..(18)..(19)..(20): Xaa is A or G or is absent
SRVVMNPYVKLXXXXXXXXXFFLVSLSSLKTPAXTPKT

SEQ ID NO: 43544 - protein, 38 aa, Artificial Sequence
  GFR-binding peptide
  MOD_RES (1)..(35): Xaa is C or S
XKNHQLFPYVKLHQGQHPKIRFFLMSLSSEETPVXELG

SEQ ID NO: 43545 - protein, 42 aa, Artificial Sequence
  GFR-binding peptide
  MOD_RES (1)..(3)..(37): Xaa is C or S
XEXKNHQLFPYVKLHQGQHPKIRFFLMSLSSEETPVXELGED

SEQ ID NO: 43546 - protein, 41 aa, Artificial Sequence
  GFR-binding peptide
  MOD_RES (2)..(4)..(36)..(37): Xaa is C or S
RXGXESVAMGPYVKLYTVVGKDFFLISLSSLKTPVXXAKSA

SEQ ID NO: 43547 - protein, 37 aa, Artificial Sequence
  GFR-binding peptide
  MOD_RES (1)..(33): Xaa is C or S
XSRVVMNPYVKLIVNSSDDFFLVSLSSLKTPAXTPKT

SEQ ID NO: 43548 - protein, 32 aa, Artificial Sequence
  GFR-binding peptide
  MOD_RES (1)..(1): Xaa is C or S
XSRVVMNPYVKLIVNSSDDFFLVSLSSLKTPA

SEQ ID NO: 43549 - protein, 38 aa, Artificial Sequence
  GFR-binding peptide
  MOD_RES (34)..(35): Xaa is C or S
  MOD_RES (12)..(13)..(14)..(15)..(16): Xaa is A or G
  MOD_RES (17)..(18)..(19)..(20): Xaa is A or G or is absent
SEVTMNPYVKLXXXXXXXXXFFLISLSSMKEPVXXPEP

SEQ ID NO: 43550 - protein, 36 aa, Artificial Sequence
  GFR-binding peptide
  MOD_RES (2)..(4): Xaa is C or S
  MOD_RES (15)..(16)..(17)..(18)..(19): Xaa is A or G
  MOD_RES (20)..(21)..(22)..(23): Xaa is A or G or is absent
LXGXEEVIMPYVKLXXXXXXXXXFFLMSLSSTKVPA

SEQ ID NO: 43551 - protein, 43 aa, Artificial Sequence
  GFR-binding peptide
  MOD_RES (2)..(4)..(38)..(39): Xaa is C or S
  MOD_RES (16)..(17)..(18)..(19)..(20): Xaa is A or G
  MOD_RES (21)..(22)..(23)..(24): Xaa is A or G or is absent
HXGXAKVVMNPYVKLXXXXXXXXXFFLVSLSSLKTPAXXAKPV

SEQ ID NO: 43552 - protein, 39 aa, Artificial Sequence
  GFR-binding peptide
  MOD_RES (2)..(4)..(35)..(36): Xaa is C or S
SXKXSRVIMPYVKLVKPKRGVLFFISLSSLAQPVXXPAA

SEQ ID NO: 43553 - protein, 35 aa, Artificial Sequence
  GFR-binding peptide
  MOD_RES (2)..(2): Xaa is C or S
  MOD_RES (14)..(15)..(16)..(17)..(18): Xaa is A or G
  MOD_RES (19)..(20)..(21)..(22): Xaa is A or G or is absent
GXSEVVMDPYVKLXXXXXXXXXFFLISLSSLRTPV

SEQ ID NO: 43554 - protein, 40 aa, Artificial Sequence
  GFR-binding peptide
  MOD_RES (1)..(3)..(36)..(37): Xaa is C or S
  MOD_RES (14)..(15)..(16)..(17)..(18): Xaa is A or G
  MOD_RES (19)..(20)..(21)..(22): Xaa is A or G or is absent
XKXSKVVMPYVKLXXXXXXXXXFFLISLSSLDQPVXXPSA

SEQ ID NO: 43555 - protein, 36 aa, Artificial Sequence
  GFR-binding peptide
  MOD_RES (1)..(3): Xaa is C or S
  MOD_RES (15)..(16)..(17)..(18)..(19): Xaa is A or G
  MOD_RES (20)..(21)..(22)..(23): Xaa is A or G or is absent
XGXSRVVMNPYVKLXXXXXXXXXFFLVSLSSLKTPA

SEQ ID NO: 43556 - protein, 37 aa, Artificial Sequence
  GFR-binding peptide
  MOD_RES (2)..(33)..(34): Xaa is C or S
KXSKVIMPYVKLIKPTKGILFFISLSSLDQSVXXPSA

SEQ ID NO: 43557 - protein, 35 aa, Artificial Sequence
  GFR-binding peptide
  MOD_RES (1)..(3)..(34)..(35): Xaa is C or S
XKXSRVIMPYVKLVKPKRGVLFFISLSSLAQPVXX

SEQ ID NO: 43558 - protein, 33 aa, Artificial Sequence
  GFR-binding peptide
  MOD_RES (32)..(33): Xaa is C or S
SEVTMNPYVKLVVNKNEDFFLISLSSMKEPVXX

SEQ ID NO: 43559 - protein, 37 aa, Artificial Sequence
  GFR-binding peptide
  MOD_RES (2)..(35)..(36): Xaa is C or S
  MOD_RES (13)..(14)..(15)..(16)..(17): Xaa is A or G
  MOD_RES (18)..(19)..(20)..(21): Xaa is A or G or is absent
KXSRVIMPYVKLXXXXXXXXXFFLISLSSLAQPVXXP

SEQ ID NO: 43560 - protein, 31 aa, Artificial Sequence
  GFR-binding peptide
SRVVMNPYVKLIVNSSDDFFLVSLSSLKTPA

SEQ ID NO: 43561 - protein, 33 aa, Artificial Sequence
  GFR-binding peptide
  MOD_RES (1)..(1): Xaa is C or S
  MOD_RES (12)..(13)..(14)..(15)..(16): Xaa is A or G
  MOD_RES (17)..(18)..(19)..(20): Xaa is A or G or is absent
XSKVVMPYVKLXXXXXXXXXFFLISLSSLDQPV

SEQ ID NO: 43562 - protein, 34 aa, Artificial Sequence
  GFR-binding peptide
  MOD_RES (31)..(31): Xaa is C or S
RVVMNPYVKLIVNSSDDFFLVSLSSLKTPAXTPK

SEQ ID NO: 43563 - protein, 39 aa, Artificial Sequence
  GFR-binding peptide
  MOD_RES (1)..(33)..(34): Xaa is C or S
XGEVVMEPYVKLVVKDYEDFFLMSLSSLETPVXXAKPIS

SEQ ID NO: 43564 - protein, 38 aa, Artificial Sequence
  GFR-binding peptide
  MOD_RES (34)..(35): Xaa is C or S
  MOD_RES (12)..(13)..(14)..(15)..(16): Xaa is A or G
  MOD_RES (17)..(18)..(19)..(20): Xaa is A or G or is absent
SEVVMDPYVKLXXXXXXXXXFFLISLSSLRTPVXXTPP

SEQ ID NO: 43565 - protein, 33 aa, Artificial Sequence
  GFR-binding peptide
  MOD_RES (31)..(31): Xaa is C or S
RVVMNPYVKLIVNSSDDFFLVSLSSLKTPAXTP

SEQ ID NO: 43566 - protein, 33 aa, Artificial Sequence
  GFR-binding peptide
  MOD_RES (1)..(32)..(33): Xaa is C or S
XSRVIMPYVKLVKPKRGVLFFISLSSLAQPVXX

SEQ ID NO: 43567 - protein, 37 aa, Artificial Sequence
  GFR-binding peptide
  MOD_RES (1)..(3)..(35)..(36): Xaa is C or S
XGXSEVVMDPYVKLVVNNASDFFLISLSSLRTPVXXT

SEQ ID NO: 43568 - protein, 36 aa, Artificial Sequence
  GFR-binding peptide
  MOD_RES (1)..(3)..(36): Xaa is C or S
  MOD_RES (14)..(15)..(16)..(17)..(18): Xaa is A or G
  MOD_RES (19)..(20)..(21)..(22): Xaa is A or G or is absent
XKXSKVIMPYVKLXXXXXXXXXFFLISLSSLDQSVX

SEQ ID NO: 43569 - protein, 41 aa, Artificial Sequence
  GFR-binding peptide
  MOD_RES (1)..(35)..(36): Xaa is C or S
  MOD_RES (13)..(14)..(15)..(16)..(17): Xaa is A or G
  MOD_RES (18)..(19)..(20)..(21): Xaa is A or G or is absent
XARVVMNPYVKLXXXXXXXXXFFLVSLSSLQTPAXXPKPVT

SEQ ID NO: 43570 - protein, 36 aa, Artificial Sequence
  GFR-binding peptide
  MOD_RES (1)..(33)..(34): Xaa is C or S
XARVVMNPYVKLIVNSSDDFFLVSLSSLQTPAXXPK

SEQ ID NO: 43571 - protein, 38 aa, Artificial Sequence
  GFR-binding peptide
  MOD_RES (1)..(3)..(37)..(38): Xaa is C or S
  MOD_RES (15)..(16)..(17)..(18)..(19): Xaa is A or G
  MOD_RES (20)..(21)..(22)..(23): Xaa is A or G or is absent
XGXSEVVMDPYVKLXXXXXXXXXFFLISLSSLRTPVXX

SEQ ID NO: 43572 - protein, 36 aa, Artificial Sequence
  GFR-binding peptide
  MOD_RES (2)..(4)..(36): Xaa is C or S
RXGXSEVVMDPYVKLVVNNASDFFLISLSSLRTPVX

SEQ ID NO: 43573 - protein, 35 aa, Artificial Sequence
  GFR-binding peptide
  MOD_RES (1)..(33)..(34): Xaa is C or S
XAEVVMDPYVKLVVNNAADFFLISLSSLRAPVXXS

SEQ ID NO: 43574 - protein, 32 aa, Artificial Sequence
  GFR-binding peptide
  MOD_RES (31)..(32): Xaa is C or S
DVVMGPYVKLIIQQKDNFFLMSLSSMKTPTXX

SEQ ID NO: 43575 - protein, 40 aa, Artificial Sequence
  GFR-binding peptide
  MOD_RES (1)..(3)..(35)..(36): Xaa is C or S
XGXAEVVMDPYVKLVVNNAADFFLISLSSLRAPVXXSAPA

SEQ ID NO: 43576 - protein, 33 aa, Artificial Sequence
  GFR-binding peptide
  MOD_RES (1)..(3): Xaa is C or S
XGXEEVIMPYVKLLLVRGNDFFLMSLSSTKVPA

SEQ ID NO: 43577 - protein, 35 aa, Artificial Sequence
  GFR-binding peptide
  MOD_RES (32)..(32): Xaa is C or S
SRVVMNPYVKLIVNSSDDFFLVSLSSLKTPAXTPK

SEQ ID NO: 43578 - protein, 37 aa, Artificial Sequence
  GFR-binding peptide
  MOD_RES (1)..(1): Xaa is C or S
XELHEELRPYVKLLKPKKRVYEFFLVSLSSHHVRSPQ

SEQ ID NO: 43579 - protein, 38 aa, Artificial Sequence
  GFR-binding peptide
  MOD_RES (1)..(36)..(37): Xaa is C or S
  MOD_RES (14)..(15)..(16)..(17)..(18): Xaa is A or G
  MOD_RES (19)..(20)..(21)..(22): Xaa is A or G or is absent
XEAVSMGEPYVKLXXXXXXXXXFFLVSLSSLKTPVXXA

SEQ ID NO: 43580 - protein, 33 aa, Artificial Sequence
  GFR-binding peptide
  MOD_RES (31)..(32): Xaa is C or S
EEVIMPYVKLLLVRGNDFFLMSLSSTKVPAXXT

SEQ ID NO: 43581 - protein, 35 aa, Artificial Sequence
  GFR-binding peptide
  MOD_RES (2)..(2): Xaa is C or S
  MOD_RES (14)..(15)..(16)..(17)..(18): Xaa is A or G
  MOD_RES (19)..(20)..(21)..(22): Xaa is A or G or is absent
AXSEVTMNPYVKLXXXXXXXXXFFLISLSSMKEPV

SEQ ID NO: 43582 - protein, 36 aa, Artificial Sequence
  GFR-binding peptide
  MOD_RES (1)..(3)..(35)..(36): Xaa is C or S
XGXSRVVMNPYVKLIVNSSDDFFLVSLSSLKTPAXX

SEQ ID NO: 43583 - protein, 37 aa, Artificial Sequence
  GFR-binding peptide
  MOD_RES (2)..(34)..(35): Xaa is C or S
GXAKVVMNPYVKLIVNNSSDFFLVSLSSLKTPAXXAK

SEQ ID NO: 43584 - protein, 41 aa, Artificial Sequence
  GFR-binding peptide
  MOD_RES (1)..(35)..(36): Xaa is C or S
  MOD_RES (13)..(14)..(15)..(16)..(17): Xaa is A or G
  MOD_RES (18)..(19)..(20)..(21): Xaa is A or G or is absent
XGEVVMEPYVKLXXXXXXXXXFFLMSLSSLETPVXXAKPIS

SEQ ID NO: 43585 - protein, 34 aa, Artificial Sequence
  GFR-binding peptide
  MOD_RES (2)..(4): Xaa is C or S
SXKXSKVVMPYVKLVKPTRGVLFFISLSSLDQPV

SEQ ID NO: 43586 - protein, 38 aa, Artificial Sequence
  GFR-binding peptide
  MOD_RES (1)..(3)..(36)..(37): Xaa is C or S
XGXEAVSMGEPYVKLTPVGMDDFFLVSLSSLKTPVXXA

SEQ ID NO: 43587 - protein, 34 aa, Artificial Sequence
  GFR-binding peptide
  MOD_RES (34)..(34): Xaa is C or S
  MOD_RES (12)..(13)..(14)..(15)..(16): Xaa is A or G
  MOD_RES (17)..(18)..(19)..(20): Xaa is A or G or is absent
AEVVMDPYVKLXXXXXXXXXFFLISLSSLRAPVX

SEQ ID NO: 43588 - protein, 37 aa, Artificial Sequence
  GFR-binding peptide
  MOD_RES (1)..(3)..(35): Xaa is C or S
XGXSRVVMNPYVKLIVNSSDDFFLVSLSSLKTPAXTP

SEQ ID NO: 43589 - protein, 36 aa, Artificial Sequence
  GFR-binding peptide
  MOD_RES (1)..(32)..(33): Xaa is C or S
XSRVIMPYVKLVKPKRGVLFFISLSSLAQPVXXPAA

SEQ ID NO: 43590 - protein, 35 aa, Artificial Sequence
  GFR-binding peptide
  MOD_RES (2)..(34)..(35): Xaa is C or S
GXGEVVMEPYVKLVVKDYEDFFLMSLSSLETPVXX

SEQ ID NO: 43591 - protein, 34 aa, Artificial Sequence
  GFR-binding peptide
  MOD_RES (31)..(32): Xaa is C or S
KVVMNPYVKLIVNNSSDFFLVSLSSLKTPAXXAK

SEQ ID NO: 43592 - protein, 41 aa, Artificial Sequence
  GFR-binding peptide
  MOD_RES (1)..(3)..(37)..(38): Xaa is C or S
  MOD_RES (15)..(16)..(17)..(18)..(19): Xaa is A or G
  MOD_RES (20)..(21)..(22)..(23): Xaa is A or G or is absent
XAXSEVTMNPYVKLXXXXXXXXXFFLISLSSMKEPVXXPEP

SEQ ID NO: 43593 - protein, 33 aa, Artificial Sequence
  GFR-binding peptide
  MOD_RES (32)..(33): Xaa is C or S
SEVVMDPYVKLVVNNASDFFLISLSSLRTPVXX

SEQ ID NO: 43594 - protein, 37 aa, Artificial Sequence
  GFR-binding peptide
  MOD_RES (2)..(34)..(35): Xaa is C or S
GXARVVMNPYVKLIVNSSDDFFLVSLSSLQTPAXXPK

SEQ ID NO: 43595 - protein, 37 aa, Artificial Sequence
  GFR-binding peptide
  MOD_RES (1)..(3)..(37): Xaa is C or S
  MOD_RES (15)..(16)..(17)..(18)..(19): Xaa is A or G
  MOD_RES (20)..(21)..(22)..(23): Xaa is A or G or is absent
XGXAKVVMNPYVKLXXXXXXXXXFFLVSLSSLKTPAX

SEQ ID NO: 43596 - protein, 34 aa, Artificial Sequence
  GFR-binding peptide
  MOD_RES (1)..(1): Xaa is C or S
  MOD_RES (13)..(14)..(15)..(16)..(17): Xaa is A or G
  MOD_RES (18)..(19)..(20)..(21): Xaa is A or G or is absent
XGEVVMEPYVKLXXXXXXXXXFFLMSLSSLETPV

SEQ ID NO: 43597 - protein, 44 aa, Artificial Sequence
  GFR-binding peptide
  MOD_RES (1)..(3)..(40): Xaa is C or S
XAXELHEELRPYVKLLKPKKRVYEFFLVSLSSHHVRSPQXKVSS

SEQ ID NO: 43598 - protein, 39 aa, Artificial Sequence
  GFR-binding peptide
  MOD_RES (1)..(3)..(35)..(36): Xaa is C or S
XGXGEVVMEPYVKLVVKDYEDFFLMSLSSLETPVXXAKP

SEQ ID NO: 43599 - protein, 38 aa, Artificial Sequence
  GFR-binding peptide
  MOD_RES (2)..(36)..(37): Xaa is C or S
  MOD_RES (14)..(15)..(16)..(17)..(18): Xaa is A or G
  MOD_RES (19)..(20)..(21)..(22): Xaa is A or G or is absent
GXRDVVMGPYVKLXXXXXXXXXFFLMSLSSMKTPTXXP

SEQ ID NO: 43600 - protein, 38 aa, Artificial Sequence
  GFR-binding peptide
  MOD_RES (2)..(4)..(36)..(37): Xaa is C or S
HXGXSRVVMNPYVKLIVNSSDDFFLVSLSSLKTPAXXP

SEQ ID NO: 43601 - protein, 36 aa, Artificial Sequence
  GFR-binding peptide
  MOD_RES (1)..(3)..(35)..(36): Xaa is C or S
XGXRDVVMGPYVKLIIQQKDNFFLMSLSSMKTPTXX

SEQ ID NO: 43602 - protein, 34 aa, Artificial Sequence
  GFR-binding peptide
  MOD_RES (34)..(34): Xaa is C or S
  MOD_RES (12)..(13)..(14)..(15)..(16): Xaa is A or G
  MOD_RES (17)..(18)..(19)..(20): Xaa is A or G or is absent
GEVVMEPYVKLXXXXXXXXXFFLMSLSSLETPVX

SEQ ID NO: 43603 - protein, 34 aa, Artificial Sequence
  GFR-binding peptide
  MOD_RES (1)..(34): Xaa is C or S
XEAVSMGEPYVKLTPVGMDDFFLVSLSSLKTPVX

SEQ ID NO: 43604 - protein, 33 aa, Artificial Sequence
  GFR-binding peptide
  MOD_RES (12)..(13)..(14)..(15)..(16): Xaa is A or G
  MOD_RES (17)..(18)..(19)..(20): Xaa is A or G or is absent
SEVTMNPYVKLXXXXXXXXXFFLISLSSMKEPV

SEQ ID NO: 43605 - protein, 39 aa, Artificial Sequence
  GFR-binding peptide
  MOD_RES (2)..(4)..(36)..(37): Xaa is C or S
RXGXGEVVMEPYVKLVVKDYEDFFLMSLSSLETPVXXAK

SEQ ID NO: 43606 - protein, 39 aa, Artificial Sequence
  GFR-binding peptide
  MOD_RES (1)..(3)..(37)..(38): Xaa is C or S
  MOD_RES (15)..(16)..(17)..(18)..(19): Xaa is A or G
  MOD_RES (20)..(21)..(22)..(23): Xaa is A or G or is absent
XGXAKVVMNPYVKLXXXXXXXXXFFLVSLSSLKTPAXXA

SEQ ID NO: 43607 - protein, 36 aa, Artificial Sequence
  GFR-binding peptide
  MOD_RES (32)..(33): Xaa is C or S
RDVVMGPYVKLIIQQKDNFFLMSLSSMKTPTXXPGA

SEQ ID NO: 43608 - protein, 34 aa, Artificial Sequence
  GFR-binding peptide
  MOD_RES (2)..(2): Xaa is C or S
GXEAVSMGEPYVKLTPVGMDDFFLVSLSSLKTPV

SEQ ID NO: 43609 - protein, 35 aa, Artificial Sequence
  GFR-binding peptide
  MOD_RES (2)..(2): Xaa is C or S
  MOD_RES (14)..(15)..(16)..(17)..(18): Xaa is A or G
  MOD_RES (19)..(20)..(21)..(22): Xaa is A or G or is absent
GXRDVVMGPYVKLXXXXXXXXXFFLMSLSSMKTPT

SEQ ID NO: 43610 - protein, 38 aa, Artificial Sequence
  GFR-binding peptide
  MOD_RES (2)..(2): Xaa is C or S
  MOD_RES (15)..(16)..(17)..(18)..(19): Xaa is A or G
  MOD_RES (20)..(21)..(22)..(23): Xaa is A or G or is absent
AXELHEELRPYVKLXXXXXXXXXFFLVSLSSHHVRSPQ

SEQ ID NO: 43611 - protein, 35 aa, Artificial Sequence
  GFR-binding peptide
  MOD_RES (34)..(35): Xaa is C or S
  MOD_RES (12)..(13)..(14)..(15)..(16): Xaa is A or G
  MOD_RES (17)..(18)..(19)..(20): Xaa is A or G or is absent
GEVVMEPYVKLXXXXXXXXXFFLMSLSSLETPVXX

SEQ ID NO: 43612 - protein, 40 aa, Artificial Sequence
  GFR-binding peptide
  MOD_RES (2)..(4)..(36)..(37): Xaa is C or S
RXAXSEVTMNPYVKLVVNKNEDFFLISLSSMKEPVXXPEP

SEQ ID NO: 43613 - protein, 38 aa, Artificial Sequence
  GFR-binding peptide
  MOD_RES (1)..(34)..(35): Xaa is C or S
  MOD_RES (12)..(13)..(14)..(15)..(16): Xaa is A or G
  MOD_RES (17)..(18)..(19)..(20): Xaa is A or G or is absent
XSKVVMPYVKLXXXXXXXXXFFLISLSSLDQPVXXPSA

SEQ ID NO: 43614 - protein, 36 aa, Artificial Sequence
  GFR-binding peptide
  MOD_RES (2)..(35)..(36): Xaa is C or S
  MOD_RES (13)..(14)..(15)..(16)..(17): Xaa is A or G
  MOD_RES (18)..(19)..(20)..(21): Xaa is A or G or is absent
KXSKVIMPYVKLXXXXXXXXXFFLISLSSLDQSVXX

SEQ ID NO: 43615 - protein, 40 aa, Artificial Sequence
  GFR-binding peptide
  MOD_RES (1)..(3)..(37)..(38): Xaa is C or S
  MOD_RES (15)..(16)..(17)..(18)..(19): Xaa is A or G
  MOD_RES (20)..(21)..(22)..(23): Xaa is A or G or is absent
XGXSEVVMDPYVKLXXXXXXXXXFFLISLSSLRTPVXXTP

SEQ ID NO: 43616 - protein, 37 aa, Artificial Sequence
  GFR-binding peptide
  MOD_RES (37)..(37): Xaa is C or S
  MOD_RES (13)..(14)..(15)..(16)..(17): Xaa is A or G
  MOD_RES (18)..(19)..(20)..(21): Xaa is A or G or is absent
ELHEELRPYVKLXXXXXXXXXFFLVSLSSHHVRSPQX

SEQ ID NO: 43617 - protein, 31 aa, Artificial Sequence
  GFR-binding peptide
RDVVMGPYVKLIIQQKDNFFLMSLSSMKTPT

SEQ ID NO: 43618 - protein, 41 aa, Artificial Sequence
  GFR-binding peptide
  MOD_RES (1)..(35)..(36): Xaa is C or S
  MOD_RES (13)..(14)..(15)..(16)..(17): Xaa is A or G
  MOD_RES (18)..(19)..(20)..(21): Xaa is A or G or is absent
XSEVVMDPYVKLXXXXXXXXXFFLISLSSLRTPVXXTPPTS

SEQ ID NO: 43619 - protein, 36 aa, Artificial Sequence
  GFR-binding peptide
  MOD_RES (2)..(34)..(35): Xaa is C or S
GXGEVVMEPYVKLVVKDYEDFFLMSLSSLETPVXXA

SEQ ID NO: 43620 - protein, 36 aa, Artificial Sequence
  GFR-binding peptide
  MOD_RES (2)..(34)..(35): Xaa is C or S
GXSRVVMNPYVKLIVNSSDDFFLVSLSSLKTPAXXP

SEQ ID NO: 43621 - protein, 30 aa, Artificial Sequence
  GFR-binding peptide
RVVMNPYVKLIVNSSDDFFLVSLSSLKTPA

SEQ ID NO: 43622 - protein, 33 aa, Artificial Sequence
  GFR-binding peptide
  MOD_RES (32)..(33): Xaa is C or S
ARVVMNPYVKLIVNSSDDFFLVSLSSLQTPAXX

SEQ ID NO: 43623 - protein, 36 aa, Artificial Sequence
  GFR-binding peptide
  MOD_RES (2)..(36): Xaa is C or S
  MOD_RES (14)..(15)..(16)..(17)..(18): Xaa is A or G
  MOD_RES (19)..(20)..(21)..(22): Xaa is A or G or is absent
GXESVAMGPYVKLXXXXXXXXXFFLISLSSLKTPVX

SEQ ID NO: 43624 - protein, 36 aa, Artificial Sequence
  GFR-binding peptide
  MOD_RES (32)..(33): Xaa is C or S
ESVAMGPYVKLYTVVGKDFFLISLSSLKTPVXXAKS

SEQ ID NO: 43625 - protein, 31 aa, Artificial Sequence
  GFR-binding peptide
  MOD_RES (31)..(31): Xaa is C or S
KVVMNPYVKLIVNNSSDFFLVSLSSLKTPAX

SEQ ID NO: 43626 - protein, 36 aa, Artificial Sequence
  GFR-binding peptide
  MOD_RES (1)..(33)..(34): Xaa is C or S
XRDVVMGPYVKLIIQQKDNFFLMSLSSMKTPTXXPG

SEQ ID NO: 43627 - protein, 40 aa, Artificial Sequence
  GFR-binding peptide
  MOD_RES (1)..(3)..(35)..(36): Xaa is C or S
XGXARVVMNPYVKLIVNSSDDFFLVSLSSLQTPAXXPKPV

SEQ ID NO: 43628 - protein, 39 aa, Artificial Sequence
  GFR-binding peptide
  MOD_RES (1)..(34)..(35): Xaa is C or S
  MOD_RES (12)..(13)..(14)..(15)..(16): Xaa is A or G
  MOD_RES (17)..(18)..(19)..(20): Xaa is A or G or is absent
XSRVIMPYVKLXXXXXXXXXFFLISLSSLAQPVXXPAAS

SEQ ID NO: 43629 - protein, 39 aa, Artificial Sequence
  GFR-binding peptide
  MOD_RES (1)..(38): Xaa is C or S
XELHEELRPYVKLLKPKKRVYEFFLVSLSSHHVRSPQXK

SEQ ID NO: 43630 - protein, 38 aa, Artificial Sequence
  GFR-binding peptide
  MOD_RES (33)..(33): Xaa is C or S
  MOD_RES (11)..(12)..(13)..(14)..(15): Xaa is A or G
  MOD_RES (16)..(17)..(18)..(19): Xaa is A or G or is absent
NHQLFPYVKLXXXXXXXXXFFLMSLSSEETPVXELGED

SEQ ID NO: 43631 - protein, 38 aa, Artificial Sequence
  GFR-binding peptide
  MOD_RES (2)..(4)..(38): Xaa is C or S
  MOD_RES (16)..(17)..(18)..(19)..(20): Xaa is A or G
  MOD_RES (21)..(22)..(23)..(24): Xaa is A or G or is absent
RXGXAEVVMDPYVKLXXXXXXXXXFFLISLSSLRAPVX

SEQ ID NO: 43632 - protein, 38 aa, Artificial Sequence
  GFR-binding peptide
  MOD_RES (1)..(35)..(36): Xaa is C or S
  MOD_RES (13)..(14)..(15)..(16)..(17): Xaa is A or G
  MOD_RES (18)..(19)..(20)..(21): Xaa is A or G or is absent
XAEVVMDPYVKLXXXXXXXXXFFLISLSSLRAPVXXSA

SEQ ID NO: 43633 - protein, 33 aa, Artificial Sequence
  GFR-binding peptide
  MOD_RES (1)..(1): Xaa is C or S
  MOD_RES (12)..(13)..(14)..(15)..(16): Xaa is A or G
  MOD_RES (17)..(18)..(19)..(20): Xaa is A or G or is absent
XSKVIMPYVKLXXXXXXXXXFFLISLSSLDQSV

SEQ ID NO: 43634 - protein, 32 aa, Artificial Sequence
  GFR-binding peptide
  MOD_RES (1)..(1): Xaa is C or S
XRDVVMGPYVKLIIQQKDNFFLMSLSSMKTPT

SEQ ID NO: 43635 - protein, 39 aa, Artificial Sequence
  GFR-binding peptide
  MOD_RES (33)..(34): Xaa is C or S
  MOD_RES (11)..(12)..(13)..(14)..(15): Xaa is A or G
  MOD_RES (16)..(17)..(18)..(19): Xaa is A or G or is absent
RVVMNPYVKLXXXXXXXXXFFLVSLSSLKTPAXXPKPVY

SEQ ID NO: 43636 - protein, 36 aa, Artificial Sequence
  GFR-binding peptide
  MOD_RES (2)..(4): Xaa is C or S
RXGXEAVSMGEPYVKLTPVGMDDFFLVSLSSLKTPV

SEQ ID NO: 43637 - protein, 36 aa, Artificial Sequence
  GFR-binding peptide
  MOD_RES (1)..(35)..(36): Xaa is C or S
  MOD_RES (13)..(14)..(15)..(16)..(17): Xaa is A or G
  MOD_RES (18)..(19)..(20)..(21): Xaa is A or G or is absent
XSEVVMDPYVKLXXXXXXXXXFFLISLSSLRTPVXX

SEQ ID NO: 43638 - protein, 39 aa, Artificial Sequence
  GFR-binding peptide
  MOD_RES (2)..(36)..(37): Xaa is C or S
  MOD_RES (14)..(15)..(16)..(17)..(18): Xaa is A or G
  MOD_RES (19)..(20)..(21)..(22): Xaa is A or G or is absent
GXRDVVMGPYVKLXXXXXXXXXFFLMSLSSMKTPTXXPG

SEQ ID NO: 43639 - protein, 39 aa, Artificial Sequence
  GFR-binding peptide
  MOD_RES (33)..(34): Xaa is C or S
  MOD_RES (11)..(12)..(13)..(14)..(15): Xaa is A or G
  MOD_RES (16)..(17)..(18)..(19): Xaa is A or G or is absent
EVTMNPYVKLXXXXXXXXXFFLISLSSMKEPVXXPEPIG

SEQ ID NO: 43640 - protein, 35 aa, Artificial Sequence
  GFR-binding peptide
  MOD_RES (2)..(34)..(35): Xaa is C or S
GXSEVVMDPYVKLVVNNASDFFLISLSSLRTPVXX

SEQ ID NO: 43641 - protein, 40 aa, Artificial Sequence
  GFR-binding peptide
  MOD_RES (34)..(34): Xaa is C or S
KNHQLFPYVKLHQGQHPKIRFFLMSLSSEETPVXELGEDN

SEQ ID NO: 43642 - protein, 32 aa, Artificial Sequence
  GFR-binding peptide
  MOD_RES (32)..(32): Xaa is C or S
AEVVMDPYVKLVVNNAADFFLISLSSLRAPVX

SEQ ID NO: 43643 - protein, 39 aa, Artificial Sequence
  GFR-binding peptide
  MOD_RES (2)..(4)..(36)..(37): Xaa is C or S
RXAXSEVTMNPYVKLVVNKNEDFFLISLSSMKEPVXXPE

SEQ ID NO: 43644 - protein, 43 aa, Artificial Sequence
  GFR-binding peptide
  MOD_RES (1)..(3)..(37): Xaa is C or S
XEXKNHQLFPYVKLHQGQHPKIRFFLMSLSSEETPVXELGEDN

SEQ ID NO: 43645 - protein, 34 aa, Artificial Sequence
  GFR-binding peptide
  MOD_RES (34)..(34): Xaa is C or S
  MOD_RES (12)..(13)..(14)..(15)..(16): Xaa is A or G
  MOD_RES (17)..(18)..(19)..(20): Xaa is A or G or is absent
RDVVMGPYVKLXXXXXXXXXFFLMSLSSMKTPTX

SEQ ID NO: 43646 - protein, 38 aa, Artificial Sequence
  GFR-binding peptide
  MOD_RES (1)..(34)..(35): Xaa is C or S
  MOD_RES (12)..(13)..(14)..(15)..(16): Xaa is A or G
  MOD_RES (17)..(18)..(19)..(20): Xaa is A or G or is absent
XEEVIMPYVKLXXXXXXXXXFFLMSLSSTKVPAXXTSP

SEQ ID NO: 43647 - protein, 37 aa, Artificial Sequence
  GFR-binding peptide
  MOD_RES (34)..(35): Xaa is C or S
  MOD_RES (12)..(13)..(14)..(15)..(16): Xaa is A or G
  MOD_RES (17)..(18)..(19)..(20): Xaa is A or G or is absent
SEVTMNPYVKLXXXXXXXXXFFLISLSSMKEPVXXPE

SEQ ID NO: 43648 - protein, 36 aa, Artificial Sequence
  GFR-binding peptide
  MOD_RES (1)..(33)..(34): Xaa is C or S
XAEVVMDPYVKLVVNNAADFFLISLSSLRAPVXXSA

SEQ ID NO: 43649 - protein, 40 aa, Artificial Sequence
  GFR-binding peptide
  MOD_RES (2)..(36)..(37): Xaa is C or S
  MOD_RES (14)..(15)..(16)..(17)..(18): Xaa is A or G
  MOD_RES (19)..(20)..(21)..(22): Xaa is A or G or is absent
GXSEVVMDPYVKLXXXXXXXXXFFLISLSSLRTPVXXTPP

SEQ ID NO: 43650 - protein, 34 aa, Artificial Sequence
  GFR-binding peptide
  MOD_RES (12)..(13)..(14)..(15)..(16): Xaa is A or G
  MOD_RES (17)..(18)..(19)..(20): Xaa is A or G or is absent
LHEELRPYVKLXXXXXXXXXFFLVSLSSHHVRSP

SEQ ID NO: 43651 - protein, 41 aa, Artificial Sequence
  GFR-binding peptide
  MOD_RES (2)..(39): Xaa is C or S
  MOD_RES (15)..(16)..(17)..(18)..(19): Xaa is A or G
  MOD_RES (20)..(21)..(22)..(23): Xaa is A or G or is absent
AXELHEELRPYVKLXXXXXXXXXFFLVSLSSHHVRSPQXKV

SEQ ID NO: 43652 - protein, 38 aa, Artificial Sequence
  GFR-binding peptide
  MOD_RES (2)..(4)..(38): Xaa is C or S
RXEXKNHQLFPYVKLHQGQHPKIRFFLMSLSSEETPVX

SEQ ID NO: 43653 - protein, 36 aa, Artificial Sequence
  GFR-binding peptide
  MOD_RES (1)..(34)..(35): Xaa is C or S
  MOD_RES (12)..(13)..(14)..(15)..(16): Xaa is A or G
  MOD_RES (17)..(18)..(19)..(20): Xaa is A or G or is absent
XSRVIMPYVKLXXXXXXXXXFFLISLSSLAQPVXXP

SEQ ID NO: 43654 - protein, 32 aa, Artificial Sequence
  GFR-binding peptide
  MOD_RES (11)..(12)..(13)..(14)..(15): Xaa is A or G
  MOD_RES (16)..(17)..(18)..(19): Xaa is A or G or is absent
RVVMNPYVKLXXXXXXXXXFFLVSLSSLKTPA

SEQ ID NO: 43655 - protein, 37 aa, Artificial Sequence
  GFR-binding peptide
  MOD_RES (2)..(36)..(37): Xaa is C or S
  MOD_RES (14)..(15)..(16)..(17)..(18): Xaa is A or G
  MOD_RES (19)..(20)..(21)..(22): Xaa is A or G or is absent
GXARVVMNPYVKLXXXXXXXXXFFLVSLSSLQTPAXX

SEQ ID NO: 43656 - protein, 33 aa, Artificial Sequence
  GFR-binding peptide
  MOD_RES (1)..(33): Xaa is C or S
XGEVVMEPYVKLVVKDYEDFFLMSLSSLETPVX

SEQ ID NO: 43657 - protein, 38 aa, Artificial Sequence
  GFR-binding peptide
  MOD_RES (1)..(33)..(34): Xaa is C or S
XARVVMNPYVKLIVNSSDDFFLVSLSSLQTPAXXPKPV

SEQ ID NO: 43658 - protein, 33 aa, Artificial Sequence
  GFR-binding peptide
  MOD_RES (12)..(13)..(14)..(15)..(16): Xaa is A or G
  MOD_RES (17)..(18)..(19)..(20): Xaa is A or G or is absent
ESVAMGPYVKLXXXXXXXXXFFLISLSSLKTPV

SEQ ID NO: 43659 - protein, 36 aa, Artificial Sequence
  GFR-binding peptide
  MOD_RES (1)..(33)..(34): Xaa is C or S
XGEVVMEPYVKLVVKDYEDFFLMSLSSLETPVXXAK

SEQ ID NO: 43660 - protein, 39 aa, Artificial Sequence
  GFR-binding peptide
  MOD_RES (2)..(4)..(36)..(37): Xaa is C or S
HXGXAKVVMNPYVKLIVNNSSDFFLVSLSSLKTPAXXAK

SEQ ID NO: 43661 - protein, 35 aa, Artificial Sequence
  GFR-binding peptide
  MOD_RES (1)..(3)..(34)..(35): Xaa is C or S
XKXSKVVMPYVKLVKPTRGVLFFISLSSLDQPVXX

SEQ ID NO: 43662 - protein, 35 aa, Artificial Sequence
  GFR-binding peptide
  MOD_RES (1)..(3)..(35): Xaa is C or S
XGXESVAMGPYVKLYTVVGKDFFLISLSSLKTPVX

SEQ ID NO: 43663 - protein, 35 aa, Artificial Sequence
  GFR-binding peptide
  MOD_RES (31)..(32): Xaa is C or S
EVTMNPYVKLVVNKNEDFFLISLSSMKEPVXXPEP

SEQ ID NO: 43664 - protein, 41 aa, Artificial Sequence
  GFR-binding peptide
  MOD_RES (1)..(3)..(37)..(38): Xaa is C or S
  MOD_RES (15)..(16)..(17)..(18)..(19): Xaa is A or G
  MOD_RES (20)..(21)..(22)..(23): Xaa is A or G or is absent
XGXGEVVMEPYVKLXXXXXXXXXFFLMSLSSLETPVXXAKP

SEQ ID NO: 43665 - protein, 44 aa, Artificial Sequence
  GFR-binding peptide
  MOD_RES (2)..(4)..(38): Xaa is C or S
  MOD_RES (16)..(17)..(18)..(19)..(20): Xaa is A or G
  MOD_RES (21)..(22)..(23)..(24): Xaa is A or G or is absent
HXGXSRVVMNPYVKLXXXXXXXXXFFLVSLSSLKTPAXTPKTVH

SEQ ID NO: 43666 - protein, 37 aa, Artificial Sequence
  GFR-binding peptide
  MOD_RES (1)..(3)..(34)..(35): Xaa is C or S
XKXSRVIMPYVKLVKPKRGVLFFISLSSLAQPVXXPA

SEQ ID NO: 43667 - protein, 32 aa, Artificial Sequence
  GFR-binding peptide
  MOD_RES (31)..(32): Xaa is C or S
SKVVMPYVKLVKPTRGVLFFISLSSLDQPVXX

SEQ ID NO: 43668 - protein, 41 aa, Artificial Sequence
  GFR-binding peptide
  MOD_RES (2)..(4)..(38)..(39): Xaa is C or S
  MOD_RES (16)..(17)..(18)..(19)..(20): Xaa is A or G
  MOD_RES (21)..(22)..(23)..(24): Xaa is A or G or is absent
HXGXSRVVMNPYVKLXXXXXXXXXFFLVSLSSLKTPAXXPK

SEQ ID NO: 43669 - protein, 35 aa, Artificial Sequence
  GFR-binding peptide
  MOD_RES (33)..(34): Xaa is C or S
  MOD_RES (11)..(12)..(13)..(14)..(15): Xaa is A or G
  MOD_RES (16)..(17)..(18)..(19): Xaa is A or G or is absent
EEVIMPYVKLXXXXXXXXXFFLMSLSSTKVPAXXT

SEQ ID NO: 43670 - protein, 37 aa, Artificial Sequence
  GFR-binding peptide
  MOD_RES (32)..(33): Xaa is C or S
SRVVMNPYVKLIVNSSDDFFLVSLSSLKTPAXXPKPV

SEQ ID NO: 43671 - protein, 39 aa, Artificial Sequence
  GFR-binding peptide
  MOD_RES (35)..(35): Xaa is C or S
HEELRPYVKLLKPKKRVYEFFLVSLSSHHVRSPQXKVSS

SEQ ID NO: 43672 - protein, 37 aa, Artificial Sequence
  GFR-binding peptide
  MOD_RES (1)..(32)..(33): Xaa is C or S
XEEVIMPYVKLLLVRGNDFFLMSLSSTKVPAXXTSPV

SEQ ID NO: 43673 - protein, 40 aa, Artificial Sequence
  GFR-binding peptide
  MOD_RES (1)..(3)..(35)..(36): Xaa is C or S
XGXRDVVMGPYVKLIIQQKDNFFLMSLSSMKTPTXXPGAS

SEQ ID NO: 43674 - protein, 38 aa, Artificial Sequence
  GFR-binding peptide
  MOD_RES (32)..(33): Xaa is C or S
SEVVMDPYVKLVVNNASDFFLISLSSLRTPVXXTPPTS

SEQ ID NO: 43675 - protein, 40 aa, Artificial Sequence
  GFR-binding peptide
  MOD_RES (1)..(3)..(35)..(36): Xaa is C or S
XAXSEVTMNPYVKLVVNKNEDFFLISLSSMKEPVXXPEPI

SEQ ID NO: 43676 - protein, 37 aa, Artificial Sequence
  GFR-binding peptide
  MOD_RES (2)..(2): Xaa is C or S
  MOD_RES (15)..(16)..(17)..(18)..(19): Xaa is A or G
  MOD_RES (20)..(21)..(22)..(23): Xaa is A or G or is absent
AXELHEELRPYVKLXXXXXXXXXFFLVSLSSHHVRSP

SEQ ID NO: 43677 - protein, 34 aa, Artificial Sequence
  GFR-binding peptide
  MOD_RES (34)..(34): Xaa is C or S
  MOD_RES (12)..(13)..(14)..(15)..(16): Xaa is A or G
  MOD_RES (17)..(18)..(19)..(20): Xaa is A or G or is absent
ARVVMNPYVKLXXXXXXXXXFFLVSLSSLQTPAX

SEQ ID NO: 43678 - protein, 40 aa, Artificial Sequence
  GFR-binding peptide
  MOD_RES (2)..(4)..(36)..(37): Xaa is C or S
SXGXRDVVMGPYVKLIIQQKDNFFLMSLSSMKTPTXXPGA

SEQ ID NO: 43679 - protein, 40 aa, Artificial Sequence
  GFR-binding peptide
  MOD_RES (36)..(36): Xaa is C or S
LHEELRPYVKLLKPKKRVYEFFLVSLSSHHVRSPQXKVSS

SEQ ID NO: 43680 - protein, 40 aa, Artificial Sequence
  GFR-binding peptide
  MOD_RES (1)..(35)..(36): Xaa is C or S
  MOD_RES (13)..(14)..(15)..(16)..(17): Xaa is A or G
  MOD_RES (18)..(19)..(20)..(21): Xaa is A or G or is absent
XSEVVMDPYVKLXXXXXXXXXFFLISLSSLRTPVXXTPPT

SEQ ID NO: 43681 - protein, 38 aa, Artificial Sequence
  GFR-binding peptide
  MOD_RES (2)..(36)..(37): Xaa is C or S
  MOD_RES (14)..(15)..(16)..(17)..(18): Xaa is A or G
  MOD_RES (19)..(20)..(21)..(22): Xaa is A or G or is absent
GXSRVVMNPYVKLXXXXXXXXXFFLVSLSSLKTPAXXP

SEQ ID NO: 43682 - protein, 38 aa, Artificial Sequence
  GFR-binding peptide
  MOD_RES (1)..(3)..(35)..(36): Xaa is C or S
XGXRDVVMGPYVKLIIQQKDNFFLMSLSSMKTPTXXPG

SEQ ID NO: 43683 - protein, 39 aa, Artificial Sequence
  GFR-binding peptide
  MOD_RES (2)..(4)..(37)..(38): Xaa is C or S
  MOD_RES (15)..(16)..(17)..(18)..(19): Xaa is A or G
  MOD_RES (20)..(21)..(22)..(23): Xaa is A or G or is absent
SXKXSRVIMPYVKLXXXXXXXXXFFLISLSSLAQPVXXP

SEQ ID NO: 43684 - protein, 40 aa, Artificial Sequence
  GFR-binding peptide
  MOD_RES (1)..(3)..(37)..(38): Xaa is C or S
  MOD_RES (15)..(16)..(17)..(18)..(19): Xaa is A or G
  MOD_RES (20)..(21)..(22)..(23): Xaa is A or G or is absent
XGXAKVVMNPYVKLXXXXXXXXXFFLVSLSSLKTPAXXAK

SEQ ID NO: 43685 - protein, 40 aa, Artificial Sequence
  GFR-binding peptide
  MOD_RES (1)..(35)..(36): Xaa is C or S
  MOD_RES (13)..(14)..(15)..(16)..(17): Xaa is A or G
  MOD_RES (18)..(19)..(20)..(21): Xaa is A or G or is absent
XRDVVMGPYVKLXXXXXXXXXFFLMSLSSMKTPTXXPGAS

SEQ ID NO: 43686 - protein, 42 aa, Artificial Sequence
  GFR-binding peptide
  MOD_RES (1)..(3)..(40): Xaa is C or S
XAXELHEELRPYVKLLKPKKRVYEFFLVSLSSHHVRSPQXKV

SEQ ID NO: 43687 - protein, 35 aa, Artificial Sequence
  GFR-binding peptide
  MOD_RES (1)..(3)..(35): Xaa is C or S
XGXGEVVMEPYVKLVVKDYEDFFLMSLSSLETPVX

SEQ ID NO: 43688 - protein, 37 aa, Artificial Sequence
  GFR-binding peptide
  MOD_RES (1)..(36)..(37): Xaa is C or S
  MOD_RES (14)..(15)..(16)..(17)..(18): Xaa is A or G
  MOD_RES (19)..(20)..(21)..(22): Xaa is A or G or is absent
XEAVSMGEPYVKLXXXXXXXXXFFLVSLSSLKTPVXX

SEQ ID NO: 43689 - protein, 36 aa, Artificial Sequence
  GFR-binding peptide
  MOD_RES (2)..(36): Xaa is C or S
  MOD_RES (14)..(15)..(16)..(17)..(18): Xaa is A or G
  MOD_RES (19)..(20)..(21)..(22): Xaa is A or G or is absent
GXRDVVMGPYVKLXXXXXXXXXFFLMSLSSMKTPTX

SEQ ID NO: 43690 - protein, 36 aa, Artificial Sequence
  GFR-binding peptide
  MOD_RES (2)..(34)..(35): Xaa is C or S
GXSEVVMDPYVKLVVNNASDFFLISLSSLRTPVXXT

SEQ ID NO: 43691 - protein, 42 aa, Artificial Sequence
  GFR-binding peptide
  MOD_RES (2)..(36)..(37): Xaa is C or S
  MOD_RES (14)..(15)..(16)..(17)..(18): Xaa is A or G
  MOD_RES (19)..(20)..(21)..(22): Xaa is A or G or is absent
AXSEVTMNPYVKLXXXXXXXXXFFLISLSSMKEPVXXPEPIG

SEQ ID NO: 43692 - protein, 33 aa, Artificial Sequence
  GFR-binding peptide
  MOD_RES (11)..(12)..(13)..(14)..(15): Xaa is A or G
  MOD_RES (16)..(17)..(18)..(19): Xaa is A or G or is absent
HEELRPYVKLXXXXXXXXXFFLVSLSSHHVRSP

SEQ ID NO: 43693 - protein, 32 aa, Artificial Sequence
  GFR-binding peptide
  MOD_RES (32)..(32): Xaa is C or S
GEVVMEPYVKLVVKDYEDFFLMSLSSLETPVX

SEQ ID NO: 43694 - protein, 42 aa, Artificial Sequence
  GFR-binding peptide
  MOD_RES (2)..(4)..(38): Xaa is C or S
  MOD_RES (16)..(17)..(18)..(19)..(20): Xaa is A or G
  MOD_RES (21)..(22)..(23)..(24): Xaa is A or G or is absent
RXEXKNHQLFPYVKLXXXXXXXXXFFLMSLSSEETPVXELGE

SEQ ID NO: 43695 - protein, 33 aa, Artificial Sequence
  GFR-binding peptide
  MOD_RES (1)..(3): Xaa is C or S
XKXSRVIMPYVKLVKPKRGVLFFISLSSLAQPV

SEQ ID NO: 43696 - protein, 39 aa, Artificial Sequence
  GFR-binding peptide
  MOD_RES (1)..(3): Xaa is C or S
  MOD_RES (16)..(17)..(18)..(19)..(20): Xaa is A or G
  MOD_RES (21)..(22)..(23)..(24): Xaa is A or G or is absent
XAXELHEELRPYVKLXXXXXXXXXFFLVSLSSHHVRSPQ

SEQ ID NO: 43697 - protein, 43 aa, Artificial Sequence
  GFR-binding peptide
  MOD_RES (1)..(3)..(40): Xaa is C or S
XAXELHEELRPYVKLLKPKKRVYEFFLVSLSSHHVRSPQXKVS

SEQ ID NO: 43698 - protein, 33 aa, Artificial Sequence
  GFR-binding peptide
  MOD_RES (1)..(3): Xaa is C or S
XKXSKVIMPYVKLIKPTKGILFFISLSSLDQSV

SEQ ID NO: 43699 - protein, 40 aa, Artificial Sequence
  GFR-binding peptide
  MOD_RES (1)..(3)..(37)..(38): Xaa is C or S
  MOD_RES (15)..(16)..(17)..(18)..(19): Xaa is A or G
  MOD_RES (20)..(21)..(22)..(23): Xaa is A or G or is absent
XGXARVVMNPYVKLXXXXXXXXXFFLVSLSSLQTPAXXPK

SEQ ID NO: 43700 - protein, 41 aa, Artificial Sequence
  GFR-binding peptide
  MOD_RES (1)..(3)..(40): Xaa is C or S
  MOD_RES (16)..(17)..(18)..(19)..(20): Xaa is A or G
  MOD_RES (21)..(22)..(23)..(24): Xaa is A or G or is absent
XAXELHEELRPYVKLXXXXXXXXXFFLVSLSSHHVRSPQXK

SEQ ID NO: 43701 - protein, 39 aa, Artificial Sequence
  GFR-binding peptide
  MOD_RES (1)..(3)..(34)..(35): Xaa is C or S
XKXSRVIMPYVKLVKPKRGVLFFISLSSLAQPVXXPAAS

SEQ ID NO: 43702 - protein, 36 aa, Artificial Sequence
  GFR-binding peptide
  MOD_RES (2)..(34)..(35): Xaa is C or S
GXAEVVMDPYVKLVVNNAADFFLISLSSLRAPVXXS

SEQ ID NO: 43703 - protein, 41 aa, Artificial Sequence
  GFR-binding peptide
  MOD_RES (1)..(35): Xaa is C or S
  MOD_RES (13)..(14)..(15)..(16)..(17): Xaa is A or G
  MOD_RES (18)..(19)..(20)..(21): Xaa is A or G or is absent
XKNHQLFPYVKLXXXXXXXXXFFLMSLSSEETPVXELGEDN

SEQ ID NO: 43704 - protein, 38 aa, Artificial Sequence
  GFR-binding peptide
  MOD_RES (1)..(3)..(35)..(36): Xaa is C or S
XGXGEVVMEPYVKLVVKDYEDFFLMSLSSLETPVXXAK

SEQ ID NO: 43705 - protein, 38 aa, Artificial Sequence
  GFR-binding peptide
  MOD_RES (1)..(35)..(36): Xaa is C or S
  MOD_RES (13)..(14)..(15)..(16)..(17): Xaa is A or G
  MOD_RES (18)..(19)..(20)..(21): Xaa is A or G or is absent
XSEVTMNPYVKLXXXXXXXXXFFLISLSSMKEPVXXPE

SEQ ID NO: 43706 - protein, 35 aa, Artificial Sequence
  GFR-binding peptide
  MOD_RES (2)..(4)..(35): Xaa is C or S
SXKXSKVVMPYVKLVKPTRGVLFFISLSSLDQPVX

SEQ ID NO: 43707 - protein, 34 aa, Artificial Sequence
  GFR-binding peptide
  MOD_RES (33)..(33): Xaa is C or S
  MOD_RES (11)..(12)..(13)..(14)..(15): Xaa is A or G
  MOD_RES (16)..(17)..(18)..(19): Xaa is A or G or is absent
NHQLFPYVKLXXXXXXXXXFFLMSLSSEETPVXE

SEQ ID NO: 43708 - protein, 39 aa, Artificial Sequence
  GFR-binding peptide
  MOD_RES (2)..(36)..(37): Xaa is C or S
  MOD_RES (14)..(15)..(16)..(17)..(18): Xaa is A or G
  MOD_RES (19)..(20)..(21)..(22): Xaa is A or G or is absent
GXSEVVMDPYVKLXXXXXXXXXFFLISLSSLRTPVXXTP

SEQ ID NO: 43709 - protein, 37 aa, Artificial Sequence
  GFR-binding peptide
  MOD_RES (1)..(3): Xaa is C or S
  MOD_RES (16)..(17)..(18)..(19)..(20): Xaa is A or G
  MOD_RES (21)..(22)..(23)..(24): Xaa is A or G or is absent
XGXEAVSMGEPYVKLXXXXXXXXXFFLVSLSSLKTPV

SEQ ID NO: 43710 - protein, 32 aa, Artificial Sequence
  GFR-binding peptide
  MOD_RES (11)..(12)..(13)..(14)..(15): Xaa is A or G
  MOD_RES (16)..(17)..(18)..(19): Xaa is A or G or is absent
EEVIMPYVKLXXXXXXXXXFFLMSLSSTKVPA

SEQ ID NO: 43711 - protein, 38 aa, Artificial Sequence
  GFR-binding peptide
  MOD_RES (1)..(3)..(35)..(36): Xaa is C or S
XGXESVAMGPYVKLYTVVGKDFFLISLSSLKTPVXXAK

SEQ ID NO: 43712 - protein, 41 aa, Artificial Sequence
  GFR-binding peptide
  MOD_RES (1)..(35): Xaa is C or S
XKNHQLFPYVKLHQGQHPKIRFFLMSLSSEETPVXELGEDN

SEQ ID NO: 43713 - protein, 37 aa, Artificial Sequence
  GFR-binding peptide
  MOD_RES (1)..(35)..(36): Xaa is C or S
  MOD_RES (13)..(14)..(15)..(16)..(17): Xaa is A or G
  MOD_RES (18)..(19)..(20)..(21): Xaa is A or G or is absent
XSEVTMNPYVKLXXXXXXXXXFFLISLSSMKEPVXXP

SEQ ID NO: 43714 - protein, 38 aa, Artificial Sequence
  GFR-binding peptide
  MOD_RES (2)..(4)..(38): Xaa is C or S
  MOD_RES (16)..(17)..(18)..(19)..(20): Xaa is A or G
  MOD_RES (21)..(22)..(23)..(24): Xaa is A or G or is absent
RXGXGEVVMEPYVKLXXXXXXXXXFFLMSLSSLETPVX

SEQ ID NO: 43715 - protein, 38 aa, Artificial Sequence
  GFR-binding peptide
  MOD_RES (2)..(33)..(34): Xaa is C or S
KXSRVIMPYVKLVKPKRGVLFFISLSSLAQPVXXPAAS

SEQ ID NO: 43716 - protein, 36 aa, Artificial Sequence
  GFR-binding peptide
  MOD_RES (31)..(32): Xaa is C or S
SRVIMPYVKLVKPKRGVLFFISLSSLAQPVXXPAAS

SEQ ID NO: 43717 - protein, 42 aa, Artificial Sequence
  GFR-binding peptide
  MOD_RES (1)..(3)..(37): Xaa is C or S
  MOD_RES (15)..(16)..(17)..(18)..(19): Xaa is A or G
  MOD_RES (20)..(21)..(22)..(23): Xaa is A or G or is absent
XEXKNHQLFPYVKLXXXXXXXXXFFLMSLSSEETPVXELGED

SEQ ID NO: 43718 - protein, 33 aa, Artificial Sequence
  GFR-binding peptide
  MOD_RES (32)..(33): Xaa is C or S
SRVVMNPYVKLIVNSSDDFFLVSLSSLKTPAXX

SEQ ID NO: 43719 - protein, 36 aa, Artificial Sequence
  GFR-binding peptide
  MOD_RES (2)..(2): Xaa is C or S
  MOD_RES (15)..(16)..(17)..(18)..(19): Xaa is A or G
  MOD_RES (20)..(21)..(22)..(23): Xaa is A or G or is absent
AXELHEELRPYVKLXXXXXXXXXFFLVSLSSHHVRS

SEQ ID NO: 43720 - protein, 34 aa, Artificial Sequence
  GFR-binding peptide
  MOD_RES (31)..(32): Xaa is C or S
RVVMNPYVKLIVNSSDDFFLVSLSSLQTPAXXPK

SEQ ID NO: 43721 - protein, 36 aa, Artificial Sequence
  GFR-binding peptide
  MOD_RES (1)..(3)..(35)..(36): Xaa is C or S
XAXSEVTMNPYVKLVVNKNEDFFLISLSSMKEPVXX

SEQ ID NO: 43722 - protein, 33 aa, Artificial Sequence
  GFR-binding peptide
  MOD_RES (1)..(33): Xaa is C or S
XSRVVMNPYVKLIVNSSDDFFLVSLSSLKTPAX

SEQ ID NO: 43723 - protein, 40 aa, Artificial Sequence
  GFR-binding peptide
  MOD_RES (1)..(3)..(35)..(36): Xaa is C or S
XGXESVAMGPYVKLYTVVGKDFFLISLSSLKTPVXXAKSA

SEQ ID NO: 43724 - protein, 40 aa, Artificial Sequence
  GFR-binding peptide
  MOD_RES (34)..(34): Xaa is C or S
  MOD_RES (12)..(13)..(14)..(15)..(16): Xaa is A or G
  MOD_RES (17)..(18)..(19)..(20): Xaa is A or G or is absent
KNHQLFPYVKLXXXXXXXXXFFLMSLSSEETPVXELGEDN

SEQ ID NO: 43725 - protein, 38 aa, Artificial Sequence
  GFR-binding peptide
  MOD_RES (1)..(35)..(36): Xaa is C or S
  MOD_RES (13)..(14)..(15)..(16)..(17): Xaa is A or G
  MOD_RES (18)..(19)..(20)..(21): Xaa is A or G or is absent
XESVAMGPYVKLXXXXXXXXXFFLISLSSLKTPVXXAK

SEQ ID NO: 43726 - protein, 36 aa, Artificial Sequence
  GFR-binding peptide
  MOD_RES (1)..(33)..(34): Xaa is C or S
XSEVVMDPYVKLVVNNASDFFLISLSSLRTPVXXTP

SEQ ID NO: 43727 - protein, 38 aa, Artificial Sequence
  GFR-binding peptide
  MOD_RES (33)..(34): Xaa is C or S
  MOD_RES (11)..(12)..(13)..(14)..(15): Xaa is A or G
  MOD_RES (16)..(17)..(18)..(19): Xaa is A or G or is absent
EVVMDPYVKLXXXXXXXXXFFLISLSSLRTPVXXTPPT

SEQ ID NO: 43728 - protein, 37 aa, Artificial Sequence
  GFR-binding peptide
  MOD_RES (33)..(34): Xaa is C or S
  MOD_RES (11)..(12)..(13)..(14)..(15): Xaa is A or G
  MOD_RES (16)..(17)..(18)..(19): Xaa is A or G or is absent
EVTMNPYVKLXXXXXXXXXFFLISLSSMKEPVXXPEP

SEQ ID NO: 43729 - protein, 39 aa, Artificial Sequence
  GFR-binding peptide
  MOD_RES (1)..(33)..(34): Xaa is C or S
XRDVVMGPYVKLIIQQKDNFFLMSLSSMKTPTXXPGASG

SEQ ID NO: 43730 - protein, 36 aa, Artificial Sequence
  GFR-binding peptide
  MOD_RES (33)..(34): Xaa is C or S
  MOD_RES (11)..(12)..(13)..(14)..(15): Xaa is A or G
  MOD_RES (16)..(17)..(18)..(19): Xaa is A or G or is absent
SKVIMPYVKLXXXXXXXXXFFLISLSSLDQSVXXPS

SEQ ID NO: 43731 - protein, 32 aa, Artificial Sequence
  GFR-binding peptide
  MOD_RES (11)..(12)..(13)..(14)..(15): Xaa is A or G
  MOD_RES (16)..(17)..(18)..(19): Xaa is A or G or is absent
KVVMNPYVKLXXXXXXXXXFFLVSLSSLKTPA

SEQ ID NO: 43732 - protein, 36 aa, Artificial Sequence
  GFR-binding peptide
  MOD_RES (33)..(34): Xaa is C or S
  MOD_RES (11)..(12)..(13)..(14)..(15): Xaa is A or G
  MOD_RES (16)..(17)..(18)..(19): Xaa is A or G or is absent
DVVMGPYVKLXXXXXXXXXFFLMSLSSMKTPTXXPG

SEQ ID NO: 43733 - protein, 39 aa, Artificial Sequence
  GFR-binding peptide
  MOD_RES (1)..(34)..(35): Xaa is C or S
  MOD_RES (12)..(13)..(14)..(15)..(16): Xaa is A or G
  MOD_RES (17)..(18)..(19)..(20): Xaa is A or G or is absent
XSKVVMPYVKLXXXXXXXXXFFLISLSSLDQPVXXPSAS

SEQ ID NO: 43734 - protein, 37 aa, Artificial Sequence
  GFR-binding peptide
  MOD_RES (32)..(33): Xaa is C or S
RDVVMGPYVKLIIQQKDNFFLMSLSSMKTPTXXPGAS

SEQ ID NO: 43735 - protein, 36 aa, Artificial Sequence
  GFR-binding peptide
  MOD_RES (34)..(35): Xaa is C or S
  MOD_RES (12)..(13)..(14)..(15)..(16): Xaa is A or G
  MOD_RES (17)..(18)..(19)..(20): Xaa is A or G or is absent
AEVVMDPYVKLXXXXXXXXXFFLISLSSLRAPVXXS

SEQ ID NO: 43736 - protein, 37 aa, Artificial Sequence
  GFR-binding peptide
  MOD_RES (33)..(34): Xaa is C or S
  MOD_RES (11)..(12)..(13)..(14)..(15): Xaa is A or G
  MOD_RES (16)..(17)..(18)..(19): Xaa is A or G or is absent
RVVMNPYVKLXXXXXXXXXFFLVSLSSLQTPAXXPKP

SEQ ID NO: 43737 - protein, 33 aa, Artificial Sequence
  GFR-binding peptide
  MOD_RES (32)..(33): Xaa is C or S
ESVAMGPYVKLYTVVGKDFFLISLSSLKTPVXX

SEQ ID NO: 43738 - protein, 42 aa, Artificial Sequence; identical to SEQ ID NO: 1221
  GFR-binding peptide
  MOD_RES (2)..(4)..(36)..(37): Xaa is C or S

SEQ ID NO: 43739 - protein, 33 aa, Artificial Sequence
  GFR-binding peptide
  MOD_RES (2)..(33): Xaa is C or S
KXSRVIMPYVKLVKPKRGVLFFISLSSLAQPVX

SEQ ID NO: 43740 - protein, 35 aa, Artificial Sequence
  GFR-binding peptide
  MOD_RES (1)..(35): Xaa is C or S
  MOD_RES (13)..(14)..(15)..(16)..(17): Xaa is A or G
  MOD_RES (18)..(19)..(20)..(21): Xaa is A or G or is absent
XSEVVMDPYVKLXXXXXXXXXFFLISLSSLRTPVX

SEQ ID NO: 43741 - protein, 37 aa, Artificial Sequence
  GFR-binding peptide
  MOD_RES (32)..(33): Xaa is C or S
GEVVMEPYVKLVVKDYEDFFLMSLSSLETPVXXAKPI

SEQ ID NO: 43742 - protein, 38 aa, Artificial Sequence
  GFR-binding peptide
  MOD_RES (2)..(4)..(36)..(37): Xaa is C or S
RXGXSEVVMDPYVKLVVNNASDFFLISLSSLRTPVXXT

SEQ ID NO: 43743 - protein, 36 aa, Artificial Sequence
  GFR-binding peptide
  MOD_RES (1)..(3)..(34)..(35): Xaa is C or S
XGXEEVIMPYVKLLLVRGNDFFLMSLSSTKVPAXXT

SEQ ID NO: 43744 - protein, 41 aa, Artificial Sequence
  GFR-binding peptide
  MOD_RES (2)..(4)..(36)..(37): Xaa is C or S
HXGXAKVVMNPYVKLIVNNSSDFFLVSLSSLKTPAXXAKPV

SEQ ID NO: 43745 - protein, 39 aa, Artificial Sequence
  GFR-binding peptide
  MOD_RES (1)..(33)..(34): Xaa is C or S
XARVVMNPYVKLIVNSSDDFFLVSLSSLQTPAXXPKPVT

SEQ ID NO: 43746 - protein, 36 aa, Artificial Sequence
  GFR-binding peptide
  MOD_RES (31)..(32): Xaa is C or S
SKVVMPYVKLVKPTRGVLFFISLSSLDQPVXXPSAS

SEQ ID NO: 43747 - protein, 43 aa, Artificial Sequence
  GFR-binding peptide
  MOD_RES (2)..(4)..(38)..(39): Xaa is C or S
  MOD_RES (16)..(17)..(18)..(19)..(20): Xaa is A or G
  MOD_RES (21)..(22)..(23)..(24): Xaa is A or G or is absent
RXAXSEVTMNPYVKLXXXXXXXXXFFLISLSSMKEPVXXPEPI

SEQ ID NO: 43748 - protein, 37 aa, Artificial Sequence
  GFR-binding peptide
  MOD_RES (31)..(32): Xaa is C or S
SRVIMPYVKLVKPKRGVLFFISLSSLAQPVXXPAASA

SEQ ID NO: 43749 - protein, 37 aa, Artificial Sequence
  GFR-binding peptide
  MOD_RES (33)..(34): Xaa is C or S
  MOD_RES (11)..(12)..(13)..(14)..(15): Xaa is A or G
  MOD_RES (16)..(17)..(18)..(19): Xaa is A or G or is absent
SRVIMPYVKLXXXXXXXXXFFLISLSSLAQPVXXPAA

SEQ ID NO: 43750 - protein, 33 aa, Artificial Sequence
  GFR-binding peptide
  MOD_RES (33)..(33): Xaa is C or S
  MOD_RES (11)..(12)..(13)..(14)..(15): Xaa is A or G
  MOD_RES (16)..(17)..(18)..(19): Xaa is A or G or is absent
EVVMDPYVKLXXXXXXXXXFFLISLSSLRTPVX

SEQ ID NO: 43751 - protein, 37 aa, Artificial Sequence
  GFR-binding peptide
  MOD_RES (1)..(35)..(36): Xaa is C or S
  MOD_RES (13)..(14)..(15)..(16)..(17): Xaa is A or G
  MOD_RES (18)..(19)..(20)..(21): Xaa is A or G or is absent
XAKVVMNPYVKLXXXXXXXXXFFLVSLSSLKTPAXXA

SEQ ID NO: 43752 - protein, 32 aa, Artificial Sequence
  GFR-binding peptide
  MOD_RES (32)..(32): Xaa is C or S
ARVVMNPYVKLIVNSSDDFFLVSLSSLQTPAX

SEQ ID NO: 43753 - protein, 39 aa, Artificial Sequence
  GFR-binding peptide
  MOD_RES (2)..(4)..(35)..(36): Xaa is C or S
SXKXSKVVMPYVKLVKPTRGVLFFISLSSLDQPVXXPSA

SEQ ID NO: 43754 - protein, 39 aa, Artificial Sequence
  GFR-binding peptide
  MOD_RES (2)..(4)..(36)..(37): Xaa is C or S
RXGXSEVVMDPYVKLVVNNASDFFLISLSSLRTPVXXTP

SEQ ID NO: 43755 - protein, 39 aa, Artificial Sequence
  GFR-binding peptide
  MOD_RES (35)..(36): Xaa is C or S
  MOD_RES (13)..(14)..(15)..(16)..(17): Xaa is A or G
  MOD_RES (18)..(19)..(20)..(21): Xaa is A or G or is absent
EAVSMGEPYVKLXXXXXXXXXFFLVSLSSLKTPVXXAKG

SEQ ID NO: 43756 - protein, 35 aa, Artificial Sequence
  GFR-binding peptide
  MOD_RES (31)..(32): Xaa is C or S
RVVMNPYVKLIVNSSDDFFLVSLSSLKTPAXXPKP

SEQ ID NO: 43757 - protein, 37 aa, Artificial Sequence
  GFR-binding peptide
  MOD_RES (1)..(3)..(35)..(36): Xaa is C or S
XGXSRVVMNPYVKLIVNSSDDFFLVSLSSLKTPAXXP

SEQ ID NO: 43758 - protein, 38 aa, Artificial Sequence
  GFR-binding peptide
  MOD_RES (2)..(34)..(35): Xaa is C or S
GXAKVVMNPYVKLIVNNSSDFFLVSLSSLKTPAXXAKP

SEQ ID NO: 43759 - protein, 37 aa, Artificial Sequence
  GFR-binding peptide
  MOD_RES (33)..(34): Xaa is C or S
  MOD_RES (11)..(12)..(13)..(14)..(15): Xaa is A or G
  MOD_RES (16)..(17)..(18)..(19): Xaa is A or G or is absent
SKVIMPYVKLXXXXXXXXXFFLISLSSLDQSVXXPSA

SEQ ID NO: 43760 - protein, 41 aa, Artificial Sequence
  GFR-binding peptide
  MOD_RES (2)..(4)..(38)..(39): Xaa is C or S
  MOD_RES (16)..(17)..(18)..(19)..(20): Xaa is A or G
  MOD_RES (21)..(22)..(23)..(24): Xaa is A or G or is absent
RXGXGEVVMEPYVKLXXXXXXXXXFFLMSLSSLETPVXXAK

SEQ ID NO: 43761 - protein, 40 aa, Artificial Sequence
  GFR-binding peptide
  MOD_RES (1)..(3)..(36)..(37): Xaa is C or S
XGXEAVSMGEPYVKLTPVGMDDFFLVSLSSLKTPVXXAKG

SEQ ID NO: 43762 - protein, 40 aa, Artificial Sequence
  GFR-binding peptide
  MOD_RES (2)..(35)..(36): Xaa is C or S
  MOD_RES (13)..(14)..(15)..(16)..(17): Xaa is A or G
  MOD_RES (18)..(19)..(20)..(21): Xaa is A or G or is absent
KXSKVIMPYVKLXXXXXXXXXFFLISLSSLDQSVXXPSAS

SEQ ID NO: 43763 - protein, 36 aa, Artificial Sequence
  GFR-binding peptide
  MOD_RES (1)..(3)..(34)..(35): Xaa is C or S
XKXSKVIMPYVKLIKPTKGILFFISLSSLDQSVXXP

SEQ ID NO: 43764 - protein, 36 aa, Artificial Sequence
  GFR-binding peptide
  MOD_RES (1)..(3)..(34)..(35): Xaa is C or S
XKXSRVIMPYVKLVKPKRGVLFFISLSSLAQPVXXP

SEQ ID NO: 43765 - protein, 41 aa, Artificial Sequence
  GFR-binding peptide
  MOD_RES (2)..(35)..(36): Xaa is C or S
GXEAVSMGEPYVKLTPVGMDDFFLVSLSSLKTPVXXAKGVK

SEQ ID NO: 43766 - protein, 37 aa, Artificial Sequence
  GFR-binding peptide
  MOD_RES (2)..(4)..(36)..(37): Xaa is C or S
SXGXRDVVMGPYVKLIIQQKDNFFLMSLSSMKTPTXX

SEQ ID NO: 43767 - protein, 41 aa, Artificial Sequence
  GFR-binding peptide
  MOD_RES (2)..(4)..(39)..(40): Xaa is C or S
  MOD_RES (17)..(18)..(19)..(20)..(21): Xaa is A or G
  MOD_RES (22)..(23)..(24)..(25): Xaa is A or G or is absent
RXGXEAVSMGEPYVKLXXXXXXXXXFFLVSLSSLKTPVXXA

SEQ ID NO: 43768 - protein, 42 aa, Artificial Sequence
  GFR-binding peptide
  MOD_RES (2)..(36)..(37): Xaa is C or S
  MOD_RES (14)..(15)..(16)..(17)..(18): Xaa is A or G
  MOD_RES (19)..(20)..(21)..(22): Xaa is A or G or is absent
GXSRVVMNPYVKLXXXXXXXXXFFLVSLSSLKTPAXXPKPVH

SEQ ID NO: 43769 - protein, 37 aa, Artificial Sequence
  GFR-binding peptide
  MOD_RES (1)..(33)..(34): Xaa is C or S
XESVAMGPYVKLYTVVGKDFFLISLSSLKTPVXXAKS

SEQ ID NO: 43770 - protein, 39 aa, Artificial Sequence
  GFR-binding peptide
  MOD_RES (2)..(4)..(38)..(39): Xaa is C or S
  MOD_RES (16)..(17)..(18)..(19)..(20): Xaa is A or G
  MOD_RES (21)..(22)..(23)..(24): Xaa is A or G or is absent
RXAXSEVTMNPYVKLXXXXXXXXXFFLISLSSMKEPVXX

SEQ ID NO: 43771 - protein, 42 aa, Artificial Sequence
  GFR-binding peptide
  MOD_RES (2)..(37)..(38): Xaa is C or S
  MOD_RES (15)..(16)..(17)..(18)..(19): Xaa is A or G
  MOD_RES (20)..(21)..(22)..(23): Xaa is A or G or is absent
GXEAVSMGEPYVKLXXXXXXXXXFFLVSLSSLKTPVXXAKGV

SEQ ID NO: 43772 - protein, 36 aa, Artificial Sequence
  GFR-binding peptide
  MOD_RES (13)..(14)..(15)..(16)..(17): Xaa is A or G
  MOD_RES (18)..(19)..(20)..(21): Xaa is A or G or is absent
ELHEELRPYVKLXXXXXXXXXFFLVSLSSHHVRSPQ

SEQ ID NO: 43773 - protein, 40 aa, Artificial Sequence
  GFR-binding peptide
  MOD_RES (1)..(3)..(34)..(35): Xaa is C or S
XKXSKVVMPYVKLVKPTRGVLFFISLSSLDQPVXXPSASA

SEQ ID NO: 43774 - protein, 41 aa, Artificial Sequence
  GFR-binding peptide
  MOD_RES (1)..(3)..(37)..(38): Xaa is C or S
  MOD_RES (15)..(16)..(17)..(18)..(19): Xaa is A or G
  MOD_RES (20)..(21)..(22)..(23): Xaa is A or G or is absent
XGXSEVVMDPYVKLXXXXXXXXXFFLISLSSLRTPVXXTPP

SEQ ID NO: 43775 - protein, 38 aa, Artificial Sequence
  GFR-binding peptide
  MOD_RES (1)..(33)..(34): Xaa is C or S
XESVAMGPYVKLYTVVGKDFFLISLSSLKTPVXXAKSA

SEQ ID NO: 43776 - protein, 40 aa, Artificial Sequence
  GFR-binding peptide
  MOD_RES (1)..(3)..(38)..(39): Xaa is C or S
  MOD_RES (16)..(17)..(18)..(19)..(20): Xaa is A or G
  MOD_RES (21)..(22)..(23)..(24): Xaa is A or G or is absent
XGXEAVSMGEPYVKLXXXXXXXXXFFLVSLSSLKTPVXXA

SEQ ID NO: 43777 - protein, 37 aa, Artificial Sequence
  GFR-binding peptide
  MOD_RES (2)..(36)..(37): Xaa is C or S
  MOD_RES (14)..(15)..(16)..(17)..(18): Xaa is A or G
  MOD_RES (19)..(20)..(21)..(22): Xaa is A or G or is absent
GXAKVVMNPYVKLXXXXXXXXXFFLVSLSSLKTPAXX

SEQ ID NO: 43778 - protein, 35 aa, Artificial Sequence
  GFR-binding peptide
  MOD_RES (1)..(34)..(35): Xaa is C or S
XEAVSMGEPYVKLTPVGMDDFFLVSLSSLKTPVXX

SEQ ID NO: 43779 - protein, 37 aa, Artificial Sequence
  GFR-binding peptide
  MOD_RES (2)..(4)..(37): Xaa is C or S
  MOD_RES (15)..(16)..(17)..(18)..(19): Xaa is A or G
  MOD_RES (20)..(21)..(22)..(23): Xaa is A or G or is absent
SXKXSKVIMPYVKLXXXXXXXXXFFLISLSSLDQSVX

SEQ ID NO: 43780 - protein, 38 aa, Artificial Sequence
  GFR-binding peptide
  MOD_RES (36)..(36): Xaa is C or S
  MOD_RES (12)..(13)..(14)..(15)..(16): Xaa is A or G
  MOD_RES (17)..(18)..(19)..(20): Xaa is A or G or is absent
LHEELRPYVKLXXXXXXXXXFFLVSLSSHHVRSPQXKV

SEQ ID NO: 43781 - protein, 39 aa, Artificial Sequence
  GFR-binding peptide
  MOD_RES (34)..(35): Xaa is C or S
  MOD_RES (12)..(13)..(14)..(15)..(16): Xaa is A or G
  MOD_RES (17)..(18)..(19)..(20): Xaa is A or G or is absent
RDVVMGPYVKLXXXXXXXXXFFLMSLSSMKTPTXXPGAS

SEQ ID NO: 43782 - protein, 35 aa, Artificial Sequence
  GFR-binding peptide
  MOD_RES (32)..(33): Xaa is C or S
SRVVMNPYVKLIVNSSDDFFLVSLSSLKTPAXXPK

SEQ ID NO: 43783 - protein, 32 aa, Artificial Sequence
  GFR-binding peptide
  MOD_RES (11)..(12)..(13)..(14)..(15): Xaa is A or G
  MOD_RES (16)..(17)..(18)..(19): Xaa is A or G or is absent
EVVMDPYVKLXXXXXXXXXFFLISLSSLRTPV

SEQ ID NO: 43784 - protein, 37 aa, Artificial Sequence
  GFR-binding peptide
  MOD_RES (1)..(32)..(33): Xaa is C or S
XSRVIMPYVKLVKPKRGVLFFISLSSLAQPVXXPAAS

SEQ ID NO: 43785 - protein, 37 aa, Artificial Sequence
  GFR-binding peptide
  MOD_RES (2)..(4)..(35)..(36): Xaa is C or S
SXKXSKVIMPYVKLIKPTKGILFFISLSSLDQSVXXP

SEQ ID NO: 43786 - protein, 31 aa, Artificial Sequence
  GFR-binding peptide
  MOD_RES (31)..(31): Xaa is C or S
SKVIMPYVKLIKPTKGILFFISLSSLDQSVX

SEQ ID NO: 43787 - protein, 40 aa, Artificial Sequence
  GFR-binding peptide
  MOD_RES (2)..(4): Xaa is C or S
  MOD_RES (17)..(18)..(19)..(20)..(21): Xaa is A or G
  MOD_RES (22)..(23)..(24)..(25): Xaa is A or G or is absent
AXAXELHEELRPYVKLXXXXXXXXXFFLVSLSSHHVRSPQ

SEQ ID NO: 43788 - protein, 32 aa, Artificial Sequence
  GFR-binding peptide
  MOD_RES (31)..(32): Xaa is C or S
EEVIMPYVKLLLVRGNDFFLMSLSSTKVPAXX

SEQ ID NO: 43789 - protein, 31 aa, Artificial Sequence
  GFR-binding peptide
  MOD_RES (31)..(31): Xaa is C or S
SRVIMPYVKLVKPKRGVLFFISLSSLAQPVX

SEQ ID NO: 43790 - protein, 34 aa, Artificial Sequence
  GFR-binding peptide
  MOD_RES (2)..(34): Xaa is C or S
GXSRVVMNPYVKLIVNSSDDFFLVSLSSLKTPAX

SEQ ID NO: 43791 - protein, 38 aa, Artificial Sequence
  GFR-binding peptide
  MOD_RES (2)..(33)..(34): Xaa is C or S
GXEEVIMPYVKLLLVRGNDFFLMSLSSTKVPAXXTSPV

SEQ ID NO: 43792 - protein, 31 aa, Artificial Sequence
  GFR-binding peptide
  MOD_RES (31)..(31): Xaa is C or S
RVVMNPYVKLIVNSSDDFFLVSLSSLKTPAX

SEQ ID NO: 43793 - protein, 38 aa, Artificial Sequence
  GFR-binding peptide
  MOD_RES (1)..(35)..(36): Xaa is C or S
  MOD_RES (13)..(14)..(15)..(16)..(17): Xaa is A or G
  MOD_RES (18)..(19)..(20)..(21): Xaa is A or G or is absent
XRDVVMGPYVKLXXXXXXXXXFFLMSLSSMKTPTXXPG

SEQ ID NO: 43794 - protein, 42 aa, Artificial Sequence
  GFR-binding peptide
  MOD_RES (1)..(3)..(36)..(37): Xaa is C or S
  MOD_RES (14)..(15)..(16)..(17)..(18): Xaa is A or G
  MOD_RES (19)..(20)..(21)..(22): Xaa is A or G or is absent
XKXSKVIMPYVKLXXXXXXXXXFFLISLSSLDQSVXXPSASA

SEQ ID NO: 43795 - protein, 41 aa, Artificial Sequence
  GFR-binding peptide
  MOD_RES (1)..(3)..(36)..(37): Xaa is C or S
  MOD_RES (14)..(15)..(16)..(17)..(18): Xaa is A or G
  MOD_RES (19)..(20)..(21)..(22): Xaa is A or G or is absent
XKXSKVIMPYVKLXXXXXXXXXFFLISLSSLDQSVXXPSAS

SEQ ID NO: 43796 - protein, 41 aa, Artificial Sequence
  GFR-binding peptide
  MOD_RES (1)..(3)..(37)..(38): Xaa is C or S
  MOD_RES (15)..(16)..(17)..(18)..(19): Xaa is A or G
  MOD_RES (20)..(21)..(22)..(23): Xaa is A or G or is absent
XGXARVVMNPYVKLXXXXXXXXXFFLVSLSSLQTPAXXPKP

SEQ ID NO: 43797 - protein, 34 aa, Artificial Sequence
  GFR-binding peptide
  MOD_RES (1)..(1): Xaa is C or S
  MOD_RES (13)..(14)..(15)..(16)..(17): Xaa is A or G
  MOD_RES (18)..(19)..(20)..(21): Xaa is A or G or is absent
XSEVTMNPYVKLXXXXXXXXXFFLISLSSMKEPV

SEQ ID NO: 43798 - protein, 34 aa, Artificial Sequence
  GFR-binding peptide
  MOD_RES (32)..(33): Xaa is C or S
AKVVMNPYVKLIVNNSSDFFLVSLSSLKTPAXXA

SEQ ID NO: 43799 - protein, 36 aa, Artificial Sequence
  GFR-binding peptide
  MOD_RES (33)..(34): Xaa is C or S
  MOD_RES (11)..(12)..(13)..(14)..(15): Xaa is A or G
  MOD_RES (16)..(17)..(18)..(19): Xaa is A or G or is absent
SKVVMPYVKLXXXXXXXXXFFLISLSSLDQPVXXPS

SEQ ID NO: 43800 - protein, 41 aa, Artificial Sequence
  GFR-binding peptide
  MOD_RES (2)..(36)..(37): Xaa is C or S
  MOD_RES (14)..(15)..(16)..(17)..(18): Xaa is A or G
  MOD_RES (19)..(20)..(21)..(22): Xaa is A or G or is absent
AXSEVTMNPYVKLXXXXXXXXXFFLISLSSMKEPVXXPEPI

SEQ ID NO: 43801 - protein, 41 aa, Artificial Sequence
  GFR-binding peptide
  MOD_RES (2)..(4)..(36)..(37): Xaa is C or S
HXGXARVVMNPYVKLIVNSSDDFFLVSLSSLQTPAXXPKPV

SEQ ID NO: 43802 - protein, 38 aa, Artificial Sequence
  GFR-binding peptide
  MOD_RES (32)..(33): Xaa is C or S
SRVVMNPYVKLIVNSSDDFFLVSLSSLKTPAXXPKPVH

SEQ ID NO: 43803 - protein, 43 aa, Artificial Sequence
  GFR-binding peptide
  MOD_RES (1)..(3)..(38)..(39): Xaa is C or S
  MOD_RES (16)..(17)..(18)..(19)..(20): Xaa is A or G
  MOD_RES (21)..(22)..(23)..(24): Xaa is A or G or is absent
XGXEAVSMGEPYVKLXXXXXXXXXFFLVSLSSLKTPVXXAKGV

SEQ ID NO: 43804 - protein, 35 aa, Artificial Sequence
  GFR-binding peptide
  MOD_RES (33)..(34): Xaa is C or S
  MOD_RES (11)..(12)..(13)..(14)..(15): Xaa is A or G
  MOD_RES (16)..(17)..(18)..(19): Xaa is A or G or is absent
EVVMDPYVKLXXXXXXXXXFFLISLSSLRTPVXXT

SEQ ID NO: 43805 - protein, 32 aa, Artificial Sequence
  GFR-binding peptide
  MOD_RES (11)..(12)..(13)..(14)..(15): Xaa is A or G
  MOD_RES (16)..(17)..(18)..(19): Xaa is A or G or is absent
EVTMNPYVKLXXXXXXXXXFFLISLSSMKEPV

SEQ ID NO: 43806 - protein, 37 aa, Artificial Sequence
  GFR-binding peptide
  MOD_RES (2)..(37): Xaa is C or S
  MOD_RES (15)..(16)..(17)..(18)..(19): Xaa is A or G
  MOD_RES (20)..(21)..(22)..(23): Xaa is A or G or is absent
GXEAVSMGEPYVKLXXXXXXXXXFFLVSLSSLKTPVX

SEQ ID NO: 43807 - protein, 35 aa, Artificial Sequence
  GFR-binding peptide
  MOD_RES (34)..(34): Xaa is C or S
KNHQLFPYVKLHQGQHPKIRFFLMSLSSEETPVXE

SEQ ID NO: 43808 - protein, 42 aa, Artificial Sequence
  GFR-binding peptide
  MOD_RES (1)..(3)..(36)..(37): Xaa is C or S
  MOD_RES (14)..(15)..(16)..(17)..(18): Xaa is A or G
  MOD_RES (19)..(20)..(21)..(22): Xaa is A or G or is absent
XKXSRVIMPYVKLXXXXXXXXXFFLISLSSLAQPVXXPAASA

SEQ ID NO: 43809 - protein, 42 aa, Artificial Sequence
  GFR-binding peptide
  MOD_RES (1)..(3)..(37)..(38): Xaa is C or S
  MOD_RES (15)..(16)..(17)..(18)..(19): Xaa is A or G
  MOD_RES (20)..(21)..(22)..(23): Xaa is A or G or is absent
XGXRDVVMGPYVKLXXXXXXXXXFFLMSLSSMKTPTXXPGAS

SEQ ID NO: 43810 - protein, 38 aa, Artificial Sequence
  GFR-binding peptide
  MOD_RES (2)..(4)..(37)..(38): Xaa is C or S
  MOD_RES (15)..(16)..(17)..(18)..(19): Xaa is A or G
  MOD_RES (20)..(21)..(22)..(23): Xaa is A or G or is absent
SXKXSRVIMPYVKLXXXXXXXXXFFLISLSSLAQPVXX

SEQ ID NO: 43811 - protein, 38 aa, Artificial Sequence
  GFR-binding peptide
  MOD_RES (2)..(4)..(36)..(37): Xaa is C or S
RXGXESVAMGPYVKLYTVVGKDFFLISLSSLKTPVXXA

SEQ ID NO: 43812 - protein, 37 aa, Artificial Sequence
  GFR-binding peptide
  MOD_RES (34)..(35): Xaa is C or S
  MOD_RES (12)..(13)..(14)..(15)..(16): Xaa is A or G
  MOD_RES (17)..(18)..(19)..(20): Xaa is A or G or is absent
ESVAMGPYVKLXXXXXXXXXFFLISLSSLKTPVXXAK

SEQ ID NO: 43813 - protein, 37 aa, Artificial Sequence
  GFR-binding peptide
  MOD_RES (34)..(35): Xaa is C or S
  MOD_RES (12)..(13)..(14)..(15)..(16): Xaa is A or G
  MOD_RES (17)..(18)..(19)..(20): Xaa is A or G or is absent
SEVVMDPYVKLXXXXXXXXXFFLISLSSLRTPVXXTP

SEQ ID NO: 43814 - protein, 41 aa, Artificial Sequence
  GFR-binding peptide
  MOD_RES (1)..(3)..(37): Xaa is C or S
  MOD_RES (15)..(16)..(17)..(18)..(19): Xaa is A or G
  MOD_RES (20)..(21)..(22)..(23): Xaa is A or G or is absent
XEXKNHQLFPYVKLXXXXXXXXXFFLMSLSSEETPVXELGE

SEQ ID NO: 43815 - protein, 34 aa, Artificial Sequence
  GFR-binding peptide
  MOD_RES (2)..(34): Xaa is C or S
GXESVAMGPYVKLYTVVGKDFFLISLSSLKTPVX

SEQ ID NO: 43816 - protein, 38 aa, Artificial Sequence
  GFR-binding peptide
  MOD_RES (2)..(35)..(36): Xaa is C or S
  MOD_RES (13)..(14)..(15)..(16)..(17): Xaa is A or G
  MOD_RES (18)..(19)..(20)..(21): Xaa is A or G or is absent
GXEEVIMPYVKLXXXXXXXXXFFLMSLSSTKVPAXXTS

SEQ ID NO: 43817 - protein, 39 aa, Artificial Sequence
  GFR-binding peptide
  MOD_RES (34)..(34): Xaa is C or S
  MOD_RES (12)..(13)..(14)..(15)..(16): Xaa is A or G
  MOD_RES (17)..(18)..(19)..(20): Xaa is A or G or is absent
SRVVMNPYVKLXXXXXXXXXFFLVSLSSLKTPAXTPKTV

SEQ ID NO: 43818 - protein, 34 aa, Artificial Sequence
  GFR-binding peptide
  MOD_RES (1)..(3)..(34): Xaa is C or S
XKXSKVVMPYVKLVKPTRGVLFFISLSSLDQPVX

SEQ ID NO: 43819 - protein, 42 aa, Artificial Sequence
  GFR-binding peptide
  MOD_RES (1)..(36)..(37): Xaa is C or S
  MOD_RES (14)..(15)..(16)..(17)..(18): Xaa is A or G
  MOD_RES (19)..(20)..(21)..(22): Xaa is A or G or is absent
XEAVSMGEPYVKLXXXXXXXXXFFLVSLSSLKTPVXXAKGVK

SEQ ID NO: 43820 - protein, 32 aa, Artificial Sequence
  GFR-binding peptide
  MOD_RES (32)..(32): Xaa is C or S
SEVTMNPYVKLVVNKNEDFFLISLSSMKEPVX

SEQ ID NO: 43821 - protein, 35 aa, Artificial Sequence
  GFR-binding peptide
  MOD_RES (1)..(1): Xaa is C or S
XELHEELRPYVKLLKPKKRVYEFFLVSLSSHHVRS

SEQ ID NO: 43822 - protein, 38 aa, Artificial Sequence
  GFR-binding peptide
  MOD_RES (1)..(3)..(37): Xaa is C or S
  MOD_RES (15)..(16)..(17)..(18)..(19): Xaa is A or G
  MOD_RES (20)..(21)..(22)..(23): Xaa is A or G or is absent
XEXKNHQLFPYVKLXXXXXXXXXFFLMSLSSEETPVXE

SEQ ID NO: 43823 - protein, 34 aa, Artificial Sequence
  GFR-binding peptide
HEELRPYVKLLKPKKRVYEFFLVSLSSHHVRSPQ

SEQ ID NO: 43824 - protein, 30 aa, Artificial Sequence
  GFR-binding peptide
KVVMNPYVKLIVNNSSDFFLVSLSSLKTPA

SEQ ID NO: 43825 - protein, 38 aa, Artificial Sequence
  GFR-binding peptide
  MOD_RES (2)..(4)..(38): Xaa is C or S
  MOD_RES (16)..(17)..(18)..(19)..(20): Xaa is A or G
  MOD_RES (21)..(22)..(23)..(24): Xaa is A or G or is absent
HXGXARVVMNPYVKLXXXXXXXXXFFLVSLSSLQTPAX

SEQ ID NO: 43826 - protein, 38 aa, Artificial Sequence
  GFR-binding peptide
  MOD_RES (1)..(35)..(36): Xaa is C or S
  MOD_RES (13)..(14)..(15)..(16)..(17): Xaa is A or G
  MOD_RES (18)..(19)..(20)..(21): Xaa is A or G or is absent
XARVVMNPYVKLXXXXXXXXXFFLVSLSSLQTPAXXPK

SEQ ID NO: 43827 - protein, 35 aa, Artificial Sequence
  GFR-binding peptide
  MOD_RES (2)..(2): Xaa is C or S
  MOD_RES (14)..(15)..(16)..(17)..(18): Xaa is A or G
  MOD_RES (19)..(20)..(21)..(22): Xaa is A or G or is absent
GXESVAMGPYVKLXXXXXXXXXFFLISLSSLKTPV

SEQ ID NO: 43828 - protein, 38 aa, Artificial Sequence
  GFR-binding peptide
  MOD_RES (1)..(3)..(37)..(38): Xaa is C or S
  MOD_RES (15)..(16)..(17)..(18)..(19): Xaa is A or G
  MOD_RES (20)..(21)..(22)..(23): Xaa is A or G or is absent
XGXAEVVMDPYVKLXXXXXXXXXFFLISLSSLRAPVXX

SEQ ID NO: 43829 - protein, 32 aa, Artificial Sequence
  GFR-binding peptide
  MOD_RES (1)..(1): Xaa is C or S
XGEVVMEPYVKLVVKDYEDFFLMSLSSLETPV

SEQ ID NO: 43830 - protein, 39 aa, Artificial Sequence
  GFR-binding peptide
  MOD_RES (2)..(4)..(38)..(39): Xaa is C or S
  MOD_RES (16)..(17)..(18)..(19)..(20): Xaa is A or G
  MOD_RES (21)..(22)..(23)..(24): Xaa is A or G or is absent
SXGXRDVVMGPYVKLXXXXXXXXXFFLMSLSSMKTPTXX

SEQ ID NO: 43831 - protein, 36 aa, Artificial Sequence
  GFR-binding peptide
  MOD_RES (33)..(33): Xaa is C or S
  MOD_RES (11)..(12)..(13)..(14)..(15): Xaa is A or G
  MOD_RES (16)..(17)..(18)..(19): Xaa is A or G or is absent
RVVMNPYVKLXXXXXXXXXFFLVSLSSLKTPAXTPK

SEQ ID NO: 43832 - protein, 38 aa, Artificial Sequence
  GFR-binding peptide
  MOD_RES (2)..(4): Xaa is C or S
AXAXELHEELRPYVKLLKPKKRVYEFFLVSLSSHHVRS

SEQ ID NO: 43833 - protein, 39 aa, Artificial Sequence
  GFR-binding peptide
  MOD_RES (2)..(4)..(38)..(39): Xaa is C or S
  MOD_RES (16)..(17)..(18)..(19)..(20): Xaa is A or G
  MOD_RES (21)..(22)..(23)..(24): Xaa is A or G or is absent
RXGXAEVVMDPYVKLXXXXXXXXXFFLISLSSLRAPVXX

SEQ ID NO: 43834 - protein, 42 aa, Artificial Sequence
  GFR-binding peptide
  MOD_RES (2)..(4)..(39)..(40): Xaa is C or S
  MOD_RES (17)..(18)..(19)..(20)..(21): Xaa is A or G
  MOD_RES (22)..(23)..(24)..(25): Xaa is A or G or is absent
RXGXEAVSMGEPYVKLXXXXXXXXXFFLVSLSSLKTPVXXAK

SEQ ID NO: 43835 - protein, 37 aa, Artificial Sequence
  GFR-binding peptide
  MOD_RES (1)..(35)..(36): Xaa is C or S
  MOD_RES (13)..(14)..(15)..(16)..(17): Xaa is A or G
  MOD_RES (18)..(19)..(20)..(21): Xaa is A or G or is absent
XGEVVMEPYVKLXXXXXXXXXFFLMSLSSLETPVXXA

SEQ ID NO: 43836 - protein, 36 aa, Artificial Sequence
  GFR-binding peptide
  MOD_RES (1)..(33)..(34): Xaa is C or S
XSRVVMNPYVKLIVNSSDDFFLVSLSSLKTPAXXPK

SEQ ID NO: 43837 - protein, 40 aa, Artificial Sequence
  GFR-binding peptide
  MOD_RES (1)..(3)..(37)..(38): Xaa is C or S
  MOD_RES (15)..(16)..(17)..(18)..(19): Xaa is A or G
  MOD_RES (20)..(21)..(22)..(23): Xaa is A or G or is absent
XAXSEVTMNPYVKLXXXXXXXXXFFLISLSSMKEPVXXPE

SEQ ID NO: 43838 - protein, 34 aa, Artificial Sequence
  GFR-binding peptide
  MOD_RES (2)..(34): Xaa is C or S
GXSEVVMDPYVKLVVNNASDFFLISLSSLRTPVX

SEQ ID NO: 43839 - protein, 38 aa, Artificial Sequence
  GFR-binding peptide
  MOD_RES (34)..(35): Xaa is C or S
  MOD_RES (12)..(13)..(14)..(15)..(16): Xaa is A or G
  MOD_RES (17)..(18)..(19)..(20): Xaa is A or G or is absent
ARVVMNPYVKLXXXXXXXXXFFLVSLSSLQTPAXXPKP

SEQ ID NO: 43840 - protein, 43 aa, Artificial Sequence
  GFR-binding peptide
  MOD_RES (2)..(4)..(37)..(38): Xaa is C or S
  MOD_RES (15)..(16)..(17)..(18)..(19): Xaa is A or G
  MOD_RES (20)..(21)..(22)..(23): Xaa is A or G or is absent
SXKXSKVIMPYVKLXXXXXXXXXFFLISLSSLDQSVXXPSASA

SEQ ID NO: 43841 - protein, 35 aa, Artificial Sequence
  GFR-binding peptide
  MOD_RES (1)..(33): Xaa is C or S
XSRVVMNPYVKLIVNSSDDFFLVSLSSLKTPAXTP

SEQ ID NO: 43842 - protein, 37 aa, Artificial Sequence
  GFR-binding peptide
  MOD_RES (2)..(4): Xaa is C or S
  MOD_RES (16)..(17)..(18)..(19)..(20): Xaa is A or G
  MOD_RES (21)..(22)..(23)..(24): Xaa is A or G or is absent
RXGXSEVVMDPYVKLXXXXXXXXXFFLISLSSLRTPV

SEQ ID NO: 43843 - protein, 36 aa, Artificial Sequence
  GFR-binding peptide
  MOD_RES (33)..(34): Xaa is C or S
  MOD_RES (11)..(12)..(13)..(14)..(15): Xaa is A or G
  MOD_RES (16)..(17)..(18)..(19): Xaa is A or G or is absent
EVVMEPYVKLXXXXXXXXXFFLMSLSSLETPVXXAK

SEQ ID NO: 43844 - protein, 35 aa, Artificial Sequence
  GFR-binding peptide
  MOD_RES (1)..(32)..(33): Xaa is C or S
XSKVVMPYVKLVKPTRGVLFFISLSSLDQPVXXPS

SEQ ID NO: 43845 - protein, 39 aa, Artificial Sequence
  GFR-binding peptide
  MOD_RES (33)..(34): Xaa is C or S
  MOD_RES (11)..(12)..(13)..(14)..(15): Xaa is A or G
  MOD_RES (16)..(17)..(18)..(19): Xaa is A or G or is absent
RVVMNPYVKLXXXXXXXXXFFLVSLSSLQTPAXXPKPVT

SEQ ID NO: 43846 - protein, 35 aa, Artificial Sequence
  GFR-binding peptide
  MOD_RES (1)..(3)..(35): Xaa is C or S
XGXSRVVMNPYVKLIVNSSDDFFLVSLSSLKTPAX

SEQ ID NO: 43847 - protein, 34 aa, Artificial Sequence
  GFR-binding peptide
  MOD_RES (2)..(34): Xaa is C or S
GXAEVVMDPYVKLVVNNAADFFLISLSSLRAPVX

SEQ ID NO: 43848 - protein, 35 aa, Artificial Sequence
  GFR-binding peptide
  MOD_RES (32)..(33): Xaa is C or S
ARVVMNPYVKLIVNSSDDFFLVSLSSLQTPAXXPK

SEQ ID NO: 43849 - protein, 38 aa, Artificial Sequence
  GFR-binding peptide
  MOD_RES (35)..(36): Xaa is C or S
  MOD_RES (13)..(14)..(15)..(16)..(17): Xaa is A or G
  MOD_RES (18)..(19)..(20)..(21): Xaa is A or G or is absent
EAVSMGEPYVKLXXXXXXXXXFFLVSLSSLKTPVXXAK

SEQ ID NO: 43850 - protein, 34 aa, Artificial Sequence
  GFR-binding peptide
LHEELRPYVKLLKPKKRVYEFFLVSLSSHHVRSP

SEQ ID NO: 43851 - protein, 33 aa, Artificial Sequence
  GFR-binding peptide
  MOD_RES (1)..(32)..(33): Xaa is C or S
XSKVIMPYVKLIKPTKGILFFISLSSLDQSVXX

SEQ ID NO: 43852 - protein, 35 aa, Artificial Sequence
  GFR-binding peptide
  MOD_RES (1)..(34)..(35): Xaa is C or S
  MOD_RES (12)..(13)..(14)..(15)..(16): Xaa is A or G
  MOD_RES (17)..(18)..(19)..(20): Xaa is A or G or is absent
XSKVIMPYVKLXXXXXXXXXFFLISLSSLDQSVXX

SEQ ID NO: 43853 - protein, 40 aa, Artificial Sequence
  GFR-binding peptide
  MOD_RES (2)..(37)..(38): Xaa is C or S
  MOD_RES (15)..(16)..(17)..(18)..(19): Xaa is A or G
  MOD_RES (20)..(21)..(22)..(23): Xaa is A or G or is absent
GXEAVSMGEPYVKLXXXXXXXXXFFLVSLSSLKTPVXXAK

SEQ ID NO: 43854 - protein, 37 aa, Artificial Sequence
  GFR-binding peptide
  MOD_RES (33)..(34): Xaa is C or S
  MOD_RES (11)..(12)..(13)..(14)..(15): Xaa is A or G
  MOD_RES (16)..(17)..(18)..(19): Xaa is A or G or is absent
DVVMGPYVKLXXXXXXXXXFFLMSLSSMKTPTXXPGA

SEQ ID NO: 43855 - protein, 35 aa, Artificial Sequence
  GFR-binding peptide
  MOD_RES (2)..(33)..(34): Xaa is C or S
KXSKVIMPYVKLIKPTKGILFFISLSSLDQSVXXP

SEQ ID NO: 43856 - protein, 35 aa, Artificial Sequence
  GFR-binding peptide
  MOD_RES (2)..(4): Xaa is C or S
RXGXGEVVMEPYVKLVVKDYEDFFLMSLSSLETPV

SEQ ID NO: 43857 - protein, 38 aa, Artificial Sequence
  GFR-binding peptide
  MOD_RES (2)..(36)..(37): Xaa is C or S
  MOD_RES (14)..(15)..(16)..(17)..(18): Xaa is A or G
  MOD_RES (19)..(20)..(21)..(22): Xaa is A or G or is absent
GXARVVMNPYVKLXXXXXXXXXFFLVSLSSLQTPAXXP

SEQ ID NO: 43858 - protein, 37 aa, Artificial Sequence
  GFR-binding peptide
  MOD_RES (34)..(35): Xaa is C or S
  MOD_RES (12)..(13)..(14)..(15)..(16): Xaa is A or G
  MOD_RES (17)..(18)..(19)..(20): Xaa is A or G or is absent
AEVVMDPYVKLXXXXXXXXXFFLISLSSLRAPVXXSA

SEQ ID NO: 43859 - protein, 43 aa, Artificial Sequence
  GFR-binding peptide
  MOD_RES (1)..(3)..(37)..(38): Xaa is C or S
  MOD_RES (15)..(16)..(17)..(18)..(19): Xaa is A or G
  MOD_RES (20)..(21)..(22)..(23): Xaa is A or G or is absent
XGXSEVVMDPYVKLXXXXXXXXXFFLISLSSLRTPVXXTPPTS

SEQ ID NO: 43860 - protein, 40 aa, Artificial Sequence
  GFR-binding peptide
  MOD_RES (36)..(36): Xaa is C or S
  MOD_RES (12)..(13)..(14)..(15)..(16): Xaa is A or G
  MOD_RES (17)..(18)..(19)..(20): Xaa is A or G or is absent
LHEELRPYVKLXXXXXXXXXFFLVSLSSHHVRSPQXKVSS

SEQ ID NO: 43861 - protein, 39 aa, Artificial Sequence
  GFR-binding peptide
  MOD_RES (2)..(35)..(36): Xaa is C or S
  MOD_RES (13)..(14)..(15)..(16)..(17): Xaa is A or G
  MOD_RES (18)..(19)..(20)..(21): Xaa is A or G or is absent
KXSKVVMPYVKLXXXXXXXXXFFLISLSSLDQPVXXPSA

SEQ ID NO: 43862 - protein, 33 aa, Artificial Sequence
  GFR-binding peptide
  MOD_RES (33)..(33): Xaa is C or S
  MOD_RES (11)..(12)..(13)..(14)..(15): Xaa is A or G
  MOD_RES (16)..(17)..(18)..(19): Xaa is A or G or is absent
EVTMNPYVKLXXXXXXXXXFFLISLSSMKEPVX

SEQ ID NO: 43863 - protein, 38 aa, Artificial Sequence
  GFR-binding peptide
  MOD_RES (1)..(3)..(35): Xaa is C or S
XGXSRVVMNPYVKLIVNSSDDFFLVSLSSLKTPAXTPK

SEQ ID NO: 43864 - protein, 44 aa, Artificial Sequence
  GFR-binding peptide
  MOD_RES (2)..(4)..(38)..(39): Xaa is C or S
  MOD_RES (16)..(17)..(18)..(19)..(20): Xaa is A or G
  MOD_RES (21)..(22)..(23)..(24): Xaa is A or G or is absent
SXGXRDVVMGPYVKLXXXXXXXXXFFLMSLSSMKTPTXXPGASG

SEQ ID NO: 43865 - protein, 37 aa, Artificial Sequence
  GFR-binding peptide
  MOD_RES (1)..(3)..(37): Xaa is C or S
  MOD_RES (15)..(16)..(17)..(18)..(19): Xaa is A or G
  MOD_RES (20)..(21)..(22)..(23): Xaa is A or G or is absent
XEXKNHQLFPYVKLXXXXXXXXXFFLMSLSSEETPVX

SEQ ID NO: 43866 - protein, 38 aa, Artificial Sequence
  GFR-binding peptide
  MOD_RES (2)..(36): Xaa is C or S
  MOD_RES (14)..(15)..(16)..(17)..(18): Xaa is A or G
  MOD_RES (19)..(20)..(21)..(22): Xaa is A or G or is absent
EXKNHQLFPYVKLXXXXXXXXXFFLMSLSSEETPVXEL

SEQ ID NO: 43867 - protein, 39 aa, Artificial Sequence
  GFR-binding peptide
  MOD_RES (1)..(3)..(37)..(38): Xaa is C or S
  MOD_RES (15)..(16)..(17)..(18)..(19): Xaa is A or G
  MOD_RES (20)..(21)..(22)..(23): Xaa is A or G or is absent
XAXSEVTMNPYVKLXXXXXXXXXFFLISLSSMKEPVXXP

SEQ ID NO: 43868 - protein, 37 aa, Artificial Sequence
  GFR-binding peptide
  MOD_RES (2)..(33)..(34): Xaa is C or S
KXSKVVMPYVKLVKPTRGVLFFISLSSLDQPVXXPSA

SEQ ID NO: 43869 - protein, 35 aa, Artificial Sequence
  GFR-binding peptide
  MOD_RES (32)..(33): Xaa is C or S
ESVAMGPYVKLYTVVGKDFFLISLSSLKTPVXXAK

SEQ ID NO: 43870 - protein, 40 aa, Artificial Sequence
  GFR-binding peptide
  MOD_RES (1)..(3)..(37)..(38): Xaa is C or S
  MOD_RES (15)..(16)..(17)..(18)..(19): Xaa is A or G
  MOD_RES (20)..(21)..(22)..(23): Xaa is A or G or is absent
XGXRDVVMGPYVKLXXXXXXXXXFFLMSLSSMKTPTXXPG

SEQ ID NO: 43871 - protein, 40 aa, Artificial Sequence
  GFR-binding peptide
  MOD_RES (2)..(4)..(38): Xaa is C or S
  MOD_RES (16)..(17)..(18)..(19)..(20): Xaa is A or G
  MOD_RES (21)..(22)..(23)..(24): Xaa is A or G or is absent
RXEXKNHQLFPYVKLXXXXXXXXXFFLMSLSSEETPVXEL

SEQ ID NO: 43872 - protein, 32 aa, Artificial Sequence
  GFR-binding peptide
  MOD_RES (32)..(32): Xaa is C or S
ESVAMGPYVKLYTVVGKDFFLISLSSLKTPVX

SEQ ID NO: 43873 - protein, 43 aa, Artificial Sequence
  GFR-binding peptide
  MOD_RES (1)..(3)..(37)..(38): Xaa is C or S
  MOD_RES (15)..(16)..(17)..(18)..(19): Xaa is A or G
  MOD_RES (20)..(21)..(22)..(23): Xaa is A or G or is absent
XGXESVAMGPYVKLXXXXXXXXXFFLISLSSLKTPVXXAKSAK

SEQ ID NO: 43874 - protein, 39 aa, Artificial Sequence
  GFR-binding peptide
  MOD_RES (1)..(35)..(36): Xaa is C or S
  MOD_RES (13)..(14)..(15)..(16)..(17): Xaa is A or G
  MOD_RES (18)..(19)..(20)..(21): Xaa is A or G or is absent
XSEVVMDPYVKLXXXXXXXXXFFLISLSSLRTPVXXTPP

SEQ ID NO: 43875 - protein, 41 aa, Artificial Sequence
  GFR-binding peptide
  MOD_RES (2)..(4)..(35)..(36): Xaa is C or S
SXKXSKVVMPYVKLVKPTRGVLFFISLSSLDQPVXXPSASA

SEQ ID NO: 43876 - protein, 44 aa, Artificial Sequence
  GFR-binding peptide
  MOD_RES (2)..(4)..(38)..(39): Xaa is C or S
  MOD_RES (16)..(17)..(18)..(19)..(20): Xaa is A or G
  MOD_RES (21)..(22)..(23)..(24): Xaa is A or G or is absent
HXGXAKVVMNPYVKLXXXXXXXXXFFLVSLSSLKTPAXXAKPVA

SEQ ID NO: 43877 - protein, 39 aa, Artificial Sequence
  GFR-binding peptide
  MOD_RES (1)..(35)..(36): Xaa is C or S
  MOD_RES (13)..(14)..(15)..(16)..(17): Xaa is A or G
  MOD_RES (18)..(19)..(20)..(21): Xaa is A or G or is absent
XSRVVMNPYVKLXXXXXXXXXFFLVSLSSLKTPAXXPKP

SEQ ID NO: 43878 - protein, 34 aa, Artificial Sequence
  GFR-binding peptide
  MOD_RES (1)..(1): Xaa is C or S
  MOD_RES (13)..(14)..(15)..(16)..(17): Xaa is A or G
  MOD_RES (18)..(19)..(20)..(21): Xaa is A or G or is absent
XSEVVMDPYVKLXXXXXXXXXFFLISLSSLRTPV

SEQ ID NO: 43879 - protein, 36 aa, Artificial Sequence
  GFR-binding peptide
  MOD_RES (2)..(33)..(34): Xaa is C or S
GXEEVIMPYVKLLLVRGNDFFLMSLSSTKVPAXXTS

SEQ ID NO: 43880 - protein, 39 aa, Artificial Sequence
  GFR-binding peptide
  MOD_RES (1)..(35): Xaa is C or S
  MOD_RES (13)..(14)..(15)..(16)..(17): Xaa is A or G
  MOD_RES (18)..(19)..(20)..(21): Xaa is A or G or is absent
XKNHQLFPYVKLXXXXXXXXXFFLMSLSSEETPVXELGE

SEQ ID NO: 43881 - protein, 40 aa, Artificial Sequence
  GFR-binding peptide
  MOD_RES (1)..(38): Xaa is C or S
XELHEELRPYVKLLKPKKRVYEFFLVSLSSHHVRSPQXKV

SEQ ID NO: 43882 - protein, 42 aa, Artificial Sequence; identical to SEQ ID NO: 1218
  GFR-binding peptide
  MOD_RES (2)..(4)..(36)..(37): Xaa is C or S

SEQ ID NO: 43883 - protein, 35 aa, Artificial Sequence
  GFR-binding peptide
  MOD_RES (1)..(3)..(34)..(35): Xaa is C or S
XGXEEVIMPYVKLLLVRGNDFFLMSLSSTKVPAXX

SEQ ID NO: 43884 - protein, 40 aa, Artificial Sequence
  GFR-binding peptide
  MOD_RES (1)..(3)..(37): Xaa is C or S
  MOD_RES (15)..(16)..(17)..(18)..(19): Xaa is A or G
  MOD_RES (20)..(21)..(22)..(23): Xaa is A or G or is absent
XGXSRVVMNPYVKLXXXXXXXXXFFLVSLSSLKTPAXTPK

SEQ ID NO: 43885 - protein, 37 aa, Artificial Sequence
  GFR-binding peptide
  MOD_RES (1)..(3)..(35)..(36): Xaa is C or S
XAXSEVTMNPYVKLVVNKNEDFFLISLSSMKEPVXXP

SEQ ID NO: 43886 - protein, 38 aa, Artificial Sequence
  GFR-binding peptide
  MOD_RES (37)..(37): Xaa is C or S
  MOD_RES (13)..(14)..(15)..(16)..(17): Xaa is A or G
  MOD_RES (18)..(19)..(20)..(21): Xaa is A or G or is absent
ELHEELRPYVKLXXXXXXXXXFFLVSLSSHHVRSPQXK

SEQ ID NO: 43887 - protein, 37 aa, Artificial Sequence
  GFR-binding peptide
  MOD_RES (1)..(3)..(36)..(37): Xaa is C or S
XGXEAVSMGEPYVKLTPVGMDDFFLVSLSSLKTPVXX

SEQ ID NO: 43888 - protein, 37 aa, Artificial Sequence
  GFR-binding peptide
  MOD_RES (1)..(3)..(36)..(37): Xaa is C or S
  MOD_RES (14)..(15)..(16)..(17)..(18): Xaa is A or G
  MOD_RES (19)..(20)..(21)..(22): Xaa is A or G or is absent
XKXSKVVMPYVKLXXXXXXXXXFFLISLSSLDQPVXX

SEQ ID NO: 43889 - protein, 39 aa, Artificial Sequence
  GFR-binding peptide
  MOD_RES (1)..(3)..(37)..(38): Xaa is C or S
  MOD_RES (15)..(16)..(17)..(18)..(19): Xaa is A or G
  MOD_RES (20)..(21)..(22)..(23): Xaa is A or G or is absent
XGXAEVVMDPYVKLXXXXXXXXXFFLISLSSLRAPVXXS

SEQ ID NO: 43890 - protein, 40 aa, Artificial Sequence
  GFR-binding peptide
  MOD_RES (1)..(34)..(35): Xaa is C or S
  MOD_RES (12)..(13)..(14)..(15)..(16): Xaa is A or G
  MOD_RES (17)..(18)..(19)..(20): Xaa is A or G or is absent
XEEVIMPYVKLXXXXXXXXXFFLMSLSSTKVPAXXTSPVR

SEQ ID NO: 43891 - protein, 34 aa, Artificial Sequence
  GFR-binding peptide
  MOD_RES (1)..(34): Xaa is C or S
  MOD_RES (12)..(13)..(14)..(15)..(16): Xaa is A or G
  MOD_RES (17)..(18)..(19)..(20): Xaa is A or G or is absent
XSKVVMPYVKLXXXXXXXXXFFLISLSSLDQPVX

SEQ ID NO: 43892 - protein, 39 aa, Artificial Sequence
  GFR-binding peptide
  MOD_RES (1)..(3)..(36)..(37): Xaa is C or S
  MOD_RES (14)..(15)..(16)..(17)..(18): Xaa is A or G
  MOD_RES (19)..(20)..(21)..(22): Xaa is A or G or is absent
XGXEEVIMPYVKLXXXXXXXXXFFLMSLSSTKVPAXXTS

SEQ ID NO: 43893 - protein, 37 aa, Artificial Sequence
  GFR-binding peptide
  MOD_RES (2)..(4)..(37): Xaa is C or S
RXGXEAVSMGEPYVKLTPVGMDDFFLVSLSSLKTPVX

SEQ ID NO: 43894 - protein, 35 aa, Artificial Sequence
  GFR-binding peptide
  MOD_RES (1)..(33)..(34): Xaa is C or S
XARVVMNPYVKLIVNSSDDFFLVSLSSLQTPAXXP

SEQ ID NO: 43895 - protein, 43 aa, Artificial Sequence
  GFR-binding peptide
  MOD_RES (2)..(4)..(38)..(39): Xaa is C or S
  MOD_RES (16)..(17)..(18)..(19)..(20): Xaa is A or G
  MOD_RES (21)..(22)..(23)..(24): Xaa is A or G or is absent
HXGXARVVMNPYVKLXXXXXXXXXFFLVSLSSLQTPAXXPKPV

SEQ ID NO: 43896 - protein, 39 aa, Artificial Sequence
  GFR-binding peptide
  MOD_RES (1)..(35): Xaa is C or S
XKNHQLFPYVKLHQGQHPKIRFFLMSLSSEETPVXELGE

SEQ ID NO: 43897 - protein, 35 aa, Artificial Sequence
  GFR-binding peptide
  MOD_RES (32)..(33): Xaa is C or S
AEVVMDPYVKLVVNNAADFFLISLSSLRAPVXXSA

SEQ ID NO: 43898 - protein, 34 aa, Artificial Sequence
  GFR-binding peptide
  MOD_RES (2)..(34): Xaa is C or S
GXRDVVMGPYVKLIIQQKDNFFLMSLSSMKTPTX

SEQ ID NO: 43899 - protein, 39 aa, Artificial Sequence
  GFR-binding peptide
  MOD_RES (37)..(37): Xaa is C or S
ELHEELRPYVKLLKPKKRVYEFFLVSLSSHHVRSPQXKV

SEQ ID NO: 43900 - protein, 34 aa, Artificial Sequence
  GFR-binding peptide
  MOD_RES (33)..(34): Xaa is C or S
  MOD_RES (11)..(12)..(13)..(14)..(15): Xaa is A or G
  MOD_RES (16)..(17)..(18)..(19): Xaa is A or G or is absent
EVVMDPYVKLXXXXXXXXXFFLISLSSLRAPVXX

SEQ ID NO: 43901 - protein, 35 aa, Artificial Sequence
  GFR-binding peptide
  MOD_RES (35)..(35): Xaa is C or S
  MOD_RES (11)..(12)..(13)..(14)..(15): Xaa is A or G
  MOD_RES (16)..(17)..(18)..(19): Xaa is A or G or is absent
HEELRPYVKLXXXXXXXXXFFLVSLSSHHVRSPQX

SEQ ID NO: 43902 - protein, 33 aa, Artificial Sequence
  GFR-binding peptide
  MOD_RES (12)..(13)..(14)..(15)..(16): Xaa is A or G
  MOD_RES (17)..(18)..(19)..(20): Xaa is A or G or is absent
ARVVMNPYVKLXXXXXXXXXFFLVSLSSLQTPA

SEQ ID NO: 43903 - protein, 39 aa, Artificial Sequence
  GFR-binding peptide
  MOD_RES (2)..(4)..(38)..(39): Xaa is C or S
  MOD_RES (16)..(17)..(18)..(19)..(20): Xaa is A or G
  MOD_RES (21)..(22)..(23)..(24): Xaa is A or G or is absent
HXGXSRVVMNPYVKLXXXXXXXXXFFLVSLSSLKTPAXX

SEQ ID NO: 43904 - protein, 32 aa, Artificial Sequence
  GFR-binding peptide
  MOD_RES (11)..(12)..(13)..(14)..(15): Xaa is A or G
  MOD_RES (16)..(17)..(18)..(19): Xaa is A or G or is absent
HEELRPYVKLXXXXXXXXXFFLVSLSSHHVRS

SEQ ID NO: 43905 - protein, 32 aa, Artificial Sequence
  GFR-binding peptide
  MOD_RES (32)..(32): Xaa is C or S
SRVVMNPYVKLIVNSSDDFFLVSLSSLKTPAX

SEQ ID NO: 43906 - protein, 40 aa, Artificial Sequence
  GFR-binding peptide
  MOD_RES (2)..(36)..(37): Xaa is C or S
  MOD_RES (14)..(15)..(16)..(17)..(18): Xaa is A or G
  MOD_RES (19)..(20)..(21)..(22): Xaa is A or G or is absent
GXESVAMGPYVKLXXXXXXXXXFFLISLSSLKTPVXXAKS

SEQ ID NO: 43907 - protein, 37 aa, Artificial Sequence
  GFR-binding peptide
  MOD_RES (1)..(35)..(36): Xaa is C or S
  MOD_RES (13)..(14)..(15)..(16)..(17): Xaa is A or G
  MOD_RES (18)..(19)..(20)..(21): Xaa is A or G or is absent
XESVAMGPYVKLXXXXXXXXXFFLISLSSLKTPVXXA

SEQ ID NO: 43908 - protein, 40 aa, Artificial Sequence
  GFR-binding peptide
  MOD_RES (34)..(35): Xaa is C or S
  MOD_RES (12)..(13)..(14)..(15)..(16): Xaa is A or G
  MOD_RES (17)..(18)..(19)..(20): Xaa is A or G or is absent
SRVVMNPYVKLXXXXXXXXXFFLVSLSSLKTPAXXPKPVY

SEQ ID NO: 43909 - protein, 40 aa, Artificial Sequence
  GFR-binding peptide
  MOD_RES (34)..(35): Xaa is C or S
  MOD_RES (12)..(13)..(14)..(15)..(16): Xaa is A or G
  MOD_RES (17)..(18)..(19)..(20): Xaa is A or G or is absent
AKVVMNPYVKLXXXXXXXXXFFLVSLSSLKTPAXXAKPVA

SEQ ID NO: 43910 - protein, 40 aa, Artificial Sequence
  GFR-binding peptide
  MOD_RES (1)..(3)..(34)..(35): Xaa is C or S
XKXSKVIMPYVKLIKPTKGILFFISLSSLDQSVXXPSASA

SEQ ID NO: 43911 - protein, 42 aa, Artificial Sequence
  GFR-binding peptide
  MOD_RES (1)..(3)..(36)..(37): Xaa is C or S
XGXEAVSMGEPYVKLTPVGMDDFFLVSLSSLKTPVXXAKGVK

SEQ ID NO: 43912 - protein, 37 aa, Artificial Sequence
  GFR-binding peptide
  MOD_RES (1)..(3)..(37): Xaa is C or S
  MOD_RES (15)..(16)..(17)..(18)..(19): Xaa is A or G
  MOD_RES (20)..(21)..(22)..(23): Xaa is A or G or is absent
XGXAEVVMDPYVKLXXXXXXXXXFFLISLSSLRAPVX

SEQ ID NO: 43913 - protein, 36 aa, Artificial Sequence
  GFR-binding peptide
  MOD_RES (2)..(36): Xaa is C or S
  MOD_RES (14)..(15)..(16)..(17)..(18): Xaa is A or G
  MOD_RES (19)..(20)..(21)..(22): Xaa is A or G or is absent
EXKNHQLFPYVKLXXXXXXXXXFFLMSLSSEETPVX

SEQ ID NO: 43914 - protein, 35 aa, Artificial Sequence
  GFR-binding peptide
  MOD_RES (33)..(34): Xaa is C or S
  MOD_RES (11)..(12)..(13)..(14)..(15): Xaa is A or G
  MOD_RES (16)..(17)..(18)..(19): Xaa is A or G or is absent
EVVMDPYVKLXXXXXXXXXFFLISLSSLRAPVXXS

SEQ ID NO: 43915 - protein, 38 aa, Artificial Sequence
  GFR-binding peptide
  MOD_RES (34)..(35): Xaa is C or S
  MOD_RES (12)..(13)..(14)..(15)..(16): Xaa is A or G
  MOD_RES (17)..(18)..(19)..(20): Xaa is A or G or is absent
AEVVMDPYVKLXXXXXXXXXFFLISLSSLRAPVXXSAP

SEQ ID NO: 43916 - protein, 42 aa, Artificial Sequence; identical to SEQ ID NO: 1220
  GFR-binding peptide
  MOD_RES (2)..(4)..(36)..(37): Xaa is C or S

SEQ ID NO: 43917 - protein, 40 aa, Artificial Sequence
  GFR-binding peptide
  MOD_RES (2)..(36)..(37): Xaa is C or S
  MOD_RES (14)..(15)..(16)..(17)..(18): Xaa is A or G
  MOD_RES (19)..(20)..(21)..(22): Xaa is A or G or is absent
GXSRVVMNPYVKLXXXXXXXXXFFLVSLSSLKTPAXXPKP

SEQ ID NO: 43918 - protein, 37 aa, Artificial Sequence
  GFR-binding peptide
  MOD_RES (33)..(34): Xaa is C or S
  MOD_RES (11)..(12)..(13)..(14)..(15): Xaa is A or G
  MOD_RES (16)..(17)..(18)..(19): Xaa is A or G or is absent
SKVVMPYVKLXXXXXXXXXFFLISLSSLDQPVXXPSA

SEQ ID NO: 43919 - protein, 39 aa, Artificial Sequence
  GFR-binding peptide
  MOD_RES (2)..(35)..(36): Xaa is C or S
  MOD_RES (13)..(14)..(15)..(16)..(17): Xaa is A or G
  MOD_RES (18)..(19)..(20)..(21): Xaa is A or G or is absent
KXSRVIMPYVKLXXXXXXXXXFFLISLSSLAQPVXXPAA

SEQ ID NO: 43920 - protein, 33 aa, Artificial Sequence
  GFR-binding peptide
  MOD_RES (2)..(2): Xaa is C or S
GXAKVVMNPYVKLIVNNSSDFFLVSLSSLKTPA

SEQ ID NO: 43921 - protein, 40 aa, Artificial Sequence
  GFR-binding peptide
  MOD_RES (1)..(34)..(35): Xaa is C or S
  MOD_RES (12)..(13)..(14)..(15)..(16): Xaa is A or G
  MOD_RES (17)..(18)..(19)..(20): Xaa is A or G or is absent
XSKVIMPYVKLXXXXXXXXXFFLISLSSLDQSVXXPSASA

SEQ ID NO: 43922 - protein, 41 aa, Artificial Sequence
  GFR-binding peptide
  MOD_RES (2)..(39): Xaa is C or S
AXELHEELRPYVKLLKPKKRVYEFFLVSLSSHHVRSPQXKV

SEQ ID NO: 43923 - protein, 37 aa, Artificial Sequence
  GFR-binding peptide
  MOD_RES (1)..(3)..(35)..(36): Xaa is C or S
XGXAEVVMDPYVKLVVNNAADFFLISLSSLRAPVXXS

SEQ ID NO: 43924 - protein, 38 aa, Artificial Sequence
  GFR-binding peptide
  MOD_RES (1)..(3)..(35)..(36): Xaa is C or S
XAXSEVTMNPYVKLVVNKNEDFFLISLSSMKEPVXXPE

SEQ ID NO: 43925 - protein, 37 aa, Artificial Sequence
  GFR-binding peptide
  MOD_RES (2)..(36)..(37): Xaa is C or S
  MOD_RES (14)..(15)..(16)..(17)..(18): Xaa is A or G
  MOD_RES (19)..(20)..(21)..(22): Xaa is A or G or is absent
GXSRVVMNPYVKLXXXXXXXXXFFLVSLSSLKTPAXX

SEQ ID NO: 43926 - protein, 36 aa, Artificial Sequence
  GFR-binding peptide
  MOD_RES (34)..(35): Xaa is C or S
  MOD_RES (12)..(13)..(14)..(15)..(16): Xaa is A or G
  MOD_RES (17)..(18)..(19)..(20): Xaa is A or G or is absent
ESVAMGPYVKLXXXXXXXXXFFLISLSSLKTPVXXA

SEQ ID NO: 43927 - protein, 40 aa, Artificial Sequence
  GFR-binding peptide
  MOD_RES (2)..(34)..(35): Xaa is C or S
GXSRVVMNPYVKLIVNSSDDFFLVSLSSLKTPAXXPKPVY

SEQ ID NO: 43928 - protein, 38 aa, Artificial Sequence
  GFR-binding peptide
  MOD_RES (1)..(3)..(37)..(38): Xaa is C or S
  MOD_RES (15)..(16)..(17)..(18)..(19): Xaa is A or G
  MOD_RES (20)..(21)..(22)..(23): Xaa is A or G or is absent
XAXSEVTMNPYVKLXXXXXXXXXFFLISLSSMKEPVXX

SEQ ID NO: 43929 - protein, 42 aa, Artificial Sequence
  GFR-binding peptide
  MOD_RES (2)..(36)..(37): Xaa is C or S
  MOD_RES (14)..(15)..(16)..(17)..(18): Xaa is A or G
  MOD_RES (19)..(20)..(21)..(22): Xaa is A or G or is absent
GXGEVVMEPYVKLXXXXXXXXXFFLMSLSSLETPVXXAKPIS

SEQ ID NO: 43930 - protein, 35 aa, Artificial Sequence
  GFR-binding peptide
  MOD_RES (34)..(35): Xaa is C or S
  MOD_RES (12)..(13)..(14)..(15)..(16): Xaa is A or G
  MOD_RES (17)..(18)..(19)..(20): Xaa is A or G or is absent
ARVVMNPYVKLXXXXXXXXXFFLVSLSSLQTPAXX

SEQ ID NO: 43931 - protein, 35 aa, Artificial Sequence
  GFR-binding peptide
  MOD_RES (1)..(3)..(35): Xaa is C or S
XGXARVVMNPYVKLIVNSSDDFFLVSLSSLQTPAX

SEQ ID NO: 43932 - protein, 39 aa, Artificial Sequence
  GFR-binding peptide
  MOD_RES (34)..(35): Xaa is C or S
  MOD_RES (12)..(13)..(14)..(15)..(16): Xaa is A or G
  MOD_RES (17)..(18)..(19)..(20): Xaa is A or G or is absent
ARVVMNPYVKLXXXXXXXXXFFLVSLSSLQTPAXXPKPV

SEQ ID NO: 43933 - protein, 36 aa, Artificial Sequence
  GFR-binding peptide
  MOD_RES (1)..(3): Xaa is C or S
  MOD_RES (15)..(16)..(17)..(18)..(19): Xaa is A or G
  MOD_RES (20)..(21)..(22)..(23): Xaa is A or G or is absent
XGXAKVVMNPYVKLXXXXXXXXXFFLVSLSSLKTPA

SEQ ID NO: 43934 - protein, 37 aa, Artificial Sequence
  GFR-binding peptide
  MOD_RES (1)..(3)..(35)..(36): Xaa is C or S
XGXARVVMNPYVKLIVNSSDDFFLVSLSSLQTPAXXP

SEQ ID NO: 43935 - protein, 43 aa, Artificial Sequence
  GFR-binding peptide
  MOD_RES (2)..(4)..(41): Xaa is C or S
AXAXELHEELRPYVKLLKPKKRVYEFFLVSLSSHHVRSPQXKV

SEQ ID NO: 43936 - protein, 38 aa, Artificial Sequence
  GFR-binding peptide
  MOD_RES (1)..(3): Xaa is C or S
XAXELHEELRPYVKLLKPKKRVYEFFLVSLSSHHVRSP

SEQ ID NO: 43937 - protein, 35 aa, Artificial Sequence
  GFR-binding peptide
  MOD_RES (33)..(34): Xaa is C or S
  MOD_RES (11)..(12)..(13)..(14)..(15): Xaa is A or G
  MOD_RES (16)..(17)..(18)..(19): Xaa is A or G or is absent
DVVMGPYVKLXXXXXXXXXFFLMSLSSMKTPTXXP

SEQ ID NO: 43938 - protein, 32 aa, Artificial Sequence
  GFR-binding peptide
  MOD_RES (11)..(12)..(13)..(14)..(15): Xaa is A or G
  MOD_RES (16)..(17)..(18)..(19): Xaa is A or G or is absent
SKVIMPYVKLXXXXXXXXXFFLISLSSLDQSV

SEQ ID NO: 43939 - protein, 41 aa, Artificial Sequence
  GFR-binding peptide
  MOD_RES (1)..(3)..(36)..(37): Xaa is C or S
  MOD_RES (14)..(15)..(16)..(17)..(18): Xaa is A or G
  MOD_RES (19)..(20)..(21)..(22): Xaa is A or G or is absent
XKXSRVIMPYVKLXXXXXXXXXFFLISLSSLAQPVXXPAAS

SEQ ID NO: 43940 - protein, 35 aa, Artificial Sequence
  GFR-binding peptide
  MOD_RES (33)..(34): Xaa is C or S
  MOD_RES (11)..(12)..(13)..(14)..(15): Xaa is A or G
  MOD_RES (16)..(17)..(18)..(19): Xaa is A or G or is absent
SVAMGPYVKLXXXXXXXXXFFLISLSSLKTPVXXA

SEQ ID NO: 43941 - protein, 37 aa, Artificial Sequence
  GFR-binding peptide
  MOD_RES (37)..(37): Xaa is C or S
ELHEELRPYVKLLKPKKRVYEFFLVSLSSHHVRSPQX

SEQ ID NO: 43942 - protein, 39 aa, Artificial Sequence
  GFR-binding peptide
  MOD_RES (1)..(3)..(35)..(36): Xaa is C or S
XAXSEVTMNPYVKLVVNKNEDFFLISLSSMKEPVXXPEP

SEQ ID NO: 43943 - protein, 33 aa, Artificial Sequence
  GFR-binding peptide
  MOD_RES (33)..(33): Xaa is C or S
  MOD_RES (11)..(12)..(13)..(14)..(15): Xaa is A or G
  MOD_RES (16)..(17)..(18)..(19): Xaa is A or G or is absent
SRVIMPYVKLXXXXXXXXXFFLISLSSLAQPVX

SEQ ID NO: 43944 - protein, 38 aa, Artificial Sequence
  GFR-binding peptide
  MOD_RES (2)..(36)..(37): Xaa is C or S
  MOD_RES (14)..(15)..(16)..(17)..(18): Xaa is A or G
  MOD_RES (19)..(20)..(21)..(22): Xaa is A or G or is absent
GXGEVVMEPYVKLXXXXXXXXXFFLMSLSSLETPVXXA

SEQ ID NO: 43945 - protein, 37 aa, Artificial Sequence
  GFR-binding peptide
  MOD_RES (2)..(36): Xaa is C or S
  MOD_RES (14)..(15)..(16)..(17)..(18): Xaa is A or G
  MOD_RES (19)..(20)..(21)..(22): Xaa is A or G or is absent
EXKNHQLFPYVKLXXXXXXXXXFFLMSLSSEETPVXE

SEQ ID NO: 43946 - protein, 42 aa, Artificial Sequence
  GFR-binding peptide
  MOD_RES (2)..(4)..(36)..(37): Xaa is C or S
HXGXAKVVMNPYVKLIVNNSSDFFLVSLSSLKTPAXXAKPVA

SEQ ID NO: 43947 - protein, 36 aa, Artificial Sequence
  GFR-binding peptide
  MOD_RES (1)..(3)..(36): Xaa is C or S
  MOD_RES (14)..(15)..(16)..(17)..(18): Xaa is A or G
  MOD_RES (19)..(20)..(21)..(22): Xaa is A or G or is absent
XGXEEVIMPYVKLXXXXXXXXXFFLMSLSSTKVPAX

SEQ ID NO: 43948 - protein, 34 aa, Artificial Sequence
  GFR-binding peptide
  MOD_RES (31)..(32): Xaa is C or S
RVVMNPYVKLIVNSSDDFFLVSLSSLKTPAXXPK

SEQ ID NO: 43949 - protein, 34 aa, Artificial Sequence
  GFR-binding peptide
  MOD_RES (2)..(4): Xaa is C or S
LXGXEEVIMPYVKLLLVRGNDFFLMSLSSTKVPA

SEQ ID NO: 43950 - protein, 32 aa, Artificial Sequence
  GFR-binding peptide
  MOD_RES (1)..(32): Xaa is C or S
XEEVIMPYVKLLLVRGNDFFLMSLSSTKVPAX

SEQ ID NO: 43951 - protein, 35 aa, Artificial Sequence
  GFR-binding peptide
  MOD_RES (1)..(3)..(34)..(35): Xaa is C or S
XKXSKVIMPYVKLIKPTKGILFFISLSSLDQSVXX

SEQ ID NO: 43952 - protein, 40 aa, Artificial Sequence
  GFR-binding peptide
  MOD_RES (1)..(3)..(40): Xaa is C or S
XAXELHEELRPYVKLLKPKKRVYEFFLVSLSSHHVRSPQX

SEQ ID NO: 43953 - protein, 37 aa, Artificial Sequence
  GFR-binding peptide
  MOD_RES (2)..(34)..(35): Xaa is C or S
AXSEVTMNPYVKLVVNKNEDFFLISLSSMKEPVXXPE

SEQ ID NO: 43954 - protein, 42 aa, Artificial Sequence
  GFR-binding peptide
  MOD_RES (2)..(36)..(37): Xaa is C or S
  MOD_RES (14)..(15)..(16)..(17)..(18): Xaa is A or G
  MOD_RES (19)..(20)..(21)..(22): Xaa is A or G or is absent
GXAKVVMNPYVKLXXXXXXXXXFFLVSLSSLKTPAXXAKPVA

SEQ ID NO: 43955 - protein, 35 aa, Artificial Sequence
  GFR-binding peptide
  MOD_RES (32)..(33): Xaa is C or S
GEVVMEPYVKLVVKDYEDFFLMSLSSLETPVXXAK

SEQ ID NO: 43956 - protein, 39 aa, Artificial Sequence
  GFR-binding peptide
  MOD_RES (1)..(3)..(35)..(36): Xaa is C or S
XGXESVAMGPYVKLYTVVGKDFFLISLSSLKTPVXXAKS

SEQ ID NO: 43957 - protein, 38 aa, Artificial Sequence
  GFR-binding peptide
  MOD_RES (1)..(3)..(37)..(38): Xaa is C or S
  MOD_RES (15)..(16)..(17)..(18)..(19): Xaa is A or G
  MOD_RES (20)..(21)..(22)..(23): Xaa is A or G or is absent
XGXAKVVMNPYVKLXXXXXXXXXFFLVSLSSLKTPAXX

SEQ ID NO: 43958 - protein, 38 aa, Artificial Sequence
  GFR-binding peptide
  MOD_RES (32)..(33): Xaa is C or S
ARVVMNPYVKLIVNSSDDFFLVSLSSLQTPAXXPKPVT

SEQ ID NO: 43959 - protein, 36 aa, Artificial Sequence
  GFR-binding peptide
  MOD_RES (34)..(35): Xaa is C or S
  MOD_RES (12)..(13)..(14)..(15)..(16): Xaa is A or G
  MOD_RES (17)..(18)..(19)..(20): Xaa is A or G or is absent
AKVVMNPYVKLXXXXXXXXXFFLVSLSSLKTPAXXA

SEQ ID NO: 43960 - protein, 39 aa, Artificial Sequence
  GFR-binding peptide
  MOD_RES (34)..(35): Xaa is C or S
  MOD_RES (12)..(13)..(14)..(15)..(16): Xaa is A or G
  MOD_RES (17)..(18)..(19)..(20): Xaa is A or G or is absent
AEVVMDPYVKLXXXXXXXXXFFLISLSSLRAPVXXSAPA

SEQ ID NO: 43961 - protein, 38 aa, Artificial Sequence
  GFR-binding peptide
  MOD_RES (2)..(4)..(36)..(37): Xaa is C or S
HXGXARVVMNPYVKLIVNSSDDFFLVSLSSLQTPAXXP

SEQ ID NO: 43962 - protein, 37 aa, Artificial Sequence
  GFR-binding peptide
  MOD_RES (2)..(2): Xaa is C or S
AXELHEELRPYVKLLKPKKRVYEFFLVSLSSHHVRSP

SEQ ID NO: 43963 - protein, 36 aa, Artificial Sequence
  GFR-binding peptide
  MOD_RES (32)..(33): Xaa is C or S
SEVVMDPYVKLVVNNASDFFLISLSSLRTPVXXTPP

SEQ ID NO: 43964 - protein, 33 aa, Artificial Sequence
  GFR-binding peptide
  MOD_RES (2)..(2): Xaa is C or S
GXGEVVMEPYVKLVVKDYEDFFLMSLSSLETPV

SEQ ID NO: 43965 - protein, 36 aa, Artificial Sequence
  GFR-binding peptide
  MOD_RES (2)..(4)..(36): Xaa is C or S
RXAXSEVTMNPYVKLVVNKNEDFFLISLSSMKEPVX

SEQ ID NO: 43966 - protein, 44 aa, Artificial Sequence
  GFR-binding peptide
  MOD_RES (2)..(4)..(38)..(39): Xaa is C or S
  MOD_RES (16)..(17)..(18)..(19)..(20): Xaa is A or G
  MOD_RES (21)..(22)..(23)..(24): Xaa is A or G or is absent
HXGXSRVVMNPYVKLXXXXXXXXXFFLVSLSSLKTPAXXPKPVH

SEQ ID NO: 43967 - protein, 37 aa, Artificial Sequence
  GFR-binding peptide
  MOD_RES (2)..(4)..(36)..(37): Xaa is C or S
RXGXESVAMGPYVKLYTVVGKDFFLISLSSLKTPVXX

SEQ ID NO: 43968 - protein, 34 aa, Artificial Sequence
  GFR-binding peptide
  MOD_RES (1)..(32)..(33): Xaa is C or S
XSRVIMPYVKLVKPKRGVLFFISLSSLAQPVXXP

SEQ ID NO: 43969 - protein, 33 aa, Artificial Sequence
  GFR-binding peptide
  MOD_RES (33)..(33): Xaa is C or S
  MOD_RES (11)..(12)..(13)..(14)..(15): Xaa is A or G
  MOD_RES (16)..(17)..(18)..(19): Xaa is A or G or is absent
EVVMEPYVKLXXXXXXXXXFFLMSLSSLETPVX

SEQ ID NO: 43970 - protein, 35 aa, Artificial Sequence
  GFR-binding peptide
  MOD_RES (31)..(31): Xaa is C or S
RVVMNPYVKLIVNSSDDFFLVSLSSLKTPAXTPKT

SEQ ID NO: 43971 - protein, 34 aa, Artificial Sequence
  GFR-binding peptide
  MOD_RES (1)..(3): Xaa is C or S
XGXAEVVMDPYVKLVVNNAADFFLISLSSLRAPV

SEQ ID NO: 43972 - protein, 39 aa, Artificial Sequence
  GFR-binding peptide
  MOD_RES (2)..(34)..(35): Xaa is C or S
GXGEVVMEPYVKLVVKDYEDFFLMSLSSLETPVXXAKPI

SEQ ID NO: 43973 - protein, 35 aa, Artificial Sequence
  GFR-binding peptide
  MOD_RES (1)..(3)..(35): Xaa is C or S
XGXSEVVMDPYVKLVVNNASDFFLISLSSLRTPVX

SEQ ID NO: 43974 - protein, 39 aa, Artificial Sequence
  GFR-binding peptide
  MOD_RES (1)..(3)..(36)..(37): Xaa is C or S
  MOD_RES (14)..(15)..(16)..(17)..(18): Xaa is A or G
  MOD_RES (19)..(20)..(21)..(22): Xaa is A or G or is absent
XKXSKVIMPYVKLXXXXXXXXXFFLISLSSLDQSVXXPS

SEQ ID NO: 43975 - protein, 37 aa, Artificial Sequence
  GFR-binding peptide
  MOD_RES (2)..(4): Xaa is C or S
  MOD_RES (16)..(17)..(18)..(19)..(20): Xaa is A or G
  MOD_RES (21)..(22)..(23)..(24): Xaa is A or G or is absent
RXAXSEVTMNPYVKLXXXXXXXXXFFLISLSSMKEPV

SEQ ID NO: 43976 - protein, 40 aa, Artificial Sequence
  GFR-binding peptide
  MOD_RES (1)..(3)..(35)..(36): Xaa is C or S
XGXSEVVMDPYVKLVVNNASDFFLISLSSLRTPVXXTPPT

SEQ ID NO: 43977 - protein, 35 aa, Artificial Sequence
  GFR-binding peptide
  MOD_RES (31)..(32): Xaa is C or S
EEVIMPYVKLLLVRGNDFFLMSLSSTKVPAXXTSP

SEQ ID NO: 43978 - protein, 36 aa, Artificial Sequence
  GFR-binding peptide
  MOD_RES (31)..(32): Xaa is C or S
SKVIMPYVKLIKPTKGILFFISLSSLDQSVXXPSAS

SEQ ID NO: 43979 - protein, 41 aa, Artificial Sequence
  GFR-binding peptide
  MOD_RES (2)..(4)..(38): Xaa is C or S
  MOD_RES (16)..(17)..(18)..(19)..(20): Xaa is A or G
  MOD_RES (21)..(22)..(23)..(24): Xaa is A or G or is absent
HXGXSRVVMNPYVKLXXXXXXXXXFFLVSLSSLKTPAXTPK

SEQ ID NO: 43980 - protein, 43 aa, Artificial Sequence
  GFR-binding peptide
  MOD_RES (2)..(4)..(38)..(39): Xaa is C or S
  MOD_RES (16)..(17)..(18)..(19)..(20): Xaa is A or G
  MOD_RES (21)..(22)..(23)..(24): Xaa is A or G or is absent
RXGXSEVVMDPYVKLXXXXXXXXXFFLISLSSLRTPVXXTPPT

SEQ ID NO: 43981 - protein, 37 aa, Artificial Sequence
  GFR-binding peptide
  MOD_RES (2)..(34)..(35): Xaa is C or S
GXESVAMGPYVKLYTVVGKDFFLISLSSLKTPVXXAK

SEQ ID NO: 43982 - protein, 34 aa, Artificial Sequence
  GFR-binding peptide
  MOD_RES (1)..(34): Xaa is C or S
  MOD_RES (12)..(13)..(14)..(15)..(16): Xaa is A or G
  MOD_RES (17)..(18)..(19)..(20): Xaa is A or G or is absent
XSRVIMPYVKLXXXXXXXXXFFLISLSSLAQPVX

SEQ ID NO: 43983 - protein, 42 aa, Artificial Sequence
  GFR-binding peptide
  MOD_RES (1)..(3)..(37): Xaa is C or S
  MOD_RES (15)..(16)..(17)..(18)..(19): Xaa is A or G
  MOD_RES (20)..(21)..(22)..(23): Xaa is A or G or is absent
XGXSRVVMNPYVKLXXXXXXXXXFFLVSLSSLKTPAXTPKTV

SEQ ID NO: 43984 - protein, 37 aa, Artificial Sequence
  GFR-binding peptide
  MOD_RES (32)..(33): Xaa is C or S
ARVVMNPYVKLIVNSSDDFFLVSLSSLQTPAXXPKPV

SEQ ID NO: 43985 - protein, 40 aa, Artificial Sequence
  GFR-binding peptide
  MOD_RES (2)..(4)..(36)..(37): Xaa is C or S
HXGXSRVVMNPYVKLIVNSSDDFFLVSLSSLKTPAXXPKP

SEQ ID NO: 43986 - protein, 32 aa, Artificial Sequence
  GFR-binding peptide
  MOD_RES (11)..(12)..(13)..(14)..(15): Xaa is A or G
  MOD_RES (16)..(17)..(18)..(19): Xaa is A or G or is absent
EVVMEPYVKLXXXXXXXXXFFLMSLSSLETPV

SEQ ID NO: 43987 - protein, 37 aa, Artificial Sequence
  GFR-binding peptide
  MOD_RES (1)..(3): Xaa is C or S
XAXELHEELRPYVKLLKPKKRVYEFFLVSLSSHHVRS

SEQ ID NO: 43988 - protein, 37 aa, Artificial Sequence
  GFR-binding peptide
  MOD_RES (1)..(35): Xaa is C or S
  MOD_RES (13)..(14)..(15)..(16)..(17): Xaa is A or G
  MOD_RES (18)..(19)..(20)..(21): Xaa is A or G or is absent
XSRVVMNPYVKLXXXXXXXXXFFLVSLSSLKTPAXTP

SEQ ID NO: 43989 - protein, 36 aa, Artificial Sequence
  GFR-binding peptide
  MOD_RES (2)..(34)..(35): Xaa is C or S
GXRDVVMGPYVKLIIQQKDNFFLMSLSSMKTPTXXP

SEQ ID NO: 43990 - protein, 39 aa, Artificial Sequence
  GFR-binding peptide
  MOD_RES (1)..(33)..(34): Xaa is C or S
XSEVVMDPYVKLVVNNASDFFLISLSSLRTPVXXTPPTS

SEQ ID NO: 43991 - protein, 40 aa, Artificial Sequence
  GFR-binding peptide
  MOD_RES (2)..(4)..(38)..(39): Xaa is C or S
  MOD_RES (16)..(17)..(18)..(19)..(20): Xaa is A or G
  MOD_RES (21)..(22)..(23)..(24): Xaa is A or G or is absent
HXGXARVVMNPYVKLXXXXXXXXXFFLVSLSSLQTPAXXP

SEQ ID NO: 43992 - protein, 37 aa, Artificial Sequence
  GFR-binding peptide
  MOD_RES (1)..(33)..(34): Xaa is C or S
XSEVVMDPYVKLVVNNASDFFLISLSSLRTPVXXTPP

SEQ ID NO: 43993 - protein, 38 aa, Artificial Sequence
  GFR-binding peptide
  MOD_RES (1)..(3)..(34)..(35): Xaa is C or S
XGXEEVIMPYVKLLLVRGNDFFLMSLSSTKVPAXXTSP

SEQ ID NO: 43994 - protein, 30 aa, Artificial Sequence
  GFR-binding peptide
EVTMNPYVKLVVNKNEDFFLISLSSMKEPV

SEQ ID NO: 43995 - protein, 40 aa, Artificial Sequence
  GFR-binding peptide
  MOD_RES (2)..(34)..(35): Xaa is C or S
AXSEVTMNPYVKLVVNKNEDFFLISLSSMKEPVXXPEPIG

SEQ ID NO: 43996 - protein, 37 aa, Artificial Sequence
  GFR-binding peptide
  MOD_RES (2)..(36)..(37): Xaa is C or S
  MOD_RES (14)..(15)..(16)..(17)..(18): Xaa is A or G
  MOD_RES (19)..(20)..(21)..(22): Xaa is A or G or is absent
GXGEVVMEPYVKLXXXXXXXXXFFLMSLSSLETPVXX

SEQ ID NO: 43997 - protein, 34 aa, Artificial Sequence
  GFR-binding peptide
  MOD_RES (33)..(34): Xaa is C or S
  MOD_RES (11)..(12)..(13)..(14)..(15): Xaa is A or G
  MOD_RES (16)..(17)..(18)..(19): Xaa is A or G or is absent
SVAMGPYVKLXXXXXXXXXFFLISLSSLKTPVXX

SEQ ID NO: 43998 - protein, 37 aa, Artificial Sequence
  GFR-binding peptide
  MOD_RES (31)..(32): Xaa is C or S
SKVIMPYVKLIKPTKGILFFISLSSLDQSVXXPSASA

SEQ ID NO: 43999 - protein, 39 aa, Artificial Sequence
  GFR-binding peptide
  MOD_RES (2)..(4): Xaa is C or S
AXAXELHEELRPYVKLLKPKKRVYEFFLVSLSSHHVRSP

SEQ ID NO: 44000 - protein, 36 aa, Artificial Sequence
  GFR-binding peptide
  MOD_RES (1)..(3): Xaa is C or S
XEXKNHQLFPYVKLHQGQHPKIRFFLMSLSSEETPV

SEQ ID NO: 44001 - protein, 38 aa, Artificial Sequence
  GFR-binding peptide
  MOD_RES (1)..(38): Xaa is C or S
XELHEELRPYVKLLKPKKRVYEFFLVSLSSHHVRSPQX

SEQ ID NO: 44002 - protein, 33 aa, Artificial Sequence
  GFR-binding peptide
  MOD_RES (2)..(2): Xaa is C or S
AXSEVTMNPYVKLVVNKNEDFFLISLSSMKEPV

SEQ ID NO: 44003 - protein, 39 aa, Artificial Sequence
  GFR-binding peptide
  MOD_RES (2)..(4)..(38): Xaa is C or S
  MOD_RES (16)..(17)..(18)..(19)..(20): Xaa is A or G
  MOD_RES (21)..(22)..(23)..(24): Xaa is A or G or is absent
RXEXKNHQLFPYVKLXXXXXXXXXFFLMSLSSEETPVXE

SEQ ID NO: 44004 - protein, 43 aa, Artificial Sequence
  GFR-binding peptide
  MOD_RES (2)..(4)..(37)..(38): Xaa is C or S
  MOD_RES (15)..(16)..(17)..(18)..(19): Xaa is A or G
  MOD_RES (20)..(21)..(22)..(23): Xaa is A or G or is absent
SXKXSKVVMPYVKLXXXXXXXXXFFLISLSSLDQPVXXPSASA

SEQ ID NO: 44005 - protein, 37 aa, Artificial Sequence
  GFR-binding peptide
  MOD_RES (34)..(35): Xaa is C or S
  MOD_RES (12)..(13)..(14)..(15)..(16): Xaa is A or G
  MOD_RES (17)..(18)..(19)..(20): Xaa is A or G or is absent
ARVVMNPYVKLXXXXXXXXXFFLVSLSSLQTPAXXPK

SEQ ID NO: 44006 - protein, 41 aa, Artificial Sequence
  GFR-binding peptide
  MOD_RES (1)..(3)..(37)..(38): Xaa is C or S
  MOD_RES (15)..(16)..(17)..(18)..(19): Xaa is A or G
  MOD_RES (20)..(21)..(22)..(23): Xaa is A or G or is absent
XGXSRVVMNPYVKLXXXXXXXXXFFLVSLSSLKTPAXXPKP

SEQ ID NO: 44007 - protein, 41 aa, Artificial Sequence
  GFR-binding peptide
  MOD_RES (2)..(36)..(37): Xaa is C or S
  MOD_RES (14)..(15)..(16)..(17)..(18): Xaa is A or G
  MOD_RES (19)..(20)..(21)..(22): Xaa is A or G or is absent
GXSRVVMNPYVKLXXXXXXXXXFFLVSLSSLKTPAXXPKPV

SEQ ID NO: 44008 - protein, 31 aa, Artificial Sequence
  GFR-binding peptide
  MOD_RES (31)..(31): Xaa is C or S
SKVVMPYVKLVKPTRGVLFFISLSSLDQPVX

SEQ ID NO: 44009 - protein, 36 aa, Artificial Sequence
  GFR-binding peptide
  MOD_RES (34)..(35): Xaa is C or S
  MOD_RES (12)..(13)..(14)..(15)..(16): Xaa is A or G
  MOD_RES (17)..(18)..(19)..(20): Xaa is A or G or is absent
RDVVMGPYVKLXXXXXXXXXFFLMSLSSMKTPTXXP

SEQ ID NO: 44010 - protein, 38 aa, Artificial Sequence
  GFR-binding peptide
  MOD_RES (32)..(33): Xaa is C or S
AKVVMNPYVKLIVNNSSDFFLVSLSSLKTPAXXAKPVA

SEQ ID NO: 44011 - protein, 42 aa, Artificial Sequence
  GFR-binding peptide
  MOD_RES (2)..(4)..(38)..(39): Xaa is C or S
  MOD_RES (16)..(17)..(18)..(19)..(20): Xaa is A or G
  MOD_RES (21)..(22)..(23)..(24): Xaa is A or G or is absent
HXGXARVVMNPYVKLXXXXXXXXXFFLVSLSSLQTPAXXPKP

SEQ ID NO: 44012 - protein, 36 aa, Artificial Sequence
  GFR-binding peptide
  MOD_RES (31)..(32): Xaa is C or S
EEVIMPYVKLLLVRGNDFFLMSLSSTKVPAXXTSPV

SEQ ID NO: 44013 - protein, 39 aa, Artificial Sequence
  GFR-binding peptide
  MOD_RES (1)..(35)..(36): Xaa is C or S
  MOD_RES (13)..(14)..(15)..(16)..(17): Xaa is A or G
  MOD_RES (18)..(19)..(20)..(21): Xaa is A or G or is absent
XRDVVMGPYVKLXXXXXXXXXFFLMSLSSMKTPTXXPGA

SEQ ID NO: 44014 - protein, 33 aa, Artificial Sequence
  GFR-binding peptide
  MOD_RES (1)..(32)..(33): Xaa is C or S
XSKVVMPYVKLVKPTRGVLFFISLSSLDQPVXX

SEQ ID NO: 44015 - protein, 42 aa, Artificial Sequence
  GFR-binding peptide
  MOD_RES (2)..(36): Xaa is C or S
  MOD_RES (14)..(15)..(16)..(17)..(18): Xaa is A or G
  MOD_RES (19)..(20)..(21)..(22): Xaa is A or G or is absent
GXSRVVMNPYVKLXXXXXXXXXFFLVSLSSLKTPAXTPKTVH

SEQ ID NO: 44016 - protein, 38 aa, Artificial Sequence
  GFR-binding peptide
  MOD_RES (33)..(34): Xaa is C or S
  MOD_RES (11)..(12)..(13)..(14)..(15): Xaa is A or G
  MOD_RES (16)..(17)..(18)..(19): Xaa is A or G or is absent
RVVMNPYVKLXXXXXXXXXFFLVSLSSLQTPAXXPKPV

SEQ ID NO: 44017 - protein, 33 aa, Artificial Sequence
  GFR-binding peptide
  MOD_RES (33)..(33): Xaa is C or S
EAVSMGEPYVKLTPVGMDDFFLVSLSSLKTPVX

SEQ ID NO: 44018 - protein, 43 aa, Artificial Sequence
  GFR-binding peptide
  MOD_RES (2)..(4)..(38): Xaa is C or S
  MOD_RES (16)..(17)..(18)..(19)..(20): Xaa is A or G
  MOD_RES (21)..(22)..(23)..(24): Xaa is A or G or is absent
HXGXSRVVMNPYVKLXXXXXXXXXFFLVSLSSLKTPAXTPKTV

SEQ ID NO: 44019 - protein, 33 aa, Artificial Sequence
  GFR-binding peptide
  MOD_RES (31)..(32): Xaa is C or S
SKVVMPYVKLVKPTRGVLFFISLSSLDQPVXXP

SEQ ID NO: 44020 - protein, 37 aa, Artificial Sequence
  GFR-binding peptide
  MOD_RES (34)..(34): Xaa is C or S
KNHQLFPYVKLHQGQHPKIRFFLMSLSSEETPVXELG

SEQ ID NO: 44021 - protein, 45 aa, Artificial Sequence
  GFR-binding peptide
  MOD_RES (2)..(4)..(41): Xaa is C or S
  MOD_RES (17)..(18)..(19)..(20)..(21): Xaa is A or G
  MOD_RES (22)..(23)..(24)..(25): Xaa is A or G or is absent
AXAXELHEELRPYVKLXXXXXXXXXFFLVSLSSHHVRSPQXKVSS

SEQ ID NO: 44022 - protein, 31 aa, Artificial Sequence
  GFR-binding peptide
  MOD_RES (1)..(1): Xaa is C or S
XEEVIMPYVKLLLVRGNDFFLMSLSSTKVPA

SEQ ID NO: 44023 - protein, 30 aa, Artificial Sequence
  GFR-binding peptide
RVVMNPYVKLIVNSSDDFFLVSLSSLQTPA

SEQ ID NO: 44024 - protein, 32 aa, Artificial Sequence
  GFR-binding peptide
  MOD_RES (2)..(2): Xaa is C or S
KXSRVIMPYVKLVKPKRGVLFFISLSSLAQPV

SEQ ID NO: 44025 - protein, 41 aa, Artificial Sequence
  GFR-binding peptide
  MOD_RES (1)..(3)..(36)..(37): Xaa is C or S
  MOD_RES (14)..(15)..(16)..(17)..(18): Xaa is A or G
  MOD_RES (19)..(20)..(21)..(22): Xaa is A or G or is absent
XGXEEVIMPYVKLXXXXXXXXXFFLMSLSSTKVPAXXTSPV

SEQ ID NO: 44026 - protein, 43 aa, Artificial Sequence
  GFR-binding peptide
  MOD_RES (1)..(3)..(37)..(38): Xaa is C or S
  MOD_RES (15)..(16)..(17)..(18)..(19): Xaa is A or G
  MOD_RES (20)..(21)..(22)..(23): Xaa is A or G or is absent
XGXAEVVMDPYVKLXXXXXXXXXFFLISLSSLRAPVXXSAPAA

SEQ ID NO: 44027 - protein, 41 aa, Artificial Sequence
  GFR-binding peptide
  MOD_RES (2)..(4)..(38)..(39): Xaa is C or S
  MOD_RES (16)..(17)..(18)..(19)..(20): Xaa is A or G
  MOD_RES (21)..(22)..(23)..(24): Xaa is A or G or is absent
RXGXSEVVMDPYVKLXXXXXXXXXFFLISLSSLRTPVXXTP

SEQ ID NO: 44028 - protein, 37 aa, Artificial Sequence
  GFR-binding peptide
  MOD_RES (1)..(1): Xaa is C or S
  MOD_RES (14)..(15)..(16)..(17)..(18): Xaa is A or G
  MOD_RES (19)..(20)..(21)..(22): Xaa is A or G or is absent
XELHEELRPYVKLXXXXXXXXXFFLVSLSSHHVRSPQ

SEQ ID NO: 44029 - protein, 39 aa, Artificial Sequence
  GFR-binding peptide
  MOD_RES (1)..(3)..(36)..(37): Xaa is C or S
  MOD_RES (14)..(15)..(16)..(17)..(18): Xaa is A or G
  MOD_RES (19)..(20)..(21)..(22): Xaa is A or G or is absent
XKXSRVIMPYVKLXXXXXXXXXFFLISLSSLAQPVXXPA

SEQ ID NO: 44030 - protein, 38 aa, Artificial Sequence
  GFR-binding peptide
  MOD_RES (2)..(4)..(38): Xaa is C or S
  MOD_RES (16)..(17)..(18)..(19)..(20): Xaa is A or G
  MOD_RES (21)..(22)..(23)..(24): Xaa is A or G or is absent
RXEXKNHQLFPYVKLXXXXXXXXXFFLMSLSSEETPVX

SEQ ID NO: 44031 - protein, 36 aa, Artificial Sequence
  GFR-binding peptide
  MOD_RES (2)..(4)..(36): Xaa is C or S
HXGXARVVMNPYVKLIVNSSDDFFLVSLSSLQTPAX

SEQ ID NO: 44032 - protein, 39 aa, Artificial Sequence
  GFR-binding peptide
  MOD_RES (34)..(35): Xaa is C or S
  MOD_RES (12)..(13)..(14)..(15)..(16): Xaa is A or G
  MOD_RES (17)..(18)..(19)..(20): Xaa is A or G or is absent
SEVTMNPYVKLXXXXXXXXXFFLISLSSMKEPVXXPEPI

SEQ ID NO: 44033 - protein, 37 aa, Artificial Sequence
  GFR-binding peptide
  MOD_RES (35)..(35): Xaa is C or S
HEELRPYVKLLKPKKRVYEFFLVSLSSHHVRSPQXKV

SEQ ID NO: 44034 - protein, 32 aa, Artificial Sequence
  GFR-binding peptide
  MOD_RES (11)..(12)..(13)..(14)..(15): Xaa is A or G
  MOD_RES (16)..(17)..(18)..(19): Xaa is A or G or is absent
RVVMNPYVKLXXXXXXXXXFFLVSLSSLQTPA

SEQ ID NO: 44035 - protein, 40 aa, Artificial Sequence
  GFR-binding peptide
  MOD_RES (1)..(3)..(37)..(38): Xaa is C or S
  MOD_RES (15)..(16)..(17)..(18)..(19): Xaa is A or G
  MOD_RES (20)..(21)..(22)..(23): Xaa is A or G or is absent
XGXESVAMGPYVKLXXXXXXXXXFFLISLSSLKTPVXXAK

SEQ ID NO: 44036 - protein, 37 aa, Artificial Sequence
  GFR-binding peptide
  MOD_RES (33)..(34): Xaa is C or S
  MOD_RES (11)..(12)..(13)..(14)..(15): Xaa is A or G
  MOD_RES (16)..(17)..(18)..(19): Xaa is A or G or is absent
EVVMDPYVKLXXXXXXXXXFFLISLSSLRAPVXXSAP

SEQ ID NO: 44037 - protein, 41 aa, Artificial Sequence
  GFR-binding peptide
  MOD_RES (2)..(4)..(41): Xaa is C or S
  MOD_RES (17)..(18)..(19)..(20)..(21): Xaa is A or G
  MOD_RES (22)..(23)..(24)..(25): Xaa is A or G or is absent
AXAXELHEELRPYVKLXXXXXXXXXFFLVSLSSHHVRSPQX

SEQ ID NO: 44038 - protein, 35 aa, Artificial Sequence
  GFR-binding peptide
  MOD_RES (31)..(32): Xaa is C or S
EVVMDPYVKLVVNNASDFFLISLSSLRTPVXXTPP

SEQ ID NO: 44039 - protein, 32 aa, Artificial Sequence
  GFR-binding peptide
EAVSMGEPYVKLTPVGMDDFFLVSLSSLKTPV

SEQ ID NO: 44040 - protein, 42 aa, Artificial Sequence
  GFR-binding peptide
  MOD_RES (2)..(4)..(36)..(37): Xaa is C or S
HXGXSRVVMNPYVKLIVNSSDDFFLVSLSSLKTPAXXPKPVY

SEQ ID NO: 44041 - protein, 35 aa, Artificial Sequence
  GFR-binding peptide
  MOD_RES (1)..(3)..(35): Xaa is C or S
XGXAKVVMNPYVKLIVNNSSDFFLVSLSSLKTPAX

SEQ ID NO: 44042 - protein, 33 aa, Artificial Sequence
  GFR-binding peptide
  MOD_RES (33)..(33): Xaa is C or S
  MOD_RES (11)..(12)..(13)..(14)..(15): Xaa is A or G
  MOD_RES (16)..(17)..(18)..(19): Xaa is A or G or is absent
RVVMNPYVKLXXXXXXXXXFFLVSLSSLQTPAX

SEQ ID NO: 44043 - protein, 43 aa, Artificial Sequence
  GFR-binding peptide
  MOD_RES (2)..(4)..(38)..(39): Xaa is C or S
  MOD_RES (16)..(17)..(18)..(19)..(20): Xaa is A or G
  MOD_RES (21)..(22)..(23)..(24): Xaa is A or G or is absent
RXGXAEVVMDPYVKLXXXXXXXXXFFLISLSSLRAPVXXSAPA

SEQ ID NO: 44044 - protein, 39 aa, Artificial Sequence
  GFR-binding peptide
  MOD_RES (2)..(33)..(34): Xaa is C or S
GXEEVIMPYVKLLLVRGNDFFLMSLSSTKVPAXXTSPVR

SEQ ID NO: 44045 - protein, 35 aa, Artificial Sequence
  GFR-binding peptide
  MOD_RES (33)..(34): Xaa is C or S
  MOD_RES (11)..(12)..(13)..(14)..(15): Xaa is A or G
  MOD_RES (16)..(17)..(18)..(19): Xaa is A or G or is absent
RVVMNPYVKLXXXXXXXXXFFLVSLSSLQTPAXXP

SEQ ID NO: 44046 - protein, 35 aa, Artificial Sequence
  GFR-binding peptide
  MOD_RES (1)..(35): Xaa is C or S
  MOD_RES (13)..(14)..(15)..(16)..(17): Xaa is A or G
  MOD_RES (18)..(19)..(20)..(21): Xaa is A or G or is absent
XARVVMNPYVKLXXXXXXXXXFFLVSLSSLQTPAX

SEQ ID NO: 44047 - protein, 39 aa, Artificial Sequence
  GFR-binding peptide
  MOD_RES (33)..(34): Xaa is C or S
  MOD_RES (11)..(12)..(13)..(14)..(15): Xaa is A or G
  MOD_RES (16)..(17)..(18)..(19): Xaa is A or G or is absent
KVVMNPYVKLXXXXXXXXXFFLVSLSSLKTPAXXAKPVA

SEQ ID NO: 44048 - protein, 40 aa, Artificial Sequence
  GFR-binding peptide
  MOD_RES (37)..(37): Xaa is C or S
ELHEELRPYVKLLKPKKRVYEFFLVSLSSHHVRSPQXKVS

SEQ ID NO: 44049 - protein, 35 aa, Artificial Sequence
  GFR-binding peptide
  MOD_RES (1)..(34)..(35): Xaa is C or S
  MOD_RES (12)..(13)..(14)..(15)..(16): Xaa is A or G
  MOD_RES (17)..(18)..(19)..(20): Xaa is A or G or is absent
XSRVIMPYVKLXXXXXXXXXFFLISLSSLAQPVXX

SEQ ID NO: 44050 - protein, 38 aa, Artificial Sequence
  GFR-binding peptide
  MOD_RES (1)..(3)..(37)..(38): Xaa is C or S
  MOD_RES (15)..(16)..(17)..(18)..(19): Xaa is A or G
  MOD_RES (20)..(21)..(22)..(23): Xaa is A or G or is absent
XGXRDVVMGPYVKLXXXXXXXXXFFLMSLSSMKTPTXX

SEQ ID NO: 44051 - protein, 38 aa, Artificial Sequence
  GFR-binding peptide
  MOD_RES (1)..(3): Xaa is C or S
  MOD_RES (16)..(17)..(18)..(19)..(20): Xaa is A or G
  MOD_RES (21)..(22)..(23)..(24): Xaa is A or G or is absent
XAXELHEELRPYVKLXXXXXXXXXFFLVSLSSHHVRSP

SEQ ID NO: 44052 - protein, 36 aa, Artificial Sequence
  GFR-binding peptide
  MOD_RES (2)..(4)..(36): Xaa is C or S
RXGXESVAMGPYVKLYTVVGKDFFLISLSSLKTPVX

SEQ ID NO: 44053 - protein, 36 aa, Artificial Sequence
  GFR-binding peptide
  MOD_RES (2)..(4)..(36): Xaa is C or S
HXGXSRVVMNPYVKLIVNSSDDFFLVSLSSLKTPAX

SEQ ID NO: 44054 - protein, 32 aa, Artificial Sequence
  GFR-binding peptide
  MOD_RES (31)..(32): Xaa is C or S
SRVIMPYVKLVKPKRGVLFFISLSSLAQPVXX

SEQ ID NO: 44055 - protein, 41 aa, Artificial Sequence
  GFR-binding peptide
  MOD_RES (2)..(37)..(38): Xaa is C or S
  MOD_RES (15)..(16)..(17)..(18)..(19): Xaa is A or G
  MOD_RES (20)..(21)..(22)..(23): Xaa is A or G or is absent
GXEAVSMGEPYVKLXXXXXXXXXFFLVSLSSLKTPVXXAKG

SEQ ID NO: 44056 - protein, 40 aa, Artificial Sequence
  GFR-binding peptide
  MOD_RES (1)..(3)..(35)..(36): Xaa is C or S
XGXAKVVMNPYVKLIVNNSSDFFLVSLSSLKTPAXXAKPV

SEQ ID NO: 44057 - protein, 36 aa, Artificial Sequence
  GFR-binding peptide
  MOD_RES (2)..(36): Xaa is C or S
  MOD_RES (14)..(15)..(16)..(17)..(18): Xaa is A or G
  MOD_RES (19)..(20)..(21)..(22): Xaa is A or G or is absent
AXSEVTMNPYVKLXXXXXXXXXFFLISLSSMKEPVX

SEQ ID NO: 44058 - protein, 40 aa, Artificial Sequence
  GFR-binding peptide
  MOD_RES (2)..(4)..(35)..(36): Xaa is C or S
SXKXSRVIMPYVKLVKPKRGVLFFISLSSLAQPVXXPAAS

SEQ ID NO: 44059 - protein, 39 aa, Artificial Sequence
  GFR-binding peptide
  MOD_RES (1)..(36)..(37): Xaa is C or S
  MOD_RES (14)..(15)..(16)..(17)..(18): Xaa is A or G
  MOD_RES (19)..(20)..(21)..(22): Xaa is A or G or is absent
XEAVSMGEPYVKLXXXXXXXXXFFLVSLSSLKTPVXXAK

SEQ ID NO: 44060 - protein, 41 aa, Artificial Sequence
  GFR-binding peptide
  MOD_RES (2)..(4)..(35)..(36): Xaa is C or S
SXKXSRVIMPYVKLVKPKRGVLFFISLSSLAQPVXXPAASA

SEQ ID NO: 44061 - protein, 36 aa, Artificial Sequence
  GFR-binding peptide
  MOD_RES (2)..(34)..(35): Xaa is C or S
GXARVVMNPYVKLIVNSSDDFFLVSLSSLQTPAXXP

SEQ ID NO: 44062 - protein, 37 aa, Artificial Sequence
  GFR-binding peptide
  MOD_RES (31)..(31): Xaa is C or S
RVVMNPYVKLIVNSSDDFFLVSLSSLKTPAXTPKTVH

SEQ ID NO: 44063 - protein, 35 aa, Artificial Sequence
  GFR-binding peptide
  MOD_RES (33)..(34): Xaa is C or S
  MOD_RES (11)..(12)..(13)..(14)..(15): Xaa is A or G
  MOD_RES (16)..(17)..(18)..(19): Xaa is A or G or is absent
SRVIMPYVKLXXXXXXXXXFFLISLSSLAQPVXXP

SEQ ID NO: 44064 - protein, 34 aa, Artificial Sequence
  GFR-binding peptide
  MOD_RES (31)..(32): Xaa is C or S
EVTMNPYVKLVVNKNEDFFLISLSSMKEPVXXPE

SEQ ID NO: 44065 - protein, 39 aa, Artificial Sequence
  GFR-binding peptide
  MOD_RES (2)..(4)..(38)..(39): Xaa is C or S
  MOD_RES (16)..(17)..(18)..(19)..(20): Xaa is A or G
  MOD_RES (21)..(22)..(23)..(24): Xaa is A or G or is absent
HXGXARVVMNPYVKLXXXXXXXXXFFLVSLSSLQTPAXX

SEQ ID NO: 44066 - protein, 38 aa, Artificial Sequence
  GFR-binding peptide
  MOD_RES (37)..(37): Xaa is C or S
ELHEELRPYVKLLKPKKRVYEFFLVSLSSHHVRSPQXK

SEQ ID NO: 44067 - protein, 35 aa, Artificial Sequence
  GFR-binding peptide
  MOD_RES (33)..(34): Xaa is C or S
EAVSMGEPYVKLTPVGMDDFFLVSLSSLKTPVXXA

SEQ ID NO: 44068 - protein, 41 aa, Artificial Sequence
  GFR-binding peptide
  MOD_RES (35)..(36): Xaa is C or S
  MOD_RES (13)..(14)..(15)..(16)..(17): Xaa is A or G
  MOD_RES (18)..(19)..(20)..(21): Xaa is A or G or is absent
EAVSMGEPYVKLXXXXXXXXXFFLVSLSSLKTPVXXAKGVK

SEQ ID NO: 44069 - protein, 32 aa, Artificial Sequence
  GFR-binding peptide
  MOD_RES (32)..(32): Xaa is C or S
SEVVMDPYVKLVVNNASDFFLISLSSLRTPVX

SEQ ID NO: 44070 - protein, 36 aa, Artificial Sequence
  GFR-binding peptide
  MOD_RES (1)..(32)..(33): Xaa is C or S
XSKVVMPYVKLVKPTRGVLFFISLSSLDQPVXXPSA

SEQ ID NO: 44071 - protein, 31 aa, Artificial Sequence
  GFR-binding peptide
  MOD_RES (31)..(31): Xaa is C or S
RVVMNPYVKLIVNSSDDFFLVSLSSLQTPAX

SEQ ID NO: 44072 - protein, 36 aa, Artificial Sequence
  GFR-binding peptide
  MOD_RES (32)..(33): Xaa is C or S
SEVTMNPYVKLVVNKNEDFFLISLSSMKEPVXXPEP

SEQ ID NO: 44073 - protein, 40 aa, Artificial Sequence
  GFR-binding peptide
  MOD_RES (1)..(35): Xaa is C or S
XKNHQLFPYVKLHQGQHPKIRFFLMSLSSEETPVXELGED

SEQ ID NO: 44074 - protein, 37 aa, Artificial Sequence
  GFR-binding peptide
  MOD_RES (1)..(3)..(37): Xaa is C or S
  MOD_RES (15)..(16)..(17)..(18)..(19): Xaa is A or G
  MOD_RES (20)..(21)..(22)..(23): Xaa is A or G or is absent
XGXSRVVMNPYVKLXXXXXXXXXFFLVSLSSLKTPAX

SEQ ID NO: 44075 - protein, 42 aa, Artificial Sequence
  GFR-binding peptide
  MOD_RES (2)..(4)..(37)..(38): Xaa is C or S
  MOD_RES (15)..(16)..(17)..(18)..(19): Xaa is A or G
  MOD_RES (20)..(21)..(22)..(23): Xaa is A or G or is absent
SXKXSRVIMPYVKLXXXXXXXXXFFLISLSSLAQPVXXPAAS

SEQ ID NO: 44076 - protein, 40 aa, Artificial Sequence
  GFR-binding peptide
  MOD_RES (2)..(4)..(35)..(36): Xaa is C or S
LXGXEEVIMPYVKLLLVRGNDFFLMSLSSTKVPAXXTSPV

SEQ ID NO: 44077 - protein, 36 aa, Artificial Sequence
  GFR-binding peptide
  MOD_RES (2)..(4)..(36): Xaa is C or S
HXGXAKVVMNPYVKLIVNNSSDFFLVSLSSLKTPAX

SEQ ID NO: 44078 - protein, 41 aa, Artificial Sequence
  GFR-binding peptide
  MOD_RES (2)..(35)..(36): Xaa is C or S
  MOD_RES (13)..(14)..(15)..(16)..(17): Xaa is A or G
  MOD_RES (18)..(19)..(20)..(21): Xaa is A or G or is absent
KXSKVIMPYVKLXXXXXXXXXFFLISLSSLDQSVXXPSASA

SEQ ID NO: 44079 - protein, 39 aa, Artificial Sequence
  GFR-binding peptide
  MOD_RES (1)..(3)..(37)..(38): Xaa is C or S
  MOD_RES (15)..(16)..(17)..(18)..(19): Xaa is A or G
  MOD_RES (20)..(21)..(22)..(23): Xaa is A or G or is absent
XGXSRVVMNPYVKLXXXXXXXXXFFLVSLSSLKTPAXXP

SEQ ID NO: 44080 - protein, 35 aa, Artificial Sequence
  GFR-binding peptide
  MOD_RES (2)..(4): Xaa is C or S
HXGXSRVVMNPYVKLIVNSSDDFFLVSLSSLKTPA

SEQ ID NO: 44081 - protein, 39 aa, Artificial Sequence
  GFR-binding peptide
  MOD_RES (33)..(34): Xaa is C or S
EAVSMGEPYVKLTPVGMDDFFLVSLSSLKTPVXXAKGVK

SEQ ID NO: 44082 - protein, 41 aa, Artificial Sequence
  GFR-binding peptide
  MOD_RES (2)..(4)..(36)..(37): Xaa is C or S
RXGXAEVVMDPYVKLVVNNAADFFLISLSSLRAPVXXSAPA

SEQ ID NO: 44083 - protein, 37 aa, Artificial Sequence
  GFR-binding peptide
  MOD_RES (2)..(34)..(35): Xaa is C or S
GXSEVVMDPYVKLVVNNASDFFLISLSSLRTPVXXTP

SEQ ID NO: 44084 - protein, 38 aa, Artificial Sequence
  GFR-binding peptide
  MOD_RES (1)..(3)..(36)..(37): Xaa is C or S
  MOD_RES (14)..(15)..(16)..(17)..(18): Xaa is A or G
  MOD_RES (19)..(20)..(21)..(22): Xaa is A or G or is absent
XKXSKVVMPYVKLXXXXXXXXXFFLISLSSLDQPVXXP

SEQ ID NO: 44085 - protein, 39 aa, Artificial Sequence
  GFR-binding peptide
  MOD_RES (2)..(34)..(35): Xaa is C or S
GXAEVVMDPYVKLVVNNAADFFLISLSSLRAPVXXSAPA

SEQ ID NO: 44086 - protein, 37 aa, Artificial Sequence
  GFR-binding peptide
  MOD_RES (1)..(32)..(33): Xaa is C or S
XSKVIMPYVKLIKPTKGILFFISLSSLDQSVXXPSAS

SEQ ID NO: 44087 - protein, 39 aa, Artificial Sequence
  GFR-binding peptide
  MOD_RES (2)..(33)..(34): Xaa is C or S
KXSKVIMPYVKLIKPTKGILFFISLSSLDQSVXXPSASA

SEQ ID NO: 44088 - protein, 40 aa, Artificial Sequence
  GFR-binding peptide
  MOD_RES (2)..(36)..(37): Xaa is C or S
  MOD_RES (14)..(15)..(16)..(17)..(18): Xaa is A or G
  MOD_RES (19)..(20)..(21)..(22): Xaa is A or G or is absent
GXARVVMNPYVKLXXXXXXXXXFFLVSLSSLQTPAXXPKP

SEQ ID NO: 44089 - protein, 35 aa, Artificial Sequence
  GFR-binding peptide
  MOD_RES (34)..(35): Xaa is C or S
  MOD_RES (12)..(13)..(14)..(15)..(16): Xaa is A or G
  MOD_RES (17)..(18)..(19)..(20): Xaa is A or G or is absent
ESVAMGPYVKLXXXXXXXXXFFLISLSSLKTPVXX

SEQ ID NO: 44090 - protein, 41 aa, Artificial Sequence
  GFR-binding peptide
  MOD_RES (1)..(35)..(36): Xaa is C or S
  MOD_RES (13)..(14)..(15)..(16)..(17): Xaa is A or G
  MOD_RES (18)..(19)..(20)..(21): Xaa is A or G or is absent
XSRVVMNPYVKLXXXXXXXXXFFLVSLSSLKTPAXXPKPVY

SEQ ID NO: 44091 - protein, 42 aa, Artificial Sequence
  GFR-binding peptide
  MOD_RES (2)..(36)..(37): Xaa is C or S
  MOD_RES (14)..(15)..(16)..(17)..(18): Xaa is A or G
  MOD_RES (19)..(20)..(21)..(22): Xaa is A or G or is absent
GXSEVVMDPYVKLXXXXXXXXXFFLISLSSLRTPVXXTPPTS

SEQ ID NO: 44092 - protein, 33 aa, Artificial Sequence
  GFR-binding peptide
  MOD_RES (31)..(32): Xaa is C or S
DVVMGPYVKLIIQQKDNFFLMSLSSMKTPTXXP

SEQ ID NO: 44093 - protein, 43 aa, Artificial Sequence
  GFR-binding peptide
  MOD_RES (1)..(3)..(37)..(38): Xaa is C or S
  MOD_RES (15)..(16)..(17)..(18)..(19): Xaa is A or G
  MOD_RES (20)..(21)..(22)..(23): Xaa is A or G or is absent
XAXSEVTMNPYVKLXXXXXXXXXFFLISLSSMKEPVXXPEPIG

SEQ ID NO: 44094 - protein, 35 aa, Artificial Sequence
  GFR-binding peptide
  MOD_RES (2)..(4): Xaa is C or S
RXGXAEVVMDPYVKLVVNNAADFFLISLSSLRAPV

SEQ ID NO: 44095 - protein, 37 aa, Artificial Sequence
  GFR-binding peptide
  MOD_RES (32)..(33): Xaa is C or S
SEVTMNPYVKLVVNKNEDFFLISLSSMKEPVXXPEPI

SEQ ID NO: 44096 - protein, 35 aa, Artificial Sequence
  GFR-binding peptide
  MOD_RES (2)..(4)..(35): Xaa is C or S
SXKXSRVIMPYVKLVKPKRGVLFFISLSSLAQPVX

SEQ ID NO: 44097 - protein, 36 aa, Artificial Sequence
  GFR-binding peptide
  MOD_RES (2)..(4): Xaa is C or S
  MOD_RES (15)..(16)..(17)..(18)..(19): Xaa is A or G
  MOD_RES (20)..(21)..(22)..(23): Xaa is A or G or is absent
SXKXSRVIMPYVKLXXXXXXXXXFFLISLSSLAQPV

SEQ ID NO: 44098 - protein, 37 aa, Artificial Sequence
  GFR-binding peptide
  MOD_RES (2)..(35)..(36): Xaa is C or S
  MOD_RES (13)..(14)..(15)..(16)..(17): Xaa is A or G
  MOD_RES (18)..(19)..(20)..(21): Xaa is A or G or is absent
KXSKVVMPYVKLXXXXXXXXXFFLISLSSLDQPVXXP

SEQ ID NO: 44099 - protein, 37 aa, Artificial Sequence
  GFR-binding peptide
  MOD_RES (31)..(32): Xaa is C or S
RVVMNPYVKLIVNSSDDFFLVSLSSLKTPAXXPKPVH

SEQ ID NO: 44100 - protein, 35 aa, Artificial Sequence
  GFR-binding peptide
  MOD_RES (2)..(4): Xaa is C or S
HXGXAKVVMNPYVKLIVNNSSDFFLVSLSSLKTPA

SEQ ID NO: 44101 - protein, 40 aa, Artificial Sequence
  GFR-binding peptide
  MOD_RES (2)..(4)..(38)..(39): Xaa is C or S
  MOD_RES (16)..(17)..(18)..(19)..(20): Xaa is A or G
  MOD_RES (21)..(22)..(23)..(24): Xaa is A or G or is absent
RXAXSEVTMNPYVKLXXXXXXXXXFFLISLSSMKEPVXXP

SEQ ID NO: 44102 - protein, 38 aa, Artificial Sequence
  GFR-binding peptide
  MOD_RES (2)..(4): Xaa is C or S
  MOD_RES (17)..(18)..(19)..(20)..(21): Xaa is A or G
  MOD_RES (22)..(23)..(24)..(25): Xaa is A or G or is absent
AXAXELHEELRPYVKLXXXXXXXXXFFLVSLSSHHVRS

SEQ ID NO: 44103 - protein, 36 aa, Artificial Sequence
  GFR-binding peptide
  MOD_RES (1)..(35)..(36): Xaa is C or S
  MOD_RES (13)..(14)..(15)..(16)..(17): Xaa is A or G
  MOD_RES (18)..(19)..(20)..(21): Xaa is A or G or is absent
XARVVMNPYVKLXXXXXXXXXFFLVSLSSLQTPAXX

SEQ ID NO: 44104 - protein, 42 aa, Artificial Sequence
  GFR-binding peptide
  MOD_RES (2)..(36)..(37): Xaa is C or S
  MOD_RES (14)..(15)..(16)..(17)..(18): Xaa is A or G
  MOD_RES (19)..(20)..(21)..(22): Xaa is A or G or is absent
GXESVAMGPYVKLXXXXXXXXXFFLISLSSLKTPVXXAKSAK

SEQ ID NO: 44105 - protein, 33 aa, Artificial Sequence
  GFR-binding peptide
KNHQLFPYVKLHQGQHPKIRFFLMSLSSEETPV

SEQ ID NO: 44106 - protein, 36 aa, Artificial Sequence
  GFR-binding peptide
  MOD_RES (34)..(35): Xaa is C or S
  MOD_RES (12)..(13)..(14)..(15)..(16): Xaa is A or G
  MOD_RES (17)..(18)..(19)..(20): Xaa is A or G or is absent
SRVVMNPYVKLXXXXXXXXXFFLVSLSSLKTPAXXP

SEQ ID NO: 44107 - protein, 35 aa, Artificial Sequence
  GFR-binding peptide
  MOD_RES (1)..(33)..(34): Xaa is C or S
XSRVVMNPYVKLIVNSSDDFFLVSLSSLKTPAXXP

SEQ ID NO: 44108 - protein, 38 aa, Artificial Sequence
  GFR-binding peptide
  MOD_RES (35)..(35): Xaa is C or S
  MOD_RES (11)..(12)..(13)..(14)..(15): Xaa is A or G
  MOD_RES (16)..(17)..(18)..(19): Xaa is A or G or is absent
HEELRPYVKLXXXXXXXXXFFLVSLSSHHVRSPQXKVS

SEQ ID NO: 44109 - protein, 42 aa, Artificial Sequence
  GFR-binding peptide
  MOD_RES (2)..(4)..(36)..(37): Xaa is C or S
HXGXARVVMNPYVKLIVNSSDDFFLVSLSSLQTPAXXPKPVT

SEQ ID NO: 44110 - protein, 42 aa, Artificial Sequence
  GFR-binding peptide
  MOD_RES (1)..(3)..(37)..(38): Xaa is C or S
  MOD_RES (15)..(16)..(17)..(18)..(19): Xaa is A or G
  MOD_RES (20)..(21)..(22)..(23): Xaa is A or G or is absent
XGXESVAMGPYVKLXXXXXXXXXFFLISLSSLKTPVXXAKSA

SEQ ID NO: 44111 - protein, 39 aa, Artificial Sequence
  GFR-binding peptide
  MOD_RES (33)..(33): Xaa is C or S
  MOD_RES (11)..(12)..(13)..(14)..(15): Xaa is A or G
  MOD_RES (16)..(17)..(18)..(19): Xaa is A or G or is absent
NHQLFPYVKLXXXXXXXXXFFLMSLSSEETPVXELGEDN

SEQ ID NO: 44112 - protein, 39 aa, Artificial Sequence
  GFR-binding peptide
  MOD_RES (2)..(33)..(34): Xaa is C or S
KXSKVVMPYVKLVKPTRGVLFFISLSSLDQPVXXPSASA

SEQ ID NO: 44113 - protein, 41 aa, Artificial Sequence
  GFR-binding peptide
  MOD_RES (1)..(35)..(36): Xaa is C or S
  MOD_RES (13)..(14)..(15)..(16)..(17): Xaa is A or G
  MOD_RES (18)..(19)..(20)..(21): Xaa is A or G or is absent
XAEVVMDPYVKLXXXXXXXXXFFLISLSSLRAPVXXSAPAA

SEQ ID NO: 44114 - protein, 36 aa, Artificial Sequence
  GFR-binding peptide
  MOD_RES (2)..(33)..(34): Xaa is C or S
KXSKVVMPYVKLVKPTRGVLFFISLSSLDQPVXXPS

SEQ ID NO: 44115 - protein, 42 aa, Artificial Sequence
  GFR-binding peptide
  MOD_RES (2)..(4)..(38)..(39): Xaa is C or S
  MOD_RES (16)..(17)..(18)..(19)..(20): Xaa is A or G
  MOD_RES (21)..(22)..(23)..(24): Xaa is A or G or is absent
RXGXESVAMGPYVKLXXXXXXXXXFFLISLSSLKTPVXXAKS

SEQ ID NO: 44116 - protein, 34 aa, Artificial Sequence
  GFR-binding peptide
  MOD_RES (1)..(3): Xaa is C or S
XGXARVVMNPYVKLIVNSSDDFFLVSLSSLQTPA

SEQ ID NO: 44117 - protein, 34 aa, Artificial Sequence
  GFR-binding peptide
  MOD_RES (33)..(34): Xaa is C or S
  MOD_RES (11)..(12)..(13)..(14)..(15): Xaa is A or G
  MOD_RES (16)..(17)..(18)..(19): Xaa is A or G or is absent
EEVIMPYVKLXXXXXXXXXFFLMSLSSTKVPAXX

SEQ ID NO: 44118 - protein, 39 aa, Artificial Sequence
  GFR-binding peptide
  MOD_RES (1)..(3)..(37): Xaa is C or S
XEXKNHQLFPYVKLHQGQHPKIRFFLMSLSSEETPVXEL

SEQ ID NO: 44119 - protein, 36 aa, Artificial Sequence
  GFR-binding peptide
  MOD_RES (35)..(35): Xaa is C or S
HEELRPYVKLLKPKKRVYEFFLVSLSSHHVRSPQXK

SEQ ID NO: 44120 - protein, 36 aa, Artificial Sequence
  GFR-binding peptide
  MOD_RES (1)..(3)..(34)..(35): Xaa is C or S
XKXSKVVMPYVKLVKPTRGVLFFISLSSLDQPVXXP

SEQ ID NO: 44121 - protein, 38 aa, Artificial Sequence
  GFR-binding peptide
  MOD_RES (2)..(4)..(38): Xaa is C or S
  MOD_RES (16)..(17)..(18)..(19)..(20): Xaa is A or G
  MOD_RES (21)..(22)..(23)..(24): Xaa is A or G or is absent
HXGXAKVVMNPYVKLXXXXXXXXXFFLVSLSSLKTPAX

SEQ ID NO: 44122 - protein, 39 aa, Artificial Sequence
  GFR-binding peptide
  MOD_RES (33)..(34): Xaa is C or S
  MOD_RES (11)..(12)..(13)..(14)..(15): Xaa is A or G
  MOD_RES (16)..(17)..(18)..(19): Xaa is A or G or is absent
EVVMDPYVKLXXXXXXXXXFFLISLSSLRAPVXXSAPAA

SEQ ID NO: 44123 - protein, 39 aa, Artificial Sequence
  GFR-binding peptide
  MOD_RES (2)..(35)..(36): Xaa is C or S
  MOD_RES (13)..(14)..(15)..(16)..(17): Xaa is A or G
  MOD_RES (18)..(19)..(20)..(21): Xaa is A or G or is absent
GXEEVIMPYVKLXXXXXXXXXFFLMSLSSTKVPAXXTSP

SEQ ID NO: 44124 - protein, 40 aa, Artificial Sequence
  GFR-binding peptide
  MOD_RES (2)..(4)..(36)..(37): Xaa is C or S
RXGXAEVVMDPYVKLVVNNAADFFLISLSSLRAPVXXSAP

SEQ ID NO: 44125 - protein, 40 aa, Artificial Sequence
  GFR-binding peptide
  MOD_RES (2)..(34)..(35): Xaa is C or S
GXESVAMGPYVKLYTVVGKDFFLISLSSLKTPVXXAKSAK

SEQ ID NO: 44126 - protein, 32 aa, Artificial Sequence
  GFR-binding peptide
  MOD_RES (11)..(12)..(13)..(14)..(15): Xaa is A or G
  MOD_RES (16)..(17)..(18)..(19): Xaa is A or G or is absent
SRVIMPYVKLXXXXXXXXXFFLISLSSLAQPV

SEQ ID NO: 44127 - protein, 42 aa, Artificial Sequence
  GFR-binding peptide
  MOD_RES (2)..(36)..(37): Xaa is C or S
  MOD_RES (14)..(15)..(16)..(17)..(18): Xaa is A or G
  MOD_RES (19)..(20)..(21)..(22): Xaa is A or G or is absent
GXSRVVMNPYVKLXXXXXXXXXFFLVSLSSLKTPAXXPKPVY

SEQ ID NO: 44128 - protein, 31 aa, Artificial Sequence
  GFR-binding peptide
  MOD_RES (31)..(31): Xaa is C or S
EVVMEPYVKLVVKDYEDFFLMSLSSLETPVX

SEQ ID NO: 44129 - protein, 36 aa, Artificial Sequence
  GFR-binding peptide
  MOD_RES (33)..(34): Xaa is C or S
EAVSMGEPYVKLTPVGMDDFFLVSLSSLKTPVXXAK

SEQ ID NO: 44130 - protein, 36 aa, Artificial Sequence
  GFR-binding peptide
  MOD_RES (2)..(4)..(36): Xaa is C or S
RXGXAEVVMDPYVKLVVNNAADFFLISLSSLRAPVX

SEQ ID NO: 44131 - protein, 37 aa, Artificial Sequence
  GFR-binding peptide
  MOD_RES (1)..(3)..(36)..(37): Xaa is C or S
  MOD_RES (14)..(15)..(16)..(17)..(18): Xaa is A or G
  MOD_RES (19)..(20)..(21)..(22): Xaa is A or G or is absent
XGXEEVIMPYVKLXXXXXXXXXFFLMSLSSTKVPAXX

SEQ ID NO: 44132 - protein, 34 aa, Artificial Sequence
  GFR-binding peptide
  MOD_RES (1)..(33)..(34): Xaa is C or S
XAKVVMNPYVKLIVNNSSDFFLVSLSSLKTPAXX

SEQ ID NO: 44133 - protein, 36 aa, Artificial Sequence
  GFR-binding peptide
  MOD_RES (1)..(36): Xaa is C or S
  MOD_RES (14)..(15)..(16)..(17)..(18): Xaa is A or G
  MOD_RES (19)..(20)..(21)..(22): Xaa is A or G or is absent
XEAVSMGEPYVKLXXXXXXXXXFFLVSLSSLKTPVX

SEQ ID NO: 44134 - protein, 41 aa, Artificial Sequence
  GFR-binding peptide
  MOD_RES (2)..(4)..(38)..(39): Xaa is C or S
  MOD_RES (16)..(17)..(18)..(19)..(20): Xaa is A or G
  MOD_RES (21)..(22)..(23)..(24): Xaa is A or G or is absent
RXAXSEVTMNPYVKLXXXXXXXXXFFLISLSSMKEPVXXPE

SEQ ID NO: 44135 - protein, 35 aa, Artificial Sequence
  GFR-binding peptide
  MOD_RES (33)..(33): Xaa is C or S
  MOD_RES (11)..(12)..(13)..(14)..(15): Xaa is A or G
  MOD_RES (16)..(17)..(18)..(19): Xaa is A or G or is absent
RVVMNPYVKLXXXXXXXXXFFLVSLSSLKTPAXTP

SEQ ID NO: 44136 - protein, 37 aa, Artificial Sequence
  GFR-binding peptide
  MOD_RES (2)..(36): Xaa is C or S
EXKNHQLFPYVKLHQGQHPKIRFFLMSLSSEETPVXE

SEQ ID NO: 44137 - protein, 41 aa, Artificial Sequence
  GFR-binding peptide
  MOD_RES (2)..(36)..(37): Xaa is C or S
  MOD_RES (14)..(15)..(16)..(17)..(18): Xaa is A or G
  MOD_RES (19)..(20)..(21)..(22): Xaa is A or G or is absent
GXGEVVMEPYVKLXXXXXXXXXFFLMSLSSLETPVXXAKPI

SEQ ID NO: 44138 - protein, 40 aa, Artificial Sequence
  GFR-binding peptide
  MOD_RES (1)..(3)..(40): Xaa is C or S
  MOD_RES (16)..(17)..(18)..(19)..(20): Xaa is A or G
  MOD_RES (21)..(22)..(23)..(24): Xaa is A or G or is absent
XAXELHEELRPYVKLXXXXXXXXXFFLVSLSSHHVRSPQX

SEQ ID NO: 44139 - protein, 35 aa, Artificial Sequence
  GFR-binding peptide
  MOD_RES (2)..(35): Xaa is C or S
  MOD_RES (13)..(14)..(15)..(16)..(17): Xaa is A or G
  MOD_RES (18)..(19)..(20)..(21): Xaa is A or G or is absent
KXSRVIMPYVKLXXXXXXXXXFFLISLSSLAQPVX

SEQ ID NO: 44140 - protein, 35 aa, Artificial Sequence
  GFR-binding peptide
  MOD_RES (2)..(2): Xaa is C or S
EXKNHQLFPYVKLHQGQHPKIRFFLMSLSSEETPV

SEQ ID NO: 44141 - protein, 34 aa, Artificial Sequence
  GFR-binding peptide
  MOD_RES (31)..(32): Xaa is C or S
EVVMDPYVKLVVNNAADFFLISLSSLRAPVXXSA

SEQ ID NO: 44142 - protein, 37 aa, Artificial Sequence
  GFR-binding peptide
  MOD_RES (2)..(4): Xaa is C or S
  MOD_RES (16)..(17)..(18)..(19)..(20): Xaa is A or G
  MOD_RES (21)..(22)..(23)..(24): Xaa is A or G or is absent
SXGXRDVVMGPYVKLXXXXXXXXXFFLMSLSSMKTPT

SEQ ID NO: 44143 - protein, 40 aa, Artificial Sequence
  GFR-binding peptide
  MOD_RES (2)..(4): Xaa is C or S
AXAXELHEELRPYVKLLKPKKRVYEFFLVSLSSHHVRSPQ

SEQ ID NO: 44144 - protein, 36 aa, Artificial Sequence
  GFR-binding peptide
  MOD_RES (2)..(33)..(34): Xaa is C or S
KXSKVIMPYVKLIKPTKGILFFISLSSLDQSVXXPS

SEQ ID NO: 44145 - protein, 42 aa, Artificial Sequence
  GFR-binding peptide
  MOD_RES (1)..(3)..(37)..(38): Xaa is C or S
  MOD_RES (15)..(16)..(17)..(18)..(19): Xaa is A or G
  MOD_RES (20)..(21)..(22)..(23): Xaa is A or G or is absent
XGXSRVVMNPYVKLXXXXXXXXXFFLVSLSSLKTPAXXPKPV

SEQ ID NO: 44146 - protein, 39 aa, Artificial Sequence
  GFR-binding peptide
  MOD_RES (2)..(4)..(38)..(39): Xaa is C or S
  MOD_RES (16)..(17)..(18)..(19)..(20): Xaa is A or G
  MOD_RES (21)..(22)..(23)..(24): Xaa is A or G or is absent
RXGXGEVVMEPYVKLXXXXXXXXXFFLMSLSSLETPVXX

SEQ ID NO: 44147 - protein, 40 aa, Artificial Sequence
  GFR-binding peptide
  MOD_RES (2)..(4)..(38)..(39): Xaa is C or S
  MOD_RES (16)..(17)..(18)..(19)..(20): Xaa is A or G
  MOD_RES (21)..(22)..(23)..(24): Xaa is A or G or is absent
RXGXAEVVMDPYVKLXXXXXXXXXFFLISLSSLRAPVXXS

SEQ ID NO: 44148 - protein, 34 aa, Artificial Sequence
  GFR-binding peptide
  MOD_RES (1)..(3)..(34): Xaa is C or S
XKXSKVIMPYVKLIKPTKGILFFISLSSLDQSVX

SEQ ID NO: 44149 - protein, 39 aa, Artificial Sequence
  GFR-binding peptide
  MOD_RES (33)..(33): Xaa is C or S
  MOD_RES (11)..(12)..(13)..(14)..(15): Xaa is A or G
  MOD_RES (16)..(17)..(18)..(19): Xaa is A or G or is absent
RVVMNPYVKLXXXXXXXXXFFLVSLSSLKTPAXTPKTVH

SEQ ID NO: 44150 - protein, 45 aa, Artificial Sequence
  GFR-binding peptide
  MOD_RES (2)..(4)..(39)..(40): Xaa is C or S
  MOD_RES (17)..(18)..(19)..(20)..(21): Xaa is A or G
  MOD_RES (22)..(23)..(24)..(25): Xaa is A or G or is absent
RXGXEAVSMGEPYVKLXXXXXXXXXFFLVSLSSLKTPVXXAKGVK

SEQ ID NO: 44151 - protein, 37 aa, Artificial Sequence
  GFR-binding peptide
  MOD_RES (31)..(32): Xaa is C or S
SKVVMPYVKLVKPTRGVLFFISLSSLDQPVXXPSASA

SEQ ID NO: 44152 - protein, 35 aa, Artificial Sequence
  GFR-binding peptide
  MOD_RES (1)..(33)..(34): Xaa is C or S
XAKVVMNPYVKLIVNNSSDFFLVSLSSLKTPAXXA

SEQ ID NO: 44153 - protein, 39 aa, Artificial Sequence
  GFR-binding peptide
  MOD_RES (34)..(35): Xaa is C or S
  MOD_RES (12)..(13)..(14)..(15)..(16): Xaa is A or G
  MOD_RES (17)..(18)..(19)..(20): Xaa is A or G or is absent
SEVVMDPYVKLXXXXXXXXXFFLISLSSLRTPVXXTPPT

SEQ ID NO: 44154 - protein, 35 aa, Artificial Sequence
  GFR-binding peptide
  MOD_RES (2)..(4): Xaa is C or S
RXAXSEVTMNPYVKLVVNKNEDFFLISLSSMKEPV

SEQ ID NO: 44155 - protein, 35 aa, Artificial Sequence
  GFR-binding peptide
  MOD_RES (1)..(33)..(34): Xaa is C or S
XGEVVMEPYVKLVVKDYEDFFLMSLSSLETPVXXA

SEQ ID NO: 44156 - protein, 38 aa, Artificial Sequence
  GFR-binding peptide
  MOD_RES (2)..(34)..(35): Xaa is C or S
GXGEVVMEPYVKLVVKDYEDFFLMSLSSLETPVXXAKP

SEQ ID NO: 44157 - protein, 37 aa, Artificial Sequence
  GFR-binding peptide
  MOD_RES (33)..(33): Xaa is C or S
  MOD_RES (11)..(12)..(13)..(14)..(15): Xaa is A or G
  MOD_RES (16)..(17)..(18)..(19): Xaa is A or G or is absent
NHQLFPYVKLXXXXXXXXXFFLMSLSSEETPVXELGE

SEQ ID NO: 44158 - protein, 38 aa, Artificial Sequence
  GFR-binding peptide
  MOD_RES (2)..(4)..(36)..(37): Xaa is C or S
SXGXRDVVMGPYVKLIIQQKDNFFLMSLSSMKTPTXXP

SEQ ID NO: 44159 - protein, 34 aa, Artificial Sequence
  GFR-binding peptide
  MOD_RES (1)..(3): Xaa is C or S
XGXGEVVMEPYVKLVVKDYEDFFLMSLSSLETPV

SEQ ID NO: 44160 - protein, 38 aa, Artificial Sequence
  GFR-binding peptide
  MOD_RES (1)..(3)..(36)..(37): Xaa is C or S
  MOD_RES (14)..(15)..(16)..(17)..(18): Xaa is A or G
  MOD_RES (19)..(20)..(21)..(22): Xaa is A or G or is absent
XGXEEVIMPYVKLXXXXXXXXXFFLMSLSSTKVPAXXT

SEQ ID NO: 44161 - protein, 32 aa, Artificial Sequence
  GFR-binding peptide
  MOD_RES (32)..(32): Xaa is C or S
RDVVMGPYVKLIIQQKDNFFLMSLSSMKTPTX

SEQ ID NO: 44162 - protein, 39 aa, Artificial Sequence
  GFR-binding peptide
  MOD_RES (2)..(36): Xaa is C or S
  MOD_RES (14)..(15)..(16)..(17)..(18): Xaa is A or G
  MOD_RES (19)..(20)..(21)..(22): Xaa is A or G or is absent
EXKNHQLFPYVKLXXXXXXXXXFFLMSLSSEETPVXELG

SEQ ID NO: 44163 - protein, 36 aa, Artificial Sequence
  GFR-binding peptide
  MOD_RES (1)..(34)..(35): Xaa is C or S
  MOD_RES (12)..(13)..(14)..(15)..(16): Xaa is A or G
  MOD_RES (17)..(18)..(19)..(20): Xaa is A or G or is absent
XEEVIMPYVKLXXXXXXXXXFFLMSLSSTKVPAXXT

SEQ ID NO: 44164 - protein, 30 aa, Artificial Sequence
  GFR-binding peptide
SKVVMPYVKLVKPTRGVLFFISLSSLDQPV

SEQ ID NO: 44165 - protein, 33 aa, Artificial Sequence
  GFR-binding peptide
  MOD_RES (31)..(32): Xaa is C or S
SKVIMPYVKLIKPTKGILFFISLSSLDQSVXXP

SEQ ID NO: 44166 - protein, 37 aa, Artificial Sequence
  GFR-binding peptide
  MOD_RES (31)..(32): Xaa is C or S
EVTMNPYVKLVVNKNEDFFLISLSSMKEPVXXPEPIG

SEQ ID NO: 44167 - protein, 42 aa, Artificial Sequence
  GFR-binding peptide
  MOD_RES (1)..(3)..(38)..(39): Xaa is C or S
  MOD_RES (16)..(17)..(18)..(19)..(20): Xaa is A or G
  MOD_RES (21)..(22)..(23)..(24): Xaa is A or G or is absent
XGXEAVSMGEPYVKLXXXXXXXXXFFLVSLSSLKTPVXXAKG

SEQ ID NO: 44168 - protein, 36 aa, Artificial Sequence
  GFR-binding peptide
  MOD_RES (33)..(34): Xaa is C or S
  MOD_RES (11)..(12)..(13)..(14)..(15): Xaa is A or G
  MOD_RES (16)..(17)..(18)..(19): Xaa is A or G or is absent
EVTMNPYVKLXXXXXXXXXFFLISLSSMKEPVXXPE

SEQ ID NO: 44169 - protein, 40 aa, Artificial Sequence
  GFR-binding peptide
  MOD_RES (2)..(4)..(37)..(38): Xaa is C or S
RXGXEAVSMGEPYVKLTPVGMDDFFLVSLSSLKTPVXXAK

SEQ ID NO: 44170 - protein, 36 aa, Artificial Sequence
  GFR-binding peptide
  MOD_RES (1)..(3)..(35): Xaa is C or S
XGXSRVVMNPYVKLIVNSSDDFFLVSLSSLKTPAXT

SEQ ID NO: 44171 - protein, 42 aa, Artificial Sequence
  GFR-binding peptide
  MOD_RES (2)..(4)..(36)..(37): Xaa is C or S
RXAXSEVTMNPYVKLVVNKNEDFFLISLSSMKEPVXXPEPIG

SEQ ID NO: 44172 - protein, 37 aa, Artificial Sequence
  GFR-binding peptide
  MOD_RES (34)..(35): Xaa is C or S
  MOD_RES (12)..(13)..(14)..(15)..(16): Xaa is A or G
  MOD_RES (17)..(18)..(19)..(20): Xaa is A or G or is absent
GEVVMEPYVKLXXXXXXXXXFFLMSLSSLETPVXXAK

SEQ ID NO: 44173 - protein, 37 aa, Artificial Sequence
  GFR-binding peptide
  MOD_RES (31)..(32): Xaa is C or S
EVVMDPYVKLVVNNAADFFLISLSSLRAPVXXSAPAA

SEQ ID NO: 44174 - protein, 35 aa, Artificial Sequence
  GFR-binding peptide
  MOD_RES (34)..(35): Xaa is C or S
  MOD_RES (12)..(13)..(14)..(15)..(16): Xaa is A or G
  MOD_RES (17)..(18)..(19)..(20): Xaa is A or G or is absent
SEVVMDPYVKLXXXXXXXXXFFLISLSSLRTPVXX

SEQ ID NO: 44175 - protein, 36 aa, Artificial Sequence
  GFR-binding peptide
  MOD_RES (33)..(34): Xaa is C or S
  MOD_RES (11)..(12)..(13)..(14)..(15): Xaa is A or G
  MOD_RES (16)..(17)..(18)..(19): Xaa is A or G or is absent
KVVMNPYVKLXXXXXXXXXFFLVSLSSLKTPAXXAK

SEQ ID NO: 44176 - protein, 37 aa, Artificial Sequence
  GFR-binding peptide
  MOD_RES (2)..(4): Xaa is C or S
  MOD_RES (16)..(17)..(18)..(19)..(20): Xaa is A or G
  MOD_RES (21)..(22)..(23)..(24): Xaa is A or G or is absent
RXGXESVAMGPYVKLXXXXXXXXXFFLISLSSLKTPV

SEQ ID NO: 44177 - protein, 38 aa, Artificial Sequence
  GFR-binding peptide
  MOD_RES (1)..(32)..(33): Xaa is C or S
XSKVVMPYVKLVKPTRGVLFFISLSSLDQPVXXPSASA

SEQ ID NO: 44178 - protein, 41 aa, Artificial Sequence
  GFR-binding peptide
  MOD_RES (1)..(3)..(37): Xaa is C or S
XEXKNHQLFPYVKLHQGQHPKIRFFLMSLSSEETPVXELGE

SEQ ID NO: 44179 - protein, 37 aa, Artificial Sequence
  GFR-binding peptide
  MOD_RES (1)..(3)..(37): Xaa is C or S
  MOD_RES (15)..(16)..(17)..(18)..(19): Xaa is A or G
  MOD_RES (20)..(21)..(22)..(23): Xaa is A or G or is absent
XGXESVAMGPYVKLXXXXXXXXXFFLISLSSLKTPVX

SEQ ID NO: 44180 - protein, 39 aa, Artificial Sequence
  GFR-binding peptide
  MOD_RES (1)..(3)..(37): Xaa is C or S
  MOD_RES (15)..(16)..(17)..(18)..(19): Xaa is A or G
  MOD_RES (20)..(21)..(22)..(23): Xaa is A or G or is absent
XGXSRVVMNPYVKLXXXXXXXXXFFLVSLSSLKTPAXTP

SEQ ID NO: 44181 - protein, 37 aa, Artificial Sequence
  GFR-binding peptide
  MOD_RES (34)..(35): Xaa is C or S
  MOD_RES (12)..(13)..(14)..(15)..(16): Xaa is A or G
  MOD_RES (17)..(18)..(19)..(20): Xaa is A or G or is absent
RDVVMGPYVKLXXXXXXXXXFFLMSLSSMKTPTXXPG

SEQ ID NO: 44182 - protein, 41 aa, Artificial Sequence
  GFR-binding peptide
  MOD_RES (2)..(4)..(36): Xaa is C or S
HXGXSRVVMNPYVKLIVNSSDDFFLVSLSSLKTPAXTPKTV

SEQ ID NO: 44183 - protein, 39 aa, Artificial Sequence
  GFR-binding peptide
  MOD_RES (2)..(34)..(35): Xaa is C or S
GXSRVVMNPYVKLIVNSSDDFFLVSLSSLKTPAXXPKPV

SEQ ID NO: 44184 - protein, 33 aa, Artificial Sequence
  GFR-binding peptide
  MOD_RES (1)..(33): Xaa is C or S
XAEVVMDPYVKLVVNNAADFFLISLSSLRAPVX

SEQ ID NO: 44185 - protein, 37 aa, Artificial Sequence
  GFR-binding peptide
  MOD_RES (2)..(4): Xaa is C or S
  MOD_RES (16)..(17)..(18)..(19)..(20): Xaa is A or G
  MOD_RES (21)..(22)..(23)..(24): Xaa is A or G or is absent
HXGXAKVVMNPYVKLXXXXXXXXXFFLVSLSSLKTPA

SEQ ID NO: 44186 - protein, 40 aa, Artificial Sequence
  GFR-binding peptide
  MOD_RES (2)..(4)..(35)..(36): Xaa is C or S
SXKXSKVIMPYVKLIKPTKGILFFISLSSLDQSVXXPSAS

SEQ ID NO: 44187 - protein, 36 aa, Artificial Sequence
  GFR-binding peptide
  MOD_RES (1)..(34)..(35): Xaa is C or S
XEAVSMGEPYVKLTPVGMDDFFLVSLSSLKTPVXXA

SEQ ID NO: 44188 - protein, 38 aa, Artificial Sequence
  GFR-binding peptide
  MOD_RES (34)..(34): Xaa is C or S
KNHQLFPYVKLHQGQHPKIRFFLMSLSSEETPVXELGE

SEQ ID NO: 44189 - protein, 40 aa, Artificial Sequence
  GFR-binding peptide
  MOD_RES (34)..(35): Xaa is C or S
  MOD_RES (12)..(13)..(14)..(15)..(16): Xaa is A or G
  MOD_RES (17)..(18)..(19)..(20): Xaa is A or G or is absent
ARVVMNPYVKLXXXXXXXXXFFLVSLSSLQTPAXXPKPVT

SEQ ID NO: 44190 - protein, 37 aa, Artificial Sequence
  GFR-binding peptide
  MOD_RES (1)..(3)..(37): Xaa is C or S
  MOD_RES (15)..(16)..(17)..(18)..(19): Xaa is A or G
  MOD_RES (20)..(21)..(22)..(23): Xaa is A or G or is absent
XGXGEVVMEPYVKLXXXXXXXXXFFLMSLSSLETPVX

SEQ ID NO: 44191 - protein, 35 aa, Artificial Sequence
  GFR-binding peptide
  MOD_RES (31)..(32): Xaa is C or S
RVVMNPYVKLIVNSSDDFFLVSLSSLQTPAXXPKP

SEQ ID NO: 44192 - protein, 32 aa, Artificial Sequence
  GFR-binding peptide
  MOD_RES (31)..(32): Xaa is C or S
EVVMDPYVKLVVNNAADFFLISLSSLRAPVXX

SEQ ID NO: 44193 - protein, 40 aa, Artificial Sequence
  GFR-binding peptide
  MOD_RES (1)..(3)..(37): Xaa is C or S
XEXKNHQLFPYVKLHQGQHPKIRFFLMSLSSEETPVXELG

SEQ ID NO: 44194 - protein, 41 aa, Artificial Sequence
  GFR-binding peptide
  MOD_RES (2)..(4)..(37)..(38): Xaa is C or S
  MOD_RES (15)..(16)..(17)..(18)..(19): Xaa is A or G
  MOD_RES (20)..(21)..(22)..(23): Xaa is A or G or is absent
LXGXEEVIMPYVKLXXXXXXXXXFFLMSLSSTKVPAXXTSP

SEQ ID NO: 44195 - protein, 35 aa, Artificial Sequence
  GFR-binding peptide
  MOD_RES (1)..(3): Xaa is C or S
XGXEAVSMGEPYVKLTPVGMDDFFLVSLSSLKTPV

SEQ ID NO: 44196 - protein, 39 aa, Artificial Sequence
  GFR-binding peptide
  MOD_RES (2)..(34)..(35): Xaa is C or S
GXSEVVMDPYVKLVVNNASDFFLISLSSLRTPVXXTPPT

SEQ ID NO: 44197 - protein, 32 aa, Artificial Sequence
  GFR-binding peptide
  MOD_RES (11)..(12)..(13)..(14)..(15): Xaa is A or G
  MOD_RES (16)..(17)..(18)..(19): Xaa is A or G or is absent
NHQLFPYVKLXXXXXXXXXFFLMSLSSEETPV

SEQ ID NO: 44198 - protein, 35 aa, Artificial Sequence
  GFR-binding peptide
  MOD_RES (1)..(3): Xaa is C or S
  MOD_RES (14)..(15)..(16)..(17)..(18): Xaa is A or G
  MOD_RES (19)..(20)..(21)..(22): Xaa is A or G or is absent
XGXEEVIMPYVKLXXXXXXXXXFFLMSLSSTKVPA

SEQ ID NO: 44199 - protein, 39 aa, Artificial Sequence
  GFR-binding peptide
  MOD_RES (1)..(3)..(37)..(38): Xaa is C or S
  MOD_RES (15)..(16)..(17)..(18)..(19): Xaa is A or G
  MOD_RES (20)..(21)..(22)..(23): Xaa is A or G or is absent
XGXESVAMGPYVKLXXXXXXXXXFFLISLSSLKTPVXXA

SEQ ID NO: 44200 - protein, 37 aa, Artificial Sequence
  GFR-binding peptide
  MOD_RES (33)..(34): Xaa is C or S
  MOD_RES (11)..(12)..(13)..(14)..(15): Xaa is A or G
  MOD_RES (16)..(17)..(18)..(19): Xaa is A or G or is absent
RVVMNPYVKLXXXXXXXXXFFLVSLSSLKTPAXXPKP

SEQ ID NO: 44201 - protein, 40 aa, Artificial Sequence
  GFR-binding peptide
  MOD_RES (2)..(39): Xaa is C or S
AXELHEELRPYVKLLKPKKRVYEFFLVSLSSHHVRSPQXK

SEQ ID NO: 44202 - protein, 35 aa, Artificial Sequence
  GFR-binding peptide
  MOD_RES (1)..(35): Xaa is C or S
XKNHQLFPYVKLHQGQHPKIRFFLMSLSSEETPVX

SEQ ID NO: 44203 - protein, 37 aa, Artificial Sequence
  GFR-binding peptide
  MOD_RES (33)..(34): Xaa is C or S
  MOD_RES (11)..(12)..(13)..(14)..(15): Xaa is A or G
  MOD_RES (16)..(17)..(18)..(19): Xaa is A or G or is absent
EEVIMPYVKLXXXXXXXXXFFLMSLSSTKVPAXXTSP

SEQ ID NO: 44204 - protein, 37 aa, Artificial Sequence
  GFR-binding peptide
  MOD_RES (2)..(4)..(36)..(37): Xaa is C or S
RXAXSEVTMNPYVKLVVNKNEDFFLISLSSMKEPVXX

SEQ ID NO: 44205 - protein, 37 aa, Artificial Sequence
  GFR-binding peptide
  MOD_RES (2)..(4)..(36)..(37): Xaa is C or S
HXGXSRVVMNPYVKLIVNSSDDFFLVSLSSLKTPAXX

SEQ ID NO: 44206 - protein, 39 aa, Artificial Sequence
  GFR-binding peptide
  MOD_RES (2)..(36)..(37): Xaa is C or S
  MOD_RES (14)..(15)..(16)..(17)..(18): Xaa is A or G
  MOD_RES (19)..(20)..(21)..(22): Xaa is A or G or is absent
GXSRVVMNPYVKLXXXXXXXXXFFLVSLSSLKTPAXXPK

SEQ ID NO: 44207 - protein, 36 aa, Artificial Sequence
  GFR-binding peptide
  MOD_RES (2)..(36): Xaa is C or S
  MOD_RES (14)..(15)..(16)..(17)..(18): Xaa is A or G
  MOD_RES (19)..(20)..(21)..(22): Xaa is A or G or is absent
GXARVVMNPYVKLXXXXXXXXXFFLVSLSSLQTPAX

SEQ ID NO: 44208 - protein, 44 aa, Artificial Sequence
  GFR-binding peptide
  MOD_RES (2)..(4)..(39)..(40): Xaa is C or S
  MOD_RES (17)..(18)..(19)..(20)..(21): Xaa is A or G
  MOD_RES (22)..(23)..(24)..(25): Xaa is A or G or is absent
RXGXEAVSMGEPYVKLXXXXXXXXXFFLVSLSSLKTPVXXAKGV

SEQ ID NO: 44209 - protein, 41 aa, Artificial Sequence
  GFR-binding peptide
  MOD_RES (1)..(3)..(35)..(36): Xaa is C or S
XGXAKVVMNPYVKLIVNNSSDFFLVSLSSLKTPAXXAKPVA

SEQ ID NO: 44210 - protein, 41 aa, Artificial Sequence
  GFR-binding peptide
  MOD_RES (2)..(36)..(37): Xaa is C or S
  MOD_RES (14)..(15)..(16)..(17)..(18): Xaa is A or G
  MOD_RES (19)..(20)..(21)..(22): Xaa is A or G or is absent
GXESVAMGPYVKLXXXXXXXXXFFLISLSSLKTPVXXAKSA

SEQ ID NO: 44211 - protein, 41 aa, Artificial Sequence
  GFR-binding peptide
  MOD_RES (1)..(3)..(37)..(38): Xaa is C or S
  MOD_RES (15)..(16)..(17)..(18)..(19): Xaa is A or G
  MOD_RES (20)..(21)..(22)..(23): Xaa is A or G or is absent
XGXRDVVMGPYVKLXXXXXXXXXFFLMSLSSMKTPTXXPGA

SEQ ID NO: 44212 - protein, 36 aa, Artificial Sequence
  GFR-binding peptide
  MOD_RES (33)..(34): Xaa is C or S
  MOD_RES (11)..(12)..(13)..(14)..(15): Xaa is A or G
  MOD_RES (16)..(17)..(18)..(19): Xaa is A or G or is absent
SRVIMPYVKLXXXXXXXXXFFLISLSSLAQPVXXPA

SEQ ID NO: 44213 - protein, 38 aa, Artificial Sequence
  GFR-binding peptide
  MOD_RES (32)..(33): Xaa is C or S
AEVVMDPYVKLVVNNAADFFLISLSSLRAPVXXSAPAA

SEQ ID NO: 44214 - protein, 31 aa, Artificial Sequence
  GFR-binding peptide
  MOD_RES (31)..(31): Xaa is C or S
EEVIMPYVKLLLVRGNDFFLMSLSSTKVPAX

SEQ ID NO: 44215 - protein, 34 aa, Artificial Sequence
  GFR-binding peptide
  MOD_RES (1)..(33)..(34): Xaa is C or S
XRDVVMGPYVKLIIQQKDNFFLMSLSSMKTPTXX

SEQ ID NO: 44216 - protein, 38 aa, Artificial Sequence
  GFR-binding peptide
  MOD_RES (1)..(33)..(34): Xaa is C or S
XGEVVMEPYVKLVVKDYEDFFLMSLSSLETPVXXAKPI

SEQ ID NO: 44217 - protein, 33 aa, Artificial Sequence
  GFR-binding peptide
  MOD_RES (12)..(13)..(14)..(15)..(16): Xaa is A or G
  MOD_RES (17)..(18)..(19)..(20): Xaa is A or G or is absent
RDVVMGPYVKLXXXXXXXXXFFLMSLSSMKTPT

SEQ ID NO: 44218 - protein, 40 aa, Artificial Sequence
  GFR-binding peptide
  MOD_RES (1)..(3)..(37)..(38): Xaa is C or S
  MOD_RES (15)..(16)..(17)..(18)..(19): Xaa is A or G
  MOD_RES (20)..(21)..(22)..(23): Xaa is A or G or is absent
XGXAEVVMDPYVKLXXXXXXXXXFFLISLSSLRAPVXXSA

SEQ ID NO: 44219 - protein, 36 aa, Artificial Sequence
  GFR-binding peptide
  MOD_RES (1)..(3): Xaa is C or S
  MOD_RES (15)..(16)..(17)..(18)..(19): Xaa is A or G
  MOD_RES (20)..(21)..(22)..(23): Xaa is A or G or is absent
XAXSEVTMNPYVKLXXXXXXXXXFFLISLSSMKEPV

SEQ ID NO: 44220 - protein, 34 aa, Artificial Sequence
  GFR-binding peptide
  MOD_RES (32)..(32): Xaa is C or S
SRVVMNPYVKLIVNSSDDFFLVSLSSLKTPAXTP

SEQ ID NO: 44221 - protein, 31 aa, Artificial Sequence
  GFR-binding peptide
ESVAMGPYVKLYTVVGKDFFLISLSSLKTPV

SEQ ID NO: 44222 - protein, 37 aa, Artificial Sequence
  GFR-binding peptide
  MOD_RES (1)..(3)..(36)..(37): Xaa is C or S
  MOD_RES (14)..(15)..(16)..(17)..(18): Xaa is A or G
  MOD_RES (19)..(20)..(21)..(22): Xaa is A or G or is absent
XKXSRVIMPYVKLXXXXXXXXXFFLISLSSLAQPVXX

SEQ ID NO: 44223 - protein, 34 aa, Artificial Sequence
  GFR-binding peptide
  MOD_RES (2)..(34): Xaa is C or S
GXARVVMNPYVKLIVNSSDDFFLVSLSSLQTPAX

SEQ ID NO: 44224 - protein, 32 aa, Artificial Sequence
  GFR-binding peptide
  MOD_RES (31)..(32): Xaa is C or S
RVVMNPYVKLIVNSSDDFFLVSLSSLKTPAXX

SEQ ID NO: 44225 - protein, 41 aa, Artificial Sequence
  GFR-binding peptide
  MOD_RES (1)..(3)..(37)..(38): Xaa is C or S
  MOD_RES (15)..(16)..(17)..(18)..(19): Xaa is A or G
  MOD_RES (20)..(21)..(22)..(23): Xaa is A or G or is absent
XGXESVAMGPYVKLXXXXXXXXXFFLISLSSLKTPVXXAKS

SEQ ID NO: 44226 - protein, 33 aa, Artificial Sequence
  GFR-binding peptide
  MOD_RES (31)..(32): Xaa is C or S
EVVMEPYVKLVVKDYEDFFLMSLSSLETPVXXA

SEQ ID NO: 44227 - protein, 37 aa, Artificial Sequence
  GFR-binding peptide
  MOD_RES (1)..(35)..(36): Xaa is C or S
  MOD_RES (13)..(14)..(15)..(16)..(17): Xaa is A or G
  MOD_RES (18)..(19)..(20)..(21): Xaa is A or G or is absent
XSEVVMDPYVKLXXXXXXXXXFFLISLSSLRTPVXXT

SEQ ID NO: 44228 - protein, 41 aa, Artificial Sequence
  GFR-binding peptide
  MOD_RES (2)..(4)..(36)..(37): Xaa is C or S
SXGXRDVVMGPYVKLIIQQKDNFFLMSLSSMKTPTXXPGAS

SEQ ID NO: 44229 - protein, 34 aa, Artificial Sequence
  GFR-binding peptide
  MOD_RES (1)..(3)..(34): Xaa is C or S
XGXEEVIMPYVKLLLVRGNDFFLMSLSSTKVPAX

SEQ ID NO: 44230 - protein, 34 aa, Artificial Sequence
  GFR-binding peptide
  MOD_RES (1)..(32)..(33): Xaa is C or S
XSKVIMPYVKLIKPTKGILFFISLSSLDQSVXXP

SEQ ID NO: 44231 - protein, 35 aa, Artificial Sequence
  GFR-binding peptide
  MOD_RES (33)..(33): Xaa is C or S
  MOD_RES (11)..(12)..(13)..(14)..(15): Xaa is A or G
  MOD_RES (16)..(17)..(18)..(19): Xaa is A or G or is absent
NHQLFPYVKLXXXXXXXXXFFLMSLSSEETPVXEL

SEQ ID NO: 44232 - protein, 34 aa, Artificial Sequence
  GFR-binding peptide
  MOD_RES (2)..(34): Xaa is C or S
GXAKVVMNPYVKLIVNNSSDFFLVSLSSLKTPAX

SEQ ID NO: 44233 - protein, 38 aa, Artificial Sequence
  GFR-binding peptide
  MOD_RES (2)..(4)..(35)..(36): Xaa is C or S
SXKXSKVIMPYVKLIKPTKGILFFISLSSLDQSVXXPS

SEQ ID NO: 44234 - protein, 33 aa, Artificial Sequence
  GFR-binding peptide
  MOD_RES (33)..(33): Xaa is C or S
  MOD_RES (11)..(12)..(13)..(14)..(15): Xaa is A or G
  MOD_RES (16)..(17)..(18)..(19): Xaa is A or G or is absent
NHQLFPYVKLXXXXXXXXXFFLMSLSSEETPVX

SEQ ID NO: 44235 - protein, 40 aa, Artificial Sequence
  GFR-binding peptide
  MOD_RES (2)..(35)..(36): Xaa is C or S
  MOD_RES (13)..(14)..(15)..(16)..(17): Xaa is A or G
  MOD_RES (18)..(19)..(20)..(21): Xaa is A or G or is absent
KXSRVIMPYVKLXXXXXXXXXFFLISLSSLAQPVXXPAAS

SEQ ID NO: 44236 - protein, 38 aa, Artificial Sequence
  GFR-binding peptide
  MOD_RES (34)..(35): Xaa is C or S
  MOD_RES (12)..(13)..(14)..(15)..(16): Xaa is A or G
  MOD_RES (17)..(18)..(19)..(20): Xaa is A or G or is absent
AKVVMNPYVKLXXXXXXXXXFFLVSLSSLKTPAXXAKP

SEQ ID NO: 44237 - protein, 41 aa, Artificial Sequence
  GFR-binding peptide
  MOD_RES (2)..(4)..(37)..(38): Xaa is C or S
RXGXEAVSMGEPYVKLTPVGMDDFFLVSLSSLKTPVXXAKG

SEQ ID NO: 44238 - protein, 43 aa, Artificial Sequence
  GFR-binding peptide
  MOD_RES (2)..(4)..(38): Xaa is C or S
  MOD_RES (16)..(17)..(18)..(19)..(20): Xaa is A or G
  MOD_RES (21)..(22)..(23)..(24): Xaa is A or G or is absent
RXEXKNHQLFPYVKLXXXXXXXXXFFLMSLSSEETPVXELGED

SEQ ID NO: 44239 - protein, 36 aa, Artificial Sequence
  GFR-binding peptide
  MOD_RES (32)..(33): Xaa is C or S
AKVVMNPYVKLIVNNSSDFFLVSLSSLKTPAXXAKP

SEQ ID NO: 44240 - protein, 33 aa, Artificial Sequence
  GFR-binding peptide
  MOD_RES (12)..(13)..(14)..(15)..(16): Xaa is A or G
  MOD_RES (17)..(18)..(19)..(20): Xaa is A or G or is absent
SEVVMDPYVKLXXXXXXXXXFFLISLSSLRTPV

SEQ ID NO: 44241 - protein, 39 aa, Artificial Sequence
  GFR-binding peptide
  MOD_RES (2)..(4)..(39): Xaa is C or S
  MOD_RES (17)..(18)..(19)..(20)..(21): Xaa is A or G
  MOD_RES (22)..(23)..(24)..(25): Xaa is A or G or is absent
RXGXEAVSMGEPYVKLXXXXXXXXXFFLVSLSSLKTPVX

SEQ ID NO: 44242 - protein, 40 aa, Artificial Sequence
  GFR-binding peptide
  MOD_RES (2)..(36)..(37): Xaa is C or S
  MOD_RES (14)..(15)..(16)..(17)..(18): Xaa is A or G
  MOD_RES (19)..(20)..(21)..(22): Xaa is A or G or is absent
AXSEVTMNPYVKLXXXXXXXXXFFLISLSSMKEPVXXPEP

SEQ ID NO: 44243 - protein, 38 aa, Artificial Sequence
  GFR-binding peptide
  MOD_RES (33)..(34): Xaa is C or S
  MOD_RES (11)..(12)..(13)..(14)..(15): Xaa is A or G
  MOD_RES (16)..(17)..(18)..(19): Xaa is A or G or is absent
SVAMGPYVKLXXXXXXXXXFFLISLSSLKTPVXXAKSA

SEQ ID NO: 44244 - protein, 36 aa, Artificial Sequence
  GFR-binding peptide
  MOD_RES (32)..(33): Xaa is C or S
ARVVMNPYVKLIVNSSDDFFLVSLSSLQTPAXXPKP

SEQ ID NO: 44245 - protein, 42 aa, Artificial Sequence
  GFR-binding peptide
  MOD_RES (2)..(4)..(38): Xaa is C or S
RXEXKNHQLFPYVKLHQGQHPKIRFFLMSLSSEETPVXELGE

SEQ ID NO: 44246 - protein, 37 aa, Artificial Sequence
  GFR-binding peptide
  MOD_RES (2)..(35)..(36): Xaa is C or S
GXEAVSMGEPYVKLTPVGMDDFFLVSLSSLKTPVXXA

SEQ ID NO: 44247 - protein, 37 aa, Artificial Sequence
  GFR-binding peptide
  MOD_RES (2)..(33)..(34): Xaa is C or S
KXSRVIMPYVKLVKPKRGVLFFISLSSLAQPVXXPAA

SEQ ID NO: 44248 - protein, 35 aa, Artificial Sequence
  GFR-binding peptide
  MOD_RES (34)..(35): Xaa is C or S
  MOD_RES (12)..(13)..(14)..(15)..(16): Xaa is A or G
  MOD_RES (17)..(18)..(19)..(20): Xaa is A or G or is absent
AEVVMDPYVKLXXXXXXXXXFFLISLSSLRAPVXX

SEQ ID NO: 44249 - protein, 38 aa, Artificial Sequence
  GFR-binding peptide
  MOD_RES (1)..(33)..(34): Xaa is C or S
XRDVVMGPYVKLIIQQKDNFFLMSLSSMKTPTXXPGAS

SEQ ID NO: 44250 - protein, 36 aa, Artificial Sequence
  GFR-binding peptide
  MOD_RES (34)..(35): Xaa is C or S
  MOD_RES (12)..(13)..(14)..(15)..(16): Xaa is A or G
  MOD_RES (17)..(18)..(19)..(20): Xaa is A or G or is absent
SEVTMNPYVKLXXXXXXXXXFFLISLSSMKEPVXXP

SEQ ID NO: 44251 - protein, 38 aa, Artificial Sequence
  GFR-binding peptide
  MOD_RES (1)..(33)..(34): Xaa is C or S
XSRVVMNPYVKLIVNSSDDFFLVSLSSLKTPAXXPKPV

SEQ ID NO: 44252 - protein, 37 aa, Artificial Sequence
  GFR-binding peptide
  MOD_RES (1)..(34)..(35): Xaa is C or S
  MOD_RES (12)..(13)..(14)..(15)..(16): Xaa is A or G
  MOD_RES (17)..(18)..(19)..(20): Xaa is A or G or is absent
XSRVIMPYVKLXXXXXXXXXFFLISLSSLAQPVXXPA

SEQ ID NO: 44253 - protein, 38 aa, Artificial Sequence
  GFR-binding peptide
  MOD_RES (2)..(4)..(37)..(38): Xaa is C or S
RXGXEAVSMGEPYVKLTPVGMDDFFLVSLSSLKTPVXX

SEQ ID NO: 44254 - protein, 41 aa, Artificial Sequence
  GFR-binding peptide
  MOD_RES (2)..(36)..(37): Xaa is C or S
  MOD_RES (14)..(15)..(16)..(17)..(18): Xaa is A or G
  MOD_RES (19)..(20)..(21)..(22): Xaa is A or G or is absent
GXSEVVMDPYVKLXXXXXXXXXFFLISLSSLRTPVXXTPPT

SEQ ID NO: 44255 - protein, 34 aa, Artificial Sequence
  GFR-binding peptide
  MOD_RES (2)..(33)..(34): Xaa is C or S
KXSRVIMPYVKLVKPKRGVLFFISLSSLAQPVXX

SEQ ID NO: 44256 - protein, 39 aa, Artificial Sequence
  GFR-binding peptide
  MOD_RES (2)..(37)..(38): Xaa is C or S
  MOD_RES (15)..(16)..(17)..(18)..(19): Xaa is A or G
  MOD_RES (20)..(21)..(22)..(23): Xaa is A or G or is absent
GXEAVSMGEPYVKLXXXXXXXXXFFLVSLSSLKTPVXXA

SEQ ID NO: 44257 - protein, 43 aa, Artificial Sequence
  GFR-binding peptide
  MOD_RES (2)..(4)..(41): Xaa is C or S
  MOD_RES (17)..(18)..(19)..(20)..(21): Xaa is A or G
  MOD_RES (22)..(23)..(24)..(25): Xaa is A or G or is absent
AXAXELHEELRPYVKLXXXXXXXXXFFLVSLSSHHVRSPQXKV

SEQ ID NO: 44258 - protein, 36 aa, Artificial Sequence
  GFR-binding peptide
  MOD_RES (36)..(36): Xaa is C or S
  MOD_RES (12)..(13)..(14)..(15)..(16): Xaa is A or G
  MOD_RES (17)..(18)..(19)..(20): Xaa is A or G or is absent
LHEELRPYVKLXXXXXXXXXFFLVSLSSHHVRSPQX

SEQ ID NO: 44259 - protein, 39 aa, Artificial Sequence
  GFR-binding peptide
  MOD_RES (1)..(35)..(36): Xaa is C or S
  MOD_RES (13)..(14)..(15)..(16)..(17): Xaa is A or G
  MOD_RES (18)..(19)..(20)..(21): Xaa is A or G or is absent
XGEVVMEPYVKLXXXXXXXXXFFLMSLSSLETPVXXAKP

SEQ ID NO: 44260 - protein, 36 aa, Artificial Sequence
  GFR-binding peptide
  MOD_RES (33)..(34): Xaa is C or S
  MOD_RES (11)..(12)..(13)..(14)..(15): Xaa is A or G
  MOD_RES (16)..(17)..(18)..(19): Xaa is A or G or is absent
EEVIMPYVKLXXXXXXXXXFFLMSLSSTKVPAXXTS

SEQ ID NO: 44261 - protein, 32 aa, Artificial Sequence
  GFR-binding peptide
  MOD_RES (31)..(32): Xaa is C or S
RVVMNPYVKLIVNSSDDFFLVSLSSLQTPAXX

SEQ ID NO: 44262 - protein, 38 aa, Artificial Sequence
  GFR-binding peptide
  MOD_RES (33)..(33): Xaa is C or S
NHQLFPYVKLHQGQHPKIRFFLMSLSSEETPVXELGED

SEQ ID NO: 44263 - protein, 40 aa, Artificial Sequence
  GFR-binding peptide
  MOD_RES (2)..(4)..(38): Xaa is C or S
  MOD_RES (16)..(17)..(18)..(19)..(20): Xaa is A or G
  MOD_RES (21)..(22)..(23)..(24): Xaa is A or G or is absent
HXGXSRVVMNPYVKLXXXXXXXXXFFLVSLSSLKTPAXTP

SEQ ID NO: 44264 - protein, 42 aa, Artificial Sequence
  GFR-binding peptide
  MOD_RES (2)..(4)..(38)..(39): Xaa is C or S
  MOD_RES (16)..(17)..(18)..(19)..(20): Xaa is A or G
  MOD_RES (21)..(22)..(23)..(24): Xaa is A or G or is absent
HXGXAKVVMNPYVKLXXXXXXXXXFFLVSLSSLKTPAXXAKP

SEQ ID NO: 44265 - protein, 35 aa, Artificial Sequence
  GFR-binding peptide
  MOD_RES (2)..(2): Xaa is C or S
  MOD_RES (14)..(15)..(16)..(17)..(18): Xaa is A or G
  MOD_RES (19)..(20)..(21)..(22): Xaa is A or G or is absent
GXSRVVMNPYVKLXXXXXXXXXFFLVSLSSLKTPA

SEQ ID NO: 44266 - protein, 34 aa, Artificial Sequence
  GFR-binding peptide
  MOD_RES (2)..(2): Xaa is C or S
  MOD_RES (13)..(14)..(15)..(16)..(17): Xaa is A or G
  MOD_RES (18)..(19)..(20)..(21): Xaa is A or G or is absent
KXSRVIMPYVKLXXXXXXXXXFFLISLSSLAQPV

SEQ ID NO: 44267 - protein, 39 aa, Artificial Sequence
  GFR-binding peptide
  MOD_RES (33)..(34): Xaa is C or S
  MOD_RES (11)..(12)..(13)..(14)..(15): Xaa is A or G
  MOD_RES (16)..(17)..(18)..(19): Xaa is A or G or is absent
RVVMNPYVKLXXXXXXXXXFFLVSLSSLKTPAXXPKPVH

SEQ ID NO: 44268 - protein, 34 aa, Artificial Sequence
  GFR-binding peptide
  MOD_RES (32)..(33): Xaa is C or S
SRVVMNPYVKLIVNSSDDFFLVSLSSLKTPAXXP

SEQ ID NO: 44269 - protein, 38 aa, Artificial Sequence
  GFR-binding peptide
  MOD_RES (1)..(3)..(35)..(36): Xaa is C or S
XGXAEVVMDPYVKLVVNNAADFFLISLSSLRAPVXXSA

SEQ ID NO: 44270 - protein, 36 aa, Artificial Sequence
  GFR-binding peptide
  MOD_RES (1)..(35)..(36): Xaa is C or S
  MOD_RES (13)..(14)..(15)..(16)..(17): Xaa is A or G
  MOD_RES (18)..(19)..(20)..(21): Xaa is A or G or is absent
XRDVVMGPYVKLXXXXXXXXXFFLMSLSSMKTPTXX

SEQ ID NO: 44271 - protein, 41 aa, Artificial Sequence
  GFR-binding peptide
  MOD_RES (1)..(3)..(36)..(37): Xaa is C or S
XGXEAVSMGEPYVKLTPVGMDDFFLVSLSSLKTPVXXAKGV

SEQ ID NO: 44272 - protein, 42 aa, Artificial Sequence
  GFR-binding peptide
  MOD_RES (1)..(38): Xaa is C or S
  MOD_RES (14)..(15)..(16)..(17)..(18): Xaa is A or G
  MOD_RES (19)..(20)..(21)..(22): Xaa is A or G or is absent
XELHEELRPYVKLXXXXXXXXXFFLVSLSSHHVRSPQXKVSS

SEQ ID NO: 44273 - protein, 39 aa, Artificial Sequence
  GFR-binding peptide
  MOD_RES (1)..(3)..(37)..(38): Xaa is C or S
  MOD_RES (15)..(16)..(17)..(18)..(19): Xaa is A or G
  MOD_RES (20)..(21)..(22)..(23): Xaa is A or G or is absent
XGXGEVVMEPYVKLXXXXXXXXXFFLMSLSSLETPVXXA

SEQ ID NO: 44274 - protein, 36 aa, Artificial Sequence
  GFR-binding peptide
  MOD_RES (2)..(36): Xaa is C or S
  MOD_RES (14)..(15)..(16)..(17)..(18): Xaa is A or G
  MOD_RES (19)..(20)..(21)..(22): Xaa is A or G or is absent
GXGEVVMEPYVKLXXXXXXXXXFFLMSLSSLETPVX

SEQ ID NO: 44275 - protein, 40 aa, Artificial Sequence
  GFR-binding peptide
  MOD_RES (34)..(35): Xaa is C or S
  MOD_RES (12)..(13)..(14)..(15)..(16): Xaa is A or G
  MOD_RES (17)..(18)..(19)..(20): Xaa is A or G or is absent
SEVVMDPYVKLXXXXXXXXXFFLISLSSLRTPVXXTPPTS

SEQ ID NO: 44276 - protein, 32 aa, Artificial Sequence
  GFR-binding peptide
  MOD_RES (2)..(2): Xaa is C or S
GXEEVIMPYVKLLLVRGNDFFLMSLSSTKVPA

SEQ ID NO: 44277 - protein, 37 aa, Artificial Sequence
  GFR-binding peptide
  MOD_RES (33)..(34): Xaa is C or S
  MOD_RES (11)..(12)..(13)..(14)..(15): Xaa is A or G
  MOD_RES (16)..(17)..(18)..(19): Xaa is A or G or is absent
KVVMNPYVKLXXXXXXXXXFFLVSLSSLKTPAXXAKP

SEQ ID NO: 44278 - protein, 38 aa, Artificial Sequence
  GFR-binding peptide
  MOD_RES (1)..(33)..(34): Xaa is C or S
XSEVTMNPYVKLVVNKNEDFFLISLSSMKEPVXXPEPI

SEQ ID NO: 44279 - protein, 38 aa, Artificial Sequence
  GFR-binding peptide
  MOD_RES (2)..(4)..(36)..(37): Xaa is C or S
RXGXAEVVMDPYVKLVVNNAADFFLISLSSLRAPVXXS

SEQ ID NO: 44280 - protein, 36 aa, Artificial Sequence
  GFR-binding peptide
  MOD_RES (2)..(35)..(36): Xaa is C or S
  MOD_RES (13)..(14)..(15)..(16)..(17): Xaa is A or G
  MOD_RES (18)..(19)..(20)..(21): Xaa is A or G or is absent
KXSRVIMPYVKLXXXXXXXXXFFLISLSSLAQPVXX

SEQ ID NO: 44281 - protein, 43 aa, Artificial Sequence
  GFR-binding peptide
  MOD_RES (1)..(3)..(37)..(38): Xaa is C or S
  MOD_RES (15)..(16)..(17)..(18)..(19): Xaa is A or G
  MOD_RES (20)..(21)..(22)..(23): Xaa is A or G or is absent
XGXRDVVMGPYVKLXXXXXXXXXFFLMSLSSMKTPTXXPGASG

SEQ ID NO: 44282 - protein, 36 aa, Artificial Sequence
  GFR-binding peptide
  MOD_RES (2)..(4)..(35)..(36): Xaa is C or S
LXGXEEVIMPYVKLLLVRGNDFFLMSLSSTKVPAXX

SEQ ID NO: 44283 - protein, 42 aa, Artificial Sequence
  GFR-binding peptide
  MOD_RES (2)..(4)..(38)..(39): Xaa is C or S
  MOD_RES (16)..(17)..(18)..(19)..(20): Xaa is A or G
  MOD_RES (21)..(22)..(23)..(24): Xaa is A or G or is absent
RXGXAEVVMDPYVKLXXXXXXXXXFFLISLSSLRAPVXXSAP

SEQ ID NO: 44284 - protein, 44 aa, Artificial Sequence
  GFR-binding peptide
  MOD_RES (2)..(4)..(41): Xaa is C or S
AXAXELHEELRPYVKLLKPKKRVYEFFLVSLSSHHVRSPQXKVS

SEQ ID NO: 44285 - protein, 37 aa, Artificial Sequence
  GFR-binding peptide
  MOD_RES (36)..(36): Xaa is C or S
  MOD_RES (12)..(13)..(14)..(15)..(16): Xaa is A or G
  MOD_RES (17)..(18)..(19)..(20): Xaa is A or G or is absent
LHEELRPYVKLXXXXXXXXXFFLVSLSSHHVRSPQXK

SEQ ID NO: 44286 - protein, 40 aa, Artificial Sequence
  GFR-binding peptide
  MOD_RES (34)..(35): Xaa is C or S
  MOD_RES (12)..(13)..(14)..(15)..(16): Xaa is A or G
  MOD_RES (17)..(18)..(19)..(20): Xaa is A or G or is absent
RDVVMGPYVKLXXXXXXXXXFFLMSLSSMKTPTXXPGASG

SEQ ID NO: 44287 - protein, 38 aa, Artificial Sequence
  GFR-binding peptide
  MOD_RES (2)..(36)..(37): Xaa is C or S
  MOD_RES (14)..(15)..(16)..(17)..(18): Xaa is A or G
  MOD_RES (19)..(20)..(21)..(22): Xaa is A or G or is absent
GXAKVVMNPYVKLXXXXXXXXXFFLVSLSSLKTPAXXA

SEQ ID NO: 44288 - protein, 39 aa, Artificial Sequence
  GFR-binding peptide
  MOD_RES (2)..(34)..(35): Xaa is C or S
GXAKVVMNPYVKLIVNNSSDFFLVSLSSLKTPAXXAKPV

SEQ ID NO: 44289 - protein, 39 aa, Artificial Sequence
  GFR-binding peptide
  MOD_RES (2)..(36)..(37): Xaa is C or S
  MOD_RES (14)..(15)..(16)..(17)..(18): Xaa is A or G
  MOD_RES (19)..(20)..(21)..(22): Xaa is A or G or is absent
GXGEVVMEPYVKLXXXXXXXXXFFLMSLSSLETPVXXAK

SEQ ID NO: 44290 - protein, 39 aa, Artificial Sequence
  GFR-binding peptide
  MOD_RES (34)..(35): Xaa is C or S
  MOD_RES (12)..(13)..(14)..(15)..(16): Xaa is A or G
  MOD_RES (17)..(18)..(19)..(20): Xaa is A or G or is absent
AKVVMNPYVKLXXXXXXXXXFFLVSLSSLKTPAXXAKPV

SEQ ID NO: 44291 - protein, 38 aa, Artificial Sequence
  GFR-binding peptide
  MOD_RES (2)..(4)..(36): Xaa is C or S
HXGXSRVVMNPYVKLIVNSSDDFFLVSLSSLKTPAXTP

SEQ ID NO: 44292 - protein, 34 aa, Artificial Sequence
  GFR-binding peptide
  MOD_RES (31)..(32): Xaa is C or S
EVVMDPYVKLVVNNASDFFLISLSSLRTPVXXTP

SEQ ID NO: 44293 - protein, 32 aa, Artificial Sequence
  GFR-binding peptide
  MOD_RES (31)..(32): Xaa is C or S
EVVMEPYVKLVVKDYEDFFLMSLSSLETPVXX

SEQ ID NO: 44294 - protein, 42 aa, Artificial Sequence
  GFR-binding peptide
  MOD_RES (1)..(3)..(36)..(37): Xaa is C or S
  MOD_RES (14)..(15)..(16)..(17)..(18): Xaa is A or G
  MOD_RES (19)..(20)..(21)..(22): Xaa is A or G or is absent
XKXSKVVMPYVKLXXXXXXXXXFFLISLSSLDQPVXXPSASA

SEQ ID NO: 44295 - protein, 40 aa, Artificial Sequence
  GFR-binding peptide
  MOD_RES (1)..(35)..(36): Xaa is C or S
  MOD_RES (13)..(14)..(15)..(16)..(17): Xaa is A or G
  MOD_RES (18)..(19)..(20)..(21): Xaa is A or G or is absent
XAKVVMNPYVKLXXXXXXXXXFFLVSLSSLKTPAXXAKPV

SEQ ID NO: 44296 - protein, 35 aa, Artificial Sequence
  GFR-binding peptide
  MOD_RES (1)..(33)..(34): Xaa is C or S
XSEVTMNPYVKLVVNKNEDFFLISLSSMKEPVXXP

SEQ ID NO: 44297 - protein, 41 aa, Artificial Sequence
  GFR-binding peptide
  MOD_RES (2)..(4)..(38): Xaa is C or S
RXEXKNHQLFPYVKLHQGQHPKIRFFLMSLSSEETPVXELG

SEQ ID NO: 44298 - protein, 31 aa, Artificial Sequence
  GFR-binding peptide
ARVVMNPYVKLIVNSSDDFFLVSLSSLQTPA

SEQ ID NO: 44299 - protein, 36 aa, Artificial Sequence
  GFR-binding peptide
  MOD_RES (1)..(3)..(36): Xaa is C or S
  MOD_RES (14)..(15)..(16)..(17)..(18): Xaa is A or G
  MOD_RES (19)..(20)..(21)..(22): Xaa is A or G or is absent
XKXSRVIMPYVKLXXXXXXXXXFFLISLSSLAQPVX

SEQ ID NO: 44300 - protein, 38 aa, Artificial Sequence
  GFR-binding peptide
  MOD_RES (36)..(36): Xaa is C or S
LHEELRPYVKLLKPKKRVYEFFLVSLSSHHVRSPQXKV

SEQ ID NO: 44301 - protein, 35 aa, Artificial Sequence
  GFR-binding peptide
  MOD_RES (34)..(34): Xaa is C or S
  MOD_RES (12)..(13)..(14)..(15)..(16): Xaa is A or G
  MOD_RES (17)..(18)..(19)..(20): Xaa is A or G or is absent
KNHQLFPYVKLXXXXXXXXXFFLMSLSSEETPVXE

SEQ ID NO: 44302 - protein, 38 aa, Artificial Sequence
  GFR-binding peptide
  MOD_RES (2)..(34)..(35): Xaa is C or S
GXSEVVMDPYVKLVVNNASDFFLISLSSLRTPVXXTPP

SEQ ID NO: 44303 - protein, 33 aa, Artificial Sequence
  GFR-binding peptide
  MOD_RES (33)..(33): Xaa is C or S
  MOD_RES (11)..(12)..(13)..(14)..(15): Xaa is A or G
  MOD_RES (16)..(17)..(18)..(19): Xaa is A or G or is absent
EEVIMPYVKLXXXXXXXXXFFLMSLSSTKVPAX

SEQ ID NO: 44304 - protein, 34 aa, Artificial Sequence
  GFR-binding peptide
  MOD_RES (32)..(33): Xaa is C or S
SEVTMNPYVKLVVNKNEDFFLISLSSMKEPVXXP

SEQ ID NO: 44305 - protein, 35 aa, Artificial Sequence
  GFR-binding peptide
  MOD_RES (1)..(34)..(35): Xaa is C or S
  MOD_RES (12)..(13)..(14)..(15)..(16): Xaa is A or G
  MOD_RES (17)..(18)..(19)..(20): Xaa is A or G or is absent
XEEVIMPYVKLXXXXXXXXXFFLMSLSSTKVPAXX

SEQ ID NO: 44306 - protein, 34 aa, Artificial Sequence
  GFR-binding peptide
  MOD_RES (32)..(33): Xaa is C or S
RDVVMGPYVKLIIQQKDNFFLMSLSSMKTPTXXP

SEQ ID NO: 44307 - protein, 38 aa, Artificial Sequence
  GFR-binding peptide
  MOD_RES (33)..(34): Xaa is C or S
  MOD_RES (11)..(12)..(13)..(14)..(15): Xaa is A or G
  MOD_RES (16)..(17)..(18)..(19): Xaa is A or G or is absent
EVVMEPYVKLXXXXXXXXXFFLMSLSSLETPVXXAKPI

SEQ ID NO: 44308 - protein, 32 aa, Artificial Sequence
  GFR-binding peptide
  MOD_RES (11)..(12)..(13)..(14)..(15): Xaa is A or G
  MOD_RES (16)..(17)..(18)..(19): Xaa is A or G or is absent
EVVMDPYVKLXXXXXXXXXFFLISLSSLRAPV

SEQ ID NO: 44309 - protein, 37 aa, Artificial Sequence
  GFR-binding peptide
  MOD_RES (1)..(33)..(34): Xaa is C or S
XAEVVMDPYVKLVVNNAADFFLISLSSLRAPVXXSAP

SEQ ID NO: 44310 - protein, 40 aa, Artificial Sequence
  GFR-binding peptide
  MOD_RES (2)..(4)..(37)..(38): Xaa is C or S
  MOD_RES (15)..(16)..(17)..(18)..(19): Xaa is A or G
  MOD_RES (20)..(21)..(22)..(23): Xaa is A or G or is absent
SXKXSKVIMPYVKLXXXXXXXXXFFLISLSSLDQSVXXPS

SEQ ID NO: 44311 - protein, 36 aa, Artificial Sequence
  GFR-binding peptide
  MOD_RES (31)..(32): Xaa is C or S
EVVMEPYVKLVVKDYEDFFLMSLSSLETPVXXAKPI

SEQ ID NO: 44312 - protein, 38 aa, Artificial Sequence
  GFR-binding peptide
  MOD_RES (1)..(35): Xaa is C or S
  MOD_RES (13)..(14)..(15)..(16)..(17): Xaa is A or G
  MOD_RES (18)..(19)..(20)..(21): Xaa is A or G or is absent
XKNHQLFPYVKLXXXXXXXXXFFLMSLSSEETPVXELG

SEQ ID NO: 44313 - protein, 36 aa, Artificial Sequence
  GFR-binding peptide
  MOD_RES (34)..(34): Xaa is C or S
  MOD_RES (12)..(13)..(14)..(15)..(16): Xaa is A or G
  MOD_RES (17)..(18)..(19)..(20): Xaa is A or G or is absent
KNHQLFPYVKLXXXXXXXXXFFLMSLSSEETPVXEL

SEQ ID NO: 44314 - protein, 40 aa, Artificial Sequence
  GFR-binding peptide
  MOD_RES (2)..(36): Xaa is C or S
  MOD_RES (14)..(15)..(16)..(17)..(18): Xaa is A or G
  MOD_RES (19)..(20)..(21)..(22): Xaa is A or G or is absent
EXKNHQLFPYVKLXXXXXXXXXFFLMSLSSEETPVXELGE

SEQ ID NO: 44315 - protein, 38 aa, Artificial Sequence
  GFR-binding peptide
  MOD_RES (2)..(37)..(38): Xaa is C or S
  MOD_RES (15)..(16)..(17)..(18)..(19): Xaa is A or G
  MOD_RES (20)..(21)..(22)..(23): Xaa is A or G or is absent
GXEAVSMGEPYVKLXXXXXXXXXFFLVSLSSLKTPVXX

SEQ ID NO: 44316 - protein, 34 aa, Artificial Sequence
  GFR-binding peptide
  MOD_RES (1)..(1): Xaa is C or S
  MOD_RES (13)..(14)..(15)..(16)..(17): Xaa is A or G
  MOD_RES (18)..(19)..(20)..(21): Xaa is A or G or is absent
XAEVVMDPYVKLXXXXXXXXXFFLISLSSLRAPV

SEQ ID NO: 44317 - protein, 42 aa, Artificial Sequence
  GFR-binding peptide
  MOD_RES (2)..(36): Xaa is C or S
  MOD_RES (14)..(15)..(16)..(17)..(18): Xaa is A or G
  MOD_RES (19)..(20)..(21)..(22): Xaa is A or G or is absent
EXKNHQLFPYVKLXXXXXXXXXFFLMSLSSEETPVXELGEDN

SEQ ID NO: 44318 - protein, 39 aa, Artificial Sequence
  GFR-binding peptide
  MOD_RES (1)..(33)..(34): Xaa is C or S
XSEVTMNPYVKLVVNKNEDFFLISLSSMKEPVXXPEPIG

SEQ ID NO: 44319 - protein, 34 aa, Artificial Sequence
  GFR-binding peptide
  MOD_RES (31)..(32): Xaa is C or S
EEVIMPYVKLLLVRGNDFFLMSLSSTKVPAXXTS

SEQ ID NO: 44320 - protein, 39 aa, Artificial Sequence
  GFR-binding peptide
  MOD_RES (1)..(3)..(35)..(36): Xaa is C or S
XGXRDVVMGPYVKLIIQQKDNFFLMSLSSMKTPTXXPGA

SEQ ID NO: 44321 - protein, 38 aa, Artificial Sequence
  GFR-binding peptide
  MOD_RES (33)..(33): Xaa is C or S
  MOD_RES (11)..(12)..(13)..(14)..(15): Xaa is A or G
  MOD_RES (16)..(17)..(18)..(19): Xaa is A or G or is absent
RVVMNPYVKLXXXXXXXXXFFLVSLSSLKTPAXTPKTV

SEQ ID NO: 44322 - protein, 34 aa, Artificial Sequence
  GFR-binding peptide
  MOD_RES (33)..(33): Xaa is C or S
NHQLFPYVKLHQGQHPKIRFFLMSLSSEETPVXE

SEQ ID NO: 44323 - protein, 45 aa, Artificial Sequence
  GFR-binding peptide
  MOD_RES (2)..(4)..(41): Xaa is C or S
AXAXELHEELRPYVKLLKPKKRVYEFFLVSLSSHHVRSPQXKVSS

SEQ ID NO: 44324 - protein, 35 aa, Artificial Sequence
  GFR-binding peptide
  MOD_RES (2)..(33)..(34): Xaa is C or S
KXSKVVMPYVKLVKPTRGVLFFISLSSLDQPVXXP

SEQ ID NO: 44325 - protein, 37 aa, Artificial Sequence
  GFR-binding peptide
  MOD_RES (31)..(32): Xaa is C or S
EEVIMPYVKLLLVRGNDFFLMSLSSTKVPAXXTSPVR

SEQ ID NO: 44326 - protein, 31 aa, Artificial Sequence
  GFR-binding peptide
GEVVMEPYVKLVVKDYEDFFLMSLSSLETPV

SEQ ID NO: 44327 - protein, 32 aa, Artificial Sequence
  GFR-binding peptide
  MOD_RES (31)..(32): Xaa is C or S
KVVMNPYVKLIVNNSSDFFLVSLSSLKTPAXX

SEQ ID NO: 44328 - protein, 35 aa, Artificial Sequence
  GFR-binding peptide
  MOD_RES (33)..(34): Xaa is C or S
  MOD_RES (11)..(12)..(13)..(14)..(15): Xaa is A or G
  MOD_RES (16)..(17)..(18)..(19): Xaa is A or G or is absent
RVVMNPYVKLXXXXXXXXXFFLVSLSSLKTPAXXP

SEQ ID NO: 44329 - protein, 39 aa, Artificial Sequence
  GFR-binding peptide
  MOD_RES (1)..(35)..(36): Xaa is C or S
  MOD_RES (13)..(14)..(15)..(16)..(17): Xaa is A or G
  MOD_RES (18)..(19)..(20)..(21): Xaa is A or G or is absent
XESVAMGPYVKLXXXXXXXXXFFLISLSSLKTPVXXAKS

SEQ ID NO: 44330 - protein, 37 aa, Artificial Sequence
  GFR-binding peptide
  MOD_RES (33)..(34): Xaa is C or S
EAVSMGEPYVKLTPVGMDDFFLVSLSSLKTPVXXAKG

SEQ ID NO: 44331 - protein, 39 aa, Artificial Sequence
  GFR-binding peptide
  MOD_RES (2)..(34)..(35): Xaa is C or S
AXSEVTMNPYVKLVVNKNEDFFLISLSSMKEPVXXPEPI

SEQ ID NO: 44332 - protein, 38 aa, Artificial Sequence
  GFR-binding peptide
  MOD_RES (2)..(2): Xaa is C or S
AXELHEELRPYVKLLKPKKRVYEFFLVSLSSHHVRSPQ

SEQ ID NO: 44333 - protein, 32 aa, Artificial Sequence
  GFR-binding peptide
  MOD_RES (1)..(1): Xaa is C or S
XARVVMNPYVKLIVNSSDDFFLVSLSSLQTPA

SEQ ID NO: 44334 - protein, 33 aa, Artificial Sequence
  GFR-binding peptide
  MOD_RES (12)..(13)..(14)..(15)..(16): Xaa is A or G
  MOD_RES (17)..(18)..(19)..(20): Xaa is A or G or is absent
AKVVMNPYVKLXXXXXXXXXFFLVSLSSLKTPA

SEQ ID NO: 44335 - protein, 43 aa, Artificial Sequence
  GFR-binding peptide
  MOD_RES (2)..(39): Xaa is C or S
  MOD_RES (15)..(16)..(17)..(18)..(19): Xaa is A or G
  MOD_RES (20)..(21)..(22)..(23): Xaa is A or G or is absent
AXELHEELRPYVKLXXXXXXXXXFFLVSLSSHHVRSPQXKVSS

SEQ ID NO: 44336 - protein, 37 aa, Artificial Sequence
  GFR-binding peptide
  MOD_RES (31)..(32): Xaa is C or S
RVVMNPYVKLIVNSSDDFFLVSLSSLKTPAXXPKPVY

SEQ ID NO: 44337 - protein, 37 aa, Artificial Sequence
  GFR-binding peptide
  MOD_RES (1)..(34)..(35): Xaa is C or S
  MOD_RES (12)..(13)..(14)..(15)..(16): Xaa is A or G
  MOD_RES (17)..(18)..(19)..(20): Xaa is A or G or is absent
XSKVVMPYVKLXXXXXXXXXFFLISLSSLDQPVXXPS

SEQ ID NO: 44338 - protein, 39 aa, Artificial Sequence
  GFR-binding peptide
  MOD_RES (2)..(4)..(36)..(37): Xaa is C or S
SXGXRDVVMGPYVKLIIQQKDNFFLMSLSSMKTPTXXPG

SEQ ID NO: 44339 - protein, 34 aa, Artificial Sequence
  GFR-binding peptide
  MOD_RES (1)..(33)..(34): Xaa is C or S
XGEVVMEPYVKLVVKDYEDFFLMSLSSLETPVXX

SEQ ID NO: 44340 - protein, 44 aa, Artificial Sequence
  GFR-binding peptide
  MOD_RES (2)..(4)..(38)..(39): Xaa is C or S
  MOD_RES (16)..(17)..(18)..(19)..(20): Xaa is A or G
  MOD_RES (21)..(22)..(23)..(24): Xaa is A or G or is absent
RXGXAEVVMDPYVKLXXXXXXXXXFFLISLSSLRAPVXXSAPAA

SEQ ID NO: 44341 - protein, 37 aa, Artificial Sequence
  GFR-binding peptide
  MOD_RES (2)..(34)..(35): Xaa is C or S
GXGEVVMEPYVKLVVKDYEDFFLMSLSSLETPVXXAK

SEQ ID NO: 44342 - protein, 36 aa, Artificial Sequence
  GFR-binding peptide
  MOD_RES (2)..(2): Xaa is C or S
AXELHEELRPYVKLLKPKKRVYEFFLVSLSSHHVRS

SEQ ID NO: 44343 - protein, 34 aa, Artificial Sequence
  GFR-binding peptide
  MOD_RES (34)..(34): Xaa is C or S
  MOD_RES (12)..(13)..(14)..(15)..(16): Xaa is A or G
  MOD_RES (17)..(18)..(19)..(20): Xaa is A or G or is absent
ESVAMGPYVKLXXXXXXXXXFFLISLSSLKTPVX

SEQ ID NO: 44344 - protein, 36 aa, Artificial Sequence
  GFR-binding peptide
  MOD_RES (1)..(3): Xaa is C or S
  MOD_RES (15)..(16)..(17)..(18)..(19): Xaa is A or G
  MOD_RES (20)..(21)..(22)..(23): Xaa is A or G or is absent
XGXAEVVMDPYVKLXXXXXXXXXFFLISLSSLRAPV

SEQ ID NO: 44345 - protein, 38 aa, Artificial Sequence
  GFR-binding peptide
  MOD_RES (2)..(36)..(37): Xaa is C or S
  MOD_RES (14)..(15)..(16)..(17)..(18): Xaa is A or G
  MOD_RES (19)..(20)..(21)..(22): Xaa is A or G or is absent
AXSEVTMNPYVKLXXXXXXXXXFFLISLSSMKEPVXXP

SEQ ID NO: 44346 - protein, 38 aa, Artificial Sequence
  GFR-binding peptide
  MOD_RES (2)..(4)..(38): Xaa is C or S
  MOD_RES (16)..(17)..(18)..(19)..(20): Xaa is A or G
  MOD_RES (21)..(22)..(23)..(24): Xaa is A or G or is absent
RXGXESVAMGPYVKLXXXXXXXXXFFLISLSSLKTPVX

SEQ ID NO: 44347 - protein, 39 aa, Artificial Sequence
  GFR-binding peptide
  MOD_RES (33)..(34): Xaa is C or S
  MOD_RES (11)..(12)..(13)..(14)..(15): Xaa is A or G
  MOD_RES (16)..(17)..(18)..(19): Xaa is A or G or is absent
SKVIMPYVKLXXXXXXXXXFFLISLSSLDQSVXXPSASA

SEQ ID NO: 44348 - protein, 36 aa, Artificial Sequence
  GFR-binding peptide
  MOD_RES (32)..(33): Xaa is C or S
GEVVMEPYVKLVVKDYEDFFLMSLSSLETPVXXAKP

SEQ ID NO: 44349 - protein, 39 aa, Artificial Sequence
  GFR-binding peptide
  MOD_RES (1)..(3)..(37)..(38): Xaa is C or S
  MOD_RES (15)..(16)..(17)..(18)..(19): Xaa is A or G
  MOD_RES (20)..(21)..(22)..(23): Xaa is A or G or is absent
XGXSEVVMDPYVKLXXXXXXXXXFFLISLSSLRTPVXXT

SEQ ID NO: 44350 - protein, 38 aa, Artificial Sequence
  GFR-binding peptide
  MOD_RES (1)..(38): Xaa is C or S
  MOD_RES (14)..(15)..(16)..(17)..(18): Xaa is A or G
  MOD_RES (19)..(20)..(21)..(22): Xaa is A or G or is absent
XELHEELRPYVKLXXXXXXXXXFFLVSLSSHHVRSPQX

SEQ ID NO: 44351 - protein, 36 aa, Artificial Sequence
  GFR-binding peptide
  MOD_RES (1)..(3)..(35)..(36): Xaa is C or S
XGXARVVMNPYVKLIVNSSDDFFLVSLSSLQTPAXX

SEQ ID NO: 44352 - protein, 37 aa, Artificial Sequence
  GFR-binding peptide
  MOD_RES (2)..(4)..(37): Xaa is C or S
  MOD_RES (15)..(16)..(17)..(18)..(19): Xaa is A or G
  MOD_RES (20)..(21)..(22)..(23): Xaa is A or G or is absent
SXKXSKVVMPYVKLXXXXXXXXXFFLISLSSLDQPVX

SEQ ID NO: 44353 - protein, 38 aa, Artificial Sequence
  GFR-binding peptide
  MOD_RES (32)..(33): Xaa is C or S
ESVAMGPYVKLYTVVGKDFFLISLSSLKTPVXXAKSAK

SEQ ID NO: 44354 - protein, 34 aa, Artificial Sequence
  GFR-binding peptide
  MOD_RES (1)..(1): Xaa is C or S
  MOD_RES (13)..(14)..(15)..(16)..(17): Xaa is A or G
  MOD_RES (18)..(19)..(20)..(21): Xaa is A or G or is absent
XARVVMNPYVKLXXXXXXXXXFFLVSLSSLQTPA

SEQ ID NO: 44355 - protein, 41 aa, Artificial Sequence
  GFR-binding peptide
  MOD_RES (1)..(35)..(36): Xaa is C or S
  MOD_RES (13)..(14)..(15)..(16)..(17): Xaa is A or G
  MOD_RES (18)..(19)..(20)..(21): Xaa is A or G or is absent
XAKVVMNPYVKLXXXXXXXXXFFLVSLSSLKTPAXXAKPVA

SEQ ID NO: 44356 - protein, 40 aa, Artificial Sequence
  GFR-binding peptide
  MOD_RES (2)..(4)..(36)..(37): Xaa is C or S
HXGXARVVMNPYVKLIVNSSDDFFLVSLSSLQTPAXXPKP

SEQ ID NO: 44357 - protein, 35 aa, Artificial Sequence
  GFR-binding peptide
  MOD_RES (2)..(34)..(35): Xaa is C or S
GXAKVVMNPYVKLIVNNSSDFFLVSLSSLKTPAXX

SEQ ID NO: 44358 - protein, 39 aa, Artificial Sequence
  GFR-binding peptide
  MOD_RES (1)..(35)..(36): Xaa is C or S
  MOD_RES (13)..(14)..(15)..(16)..(17): Xaa is A or G
  MOD_RES (18)..(19)..(20)..(21): Xaa is A or G or is absent
XAKVVMNPYVKLXXXXXXXXXFFLVSLSSLKTPAXXAKP

SEQ ID NO: 44359 - protein, 41 aa, Artificial Sequence
  GFR-binding peptide
  MOD_RES (1)..(35)..(36): Xaa is C or S
  MOD_RES (13)..(14)..(15)..(16)..(17): Xaa is A or G
  MOD_RES (18)..(19)..(20)..(21): Xaa is A or G or is absent
XSRVVMNPYVKLXXXXXXXXXFFLVSLSSLKTPAXXPKPVH

SEQ ID NO: 44360 - protein, 35 aa, Artificial Sequence
  GFR-binding peptide
  MOD_RES (1)..(33)..(34): Xaa is C or S
XSEVVMDPYVKLVVNNASDFFLISLSSLRTPVXXT

SEQ ID NO: 44361 - protein, 34 aa, Artificial Sequence
  GFR-binding peptide
  MOD_RES (33)..(34): Xaa is C or S
  MOD_RES (11)..(12)..(13)..(14)..(15): Xaa is A or G
  MOD_RES (16)..(17)..(18)..(19): Xaa is A or G or is absent
EVTMNPYVKLXXXXXXXXXFFLISLSSMKEPVXX

SEQ ID NO: 44362 - protein, 39 aa, Artificial Sequence
  GFR-binding peptide
  MOD_RES (33)..(34): Xaa is C or S
  MOD_RES (11)..(12)..(13)..(14)..(15): Xaa is A or G
  MOD_RES (16)..(17)..(18)..(19): Xaa is A or G or is absent
DVVMGPYVKLXXXXXXXXXFFLMSLSSMKTPTXXPGASG

SEQ ID NO: 44363 - protein, 35 aa, Artificial Sequence
  GFR-binding peptide
  MOD_RES (33)..(34): Xaa is C or S
  MOD_RES (11)..(12)..(13)..(14)..(15): Xaa is A or G
  MOD_RES (16)..(17)..(18)..(19): Xaa is A or G or is absent
EVVMEPYVKLXXXXXXXXXFFLMSLSSLETPVXXA

SEQ ID NO: 44364 - protein, 35 aa, Artificial Sequence
  GFR-binding peptide
  MOD_RES (1)..(35): Xaa is C or S
  MOD_RES (13)..(14)..(15)..(16)..(17): Xaa is A or G
  MOD_RES (18)..(19)..(20)..(21): Xaa is A or G or is absent
XRDVVMGPYVKLXXXXXXXXXFFLMSLSSMKTPTX

SEQ ID NO: 44365 - protein, 36 aa, Artificial Sequence
  GFR-binding peptide
  MOD_RES (34)..(35): Xaa is C or S
  MOD_RES (12)..(13)..(14)..(15)..(16): Xaa is A or G
  MOD_RES (17)..(18)..(19)..(20): Xaa is A or G or is absent
ARVVMNPYVKLXXXXXXXXXFFLVSLSSLQTPAXXP

SEQ ID NO: 44366 - protein, 37 aa, Artificial Sequence
  GFR-binding peptide
  MOD_RES (1)..(35)..(36): Xaa is C or S
  MOD_RES (13)..(14)..(15)..(16)..(17): Xaa is A or G
  MOD_RES (18)..(19)..(20)..(21): Xaa is A or G or is absent
XRDVVMGPYVKLXXXXXXXXXFFLMSLSSMKTPTXXP

SEQ ID NO: 44367 - protein, 37 aa, Artificial Sequence
  GFR-binding peptide
  MOD_RES (1)..(35): Xaa is C or S
  MOD_RES (13)..(14)..(15)..(16)..(17): Xaa is A or G
  MOD_RES (18)..(19)..(20)..(21): Xaa is A or G or is absent
XKNHQLFPYVKLXXXXXXXXXFFLMSLSSEETPVXEL

SEQ ID NO: 44368 - protein, 36 aa, Artificial Sequence
  GFR-binding peptide
  MOD_RES (1)..(3)..(35)..(36): Xaa is C or S
XGXAKVVMNPYVKLIVNNSSDFFLVSLSSLKTPAXX

SEQ ID NO: 44369 - protein, 38 aa, Artificial Sequence
  GFR-binding peptide
  MOD_RES (2)..(35)..(36): Xaa is C or S
  MOD_RES (13)..(14)..(15)..(16)..(17): Xaa is A or G
  MOD_RES (18)..(19)..(20)..(21): Xaa is A or G or is absent
KXSRVIMPYVKLXXXXXXXXXFFLISLSSLAQPVXXPA

SEQ ID NO: 44370 - protein, 41 aa, Artificial Sequence
  GFR-binding peptide
  MOD_RES (2)..(4)..(35)..(36): Xaa is C or S
SXKXSKVIMPYVKLIKPTKGILFFISLSSLDQSVXXPSASA

SEQ ID NO: 44371 - protein, 40 aa, Artificial Sequence
  GFR-binding peptide
  MOD_RES (1)..(3)..(34)..(35): Xaa is C or S
XKXSRVIMPYVKLVKPKRGVLFFISLSSLAQPVXXPAASA

SEQ ID NO: 44372 - protein, 41 aa, Artificial Sequence
  GFR-binding peptide
  MOD_RES (1)..(35)..(36): Xaa is C or S
  MOD_RES (13)..(14)..(15)..(16)..(17): Xaa is A or G
  MOD_RES (18)..(19)..(20)..(21): Xaa is A or G or is absent
XSEVTMNPYVKLXXXXXXXXXFFLISLSSMKEPVXXPEPIG

SEQ ID NO: 44373 - protein, 41 aa, Artificial Sequence
  GFR-binding peptide
  MOD_RES (2)..(35)..(36): Xaa is C or S
  MOD_RES (13)..(14)..(15)..(16)..(17): Xaa is A or G
  MOD_RES (18)..(19)..(20)..(21): Xaa is A or G or is absent
KXSKVVMPYVKLXXXXXXXXXFFLISLSSLDQPVXXPSASA

SEQ ID NO: 44374 - protein, 42 aa, Artificial Sequence
  GFR-binding peptide
  MOD_RES (2)..(36)..(37): Xaa is C or S
  MOD_RES (14)..(15)..(16)..(17)..(18): Xaa is A or G
  MOD_RES (19)..(20)..(21)..(22): Xaa is A or G or is absent
GXARVVMNPYVKLXXXXXXXXXFFLVSLSSLQTPAXXPKPVT

SEQ ID NO: 44375 - protein, 36 aa, Artificial Sequence
  GFR-binding peptide
  MOD_RES (2)..(4)..(35)..(36): Xaa is C or S
SXKXSKVIMPYVKLIKPTKGILFFISLSSLDQSVXX

SEQ ID NO: 44376 - protein, 36 aa, Artificial Sequence
  GFR-binding peptide
  MOD_RES (31)..(32): Xaa is C or S
RVVMNPYVKLIVNSSDDFFLVSLSSLKTPAXXPKPV

SEQ ID NO: 44377 - protein, 33 aa, Artificial Sequence
  GFR-binding peptide
  MOD_RES (2)..(2): Xaa is C or S
GXARVVMNPYVKLIVNSSDDFFLVSLSSLQTPA

SEQ ID NO: 44378 - protein, 40 aa, Artificial Sequence
  GFR-binding peptide
  MOD_RES (2)..(34)..(35): Xaa is C or S
GXGEVVMEPYVKLVVKDYEDFFLMSLSSLETPVXXAKPIS

SEQ ID NO: 44379 - protein, 38 aa, Artificial Sequence
  GFR-binding peptide
  MOD_RES (2)..(4)..(35)..(36): Xaa is C or S
LXGXEEVIMPYVKLLLVRGNDFFLMSLSSTKVPAXXTS

SEQ ID NO: 44380 - protein, 40 aa, Artificial Sequence
  GFR-binding peptide
  MOD_RES (1)..(36)..(37): Xaa is C or S
  MOD_RES (14)..(15)..(16)..(17)..(18): Xaa is A or G
  MOD_RES (19)..(20)..(21)..(22): Xaa is A or G or is absent
XEAVSMGEPYVKLXXXXXXXXXFFLVSLSSLKTPVXXAKG

SEQ ID NO: 44381 - protein, 36 aa, Artificial Sequence
  GFR-binding peptide
  MOD_RES (33)..(34): Xaa is C or S
  MOD_RES (11)..(12)..(13)..(14)..(15): Xaa is A or G
  MOD_RES (16)..(17)..(18)..(19): Xaa is A or G or is absent
RVVMNPYVKLXXXXXXXXXFFLVSLSSLQTPAXXPK

SEQ ID NO: 44382 - protein, 34 aa, Artificial Sequence
  GFR-binding peptide
  MOD_RES (34)..(34): Xaa is C or S
  MOD_RES (12)..(13)..(14)..(15)..(16): Xaa is A or G
  MOD_RES (17)..(18)..(19)..(20): Xaa is A or G or is absent
KNHQLFPYVKLXXXXXXXXXFFLMSLSSEETPVX

SEQ ID NO: 44383 - protein, 33 aa, Artificial Sequence
  GFR-binding peptide
  MOD_RES (2)..(2): Xaa is C or S
GXAEVVMDPYVKLVVNNAADFFLISLSSLRAPV

SEQ ID NO: 44384 - protein, 38 aa, Artificial Sequence
  GFR-binding peptide
  MOD_RES (1)..(3)..(36)..(37): Xaa is C or S
  MOD_RES (14)..(15)..(16)..(17)..(18): Xaa is A or G
  MOD_RES (19)..(20)..(21)..(22): Xaa is A or G or is absent
XKXSKVIMPYVKLXXXXXXXXXFFLISLSSLDQSVXXP

SEQ ID NO: 44385 - protein, 42 aa, Artificial Sequence
  GFR-binding peptide
  MOD_RES (2)..(4)..(38)..(39): Xaa is C or S
  MOD_RES (16)..(17)..(18)..(19)..(20): Xaa is A or G
  MOD_RES (21)..(22)..(23)..(24): Xaa is A or G or is absent
RXGXGEVVMEPYVKLXXXXXXXXXFFLMSLSSLETPVXXAKP

SEQ ID NO: 44386 - protein, 36 aa, Artificial Sequence
  GFR-binding peptide
  MOD_RES (2)..(2): Xaa is C or S
  MOD_RES (15)..(16)..(17)..(18)..(19): Xaa is A or G
  MOD_RES (20)..(21)..(22)..(23): Xaa is A or G or is absent
GXEAVSMGEPYVKLXXXXXXXXXFFLVSLSSLKTPV

SEQ ID NO: 44387 - protein, 39 aa, Artificial Sequence
  GFR-binding peptide
  MOD_RES (2)..(4): Xaa is C or S
  MOD_RES (17)..(18)..(19)..(20)..(21): Xaa is A or G
  MOD_RES (22)..(23)..(24)..(25): Xaa is A or G or is absent
AXAXELHEELRPYVKLXXXXXXXXXFFLVSLSSHHVRSP

SEQ ID NO: 44388 - protein, 35 aa, Artificial Sequence
  GFR-binding peptide
  MOD_RES (13)..(14)..(15)..(16)..(17): Xaa is A or G
  MOD_RES (18)..(19)..(20)..(21): Xaa is A or G or is absent
ELHEELRPYVKLXXXXXXXXXFFLVSLSSHHVRSP

SEQ ID NO: 44389 - protein, 37 aa, Artificial Sequence
  GFR-binding peptide
  MOD_RES (1)..(35)..(36): Xaa is C or S
  MOD_RES (13)..(14)..(15)..(16)..(17): Xaa is A or G
  MOD_RES (18)..(19)..(20)..(21): Xaa is A or G or is absent
XAEVVMDPYVKLXXXXXXXXXFFLISLSSLRAPVXXS

SEQ ID NO: 44390 - protein, 40 aa, Artificial Sequence
  GFR-binding peptide
  MOD_RES (34)..(35): Xaa is C or S
  MOD_RES (12)..(13)..(14)..(15)..(16): Xaa is A or G
  MOD_RES (17)..(18)..(19)..(20): Xaa is A or G or is absent
ESVAMGPYVKLXXXXXXXXXFFLISLSSLKTPVXXAKSAK

SEQ ID NO: 44391 - protein, 33 aa, Artificial Sequence
  GFR-binding peptide
  MOD_RES (31)..(32): Xaa is C or S
SVAMGPYVKLYTVVGKDFFLISLSSLKTPVXXA

SEQ ID NO: 44392 - protein, 38 aa, Artificial Sequence
  GFR-binding peptide
  MOD_RES (2)..(36)..(37): Xaa is C or S
  MOD_RES (14)..(15)..(16)..(17)..(18): Xaa is A or G
  MOD_RES (19)..(20)..(21)..(22): Xaa is A or G or is absent
GXAEVVMDPYVKLXXXXXXXXXFFLISLSSLRAPVXXS

SEQ ID NO: 44393 - protein, 38 aa, Artificial Sequence
  GFR-binding peptide
  MOD_RES (2)..(35)..(36): Xaa is C or S
  MOD_RES (13)..(14)..(15)..(16)..(17): Xaa is A or G
  MOD_RES (18)..(19)..(20)..(21): Xaa is A or G or is absent
KXSKVIMPYVKLXXXXXXXXXFFLISLSSLDQSVXXPS

SEQ ID NO: 44394 - protein, 40 aa, Artificial Sequence
  GFR-binding peptide
  MOD_RES (1)..(35): Xaa is C or S
  MOD_RES (13)..(14)..(15)..(16)..(17): Xaa is A or G
  MOD_RES (18)..(19)..(20)..(21): Xaa is A or G or is absent
XSRVVMNPYVKLXXXXXXXXXFFLVSLSSLKTPAXTPKTV

SEQ ID NO: 44395 - protein, 37 aa, Artificial Sequence
  GFR-binding peptide
  MOD_RES (2)..(4)..(36)..(37): Xaa is C or S
RXGXAEVVMDPYVKLVVNNAADFFLISLSSLRAPVXX

SEQ ID NO: 44396 - protein, 44 aa, Artificial Sequence
  GFR-binding peptide
  MOD_RES (2)..(4)..(38)..(39): Xaa is C or S
  MOD_RES (16)..(17)..(18)..(19)..(20): Xaa is A or G
  MOD_RES (21)..(22)..(23)..(24): Xaa is A or G or is absent
RXGXESVAMGPYVKLXXXXXXXXXFFLISLSSLKTPVXXAKSAK

SEQ ID NO: 44397 - protein, 41 aa, Artificial Sequence
  GFR-binding peptide
  MOD_RES (2)..(4)..(38)..(39): Xaa is C or S
  MOD_RES (16)..(17)..(18)..(19)..(20): Xaa is A or G
  MOD_RES (21)..(22)..(23)..(24): Xaa is A or G or is absent
RXGXAEVVMDPYVKLXXXXXXXXXFFLISLSSLRAPVXXSA

SEQ ID NO: 44398 - protein, 41 aa, Artificial Sequence
  GFR-binding peptide
  MOD_RES (1)..(3)..(35)..(36): Xaa is C or S
XGXSRVVMNPYVKLIVNSSDDFFLVSLSSLKTPAXXPKPVH

SEQ ID NO: 44399 - protein, 40 aa, Artificial Sequence
  GFR-binding peptide
  MOD_RES (2)..(4)..(36)..(37): Xaa is C or S
RXGXGEVVMEPYVKLVVKDYEDFFLMSLSSLETPVXXAKP

SEQ ID NO: 44400 - protein, 40 aa, Artificial Sequence
  GFR-binding peptide
  MOD_RES (2)..(35)..(36): Xaa is C or S
  MOD_RES (13)..(14)..(15)..(16)..(17): Xaa is A or G
  MOD_RES (18)..(19)..(20)..(21): Xaa is A or G or is absent
GXEEVIMPYVKLXXXXXXXXXFFLMSLSSTKVPAXXTSPV

SEQ ID NO: 44401 - protein, 35 aa, Artificial Sequence
  GFR-binding peptide
  MOD_RES (2)..(34)..(35): Xaa is C or S
AXSEVTMNPYVKLVVNKNEDFFLISLSSMKEPVXX

SEQ ID NO: 44402 - protein, 39 aa, Artificial Sequence
  GFR-binding peptide
  MOD_RES (1)..(3)..(35): Xaa is C or S
XGXSRVVMNPYVKLIVNSSDDFFLVSLSSLKTPAXTPKT

SEQ ID NO: 44403 - protein, 41 aa, Artificial Sequence
  GFR-binding peptide
  MOD_RES (1)..(3)..(35)..(36): Xaa is C or S
XGXRDVVMGPYVKLIIQQKDNFFLMSLSSMKTPTXXPGASG

SEQ ID NO: 44404 - protein, 33 aa, Artificial Sequence
  GFR-binding peptide
  MOD_RES (2)..(2): Xaa is C or S
GXESVAMGPYVKLYTVVGKDFFLISLSSLKTPV

SEQ ID NO: 44405 - protein, 33 aa, Artificial Sequence
  GFR-binding peptide
  MOD_RES (2)..(2): Xaa is C or S
GXSRVVMNPYVKLIVNSSDDFFLVSLSSLKTPA

SEQ ID NO: 44406 - protein, 36 aa, Artificial Sequence
  GFR-binding peptide
  MOD_RES (1)..(3): Xaa is C or S
  MOD_RES (15)..(16)..(17)..(18)..(19): Xaa is A or G
  MOD_RES (20)..(21)..(22)..(23): Xaa is A or G or is absent
XEXKNHQLFPYVKLXXXXXXXXXFFLMSLSSEETPV

SEQ ID NO: 44407 - protein, 36 aa, Artificial Sequence
  GFR-binding peptide
  MOD_RES (1)..(3)..(35)..(36): Xaa is C or S
XGXSEVVMDPYVKLVVNNASDFFLISLSSLRTPVXX

SEQ ID NO: 44408 - protein, 41 aa, Artificial Sequence
  GFR-binding peptide
  MOD_RES (2)..(35)..(36): Xaa is C or S
  MOD_RES (13)..(14)..(15)..(16)..(17): Xaa is A or G
  MOD_RES (18)..(19)..(20)..(21): Xaa is A or G or is absent
GXEEVIMPYVKLXXXXXXXXXFFLMSLSSTKVPAXXTSPVR

SEQ ID NO: 44409 - protein, 40 aa, Artificial Sequence
  GFR-binding peptide
  MOD_RES (1)..(34)..(35): Xaa is C or S
XEAVSMGEPYVKLTPVGMDDFFLVSLSSLKTPVXXAKGVK

SEQ ID NO: 44410 - protein, 37 aa, Artificial Sequence
  GFR-binding peptide
  MOD_RES (34)..(35): Xaa is C or S
  MOD_RES (12)..(13)..(14)..(15)..(16): Xaa is A or G
  MOD_RES (17)..(18)..(19)..(20): Xaa is A or G or is absent
AKVVMNPYVKLXXXXXXXXXFFLVSLSSLKTPAXXAK

SEQ ID NO: 44411 - protein, 33 aa, Artificial Sequence
  GFR-binding peptide
  MOD_RES (2)..(33): Xaa is C or S
KXSKVIMPYVKLIKPTKGILFFISLSSLDQSVX

SEQ ID NO: 44412 - protein, 40 aa, Artificial Sequence
  GFR-binding peptide
  MOD_RES (1)..(35)..(36): Xaa is C or S
  MOD_RES (13)..(14)..(15)..(16)..(17): Xaa is A or G
  MOD_RES (18)..(19)..(20)..(21): Xaa is A or G or is absent
XARVVMNPYVKLXXXXXXXXXFFLVSLSSLQTPAXXPKPV

SEQ ID NO: 44413 - protein, 36 aa, Artificial Sequence
  GFR-binding peptide
  MOD_RES (1)..(3): Xaa is C or S
  MOD_RES (15)..(16)..(17)..(18)..(19): Xaa is A or G
  MOD_RES (20)..(21)..(22)..(23): Xaa is A or G or is absent
XGXARVVMNPYVKLXXXXXXXXXFFLVSLSSLQTPA

SEQ ID NO: 44414 - protein, 37 aa, Artificial Sequence
  GFR-binding peptide
  MOD_RES (1)..(3)..(37): Xaa is C or S
XEXKNHQLFPYVKLHQGQHPKIRFFLMSLSSEETPVX

SEQ ID NO: 44415 - protein, 31 aa, Artificial Sequence
  GFR-binding peptide
  MOD_RES (31)..(31): Xaa is C or S
EVVMDPYVKLVVNNAADFFLISLSSLRAPVX

SEQ ID NO: 44416 - protein, 33 aa, Artificial Sequence
  GFR-binding peptide
  MOD_RES (12)..(13)..(14)..(15)..(16): Xaa is A or G
  MOD_RES (17)..(18)..(19)..(20): Xaa is A or G or is absent
SRVVMNPYVKLXXXXXXXXXFFLVSLSSLKTPA

SEQ ID NO: 44417 - protein, 30 aa, Artificial Sequence; identical to SEQ ID NO: 1733
  GFR-binding peptide

SEQ ID NO: 44418 - protein, 43 aa, Artificial Sequence
  GFR-binding peptide
  MOD_RES (1)..(3)..(37)..(38): Xaa is C or S
  MOD_RES (15)..(16)..(17)..(18)..(19): Xaa is A or G
  MOD_RES (20)..(21)..(22)..(23): Xaa is A or G or is absent
XGXSRVVMNPYVKLXXXXXXXXXFFLVSLSSLKTPAXXPKPVY

SEQ ID NO: 44419 - protein, 37 aa, Artificial Sequence
  GFR-binding peptide
  MOD_RES (1)..(35)..(36): Xaa is C or S
  MOD_RES (13)..(14)..(15)..(16)..(17): Xaa is A or G
  MOD_RES (18)..(19)..(20)..(21): Xaa is A or G or is absent
XARVVMNPYVKLXXXXXXXXXFFLVSLSSLQTPAXXP

SEQ ID NO: 44420 - protein, 36 aa, Artificial Sequence
  GFR-binding peptide
  MOD_RES (1)..(33)..(34): Xaa is C or S
XAKVVMNPYVKLIVNNSSDFFLVSLSSLKTPAXXAK

SEQ ID NO: 44421 - protein, 36 aa, Artificial Sequence
  GFR-binding peptide
  MOD_RES (34)..(35): Xaa is C or S
  MOD_RES (12)..(13)..(14)..(15)..(16): Xaa is A or G
  MOD_RES (17)..(18)..(19)..(20): Xaa is A or G or is absent
GEVVMEPYVKLXXXXXXXXXFFLMSLSSLETPVXXA

SEQ ID NO: 44422 - protein, 37 aa, Artificial Sequence
  GFR-binding peptide
  MOD_RES (34)..(35): Xaa is C or S
  MOD_RES (12)..(13)..(14)..(15)..(16): Xaa is A or G
  MOD_RES (17)..(18)..(19)..(20): Xaa is A or G or is absent
SRVVMNPYVKLXXXXXXXXXFFLVSLSSLKTPAXXPK

SEQ ID NO: 44423 - protein, 38 aa, Artificial Sequence
  GFR-binding peptide
  MOD_RES (1)..(3)..(37): Xaa is C or S
XEXKNHQLFPYVKLHQGQHPKIRFFLMSLSSEETPVXE

SEQ ID NO: 44424 - protein, 41 aa, Artificial Sequence
  GFR-binding peptide
  MOD_RES (2)..(4)..(38): Xaa is C or S
  MOD_RES (16)..(17)..(18)..(19)..(20): Xaa is A or G
  MOD_RES (21)..(22)..(23)..(24): Xaa is A or G or is absent
RXEXKNHQLFPYVKLXXXXXXXXXFFLMSLSSEETPVXELG

SEQ ID NO: 44425 - protein, 36 aa, Artificial Sequence
  GFR-binding peptide
  MOD_RES (2)..(35)..(36): Xaa is C or S
  MOD_RES (13)..(14)..(15)..(16)..(17): Xaa is A or G
  MOD_RES (18)..(19)..(20)..(21): Xaa is A or G or is absent
KXSKVVMPYVKLXXXXXXXXXFFLISLSSLDQPVXX

SEQ ID NO: 44426 - protein, 34 aa, Artificial Sequence
  GFR-binding peptide
  MOD_RES (13)..(14)..(15)..(16)..(17): Xaa is A or G
  MOD_RES (18)..(19)..(20)..(21): Xaa is A or G or is absent
ELHEELRPYVKLXXXXXXXXXFFLVSLSSHHVRS

SEQ ID NO: 44427 - protein, 39 aa, Artificial Sequence
  GFR-binding peptide
  MOD_RES (2)..(4)..(37)..(38): Xaa is C or S
  MOD_RES (15)..(16)..(17)..(18)..(19): Xaa is A or G
  MOD_RES (20)..(21)..(22)..(23): Xaa is A or G or is absent
LXGXEEVIMPYVKLXXXXXXXXXFFLMSLSSTKVPAXXT

SEQ ID NO: 44428 - protein, 38 aa, Artificial Sequence
  GFR-binding peptide
  MOD_RES (2)..(34)..(35): Xaa is C or S
GXSRVVMNPYVKLIVNSSDDFFLVSLSSLKTPAXXPKP

SEQ ID NO: 44429 - protein, 34 aa, Artificial Sequence
  GFR-binding peptide
  MOD_RES (33)..(34): Xaa is C or S
  MOD_RES (11)..(12)..(13)..(14)..(15): Xaa is A or G
  MOD_RES (16)..(17)..(18)..(19): Xaa is A or G or is absent
RVVMNPYVKLXXXXXXXXXFFLVSLSSLQTPAXX

SEQ ID NO: 44430 - protein, 39 aa, Artificial Sequence
  GFR-binding peptide
  MOD_RES (2)..(4)..(38)..(39): Xaa is C or S
  MOD_RES (16)..(17)..(18)..(19)..(20): Xaa is A or G
  MOD_RES (21)..(22)..(23)..(24): Xaa is A or G or is absent
HXGXAKVVMNPYVKLXXXXXXXXXFFLVSLSSLKTPAXX

SEQ ID NO: 44431 - protein, 41 aa, Artificial Sequence
  GFR-binding peptide
  MOD_RES (2)..(36): Xaa is C or S
EXKNHQLFPYVKLHQGQHPKIRFFLMSLSSEETPVXELGED

SEQ ID NO: 44432 - protein, 37 aa, Artificial Sequence
  GFR-binding peptide
  MOD_RES (2)..(4): Xaa is C or S
  MOD_RES (16)..(17)..(18)..(19)..(20): Xaa is A or G
  MOD_RES (21)..(22)..(23)..(24): Xaa is A or G or is absent
HXGXARVVMNPYVKLXXXXXXXXXFFLVSLSSLQTPA

SEQ ID NO: 44433 - protein, 36 aa, Artificial Sequence
  GFR-binding peptide
  MOD_RES (1)..(35)..(36): Xaa is C or S
  MOD_RES (13)..(14)..(15)..(16)..(17): Xaa is A or G
  MOD_RES (18)..(19)..(20)..(21): Xaa is A or G or is absent
XGEVVMEPYVKLXXXXXXXXXFFLMSLSSLETPVXX

SEQ ID NO: 44434 - protein, 39 aa, Artificial Sequence
  GFR-binding peptide
  MOD_RES (2)..(4)..(36)..(37): Xaa is C or S
RXGXAEVVMDPYVKLVVNNAADFFLISLSSLRAPVXXSA

SEQ ID NO: 44435 - protein, 31 aa, Artificial Sequence
  GFR-binding peptide
  MOD_RES (1)..(1): Xaa is C or S
XSRVIMPYVKLVKPKRGVLFFISLSSLAQPV

SEQ ID NO: 44436 - protein, 38 aa, Artificial Sequence
  GFR-binding peptide
  MOD_RES (2)..(36)..(37): Xaa is C or S
  MOD_RES (14)..(15)..(16)..(17)..(18): Xaa is A or G
  MOD_RES (19)..(20)..(21)..(22): Xaa is A or G or is absent
GXESVAMGPYVKLXXXXXXXXXFFLISLSSLKTPVXXA

SEQ ID NO: 44437 - protein, 35 aa, Artificial Sequence
  GFR-binding peptide
  MOD_RES (34)..(35): Xaa is C or S
  MOD_RES (12)..(13)..(14)..(15)..(16): Xaa is A or G
  MOD_RES (17)..(18)..(19)..(20): Xaa is A or G or is absent
RDVVMGPYVKLXXXXXXXXXFFLMSLSSMKTPTXX

SEQ ID NO: 44438 - protein, 39 aa, Artificial Sequence
  GFR-binding peptide
  MOD_RES (1)..(3)..(36)..(37): Xaa is C or S
  MOD_RES (14)..(15)..(16)..(17)..(18): Xaa is A or G
  MOD_RES (19)..(20)..(21)..(22): Xaa is A or G or is absent
XKXSKVVMPYVKLXXXXXXXXXFFLISLSSLDQPVXXPS

SEQ ID NO: 44439 - protein, 35 aa, Artificial Sequence
  GFR-binding peptide
  MOD_RES (1)..(35): Xaa is C or S
  MOD_RES (13)..(14)..(15)..(16)..(17): Xaa is A or G
  MOD_RES (18)..(19)..(20)..(21): Xaa is A or G or is absent
XGEVVMEPYVKLXXXXXXXXXFFLMSLSSLETPVX

SEQ ID NO: 44440 - protein, 38 aa, Artificial Sequence
  GFR-binding peptide
  MOD_RES (34)..(35): Xaa is C or S
  MOD_RES (12)..(13)..(14)..(15)..(16): Xaa is A or G
  MOD_RES (17)..(18)..(19)..(20): Xaa is A or G or is absent
ESVAMGPYVKLXXXXXXXXXFFLISLSSLKTPVXXAKS

SEQ ID NO: 44441 - protein, 40 aa, Artificial Sequence
  GFR-binding peptide
  MOD_RES (1)..(35)..(36): Xaa is C or S
  MOD_RES (13)..(14)..(15)..(16)..(17): Xaa is A or G
  MOD_RES (18)..(19)..(20)..(21): Xaa is A or G or is absent
XSEVTMNPYVKLXXXXXXXXXFFLISLSSMKEPVXXPEPI

SEQ ID NO: 44442 - protein, 36 aa, Artificial Sequence
  GFR-binding peptide
  MOD_RES (33)..(34): Xaa is C or S
  MOD_RES (11)..(12)..(13)..(14)..(15): Xaa is A or G
  MOD_RES (16)..(17)..(18)..(19): Xaa is A or G or is absent
RVVMNPYVKLXXXXXXXXXFFLVSLSSLKTPAXXPK

SEQ ID NO: 44443 - protein, 39 aa, Artificial Sequence
  GFR-binding peptide
  MOD_RES (1)..(35)..(36): Xaa is C or S
  MOD_RES (13)..(14)..(15)..(16)..(17): Xaa is A or G
  MOD_RES (18)..(19)..(20)..(21): Xaa is A or G or is absent
XAEVVMDPYVKLXXXXXXXXXFFLISLSSLRAPVXXSAP

SEQ ID NO: 44444 - protein, 41 aa, Artificial Sequence
  GFR-binding peptide
  MOD_RES (2)..(4)..(36)..(37): Xaa is C or S
RXGXGEVVMEPYVKLVVKDYEDFFLMSLSSLETPVXXAKPI

SEQ ID NO: 44445 - protein, 33 aa, Artificial Sequence
  GFR-binding peptide
  MOD_RES (1)..(33): Xaa is C or S
XAKVVMNPYVKLIVNNSSDFFLVSLSSLKTPAX

SEQ ID NO: 44446 - protein, 31 aa, Artificial Sequence
  GFR-binding peptide
AKVVMNPYVKLIVNNSSDFFLVSLSSLKTPA

SEQ ID NO: 44447 - protein, 38 aa, Artificial Sequence
  GFR-binding peptide
  MOD_RES (2)..(33)..(34): Xaa is C or S
KXSKVIMPYVKLIKPTKGILFFISLSSLDQSVXXPSAS

SEQ ID NO: 44448 - protein, 36 aa, Artificial Sequence
  GFR-binding peptide
  MOD_RES (33)..(34): Xaa is C or S
  MOD_RES (11)..(12)..(13)..(14)..(15): Xaa is A or G
  MOD_RES (16)..(17)..(18)..(19): Xaa is A or G or is absent
EVVMDPYVKLXXXXXXXXXFFLISLSSLRAPVXXSA

SEQ ID NO: 44449 - protein, 40 aa, Artificial Sequence
  GFR-binding peptide
  MOD_RES (2)..(4)..(38)..(39): Xaa is C or S
  MOD_RES (16)..(17)..(18)..(19)..(20): Xaa is A or G
  MOD_RES (21)..(22)..(23)..(24): Xaa is A or G or is absent
RXGXGEVVMEPYVKLXXXXXXXXXFFLMSLSSLETPVXXA

SEQ ID NO: 44450 - protein, 31 aa, Artificial Sequence
  GFR-binding peptide
SEVTMNPYVKLVVNKNEDFFLISLSSMKEPV

SEQ ID NO: 44451 - protein, 36 aa, Artificial Sequence
  GFR-binding peptide
  MOD_RES (31)..(32): Xaa is C or S
DVVMGPYVKLIIQQKDNFFLMSLSSMKTPTXXPGAS

SEQ ID NO: 44452 - protein, 39 aa, Artificial Sequence
  GFR-binding peptide
  MOD_RES (1)..(34)..(35): Xaa is C or S
  MOD_RES (12)..(13)..(14)..(15)..(16): Xaa is A or G
  MOD_RES (17)..(18)..(19)..(20): Xaa is A or G or is absent
XEEVIMPYVKLXXXXXXXXXFFLMSLSSTKVPAXXTSPV

SEQ ID NO: 44453 - protein, 35 aa, Artificial Sequence
  GFR-binding peptide
  MOD_RES (1)..(35): Xaa is C or S
  MOD_RES (13)..(14)..(15)..(16)..(17): Xaa is A or G
  MOD_RES (18)..(19)..(20)..(21): Xaa is A or G or is absent
XESVAMGPYVKLXXXXXXXXXFFLISLSSLKTPVX

SEQ ID NO: 44454 - protein, 41 aa, Artificial Sequence
  GFR-binding peptide
  MOD_RES (1)..(35)..(36): Xaa is C or S
  MOD_RES (13)..(14)..(15)..(16)..(17): Xaa is A or G
  MOD_RES (18)..(19)..(20)..(21): Xaa is A or G or is absent
XESVAMGPYVKLXXXXXXXXXFFLISLSSLKTPVXXAKSAK

SEQ ID NO: 44455 - protein, 43 aa, Artificial Sequence
  GFR-binding peptide
  MOD_RES (2)..(4)..(38)..(39): Xaa is C or S
  MOD_RES (16)..(17)..(18)..(19)..(20): Xaa is A or G
  MOD_RES (21)..(22)..(23)..(24): Xaa is A or G or is absent
SXGXRDVVMGPYVKLXXXXXXXXXFFLMSLSSMKTPTXXPGAS

SEQ ID NO: 44456 - protein, 39 aa, Artificial Sequence
  GFR-binding peptide
  MOD_RES (2)..(39): Xaa is C or S
AXELHEELRPYVKLLKPKKRVYEFFLVSLSSHHVRSPQX

SEQ ID NO: 44457 - protein, 39 aa, Artificial Sequence
  GFR-binding peptide
  MOD_RES (2)..(4)..(37)..(38): Xaa is C or S
  MOD_RES (15)..(16)..(17)..(18)..(19): Xaa is A or G
  MOD_RES (20)..(21)..(22)..(23): Xaa is A or G or is absent
SXKXSKVIMPYVKLXXXXXXXXXFFLISLSSLDQSVXXP

SEQ ID NO: 44458 - protein, 39 aa, Artificial Sequence
  GFR-binding peptide
  MOD_RES (1)..(33)..(34): Xaa is C or S
XAEVVMDPYVKLVVNNAADFFLISLSSLRAPVXXSAPAA

SEQ ID NO: 44459 - protein, 37 aa, Artificial Sequence
  GFR-binding peptide
  MOD_RES (2)..(35)..(36): Xaa is C or S
  MOD_RES (13)..(14)..(15)..(16)..(17): Xaa is A or G
  MOD_RES (18)..(19)..(20)..(21): Xaa is A or G or is absent
GXEEVIMPYVKLXXXXXXXXXFFLMSLSSTKVPAXXT

SEQ ID NO: 44460 - protein, 34 aa, Artificial Sequence
  GFR-binding peptide
  MOD_RES (1)..(3): Xaa is C or S
XGXSEVVMDPYVKLVVNNASDFFLISLSSLRTPV

SEQ ID NO: 44461 - protein, 37 aa, Artificial Sequence
  GFR-binding peptide
  MOD_RES (32)..(33): Xaa is C or S
AKVVMNPYVKLIVNNSSDFFLVSLSSLKTPAXXAKPV

SEQ ID NO: 44462 - protein, 39 aa, Artificial Sequence
  GFR-binding peptide
  MOD_RES (2)..(36)..(37): Xaa is C or S
  MOD_RES (14)..(15)..(16)..(17)..(18): Xaa is A or G
  MOD_RES (19)..(20)..(21)..(22): Xaa is A or G or is absent
GXAEVVMDPYVKLXXXXXXXXXFFLISLSSLRAPVXXSA

SEQ ID NO: 44463 - protein, 37 aa, Artificial Sequence
  GFR-binding peptide
  MOD_RES (2)..(4)..(37): Xaa is C or S
  MOD_RES (15)..(16)..(17)..(18)..(19): Xaa is A or G
  MOD_RES (20)..(21)..(22)..(23): Xaa is A or G or is absent
SXKXSRVIMPYVKLXXXXXXXXXFFLISLSSLAQPVX

SEQ ID NO: 44464 - protein, 38 aa, Artificial Sequence
  GFR-binding peptide
  MOD_RES (2)..(4)..(36)..(37): Xaa is C or S
HXGXAKVVMNPYVKLIVNNSSDFFLVSLSSLKTPAXXA

SEQ ID NO: 44465 - protein, 37 aa, Artificial Sequence
  GFR-binding peptide
  MOD_RES (1)..(34)..(35): Xaa is C or S
  MOD_RES (12)..(13)..(14)..(15)..(16): Xaa is A or G
  MOD_RES (17)..(18)..(19)..(20): Xaa is A or G or is absent
XSKVIMPYVKLXXXXXXXXXFFLISLSSLDQSVXXPS

SEQ ID NO: 44466 - protein, 36 aa, Artificial Sequence
  GFR-binding peptide
  MOD_RES (1)..(1): Xaa is C or S
  MOD_RES (14)..(15)..(16)..(17)..(18): Xaa is A or G
  MOD_RES (19)..(20)..(21)..(22): Xaa is A or G or is absent
XELHEELRPYVKLXXXXXXXXXFFLVSLSSHHVRSP

SEQ ID NO: 44467 - protein, 42 aa, Artificial Sequence
  GFR-binding peptide
  MOD_RES (2)..(4)..(37)..(38): Xaa is C or S
  MOD_RES (15)..(16)..(17)..(18)..(19): Xaa is A or G
  MOD_RES (20)..(21)..(22)..(23): Xaa is A or G or is absent
SXKXSKVIMPYVKLXXXXXXXXXFFLISLSSLDQSVXXPSAS

SEQ ID NO: 44468 - protein, 38 aa, Artificial Sequence
  GFR-binding peptide
  MOD_RES (1)..(3)..(36)..(37): Xaa is C or S
  MOD_RES (14)..(15)..(16)..(17)..(18): Xaa is A or G
  MOD_RES (19)..(20)..(21)..(22): Xaa is A or G or is absent
XKXSRVIMPYVKLXXXXXXXXXFFLISLSSLAQPVXXP

SEQ ID NO: 44469 - protein, 39 aa, Artificial Sequence
  GFR-binding peptide
  MOD_RES (1)..(33)..(34): Xaa is C or S
XSRVVMNPYVKLIVNSSDDFFLVSLSSLKTPAXXPKPVY

SEQ ID NO: 44470 - protein, 32 aa, Artificial Sequence
  GFR-binding peptide
  MOD_RES (1)..(1): Xaa is C or S
XESVAMGPYVKLYTVVGKDFFLISLSSLKTPV

SEQ ID NO: 44471 - protein, 32 aa, Artificial Sequence
  GFR-binding peptide
  MOD_RES (31)..(32): Xaa is C or S
EVVMDPYVKLVVNNASDFFLISLSSLRTPVXX

SEQ ID NO: 44472 - protein, 35 aa, Artificial Sequence
  GFR-binding peptide
LHEELRPYVKLLKPKKRVYEFFLVSLSSHHVRSPQ

SEQ ID NO: 44473 - protein, 42 aa, Artificial Sequence
  GFR-binding peptide
  MOD_RES (2)..(4)..(38)..(39): Xaa is C or S
  MOD_RES (16)..(17)..(18)..(19)..(20): Xaa is A or G
  MOD_RES (21)..(22)..(23)..(24): Xaa is A or G or is absent
SXGXRDVVMGPYVKLXXXXXXXXXFFLMSLSSMKTPTXXPGA

SEQ ID NO: 44474 - protein, 38 aa, Artificial Sequence
  GFR-binding peptide
  MOD_RES (33)..(34): Xaa is C or S
  MOD_RES (11)..(12)..(13)..(14)..(15): Xaa is A or G
  MOD_RES (16)..(17)..(18)..(19): Xaa is A or G or is absent
SKVIMPYVKLXXXXXXXXXFFLISLSSLDQSVXXPSAS

SEQ ID NO: 44475 - protein, 43 aa, Artificial Sequence
  GFR-binding peptide
  MOD_RES (2)..(4)..(38): Xaa is C or S
RXEXKNHQLFPYVKLHQGQHPKIRFFLMSLSSEETPVXELGED

SEQ ID NO: 44476 - protein, 34 aa, Artificial Sequence
  GFR-binding peptide
  MOD_RES (33)..(34): Xaa is C or S
  MOD_RES (11)..(12)..(13)..(14)..(15): Xaa is A or G
  MOD_RES (16)..(17)..(18)..(19): Xaa is A or G or is absent
SRVIMPYVKLXXXXXXXXXFFLISLSSLAQPVXX

SEQ ID NO: 44477 - protein, 34 aa, Artificial Sequence
  GFR-binding peptide
  MOD_RES (2)..(2): Xaa is C or S
  MOD_RES (13)..(14)..(15)..(16)..(17): Xaa is A or G
  MOD_RES (18)..(19)..(20)..(21): Xaa is A or G or is absent
GXEEVIMPYVKLXXXXXXXXXFFLMSLSSTKVPA

SEQ ID NO: 44478 - protein, 34 aa, Artificial Sequence
  GFR-binding peptide
  MOD_RES (31)..(32): Xaa is C or S
DVVMGPYVKLIIQQKDNFFLMSLSSMKTPTXXPG

SEQ ID NO: 44479 - protein, 39 aa, Artificial Sequence
  GFR-binding peptide
  MOD_RES (1)..(35)..(36): Xaa is C or S
  MOD_RES (13)..(14)..(15)..(16)..(17): Xaa is A or G
  MOD_RES (18)..(19)..(20)..(21): Xaa is A or G or is absent
XARVVMNPYVKLXXXXXXXXXFFLVSLSSLQTPAXXPKP

SEQ ID NO: 44480 - protein, 38 aa, Artificial Sequence
  GFR-binding peptide
  MOD_RES (1)..(34)..(35): Xaa is C or S
  MOD_RES (12)..(13)..(14)..(15)..(16): Xaa is A or G
  MOD_RES (17)..(18)..(19)..(20): Xaa is A or G or is absent
XSRVIMPYVKLXXXXXXXXXFFLISLSSLAQPVXXPAA

SEQ ID NO: 44481 - protein, 43 aa, Artificial Sequence
  GFR-binding peptide
  MOD_RES (1)..(3)..(37)..(38): Xaa is C or S
  MOD_RES (15)..(16)..(17)..(18)..(19): Xaa is A or G
  MOD_RES (20)..(21)..(22)..(23): Xaa is A or G or is absent
XGXGEVVMEPYVKLXXXXXXXXXFFLMSLSSLETPVXXAKPIS

SEQ ID NO: 44482 - protein, 38 aa, Artificial Sequence
  GFR-binding peptide
  MOD_RES (33)..(34): Xaa is C or S
  MOD_RES (11)..(12)..(13)..(14)..(15): Xaa is A or G
  MOD_RES (16)..(17)..(18)..(19): Xaa is A or G or is absent
DVVMGPYVKLXXXXXXXXXFFLMSLSSMKTPTXXPGAS

SEQ ID NO: 44483 - protein, 39 aa, Artificial Sequence
  GFR-binding peptide
  MOD_RES (33)..(34): Xaa is C or S
  MOD_RES (11)..(12)..(13)..(14)..(15): Xaa is A or G
  MOD_RES (16)..(17)..(18)..(19): Xaa is A or G or is absent
EEVIMPYVKLXXXXXXXXXFFLMSLSSTKVPAXXTSPVR

SEQ ID NO: 44484 - protein, 40 aa, Artificial Sequence
  GFR-binding peptide
  MOD_RES (2)..(34)..(35): Xaa is C or S
GXSRVVMNPYVKLIVNSSDDFFLVSLSSLKTPAXXPKPVH

SEQ ID NO: 44485 - protein, 38 aa, Artificial Sequence
  GFR-binding peptide
  MOD_RES (1)..(35)..(36): Xaa is C or S
  MOD_RES (13)..(14)..(15)..(16)..(17): Xaa is A or G
  MOD_RES (18)..(19)..(20)..(21): Xaa is A or G or is absent
XSEVVMDPYVKLXXXXXXXXXFFLISLSSLRTPVXXTP

SEQ ID NO: 44486 - protein, 35 aa, Artificial Sequence
  GFR-binding peptide
  MOD_RES (2)..(34)..(35): Xaa is C or S
GXRDVVMGPYVKLIIQQKDNFFLMSLSSMKTPTXX

SEQ ID NO: 44487 - protein, 37 aa, Artificial Sequence
  GFR-binding peptide
  MOD_RES (1)..(33)..(34): Xaa is C or S
XRDVVMGPYVKLIIQQKDNFFLMSLSSMKTPTXXPGA

SEQ ID NO: 44488 - protein, 39 aa, Artificial Sequence
  GFR-binding peptide
  MOD_RES (2)..(4)..(36)..(37): Xaa is C or S
RXGXESVAMGPYVKLYTVVGKDFFLISLSSLKTPVXXAK

SEQ ID NO: 44489 - protein, 36 aa, Artificial Sequence
  GFR-binding peptide
  MOD_RES (31)..(32): Xaa is C or S
EVVMDPYVKLVVNNAADFFLISLSSLRAPVXXSAPA

SEQ ID NO: 44490 - protein, 37 aa, Artificial Sequence
  GFR-binding peptide
  MOD_RES (2)..(4): Xaa is C or S
RXEXKNHQLFPYVKLHQGQHPKIRFFLMSLSSEETPV

SEQ ID NO: 44491 - protein, 40 aa, Artificial Sequence
  GFR-binding peptide
  MOD_RES (1)..(3)..(35)..(36): Xaa is C or S
XGXGEVVMEPYVKLVVKDYEDFFLMSLSSLETPVXXAKPI

SEQ ID NO: 44492 - protein, 35 aa, Artificial Sequence
  GFR-binding peptide
  MOD_RES (1)..(1): Xaa is C or S
  MOD_RES (14)..(15)..(16)..(17)..(18): Xaa is A or G
  MOD_RES (19)..(20)..(21)..(22): Xaa is A or G or is absent
XEAVSMGEPYVKLXXXXXXXXXFFLVSLSSLKTPV

SEQ ID NO: 44493 - protein, 33 aa, Artificial Sequence
  GFR-binding peptide
  MOD_RES (12)..(13)..(14)..(15)..(16): Xaa is A or G
  MOD_RES (17)..(18)..(19)..(20): Xaa is A or G or is absent
LHEELRPYVKLXXXXXXXXXFFLVSLSSHHVRS

SEQ ID NO: 44494 - protein, 41 aa, Artificial Sequence
  GFR-binding peptide
  MOD_RES (2)..(4)..(36)..(37): Xaa is C or S
RXGXSEVVMDPYVKLVVNNASDFFLISLSSLRTPVXXTPPT

SEQ ID NO: 44495 - protein, 39 aa, Artificial Sequence
  GFR-binding peptide
  MOD_RES (2)..(34): Xaa is C or S
GXSRVVMNPYVKLIVNSSDDFFLVSLSSLKTPAXTPKTV

SEQ ID NO: 44496 - protein, 38 aa, Artificial Sequence
  GFR-binding peptide
  MOD_RES (1)..(35)..(36): Xaa is C or S
  MOD_RES (13)..(14)..(15)..(16)..(17): Xaa is A or G
  MOD_RES (18)..(19)..(20)..(21): Xaa is A or G or is absent
XAKVVMNPYVKLXXXXXXXXXFFLVSLSSLKTPAXXAK

SEQ ID NO: 44497 - protein, 43 aa, Artificial Sequence
  GFR-binding peptide
  MOD_RES (2)..(37)..(38): Xaa is C or S
  MOD_RES (15)..(16)..(17)..(18)..(19): Xaa is A or G
  MOD_RES (20)..(21)..(22)..(23): Xaa is A or G or is absent
GXEAVSMGEPYVKLXXXXXXXXXFFLVSLSSLKTPVXXAKGVK

SEQ ID NO: 44498 - protein, 33 aa, Artificial Sequence
  GFR-binding peptide
  MOD_RES (1)..(33): Xaa is C or S
XSEVTMNPYVKLVVNKNEDFFLISLSSMKEPVX

SEQ ID NO: 44499 - protein, 40 aa, Artificial Sequence
  GFR-binding peptide
  MOD_RES (2)..(34)..(35): Xaa is C or S
GXSEVVMDPYVKLVVNNASDFFLISLSSLRTPVXXTPPTS

SEQ ID NO: 44500 - protein, 40 aa, Artificial Sequence
  GFR-binding peptide
  MOD_RES (2)..(34)..(35): Xaa is C or S
GXARVVMNPYVKLIVNSSDDFFLVSLSSLQTPAXXPKPVT

SEQ ID NO: 44501 - protein, 37 aa, Artificial Sequence
  GFR-binding peptide
  MOD_RES (32)..(33): Xaa is C or S
AEVVMDPYVKLVVNNAADFFLISLSSLRAPVXXSAPA

SEQ ID NO: 44502 - protein, 40 aa, Artificial Sequence
  GFR-binding peptide
  MOD_RES (2)..(4)..(37)..(38): Xaa is C or S
  MOD_RES (15)..(16)..(17)..(18)..(19): Xaa is A or G
  MOD_RES (20)..(21)..(22)..(23): Xaa is A or G or is absent
LXGXEEVIMPYVKLXXXXXXXXXFFLMSLSSTKVPAXXTS

SEQ ID NO: 44503 - protein, 38 aa, Artificial Sequence
  GFR-binding peptide
  MOD_RES (32)..(33): Xaa is C or S
GEVVMEPYVKLVVKDYEDFFLMSLSSLETPVXXAKPIS

SEQ ID NO: 44504 - protein, 40 aa, Artificial Sequence
  GFR-binding peptide
  MOD_RES (2)..(39): Xaa is C or S
  MOD_RES (15)..(16)..(17)..(18)..(19): Xaa is A or G
  MOD_RES (20)..(21)..(22)..(23): Xaa is A or G or is absent
AXELHEELRPYVKLXXXXXXXXXFFLVSLSSHHVRSPQXK

SEQ ID NO: 44505 - protein, 40 aa, Artificial Sequence
  GFR-binding peptide
  MOD_RES (1)..(3)..(35): Xaa is C or S
XGXSRVVMNPYVKLIVNSSDDFFLVSLSSLKTPAXTPKTV

SEQ ID NO: 44506 - protein, 38 aa, Artificial Sequence
  GFR-binding peptide
  MOD_RES (2)..(34)..(35): Xaa is C or S
GXAEVVMDPYVKLVVNNAADFFLISLSSLRAPVXXSAP

SEQ ID NO: 44507 - protein, 38 aa, Artificial Sequence
  GFR-binding peptide
  MOD_RES (2)..(34)..(35): Xaa is C or S
GXRDVVMGPYVKLIIQQKDNFFLMSLSSMKTPTXXPGA

SEQ ID NO: 44508 - protein, 39 aa, Artificial Sequence
  GFR-binding peptide
  MOD_RES (2)..(36): Xaa is C or S
EXKNHQLFPYVKLHQGQHPKIRFFLMSLSSEETPVXELG

SEQ ID NO: 44509 - protein, 37 aa, Artificial Sequence
  GFR-binding peptide
  MOD_RES (2)..(34)..(35): Xaa is C or S
GXRDVVMGPYVKLIIQQKDNFFLMSLSSMKTPTXXPG

SEQ ID NO: 44510 - protein, 37 aa, Artificial Sequence
  GFR-binding peptide
  MOD_RES (34)..(34): Xaa is C or S
  MOD_RES (12)..(13)..(14)..(15)..(16): Xaa is A or G
  MOD_RES (17)..(18)..(19)..(20): Xaa is A or G or is absent
KNHQLFPYVKLXXXXXXXXXFFLMSLSSEETPVXELG

SEQ ID NO: 44511 - protein, 33 aa, Artificial Sequence
  GFR-binding peptide
  MOD_RES (33)..(33): Xaa is C or S
  MOD_RES (11)..(12)..(13)..(14)..(15): Xaa is A or G
  MOD_RES (16)..(17)..(18)..(19): Xaa is A or G or is absent
EVVMDPYVKLXXXXXXXXXFFLISLSSLRAPVX

SEQ ID NO: 44512 - protein, 42 aa, Artificial Sequence
  GFR-binding peptide
  MOD_RES (2)..(4)..(36)..(37): Xaa is C or S
RXGXGEVVMEPYVKLVVKDYEDFFLMSLSSLETPVXXAKPIS

SEQ ID NO: 44513 - protein, 33 aa, Artificial Sequence
  GFR-binding peptide
HEELRPYVKLLKPKKRVYEFFLVSLSSHHVRSP

SEQ ID NO: 44514 - protein, 32 aa, Artificial Sequence
  GFR-binding peptide
  MOD_RES (1)..(32): Xaa is C or S
XSKVVMPYVKLVKPTRGVLFFISLSSLDQPVX

SEQ ID NO: 44515 - protein, 38 aa, Artificial Sequence
  GFR-binding peptide
  MOD_RES (2)..(4)..(38): Xaa is C or S
  MOD_RES (16)..(17)..(18)..(19)..(20): Xaa is A or G
  MOD_RES (21)..(22)..(23)..(24): Xaa is A or G or is absent
HXGXSRVVMNPYVKLXXXXXXXXXFFLVSLSSLKTPAX

SEQ ID NO: 44516 - protein, 39 aa, Artificial Sequence
  GFR-binding peptide
  MOD_RES (1)..(3)..(36)..(37): Xaa is C or S
XGXEAVSMGEPYVKLTPVGMDDFFLVSLSSLKTPVXXAK

SEQ ID NO: 44517 - protein, 38 aa, Artificial Sequence
  GFR-binding peptide
  MOD_RES (2)..(4)..(37)..(38): Xaa is C or S
  MOD_RES (15)..(16)..(17)..(18)..(19): Xaa is A or G
  MOD_RES (20)..(21)..(22)..(23): Xaa is A or G or is absent
SXKXSKVVMPYVKLXXXXXXXXXFFLISLSSLDQPVXX

SEQ ID NO: 44518 - protein, 36 aa, Artificial Sequence
  GFR-binding peptide
  MOD_RES (1)..(35)..(36): Xaa is C or S
  MOD_RES (13)..(14)..(15)..(16)..(17): Xaa is A or G
  MOD_RES (18)..(19)..(20)..(21): Xaa is A or G or is absent
XSRVVMNPYVKLXXXXXXXXXFFLVSLSSLKTPAXX

SEQ ID NO: 44519 - protein, 39 aa, Artificial Sequence
  GFR-binding peptide
  MOD_RES (1)..(3)..(35)..(36): Xaa is C or S
XGXSEVVMDPYVKLVVNNASDFFLISLSSLRTPVXXTPP

SEQ ID NO: 44520 - protein, 37 aa, Artificial Sequence
  GFR-binding peptide
  MOD_RES (1)..(3)..(35)..(36): Xaa is C or S
XGXRDVVMGPYVKLIIQQKDNFFLMSLSSMKTPTXXP

SEQ ID NO: 44521 - protein, 38 aa, Artificial Sequence
  GFR-binding peptide
  MOD_RES (1)..(3)..(35)..(36): Xaa is C or S
XGXARVVMNPYVKLIVNSSDDFFLVSLSSLQTPAXXPK

SEQ ID NO: 44522 - protein, 38 aa, Artificial Sequence
  GFR-binding peptide
  MOD_RES (33)..(34): Xaa is C or S
  MOD_RES (11)..(12)..(13)..(14)..(15): Xaa is A or G
  MOD_RES (16)..(17)..(18)..(19): Xaa is A or G or is absent
EVTMNPYVKLXXXXXXXXXFFLISLSSMKEPVXXPEPI

SEQ ID NO: 44523 - protein, 44 aa, Artificial Sequence
  GFR-binding peptide
  MOD_RES (1)..(3)..(40): Xaa is C or S
  MOD_RES (16)..(17)..(18)..(19)..(20): Xaa is A or G
  MOD_RES (21)..(22)..(23)..(24): Xaa is A or G or is absent
XAXELHEELRPYVKLXXXXXXXXXFFLVSLSSHHVRSPQXKVSS

SEQ ID NO: 44524 - protein, 31 aa, Artificial Sequence
  GFR-binding peptide
  MOD_RES (1)..(1): Xaa is C or S
XSKVIMPYVKLIKPTKGILFFISLSSLDQSV

SEQ ID NO: 44525 - protein, 36 aa, Artificial Sequence
  GFR-binding peptide
  MOD_RES (2)..(34)..(35): Xaa is C or S
GXAKVVMNPYVKLIVNNSSDFFLVSLSSLKTPAXXA

SEQ ID NO: 44526 - protein, 37 aa, Artificial Sequence
  GFR-binding peptide
  MOD_RES (1)..(33)..(34): Xaa is C or S
XSEVTMNPYVKLVVNKNEDFFLISLSSMKEPVXXPEP

SEQ ID NO: 44527 - protein, 42 aa, Artificial Sequence
  GFR-binding peptide
  MOD_RES (2)..(39): Xaa is C or S
  MOD_RES (15)..(16)..(17)..(18)..(19): Xaa is A or G
  MOD_RES (20)..(21)..(22)..(23): Xaa is A or G or is absent
AXELHEELRPYVKLXXXXXXXXXFFLVSLSSHHVRSPQXKVS

SEQ ID NO: 44528 - protein, 34 aa, Artificial Sequence
  GFR-binding peptide
  MOD_RES (2)..(4): Xaa is C or S
SXKXSKVIMPYVKLIKPTKGILFFISLSSLDQSV

SEQ ID NO: 44529 - protein, 41 aa, Artificial Sequence
  GFR-binding peptide
  MOD_RES (1)..(3)..(35)..(36): Xaa is C or S
XAXSEVTMNPYVKLVVNKNEDFFLISLSSMKEPVXXPEPIG

SEQ ID NO: 44530 - protein, 38 aa, Artificial Sequence
  GFR-binding peptide
  MOD_RES (34)..(34): Xaa is C or S
  MOD_RES (12)..(13)..(14)..(15)..(16): Xaa is A or G
  MOD_RES (17)..(18)..(19)..(20): Xaa is A or G or is absent
KNHQLFPYVKLXXXXXXXXXFFLMSLSSEETPVXELGE

SEQ ID NO: 44531 - protein, 39 aa, Artificial Sequence
  GFR-binding peptide
  MOD_RES (34)..(35): Xaa is C or S
  MOD_RES (12)..(13)..(14)..(15)..(16): Xaa is A or G
  MOD_RES (17)..(18)..(19)..(20): Xaa is A or G or is absent
ESVAMGPYVKLXXXXXXXXXFFLISLSSLKTPVXXAKSA

SEQ ID NO: 44532 - protein, 33 aa, Artificial Sequence
  GFR-binding peptide
  MOD_RES (31)..(32): Xaa is C or S
EVVMDPYVKLVVNNAADFFLISLSSLRAPVXXS

SEQ ID NO: 44533 - protein, 36 aa, Artificial Sequence
  GFR-binding peptide
  MOD_RES (1)..(33)..(34): Xaa is C or S
XESVAMGPYVKLYTVVGKDFFLISLSSLKTPVXXAK

SEQ ID NO: 44534 - protein, 38 aa, Artificial Sequence
  GFR-binding peptide
  MOD_RES (2)..(33)..(34): Xaa is C or S
KXSKVVMPYVKLVKPTRGVLFFISLSSLDQPVXXPSAS

SEQ ID NO: 44535 - protein, 35 aa, Artificial Sequence
  GFR-binding peptide
  MOD_RES (2)..(4): Xaa is C or S
RXGXSEVVMDPYVKLVVNNASDFFLISLSSLRTPV

SEQ ID NO: 44536 - protein, 38 aa, Artificial Sequence
  GFR-binding peptide
  MOD_RES (1)..(3)..(34)..(35): Xaa is C or S
XKXSKVIMPYVKLIKPTKGILFFISLSSLDQSVXXPSA

SEQ ID NO: 44537 - protein, 42 aa, Artificial Sequence
  GFR-binding peptide
  MOD_RES (2)..(4)..(37)..(38): Xaa is C or S
  MOD_RES (15)..(16)..(17)..(18)..(19): Xaa is A or G
  MOD_RES (20)..(21)..(22)..(23): Xaa is A or G or is absent
SXKXSKVVMPYVKLXXXXXXXXXFFLISLSSLDQPVXXPSAS

SEQ ID NO: 44538 - protein, 38 aa, Artificial Sequence
  GFR-binding peptide
  MOD_RES (2)..(4)..(38): Xaa is C or S
  MOD_RES (16)..(17)..(18)..(19)..(20): Xaa is A or G
  MOD_RES (21)..(22)..(23)..(24): Xaa is A or G or is absent
RXGXSEVVMDPYVKLXXXXXXXXXFFLISLSSLRTPVX

SEQ ID NO: 44539 - protein, 41 aa, Artificial Sequence
  GFR-binding peptide
  MOD_RES (1)..(36)..(37): Xaa is C or S
  MOD_RES (14)..(15)..(16)..(17)..(18): Xaa is A or G
  MOD_RES (19)..(20)..(21)..(22): Xaa is A or G or is absent
XEAVSMGEPYVKLXXXXXXXXXFFLVSLSSLKTPVXXAKGV

SEQ ID NO: 44540 - protein, 42 aa, Artificial Sequence
  GFR-binding peptide
  MOD_RES (2)..(36): Xaa is C or S
EXKNHQLFPYVKLHQGQHPKIRFFLMSLSSEETPVXELGEDN

SEQ ID NO: 44541 - protein, 37 aa, Artificial Sequence
  GFR-binding peptide
  MOD_RES (1)..(34)..(35): Xaa is C or S
XEAVSMGEPYVKLTPVGMDDFFLVSLSSLKTPVXXAK

SEQ ID NO: 44542 - protein, 35 aa, Artificial Sequence
  GFR-binding peptide
  MOD_RES (1)..(32)..(33): Xaa is C or S
XSRVIMPYVKLVKPKRGVLFFISLSSLAQPVXXPA

SEQ ID NO: 44543 - protein, 39 aa, Artificial Sequence
  GFR-binding peptide
  MOD_RES (34)..(35): Xaa is C or S
  MOD_RES (12)..(13)..(14)..(15)..(16): Xaa is A or G
  MOD_RES (17)..(18)..(19)..(20): Xaa is A or G or is absent
SRVVMNPYVKLXXXXXXXXXFFLVSLSSLKTPAXXPKPV

SEQ ID NO: 44544 - protein, 35 aa, Artificial Sequence
  GFR-binding peptide
  MOD_RES (32)..(33): Xaa is C or S
SEVVMDPYVKLVVNNASDFFLISLSSLRTPVXXTP

SEQ ID NO: 44545 - protein, 41 aa, Artificial Sequence
  GFR-binding peptide
  MOD_RES (37)..(37): Xaa is C or S
ELHEELRPYVKLLKPKKRVYEFFLVSLSSHHVRSPQXKVSS

SEQ ID NO: 44546 - protein, 32 aa, Artificial Sequence
  GFR-binding peptide
  MOD_RES (31)..(32): Xaa is C or S
SVAMGPYVKLYTVVGKDFFLISLSSLKTPVXX

SEQ ID NO: 44547 - protein, 36 aa, Artificial Sequence
  GFR-binding peptide
  MOD_RES (1)..(35)..(36): Xaa is C or S
  MOD_RES (13)..(14)..(15)..(16)..(17): Xaa is A or G
  MOD_RES (18)..(19)..(20)..(21): Xaa is A or G or is absent
XESVAMGPYVKLXXXXXXXXXFFLISLSSLKTPVXX

SEQ ID NO: 44548 - protein, 34 aa, Artificial Sequence
  GFR-binding peptide
  MOD_RES (34)..(34): Xaa is C or S
  MOD_RES (12)..(13)..(14)..(15)..(16): Xaa is A or G
  MOD_RES (17)..(18)..(19)..(20): Xaa is A or G or is absent
SEVVMDPYVKLXXXXXXXXXFFLISLSSLRTPVX

SEQ ID NO: 44549 - protein, 39 aa, Artificial Sequence
  GFR-binding peptide
  MOD_RES (1)..(3)..(35)..(36): Xaa is C or S
XGXARVVMNPYVKLIVNSSDDFFLVSLSSLQTPAXXPKP

SEQ ID NO: 44550 - protein, 44 aa, Artificial Sequence
  GFR-binding peptide
  MOD_RES (2)..(4)..(38)..(39): Xaa is C or S
  MOD_RES (16)..(17)..(18)..(19)..(20): Xaa is A or G
  MOD_RES (21)..(22)..(23)..(24): Xaa is A or G or is absent
RXAXSEVTMNPYVKLXXXXXXXXXFFLISLSSMKEPVXXPEPIG

SEQ ID NO: 44551 - protein, 42 aa, Artificial Sequence
  GFR-binding peptide
  MOD_RES (1)..(3)..(36)..(37): Xaa is C or S
  MOD_RES (14)..(15)..(16)..(17)..(18): Xaa is A or G
  MOD_RES (19)..(20)..(21)..(22): Xaa is A or G or is absent
XGXEEVIMPYVKLXXXXXXXXXFFLMSLSSTKVPAXXTSPVR

SEQ ID NO: 44552 - protein, 31 aa, Artificial Sequence
  GFR-binding peptide
AEVVMDPYVKLVVNNAADFFLISLSSLRAPV

SEQ ID NO: 44553 - protein, 37 aa, Artificial Sequence
  GFR-binding peptide
  MOD_RES (2)..(35)..(36): Xaa is C or S
  MOD_RES (13)..(14)..(15)..(16)..(17): Xaa is A or G
  MOD_RES (18)..(19)..(20)..(21): Xaa is A or G or is absent
KXSKVIMPYVKLXXXXXXXXXFFLISLSSLDQSVXXP

SEQ ID NO: 44554 - protein, 34 aa, Artificial Sequence
  GFR-binding peptide
  MOD_RES (31)..(32): Xaa is C or S
SRVIMPYVKLVKPKRGVLFFISLSSLAQPVXXPA

SEQ ID NO: 44555 - protein, 35 aa, Artificial Sequence
  GFR-binding peptide
  MOD_RES (31)..(32): Xaa is C or S
EVVMDPYVKLVVNNAADFFLISLSSLRAPVXXSAP

SEQ ID NO: 44556 - protein, 40 aa, Artificial Sequence
  GFR-binding peptide
  MOD_RES (1)..(3)..(35)..(36): Xaa is C or S
XGXSRVVMNPYVKLIVNSSDDFFLVSLSSLKTPAXXPKPV

SEQ ID NO: 44557 - protein, 41 aa, Artificial Sequence
  GFR-binding peptide
  MOD_RES (1)..(3)..(36)..(37): Xaa is C or S
  MOD_RES (14)..(15)..(16)..(17)..(18): Xaa is A or G
  MOD_RES (19)..(20)..(21)..(22): Xaa is A or G or is absent
XKXSKVVMPYVKLXXXXXXXXXFFLISLSSLDQPVXXPSAS

SEQ ID NO: 44558 - protein, 39 aa, Artificial Sequence
  GFR-binding peptide
  MOD_RES (33)..(34): Xaa is C or S
  MOD_RES (11)..(12)..(13)..(14)..(15): Xaa is A or G
  MOD_RES (16)..(17)..(18)..(19): Xaa is A or G or is absent
SRVIMPYVKLXXXXXXXXXFFLISLSSLAQPVXXPAASA

SEQ ID NO: 44559 - protein, 39 aa, Artificial Sequence
  GFR-binding peptide
  MOD_RES (33)..(33): Xaa is C or S
NHQLFPYVKLHQGQHPKIRFFLMSLSSEETPVXELGEDN

SEQ ID NO: 44560 - protein, 37 aa, Artificial Sequence
  GFR-binding peptide
  MOD_RES (2)..(4)..(35)..(36): Xaa is C or S
SXKXSRVIMPYVKLVKPKRGVLFFISLSSLAQPVXXP

SEQ ID NO: 44561 - protein, 39 aa, Artificial Sequence
  GFR-binding peptide
  MOD_RES (2)..(4)..(38)..(39): Xaa is C or S
  MOD_RES (16)..(17)..(18)..(19)..(20): Xaa is A or G
  MOD_RES (21)..(22)..(23)..(24): Xaa is A or G or is absent
RXGXESVAMGPYVKLXXXXXXXXXFFLISLSSLKTPVXX

SEQ ID NO: 44562 - protein, 36 aa, Artificial Sequence
  GFR-binding peptide
  MOD_RES (32)..(32): Xaa is C or S
SRVVMNPYVKLIVNSSDDFFLVSLSSLKTPAXTPKT

SEQ ID NO: 44563 - protein, 35 aa, Artificial Sequence
  GFR-binding peptide
  MOD_RES (31)..(32): Xaa is C or S
DVVMGPYVKLIIQQKDNFFLMSLSSMKTPTXXPGA

SEQ ID NO: 44564 - protein, 36 aa, Artificial Sequence
  GFR-binding peptide
  MOD_RES (2)..(4)..(36): Xaa is C or S
SXGXRDVVMGPYVKLIIQQKDNFFLMSLSSMKTPTX

SEQ ID NO: 44565 - protein, 34 aa, Artificial Sequence
  GFR-binding peptide
  MOD_RES (32)..(33): Xaa is C or S
ARVVMNPYVKLIVNSSDDFFLVSLSSLQTPAXXP

SEQ ID NO: 44566 - protein, 31 aa, Artificial Sequence
  GFR-binding peptide
  MOD_RES (31)..(31): Xaa is C or S
EVTMNPYVKLVVNKNEDFFLISLSSMKEPVX

SEQ ID NO: 44567 - protein, 40 aa, Artificial Sequence
  GFR-binding peptide
  MOD_RES (1)..(3)..(37)..(38): Xaa is C or S
  MOD_RES (15)..(16)..(17)..(18)..(19): Xaa is A or G
  MOD_RES (20)..(21)..(22)..(23): Xaa is A or G or is absent
XGXSRVVMNPYVKLXXXXXXXXXFFLVSLSSLKTPAXXPK

SEQ ID NO: 44568 - protein, 42 aa, Artificial Sequence
  GFR-binding peptide
  MOD_RES (2)..(36)..(37): Xaa is C or S
  MOD_RES (14)..(15)..(16)..(17)..(18): Xaa is A or G
  MOD_RES (19)..(20)..(21)..(22): Xaa is A or G or is absent
GXRDVVMGPYVKLXXXXXXXXXFFLMSLSSMKTPTXXPGASG

SEQ ID NO: 44569 - protein, 34 aa, Artificial Sequence
  GFR-binding peptide
  MOD_RES (33)..(34): Xaa is C or S
  MOD_RES (11)..(12)..(13)..(14)..(15): Xaa is A or G
  MOD_RES (16)..(17)..(18)..(19): Xaa is A or G or is absent
EVVMEPYVKLXXXXXXXXXFFLMSLSSLETPVXX

SEQ ID NO: 44570 - protein, 34 aa, Artificial Sequence
  GFR-binding peptide
  MOD_RES (34)..(34): Xaa is C or S
  MOD_RES (12)..(13)..(14)..(15)..(16): Xaa is A or G
  MOD_RES (17)..(18)..(19)..(20): Xaa is A or G or is absent
SEVTMNPYVKLXXXXXXXXXFFLISLSSMKEPVX

SEQ ID NO: 44571 - protein, 34 aa, Artificial Sequence
  GFR-binding peptide
  MOD_RES (31)..(32): Xaa is C or S
SVAMGPYVKLYTVVGKDFFLISLSSLKTPVXXAK

SEQ ID NO: 44572 - protein, 37 aa, Artificial Sequence
  GFR-binding peptide
  MOD_RES (1)..(3): Xaa is C or S
  MOD_RES (16)..(17)..(18)..(19)..(20): Xaa is A or G
  MOD_RES (21)..(22)..(23)..(24): Xaa is A or G or is absent
XAXELHEELRPYVKLXXXXXXXXXFFLVSLSSHHVRS

SEQ ID NO: 44573 - protein, 37 aa, Artificial Sequence
  GFR-binding peptide
  MOD_RES (2)..(4)..(36): Xaa is C or S
HXGXSRVVMNPYVKLIVNSSDDFFLVSLSSLKTPAXT

SEQ ID NO: 44574 - protein, 41 aa, Artificial Sequence
  GFR-binding peptide
  MOD_RES (2)..(4)..(36)..(37): Xaa is C or S
RXAXSEVTMNPYVKLVVNKNEDFFLISLSSMKEPVXXPEPI

SEQ ID NO: 44575 - protein, 33 aa, Artificial Sequence
  GFR-binding peptide
  MOD_RES (1)..(33): Xaa is C or S
XRDVVMGPYVKLIIQQKDNFFLMSLSSMKTPTX

SEQ ID NO: 44576 - protein, 35 aa, Artificial Sequence
  GFR-binding peptide
  MOD_RES (1)..(3)..(35): Xaa is C or S
XGXAEVVMDPYVKLVVNNAADFFLISLSSLRAPVX

SEQ ID NO: 44577 - protein, 35 aa, Artificial Sequence
  GFR-binding peptide
  MOD_RES (31)..(32): Xaa is C or S
SKVIMPYVKLIKPTKGILFFISLSSLDQSVXXPSA

SEQ ID NO: 44578 - protein, 42 aa, Artificial Sequence
  GFR-binding peptide
  MOD_RES (1)..(38): Xaa is C or S
XELHEELRPYVKLLKPKKRVYEFFLVSLSSHHVRSPQXKVSS

SEQ ID NO: 44579 - protein, 40 aa, Artificial Sequence
  GFR-binding peptide
  MOD_RES (2)..(36)..(37): Xaa is C or S
  MOD_RES (14)..(15)..(16)..(17)..(18): Xaa is A or G
  MOD_RES (19)..(20)..(21)..(22): Xaa is A or G or is absent
GXAEVVMDPYVKLXXXXXXXXXFFLISLSSLRAPVXXSAP

SEQ ID NO: 44580 - protein, 39 aa, Artificial Sequence
  GFR-binding peptide
  MOD_RES (1)..(34)..(35): Xaa is C or S
  MOD_RES (12)..(13)..(14)..(15)..(16): Xaa is A or G
  MOD_RES (17)..(18)..(19)..(20): Xaa is A or G or is absent
XSKVIMPYVKLXXXXXXXXXFFLISLSSLDQSVXXPSAS

SEQ ID NO: 44581 - protein, 38 aa, Artificial Sequence
  GFR-binding peptide
  MOD_RES (1)..(3)..(35)..(36): Xaa is C or S
XGXAKVVMNPYVKLIVNNSSDFFLVSLSSLKTPAXXAK

SEQ ID NO: 44582 - protein, 35 aa, Artificial Sequence
  GFR-binding peptide
  MOD_RES (1)..(35): Xaa is C or S
  MOD_RES (13)..(14)..(15)..(16)..(17): Xaa is A or G
  MOD_RES (18)..(19)..(20)..(21): Xaa is A or G or is absent
XAKVVMNPYVKLXXXXXXXXXFFLVSLSSLKTPAX

SEQ ID NO: 44583 - protein, 34 aa, Artificial Sequence
  GFR-binding peptide
  MOD_RES (1)..(1): Xaa is C or S
XKNHQLFPYVKLHQGQHPKIRFFLMSLSSEETPV

SEQ ID NO: 44584 - protein, 33 aa, Artificial Sequence
  GFR-binding peptide
  MOD_RES (1)..(1): Xaa is C or S
  MOD_RES (12)..(13)..(14)..(15)..(16): Xaa is A or G
  MOD_RES (17)..(18)..(19)..(20): Xaa is A or G or is absent
XSRVIMPYVKLXXXXXXXXXFFLISLSSLAQPV

SEQ ID NO: 44585 - protein, 38 aa, Artificial Sequence
  GFR-binding peptide
  MOD_RES (2)..(36)..(37): Xaa is C or S
  MOD_RES (14)..(15)..(16)..(17)..(18): Xaa is A or G
  MOD_RES (19)..(20)..(21)..(22): Xaa is A or G or is absent
GXSEVVMDPYVKLXXXXXXXXXFFLISLSSLRTPVXXT

SEQ ID NO: 44586 - protein, 38 aa, Artificial Sequence
  GFR-binding peptide
  MOD_RES (1)..(33): Xaa is C or S
XSRVVMNPYVKLIVNSSDDFFLVSLSSLKTPAXTPKTV

SEQ ID NO: 44587 - protein, 36 aa, Artificial Sequence
  GFR-binding peptide
  MOD_RES (1)..(3): Xaa is C or S
  MOD_RES (15)..(16)..(17)..(18)..(19): Xaa is A or G
  MOD_RES (20)..(21)..(22)..(23): Xaa is A or G or is absent
XGXGEVVMEPYVKLXXXXXXXXXFFLMSLSSLETPV

SEQ ID NO: 44588 - protein, 38 aa, Artificial Sequence
  GFR-binding peptide
  MOD_RES (2)..(4)..(37)..(38): Xaa is C or S
  MOD_RES (15)..(16)..(17)..(18)..(19): Xaa is A or G
  MOD_RES (20)..(21)..(22)..(23): Xaa is A or G or is absent
SXKXSKVIMPYVKLXXXXXXXXXFFLISLSSLDQSVXX

SEQ ID NO: 44589 - protein, 33 aa, Artificial Sequence
  GFR-binding peptide
  MOD_RES (33)..(33): Xaa is C or S
  MOD_RES (11)..(12)..(13)..(14)..(15): Xaa is A or G
  MOD_RES (16)..(17)..(18)..(19): Xaa is A or G or is absent
SVAMGPYVKLXXXXXXXXXFFLISLSSLKTPVX

SEQ ID NO: 44590 - protein, 34 aa, Artificial Sequence
  GFR-binding peptide
  MOD_RES (1)..(33)..(34): Xaa is C or S
XAEVVMDPYVKLVVNNAADFFLISLSSLRAPVXX

SEQ ID NO: 44591 - protein, 32 aa, Artificial Sequence
  GFR-binding peptide
  MOD_RES (2)..(2): Xaa is C or S
KXSKVVMPYVKLVKPTRGVLFFISLSSLDQPV

SEQ ID NO: 44592 - protein, 38 aa, Artificial Sequence
  GFR-binding peptide
  MOD_RES (1)..(35)..(36): Xaa is C or S
  MOD_RES (13)..(14)..(15)..(16)..(17): Xaa is A or G
  MOD_RES (18)..(19)..(20)..(21): Xaa is A or G or is absent
XGEVVMEPYVKLXXXXXXXXXFFLMSLSSLETPVXXAK

SEQ ID NO: 44593 - protein, 41 aa, Artificial Sequence
  GFR-binding peptide
  MOD_RES (1)..(3)..(35): Xaa is C or S
XGXSRVVMNPYVKLIVNSSDDFFLVSLSSLKTPAXTPKTVH

SEQ ID NO: 44594 - protein, 38 aa, Artificial Sequence
  GFR-binding peptide
  MOD_RES (2)..(36): Xaa is C or S
  MOD_RES (14)..(15)..(16)..(17)..(18): Xaa is A or G
  MOD_RES (19)..(20)..(21)..(22): Xaa is A or G or is absent
GXSRVVMNPYVKLXXXXXXXXXFFLVSLSSLKTPAXTP

SEQ ID NO: 44595 - protein, 40 aa, Artificial Sequence
  GFR-binding peptide
  MOD_RES (1)..(35)..(36): Xaa is C or S
  MOD_RES (13)..(14)..(15)..(16)..(17): Xaa is A or G
  MOD_RES (18)..(19)..(20)..(21): Xaa is A or G or is absent
XAEVVMDPYVKLXXXXXXXXXFFLISLSSLRAPVXXSAPA

SEQ ID NO: 44596 - protein, 39 aa, Artificial Sequence
  GFR-binding peptide
  MOD_RES (36)..(36): Xaa is C or S
LHEELRPYVKLLKPKKRVYEFFLVSLSSHHVRSPQXKVS

SEQ ID NO: 44597 - protein, 37 aa, Artificial Sequence
  GFR-binding peptide
  MOD_RES (2)..(36)..(37): Xaa is C or S
  MOD_RES (14)..(15)..(16)..(17)..(18): Xaa is A or G
  MOD_RES (19)..(20)..(21)..(22): Xaa is A or G or is absent
AXSEVTMNPYVKLXXXXXXXXXFFLISLSSMKEPVXX

SEQ ID NO: 44598 - protein, 38 aa, Artificial Sequence
  GFR-binding peptide
  MOD_RES (1)..(3)..(35)..(36): Xaa is C or S
XGXSEVVMDPYVKLVVNNASDFFLISLSSLRTPVXXTP

SEQ ID NO: 44599 - protein, 43 aa, Artificial Sequence
  GFR-binding peptide
  MOD_RES (2)..(4)..(37)..(38): Xaa is C or S
  MOD_RES (15)..(16)..(17)..(18)..(19): Xaa is A or G
  MOD_RES (20)..(21)..(22)..(23): Xaa is A or G or is absent
SXKXSRVIMPYVKLXXXXXXXXXFFLISLSSLAQPVXXPAASA

SEQ ID NO: 44600 - protein, 42 aa, Artificial Sequence
  GFR-binding peptide
  MOD_RES (2)..(4)..(38)..(39): Xaa is C or S
  MOD_RES (16)..(17)..(18)..(19)..(20): Xaa is A or G
  MOD_RES (21)..(22)..(23)..(24): Xaa is A or G or is absent
RXAXSEVTMNPYVKLXXXXXXXXXFFLISLSSMKEPVXXPEP

SEQ ID NO: 44601 - protein, 32 aa, Artificial Sequence
  GFR-binding peptide
  MOD_RES (31)..(32): Xaa is C or S
EVTMNPYVKLVVNKNEDFFLISLSSMKEPVXX

SEQ ID NO: 44602 - protein, 39 aa, Artificial Sequence
  GFR-binding peptide
  MOD_RES (34)..(34): Xaa is C or S
  MOD_RES (12)..(13)..(14)..(15)..(16): Xaa is A or G
  MOD_RES (17)..(18)..(19)..(20): Xaa is A or G or is absent
KNHQLFPYVKLXXXXXXXXXFFLMSLSSEETPVXELGED

SEQ ID NO: 44603 - protein, 38 aa, Artificial Sequence
  GFR-binding peptide
  MOD_RES (33)..(34): Xaa is C or S
  MOD_RES (11)..(12)..(13)..(14)..(15): Xaa is A or G
  MOD_RES (16)..(17)..(18)..(19): Xaa is A or G or is absent
SKVVMPYVKLXXXXXXXXXFFLISLSSLDQPVXXPSAS

SEQ ID NO: 44604 - protein, 37 aa, Artificial Sequence
  GFR-binding peptide
  MOD_RES (31)..(32): Xaa is C or S
SVAMGPYVKLYTVVGKDFFLISLSSLKTPVXXAKSAK

SEQ ID NO: 44605 - protein, 37 aa, Artificial Sequence
  GFR-binding peptide
  MOD_RES (2)..(34): Xaa is C or S
GXSRVVMNPYVKLIVNSSDDFFLVSLSSLKTPAXTPK

SEQ ID NO: 44606 - protein, 37 aa, Artificial Sequence
  GFR-binding peptide
  MOD_RES (2)..(4)..(36)..(37): Xaa is C or S
RXGXGEVVMEPYVKLVVKDYEDFFLMSLSSLETPVXX

SEQ ID NO: 44607 - protein, 33 aa, Artificial Sequence
  GFR-binding peptide
  MOD_RES (1)..(32)..(33): Xaa is C or S
XEEVIMPYVKLLLVRGNDFFLMSLSSTKVPAXX

SEQ ID NO: 44608 - protein, 34 aa, Artificial Sequence
  GFR-binding peptide
  MOD_RES (1)..(34): Xaa is C or S
  MOD_RES (12)..(13)..(14)..(15)..(16): Xaa is A or G
  MOD_RES (17)..(18)..(19)..(20): Xaa is A or G or is absent
XSKVIMPYVKLXXXXXXXXXFFLISLSSLDQSVX

SEQ ID NO: 44609 - protein, 33 aa, Artificial Sequence
  GFR-binding peptide
  MOD_RES (31)..(32): Xaa is C or S
EVTMNPYVKLVVNKNEDFFLISLSSMKEPVXXP

SEQ ID NO: 44610 - protein, 33 aa, Artificial Sequence
  GFR-binding peptide
  MOD_RES (32)..(33): Xaa is C or S
AEVVMDPYVKLVVNNAADFFLISLSSLRAPVXX

SEQ ID NO: 44611 - protein, 41 aa, Artificial Sequence
  GFR-binding peptide
  MOD_RES (2)..(4)..(38)..(39): Xaa is C or S
  MOD_RES (16)..(17)..(18)..(19)..(20): Xaa is A or G
  MOD_RES (21)..(22)..(23)..(24): Xaa is A or G or is absent
SXGXRDVVMGPYVKLXXXXXXXXXFFLMSLSSMKTPTXXPG

SEQ ID NO: 44612 - protein, 39 aa, Artificial Sequence
  GFR-binding peptide
  MOD_RES (33)..(34): Xaa is C or S
  MOD_RES (11)..(12)..(13)..(14)..(15): Xaa is A or G
  MOD_RES (16)..(17)..(18)..(19): Xaa is A or G or is absent
SKVVMPYVKLXXXXXXXXXFFLISLSSLDQPVXXPSASA

SEQ ID NO: 44613 - protein, 34 aa, Artificial Sequence
  GFR-binding peptide
  MOD_RES (1)..(33)..(34): Xaa is C or S
XSEVVMDPYVKLVVNNASDFFLISLSSLRTPVXX

SEQ ID NO: 44614 - protein, 32 aa, Artificial Sequence
  GFR-binding peptide
  MOD_RES (1)..(1): Xaa is C or S
XSEVTMNPYVKLVVNKNEDFFLISLSSMKEPV

SEQ ID NO: 44615 - protein, 41 aa, Artificial Sequence
  GFR-binding peptide
  MOD_RES (2)..(4)..(37)..(38): Xaa is C or S
  MOD_RES (15)..(16)..(17)..(18)..(19): Xaa is A or G
  MOD_RES (20)..(21)..(22)..(23): Xaa is A or G or is absent
SXKXSKVVMPYVKLXXXXXXXXXFFLISLSSLDQPVXXPSA

SEQ ID NO: 44616 - protein, 34 aa, Artificial Sequence
  GFR-binding peptide
  MOD_RES (1)..(3): Xaa is C or S
XGXAKVVMNPYVKLIVNNSSDFFLVSLSSLKTPA

SEQ ID NO: 44617 - protein, 38 aa, Artificial Sequence
  GFR-binding peptide
  MOD_RES (1)..(35): Xaa is C or S
  MOD_RES (13)..(14)..(15)..(16)..(17): Xaa is A or G
  MOD_RES (18)..(19)..(20)..(21): Xaa is A or G or is absent
XSRVVMNPYVKLXXXXXXXXXFFLVSLSSLKTPAXTPK

SEQ ID NO: 44618 - protein, 40 aa, Artificial Sequence
  GFR-binding peptide
  MOD_RES (34)..(35): Xaa is C or S
  MOD_RES (12)..(13)..(14)..(15)..(16): Xaa is A or G
  MOD_RES (17)..(18)..(19)..(20): Xaa is A or G or is absent
SEVTMNPYVKLXXXXXXXXXFFLISLSSMKEPVXXPEPIG

SEQ ID NO: 44619 - protein, 33 aa, Artificial Sequence
  GFR-binding peptide
  MOD_RES (12)..(13)..(14)..(15)..(16): Xaa is A or G
  MOD_RES (17)..(18)..(19)..(20): Xaa is A or G or is absent
GEVVMEPYVKLXXXXXXXXXFFLMSLSSLETPV

SEQ ID NO: 44620 - protein, 37 aa, Artificial Sequence
  GFR-binding peptide
  MOD_RES (32)..(33): Xaa is C or S
SEVVMDPYVKLVVNNASDFFLISLSSLRTPVXXTPPT

SEQ ID NO: 44621 - protein, 40 aa, Artificial Sequence
  GFR-binding peptide
  MOD_RES (1)..(3)..(34)..(35): Xaa is C or S
XGXEEVIMPYVKLLLVRGNDFFLMSLSSTKVPAXXTSPVR

SEQ ID NO: 44622 - protein, 35 aa, Artificial Sequence
  GFR-binding peptide
  MOD_RES (31)..(32): Xaa is C or S
EVVMEPYVKLVVKDYEDFFLMSLSSLETPVXXAKP

SEQ ID NO: 44623 - protein, 37 aa, Artificial Sequence
  GFR-binding peptide
  MOD_RES (2)..(4): Xaa is C or S
  MOD_RES (16)..(17)..(18)..(19)..(20): Xaa is A or G
  MOD_RES (21)..(22)..(23)..(24): Xaa is A or G or is absent
RXEXKNHQLFPYVKLXXXXXXXXXFFLMSLSSEETPV

SEQ ID NO: 44624 - protein, 41 aa, Artificial Sequence
  GFR-binding peptide
  MOD_RES (1)..(3)..(38)..(39): Xaa is C or S
  MOD_RES (16)..(17)..(18)..(19)..(20): Xaa is A or G
  MOD_RES (21)..(22)..(23)..(24): Xaa is A or G or is absent
XGXEAVSMGEPYVKLXXXXXXXXXFFLVSLSSLKTPVXXAK

SEQ ID NO: 44625 - protein, 33 aa, Artificial Sequence
  GFR-binding peptide
  MOD_RES (31)..(32): Xaa is C or S
KVVMNPYVKLIVNNSSDFFLVSLSSLKTPAXXA

SEQ ID NO: 44626 - protein, 39 aa, Artificial Sequence
  GFR-binding peptide
  MOD_RES (1)..(35): Xaa is C or S
  MOD_RES (13)..(14)..(15)..(16)..(17): Xaa is A or G
  MOD_RES (18)..(19)..(20)..(21): Xaa is A or G or is absent
XSRVVMNPYVKLXXXXXXXXXFFLVSLSSLKTPAXTPKT

SEQ ID NO: 44627 - protein, 37 aa, Artificial Sequence
  GFR-binding peptide
  MOD_RES (35)..(35): Xaa is C or S
  MOD_RES (11)..(12)..(13)..(14)..(15): Xaa is A or G
  MOD_RES (16)..(17)..(18)..(19): Xaa is A or G or is absent
HEELRPYVKLXXXXXXXXXFFLVSLSSHHVRSPQXKV

SEQ ID NO: 44628 - protein, 36 aa, Artificial Sequence
  GFR-binding peptide
  MOD_RES (2)..(4): Xaa is C or S
  MOD_RES (15)..(16)..(17)..(18)..(19): Xaa is A or G
  MOD_RES (20)..(21)..(22)..(23): Xaa is A or G or is absent
SXKXSKVVMPYVKLXXXXXXXXXFFLISLSSLDQPV

SEQ ID NO: 44629 - protein, 31 aa, Artificial Sequence
  GFR-binding peptide
  MOD_RES (31)..(31): Xaa is C or S
EVVMDPYVKLVVNNASDFFLISLSSLRTPVX

SEQ ID NO: 44630 - protein, 38 aa, Artificial Sequence
  GFR-binding peptide
  MOD_RES (33)..(34): Xaa is C or S
  MOD_RES (11)..(12)..(13)..(14)..(15): Xaa is A or G
  MOD_RES (16)..(17)..(18)..(19): Xaa is A or G or is absent
EVVMDPYVKLXXXXXXXXXFFLISLSSLRAPVXXSAPA

SEQ ID NO: 44631 - protein, 39 aa, Artificial Sequence
  GFR-binding peptide
  MOD_RES (1)..(3)..(35)..(36): Xaa is C or S
XGXSRVVMNPYVKLIVNSSDDFFLVSLSSLKTPAXXPKP

SEQ ID NO: 44632 - protein, 40 aa, Artificial Sequence
  GFR-binding peptide
  MOD_RES (1)..(3)..(37)..(38): Xaa is C or S
  MOD_RES (15)..(16)..(17)..(18)..(19): Xaa is A or G
  MOD_RES (20)..(21)..(22)..(23): Xaa is A or G or is absent
XGXGEVVMEPYVKLXXXXXXXXXFFLMSLSSLETPVXXAK

SEQ ID NO: 44633 - protein, 41 aa, Artificial Sequence
  GFR-binding peptide
  MOD_RES (2)..(4)..(38)..(39): Xaa is C or S
  MOD_RES (16)..(17)..(18)..(19)..(20): Xaa is A or G
  MOD_RES (21)..(22)..(23)..(24): Xaa is A or G or is absent
HXGXARVVMNPYVKLXXXXXXXXXFFLVSLSSLQTPAXXPK

SEQ ID NO: 44634 - protein, 35 aa, Artificial Sequence
  GFR-binding peptide
  MOD_RES (34)..(35): Xaa is C or S
  MOD_RES (12)..(13)..(14)..(15)..(16): Xaa is A or G
  MOD_RES (17)..(18)..(19)..(20): Xaa is A or G or is absent
SEVTMNPYVKLXXXXXXXXXFFLISLSSMKEPVXX

SEQ ID NO: 44635 - protein, 34 aa, Artificial Sequence
  GFR-binding peptide
  MOD_RES (2)..(34): Xaa is C or S
GXGEVVMEPYVKLVVKDYEDFFLMSLSSLETPVX

SEQ ID NO: 44636 - protein, 33 aa, Artificial Sequence
  GFR-binding peptide
  MOD_RES (2)..(2): Xaa is C or S
GXRDVVMGPYVKLIIQQKDNFFLMSLSSMKTPT

SEQ ID NO: 44637 - protein, 35 aa, Artificial Sequence
  GFR-binding peptide
  MOD_RES (2)..(34)..(35): Xaa is C or S
GXSRVVMNPYVKLIVNSSDDFFLVSLSSLKTPAXX

SEQ ID NO: 44638 - protein, 41 aa, Artificial Sequence
  GFR-binding peptide
  MOD_RES (37)..(37): Xaa is C or S
  MOD_RES (13)..(14)..(15)..(16)..(17): Xaa is A or G
  MOD_RES (18)..(19)..(20)..(21): Xaa is A or G or is absent
ELHEELRPYVKLXXXXXXXXXFFLVSLSSHHVRSPQXKVSS

SEQ ID NO: 44639 - protein, 36 aa, Artificial Sequence
  GFR-binding peptide
  MOD_RES (1)..(3)..(36): Xaa is C or S
  MOD_RES (14)..(15)..(16)..(17)..(18): Xaa is A or G
  MOD_RES (19)..(20)..(21)..(22): Xaa is A or G or is absent
XKXSKVVMPYVKLXXXXXXXXXFFLISLSSLDQPVX

SEQ ID NO: 44640 - protein, 34 aa, Artificial Sequence
  GFR-binding peptide
  MOD_RES (11)..(12)..(13)..(14)..(15): Xaa is A or G
  MOD_RES (16)..(17)..(18)..(19): Xaa is A or G or is absent
HEELRPYVKLXXXXXXXXXFFLVSLSSHHVRSPQ

SEQ ID NO: 44641 - protein, 43 aa, Artificial Sequence
  GFR-binding peptide
  MOD_RES (2)..(4)..(38)..(39): Xaa is C or S
  MOD_RES (16)..(17)..(18)..(19)..(20): Xaa is A or G
  MOD_RES (21)..(22)..(23)..(24): Xaa is A or G or is absent
RXGXESVAMGPYVKLXXXXXXXXXFFLISLSSLKTPVXXAKSA

SEQ ID NO: 44642 - protein, 36 aa, Artificial Sequence
  GFR-binding peptide
  MOD_RES (31)..(31): Xaa is C or S
RVVMNPYVKLIVNSSDDFFLVSLSSLKTPAXTPKTV

SEQ ID NO: 44643 - protein, 34 aa, Artificial Sequence
  GFR-binding peptide
  MOD_RES (2)..(2): Xaa is C or S
  MOD_RES (13)..(14)..(15)..(16)..(17): Xaa is A or G
  MOD_RES (18)..(19)..(20)..(21): Xaa is A or G or is absent
KXSKVIMPYVKLXXXXXXXXXFFLISLSSLDQSV

SEQ ID NO: 44644 - protein, 37 aa, Artificial Sequence
  GFR-binding peptide
  MOD_RES (2)..(4)..(37): Xaa is C or S
  MOD_RES (15)..(16)..(17)..(18)..(19): Xaa is A or G
  MOD_RES (20)..(21)..(22)..(23): Xaa is A or G or is absent
LXGXEEVIMPYVKLXXXXXXXXXFFLMSLSSTKVPAX

SEQ ID NO: 44645 - protein, 38 aa, Artificial Sequence
  GFR-binding peptide
  MOD_RES (1)..(3)..(35)..(36): Xaa is C or S
XGXSRVVMNPYVKLIVNSSDDFFLVSLSSLKTPAXXPK

SEQ ID NO: 44646 - protein, 40 aa, Artificial Sequence
  GFR-binding peptide
  MOD_RES (1)..(34)..(35): Xaa is C or S
  MOD_RES (12)..(13)..(14)..(15)..(16): Xaa is A or G
  MOD_RES (17)..(18)..(19)..(20): Xaa is A or G or is absent
XSKVVMPYVKLXXXXXXXXXFFLISLSSLDQPVXXPSASA

SEQ ID NO: 44647 - protein, 37 aa, Artificial Sequence
  GFR-binding peptide
  MOD_RES (1)..(32)..(33): Xaa is C or S
XSKVVMPYVKLVKPTRGVLFFISLSSLDQPVXXPSAS

SEQ ID NO: 44648 - protein, 39 aa, Artificial Sequence
  GFR-binding peptide
  MOD_RES (1)..(35)..(36): Xaa is C or S
  MOD_RES (13)..(14)..(15)..(16)..(17): Xaa is A or G
  MOD_RES (18)..(19)..(20)..(21): Xaa is A or G or is absent
XSEVTMNPYVKLXXXXXXXXXFFLISLSSMKEPVXXPEP

SEQ ID NO: 44649 - protein, 34 aa, Artificial Sequence
  GFR-binding peptide
  MOD_RES (33)..(33): Xaa is C or S
  MOD_RES (11)..(12)..(13)..(14)..(15): Xaa is A or G
  MOD_RES (16)..(17)..(18)..(19): Xaa is A or G or is absent
RVVMNPYVKLXXXXXXXXXFFLVSLSSLKTPAXT

SEQ ID NO: 44650 - protein, 34 aa, Artificial Sequence
  GFR-binding peptide
  MOD_RES (33)..(34): Xaa is C or S
  MOD_RES (11)..(12)..(13)..(14)..(15): Xaa is A or G
  MOD_RES (16)..(17)..(18)..(19): Xaa is A or G or is absent
EVVMDPYVKLXXXXXXXXXFFLISLSSLRTPVXX

SEQ ID NO: 44651 - protein, 42 aa, Artificial Sequence
  GFR-binding peptide
  MOD_RES (2)..(4)..(36)..(37): Xaa is C or S
HXGXSRVVMNPYVKLIVNSSDDFFLVSLSSLKTPAXXPKPVH

SEQ ID NO: 44652 - protein, 42 aa, Artificial Sequence
  GFR-binding peptide
  MOD_RES (2)..(4)..(36)..(37): Xaa is C or S
RXGXGEVVMDPYVKLVVKENEDFFLMSLSSLETPVXXAKPIK

SEQ ID NO: 44653 - protein, 36 aa, Artificial Sequence
  GFR-binding peptide
  MOD_RES (2)..(34)..(35): Xaa is C or S
GXESVAMGPYVKLYTVVGKDFFLISLSSLKTPVXXA

SEQ ID NO: 44654 - protein, 33 aa, Artificial Sequence
  GFR-binding peptide
  MOD_RES (12)..(13)..(14)..(15)..(16): Xaa is A or G
  MOD_RES (17)..(18)..(19)..(20): Xaa is A or G or is absent
AEVVMDPYVKLXXXXXXXXXFFLISLSSLRAPV

SEQ ID NO: 44655 - protein, 32 aa, Artificial Sequence
  GFR-binding peptide
  MOD_RES (1)..(1): Xaa is C or S
XAKVVMNPYVKLIVNNSSDFFLVSLSSLKTPA

SEQ ID NO: 44656 - protein, 39 aa, Artificial Sequence
  GFR-binding peptide
  MOD_RES (1)..(3): Xaa is C or S
XAXELHEELRPYVKLLKPKKRVYEFFLVSLSSHHVRSPQ

SEQ ID NO: 44657 - protein, 43 aa, Artificial Sequence
  GFR-binding peptide
  MOD_RES (2)..(4)..(37)..(38): Xaa is C or S
RXGXEAVSMGEPYVKLTPVGMDDFFLVSLSSLKTPVXXAKGVK

SEQ ID NO: 44658 - protein, 37 aa, Artificial Sequence
  GFR-binding peptide
  MOD_RES (2)..(36)..(37): Xaa is C or S
  MOD_RES (14)..(15)..(16)..(17)..(18): Xaa is A or G
  MOD_RES (19)..(20)..(21)..(22): Xaa is A or G or is absent
GXSEVVMDPYVKLXXXXXXXXXFFLISLSSLRTPVXX

SEQ ID NO: 44659 - protein, 41 aa, Artificial Sequence
  GFR-binding peptide
  MOD_RES (1)..(3)..(40): Xaa is C or S
XAXELHEELRPYVKLLKPKKRVYEFFLVSLSSHHVRSPQXK

SEQ ID NO: 44660 - protein, 38 aa, Artificial Sequence
  GFR-binding peptide
  MOD_RES (34)..(35): Xaa is C or S
  MOD_RES (12)..(13)..(14)..(15)..(16): Xaa is A or G
  MOD_RES (17)..(18)..(19)..(20): Xaa is A or G or is absent
RDVVMGPYVKLXXXXXXXXXFFLMSLSSMKTPTXXPGA

SEQ ID NO: 44661 - protein, 36 aa, Artificial Sequence
  GFR-binding peptide
  MOD_RES (34)..(35): Xaa is C or S
  MOD_RES (12)..(13)..(14)..(15)..(16): Xaa is A or G
  MOD_RES (17)..(18)..(19)..(20): Xaa is A or G or is absent
SEVVMDPYVKLXXXXXXXXXFFLISLSSLRTPVXXT

SEQ ID NO: 44662 - protein, 39 aa, Artificial Sequence
  GFR-binding peptide
  MOD_RES (1)..(34)..(35): Xaa is C or S
XEAVSMGEPYVKLTPVGMDDFFLVSLSSLKTPVXXAKGV

SEQ ID NO: 44663 - protein, 41 aa, Artificial Sequence
  GFR-binding peptide
  MOD_RES (1)..(38): Xaa is C or S
  MOD_RES (14)..(15)..(16)..(17)..(18): Xaa is A or G
  MOD_RES (19)..(20)..(21)..(22): Xaa is A or G or is absent
XELHEELRPYVKLXXXXXXXXXFFLVSLSSHHVRSPQXKVS

SEQ ID NO: 44664 - protein, 44 aa, Artificial Sequence
  GFR-binding peptide
  MOD_RES (2)..(4)..(38)..(39): Xaa is C or S
  MOD_RES (16)..(17)..(18)..(19)..(20): Xaa is A or G
  MOD_RES (21)..(22)..(23)..(24): Xaa is A or G or is absent
RXGXSEVVMDPYVKLXXXXXXXXXFFLISLSSLRTPVXXTPPTS

SEQ ID NO: 44665 - protein, 40 aa, Artificial Sequence
  GFR-binding peptide
  MOD_RES (2)..(34)..(35): Xaa is C or S
GXAEVVMDPYVKLVVNNAADFFLISLSSLRAPVXXSAPAA

SEQ ID NO: 44666 - protein, 37 aa, Artificial Sequence
  GFR-binding peptide
  MOD_RES (1)..(35)..(36): Xaa is C or S
  MOD_RES (13)..(14)..(15)..(16)..(17): Xaa is A or G
  MOD_RES (18)..(19)..(20)..(21): Xaa is A or G or is absent
XSRVVMNPYVKLXXXXXXXXXFFLVSLSSLKTPAXXP

SEQ ID NO: 44667 - protein, 37 aa, Artificial Sequence
  GFR-binding peptide
  MOD_RES (1)..(3)..(34)..(35): Xaa is C or S
XGXEEVIMPYVKLLLVRGNDFFLMSLSSTKVPAXXTS

SEQ ID NO: 44668 - protein, 37 aa, Artificial Sequence
  GFR-binding peptide
  MOD_RES (31)..(32): Xaa is C or S
EVVMDPYVKLVVNNASDFFLISLSSLRTPVXXTPPTS

SEQ ID NO: 44669 - protein, 31 aa, Artificial Sequence
  GFR-binding peptide
  MOD_RES (31)..(31): Xaa is C or S
SVAMGPYVKLYTVVGKDFFLISLSSLKTPVX

SEQ ID NO: 44670 - protein, 42 aa, Artificial Sequence
  GFR-binding peptide
  MOD_RES (2)..(4)..(38)..(39): Xaa is C or S
  MOD_RES (16)..(17)..(18)..(19)..(20): Xaa is A or G
  MOD_RES (21)..(22)..(23)..(24): Xaa is A or G or is absent
RXGXSEVVMDPYVKLXXXXXXXXXFFLISLSSLRTPVXXTPP

SEQ ID NO: 44671 - protein, 40 aa, Artificial Sequence
  GFR-binding peptide
  MOD_RES (1)..(35)..(36): Xaa is C or S
  MOD_RES (13)..(14)..(15)..(16)..(17): Xaa is A or G
  MOD_RES (18)..(19)..(20)..(21): Xaa is A or G or is absent
XSRVVMNPYVKLXXXXXXXXXFFLVSLSSLKTPAXXPKPV

SEQ ID NO: 44672 - protein, 35 aa, Artificial Sequence
  GFR-binding peptide
  MOD_RES (1)..(32)..(33): Xaa is C or S
XEEVIMPYVKLLLVRGNDFFLMSLSSTKVPAXXTS

SEQ ID NO: 44673 - protein, 40 aa, Artificial Sequence
  GFR-binding peptide
  MOD_RES (1)..(3)..(36)..(37): Xaa is C or S
  MOD_RES (14)..(15)..(16)..(17)..(18): Xaa is A or G
  MOD_RES (19)..(20)..(21)..(22): Xaa is A or G or is absent
XGXEEVIMPYVKLXXXXXXXXXFFLMSLSSTKVPAXXTSP

SEQ ID NO: 44674 - protein, 35 aa, Artificial Sequence
  GFR-binding peptide
  MOD_RES (1)..(3): Xaa is C or S
  MOD_RES (14)..(15)..(16)..(17)..(18): Xaa is A or G
  MOD_RES (19)..(20)..(21)..(22): Xaa is A or G or is absent
XKXSRVIMPYVKLXXXXXXXXXFFLISLSSLAQPV

SEQ ID NO: 44675 - protein, 32 aa, Artificial Sequence
  GFR-binding peptide
  MOD_RES (1)..(32): Xaa is C or S
XSKVIMPYVKLIKPTKGILFFISLSSLDQSVX

SEQ ID NO: 44676 - protein, 36 aa, Artificial Sequence
  GFR-binding peptide
  MOD_RES (2)..(4): Xaa is C or S
  MOD_RES (15)..(16)..(17)..(18)..(19): Xaa is A or G
  MOD_RES (20)..(21)..(22)..(23): Xaa is A or G or is absent
SXKXSKVIMPYVKLXXXXXXXXXFFLISLSSLDQSV

SEQ ID NO: 44677 - protein, 35 aa, Artificial Sequence
  GFR-binding peptide
  MOD_RES (2)..(34): Xaa is C or S
GXSRVVMNPYVKLIVNSSDDFFLVSLSSLKTPAXT

SEQ ID NO: 44678 - protein, 36 aa, Artificial Sequence
  GFR-binding peptide
  MOD_RES (2)..(36): Xaa is C or S
  MOD_RES (14)..(15)..(16)..(17)..(18): Xaa is A or G
  MOD_RES (19)..(20)..(21)..(22): Xaa is A or G or is absent
GXAEVVMDPYVKLXXXXXXXXXFFLISLSSLRAPVX

SEQ ID NO: 44679 - protein, 33 aa, Artificial Sequence
  GFR-binding peptide
  MOD_RES (1)..(33): Xaa is C or S
XSEVVMDPYVKLVVNNASDFFLISLSSLRTPVX

SEQ ID NO: 44680 - protein, 34 aa, Artificial Sequence
  GFR-binding peptide
  MOD_RES (34)..(34): Xaa is C or S
  MOD_RES (12)..(13)..(14)..(15)..(16): Xaa is A or G
  MOD_RES (17)..(18)..(19)..(20): Xaa is A or G or is absent
SRVVMNPYVKLXXXXXXXXXFFLVSLSSLKTPAX

SEQ ID NO: 44681 - protein, 40 aa, Artificial Sequence
  GFR-binding peptide
  MOD_RES (2)..(36)..(37): Xaa is C or S
  MOD_RES (14)..(15)..(16)..(17)..(18): Xaa is A or G
  MOD_RES (19)..(20)..(21)..(22): Xaa is A or G or is absent
GXAKVVMNPYVKLXXXXXXXXXFFLVSLSSLKTPAXXAKP

SEQ ID NO: 44682 - protein, 36 aa, Artificial Sequence
  GFR-binding peptide
  MOD_RES (32)..(33): Xaa is C or S
SRVVMNPYVKLIVNSSDDFFLVSLSSLKTPAXXPKP

SEQ ID NO: 44683 - protein, 34 aa, Artificial Sequence
  GFR-binding peptide
  MOD_RES (32)..(33): Xaa is C or S
GEVVMEPYVKLVVKDYEDFFLMSLSSLETPVXXA

SEQ ID NO: 44684 - protein, 38 aa, Artificial Sequence
  GFR-binding peptide
  MOD_RES (2)..(34)..(35): Xaa is C or S
GXESVAMGPYVKLYTVVGKDFFLISLSSLKTPVXXAKS

SEQ ID NO: 44685 - protein, 35 aa, Artificial Sequence
  GFR-binding peptide
  MOD_RES (32)..(33): Xaa is C or S
AKVVMNPYVKLIVNNSSDFFLVSLSSLKTPAXXAK

SEQ ID NO: 44686 - protein, 40 aa, Artificial Sequence
  GFR-binding peptide
  MOD_RES (2)..(4)..(38)..(39): Xaa is C or S
  MOD_RES (16)..(17)..(18)..(19)..(20): Xaa is A or G
  MOD_RES (21)..(22)..(23)..(24): Xaa is A or G or is absent
HXGXSRVVMNPYVKLXXXXXXXXXFFLVSLSSLKTPAXXP

SEQ ID NO: 44687 - protein, 41 aa, Artificial Sequence
  GFR-binding peptide
  MOD_RES (2)..(4)..(36)..(37): Xaa is C or S
HXGXSRVVMNPYVKLIVNSSDDFFLVSLSSLKTPAXXPKPV

SEQ ID NO: 44688 - protein, 38 aa, Artificial Sequence
  GFR-binding peptide
  MOD_RES (2)..(4): Xaa is C or S
  MOD_RES (17)..(18)..(19)..(20)..(21): Xaa is A or G
  MOD_RES (22)..(23)..(24)..(25): Xaa is A or G or is absent
RXGXEAVSMGEPYVKLXXXXXXXXXFFLVSLSSLKTPV

SEQ ID NO: 44689 - protein, 41 aa, Artificial Sequence
  GFR-binding peptide
  MOD_RES (1)..(3)..(37)..(38): Xaa is C or S
  MOD_RES (15)..(16)..(17)..(18)..(19): Xaa is A or G
  MOD_RES (20)..(21)..(22)..(23): Xaa is A or G or is absent
XGXAKVVMNPYVKLXXXXXXXXXFFLVSLSSLKTPAXXAKP

SEQ ID NO: 44690 - protein, 35 aa, Artificial Sequence
  GFR-binding peptide
  MOD_RES (2)..(33)..(34): Xaa is C or S
GXEEVIMPYVKLLLVRGNDFFLMSLSSTKVPAXXT

SEQ ID NO: 44691 - protein, 35 aa, Artificial Sequence
  GFR-binding peptide
ELHEELRPYVKLLKPKKRVYEFFLVSLSSHHVRSP

SEQ ID NO: 44692 - protein, 37 aa, Artificial Sequence
  GFR-binding peptide
  MOD_RES (2)..(4)..(36)..(37): Xaa is C or S
HXGXARVVMNPYVKLIVNSSDDFFLVSLSSLQTPAXX

SEQ ID NO: 44693 - protein, 32 aa, Artificial Sequence
  GFR-binding peptide
  MOD_RES (1)..(1): Xaa is C or S
XSEVVMDPYVKLVVNNASDFFLISLSSLRTPV

SEQ ID NO: 44694 - protein, 35 aa, Artificial Sequence
  GFR-binding peptide
  MOD_RES (2)..(4)..(35): Xaa is C or S
LXGXEEVIMPYVKLLLVRGNDFFLMSLSSTKVPAX

SEQ ID NO: 44695 - protein, 44 aa, Artificial Sequence
  GFR-binding peptide
  MOD_RES (1)..(3)..(38)..(39): Xaa is C or S
  MOD_RES (16)..(17)..(18)..(19)..(20): Xaa is A or G
  MOD_RES (21)..(22)..(23)..(24): Xaa is A or G or is absent
XGXEAVSMGEPYVKLXXXXXXXXXFFLVSLSSLKTPVXXAKGVK

SEQ ID NO: 44696 - protein, 43 aa, Artificial Sequence
  GFR-binding peptide
  MOD_RES (1)..(3)..(40): Xaa is C or S
  MOD_RES (16)..(17)..(18)..(19)..(20): Xaa is A or G
  MOD_RES (21)..(22)..(23)..(24): Xaa is A or G or is absent
XAXELHEELRPYVKLXXXXXXXXXFFLVSLSSHHVRSPQXKVS

SEQ ID NO: 44697 - protein, 34 aa, Artificial Sequence
  GFR-binding peptide
ELHEELRPYVKLLKPKKRVYEFFLVSLSSHHVRS

SEQ ID NO: 44698 - protein, 39 aa, Artificial Sequence
  GFR-binding peptide
  MOD_RES (1)..(3)..(34)..(35): Xaa is C or S
XGXEEVIMPYVKLLLVRGNDFFLMSLSSTKVPAXXTSPV

SEQ ID NO: 44699 - protein, 35 aa, Artificial Sequence
  GFR-binding peptide
  MOD_RES (33)..(34): Xaa is C or S
  MOD_RES (11)..(12)..(13)..(14)..(15): Xaa is A or G
  MOD_RES (16)..(17)..(18)..(19): Xaa is A or G or is absent
SKVVMPYVKLXXXXXXXXXFFLISLSSLDQPVXXP

SEQ ID NO: 44700 - protein, 39 aa, Artificial Sequence
  GFR-binding peptide
  MOD_RES (1)..(3)..(35)..(36): Xaa is C or S
XGXAKVVMNPYVKLIVNNSSDFFLVSLSSLKTPAXXAKP

SEQ ID NO: 44701 - protein, 38 aa, Artificial Sequence
  GFR-binding peptide
  MOD_RES (34)..(35): Xaa is C or S
  MOD_RES (12)..(13)..(14)..(15)..(16): Xaa is A or G
  MOD_RES (17)..(18)..(19)..(20): Xaa is A or G or is absent
GEVVMEPYVKLXXXXXXXXXFFLMSLSSLETPVXXAKP

SEQ ID NO: 44702 - protein, 30 aa, Artificial Sequence
  GFR-binding peptide
SKVIMPYVKLIKPTKGILFFISLSSLDQSV

SEQ ID NO: 44703 - protein, 38 aa, Artificial Sequence
  GFR-binding peptide
  MOD_RES (1)..(3)..(37)..(38): Xaa is C or S
  MOD_RES (15)..(16)..(17)..(18)..(19): Xaa is A or G
  MOD_RES (20)..(21)..(22)..(23): Xaa is A or G or is absent
XGXARVVMNPYVKLXXXXXXXXXFFLVSLSSLQTPAXX

SEQ ID NO: 44704 - protein, 42 aa, Artificial Sequence
  GFR-binding peptide
  MOD_RES (2)..(4)..(41): Xaa is C or S
  MOD_RES (17)..(18)..(19)..(20)..(21): Xaa is A or G
  MOD_RES (22)..(23)..(24)..(25): Xaa is A or G or is absent
AXAXELHEELRPYVKLXXXXXXXXXFFLVSLSSHHVRSPQXK

SEQ ID NO: 44705 - protein, 43 aa, Artificial Sequence
  GFR-binding peptide
  MOD_RES (1)..(3)..(37)..(38): Xaa is C or S
  MOD_RES (15)..(16)..(17)..(18)..(19): Xaa is A or G
  MOD_RES (20)..(21)..(22)..(23): Xaa is A or G or is absent
XGXARVVMNPYVKLXXXXXXXXXFFLVSLSSLQTPAXXPKPVT

SEQ ID NO: 44706 - protein, 43 aa, Artificial Sequence
  GFR-binding peptide
  MOD_RES (2)..(4)..(38)..(39): Xaa is C or S
  MOD_RES (16)..(17)..(18)..(19)..(20): Xaa is A or G
  MOD_RES (21)..(22)..(23)..(24): Xaa is A or G or is absent
HXGXSRVVMNPYVKLXXXXXXXXXFFLVSLSSLKTPAXXPKPV

SEQ ID NO: 44707 - protein, 35 aa, Artificial Sequence
  GFR-binding peptide
  MOD_RES (31)..(32): Xaa is C or S
KVVMNPYVKLIVNNSSDFFLVSLSSLKTPAXXAKP

SEQ ID NO: 44708 - protein, 38 aa, Artificial Sequence
  GFR-binding peptide
  MOD_RES (1)..(33)..(34): Xaa is C or S
XAKVVMNPYVKLIVNNSSDFFLVSLSSLKTPAXXAKPV

SEQ ID NO: 44709 - protein, 36 aa, Artificial Sequence
  GFR-binding peptide
  MOD_RES (1)..(35)..(36): Xaa is C or S
  MOD_RES (13)..(14)..(15)..(16)..(17): Xaa is A or G
  MOD_RES (18)..(19)..(20)..(21): Xaa is A or G or is absent
XAKVVMNPYVKLXXXXXXXXXFFLVSLSSLKTPAXX

SEQ ID NO: 44710 - protein, 39 aa, Artificial Sequence
  GFR-binding peptide
  MOD_RES (2)..(4)..(37)..(38): Xaa is C or S
  MOD_RES (15)..(16)..(17)..(18)..(19): Xaa is A or G
  MOD_RES (20)..(21)..(22)..(23): Xaa is A or G or is absent
SXKXSKVVMPYVKLXXXXXXXXXFFLISLSSLDQPVXXP

SEQ ID NO: 44711 - protein, 35 aa, Artificial Sequence
  GFR-binding peptide
  MOD_RES (33)..(34): Xaa is C or S
  MOD_RES (11)..(12)..(13)..(14)..(15): Xaa is A or G
  MOD_RES (16)..(17)..(18)..(19): Xaa is A or G or is absent
SKVIMPYVKLXXXXXXXXXFFLISLSSLDQSVXXP

SEQ ID NO: 44712 - protein, 36 aa, Artificial Sequence
  GFR-binding peptide
  MOD_RES (34)..(34): Xaa is C or S
  MOD_RES (12)..(13)..(14)..(15)..(16): Xaa is A or G
  MOD_RES (17)..(18)..(19)..(20): Xaa is A or G or is absent
SRVVMNPYVKLXXXXXXXXXFFLVSLSSLKTPAXTP

SEQ ID NO: 44713 - protein, 34 aa, Artificial Sequence
  GFR-binding peptide
  MOD_RES (31)..(32): Xaa is C or S
SKVVMPYVKLVKPTRGVLFFISLSSLDQPVXXPS

SEQ ID NO: 44714 - protein, 35 aa, Artificial Sequence
  GFR-binding peptide
  MOD_RES (31)..(32): Xaa is C or S
SVAMGPYVKLYTVVGKDFFLISLSSLKTPVXXAKS

SEQ ID NO: 44715 - protein, 42 aa, Artificial Sequence
  GFR-binding peptide
  MOD_RES (1)..(3)..(37)..(38): Xaa is C or S
  MOD_RES (15)..(16)..(17)..(18)..(19): Xaa is A or G
  MOD_RES (20)..(21)..(22)..(23): Xaa is A or G or is absent
XGXGEVVMEPYVKLXXXXXXXXXFFLMSLSSLETPVXXAKPI

SEQ ID NO: 44716 - protein, 35 aa, Artificial Sequence
  GFR-binding peptide
  MOD_RES (33)..(34): Xaa is C or S
  MOD_RES (11)..(12)..(13)..(14)..(15): Xaa is A or G
  MOD_RES (16)..(17)..(18)..(19): Xaa is A or G or is absent
KVVMNPYVKLXXXXXXXXXFFLVSLSSLKTPAXXA

SEQ ID NO: 44717 - protein, 34 aa, Artificial Sequence
  GFR-binding peptide
  MOD_RES (1)..(1): Xaa is C or S
  MOD_RES (13)..(14)..(15)..(16)..(17): Xaa is A or G
  MOD_RES (18)..(19)..(20)..(21): Xaa is A or G or is absent
XESVAMGPYVKLXXXXXXXXXFFLISLSSLKTPV

SEQ ID NO: 44718 - protein, 36 aa, Artificial Sequence
  GFR-binding peptide
  MOD_RES (1)..(35): Xaa is C or S
XKNHQLFPYVKLHQGQHPKIRFFLMSLSSEETPVXE

SEQ ID NO: 44719 - protein, 34 aa, Artificial Sequence
  GFR-binding peptide
  MOD_RES (2)..(33)..(34): Xaa is C or S
KXSKVVMPYVKLVKPTRGVLFFISLSSLDQPVXX

SEQ ID NO: 44720 - protein, 36 aa, Artificial Sequence
  GFR-binding peptide
  MOD_RES (2)..(4)..(35)..(36): Xaa is C or S
SXKXSRVIMPYVKLVKPKRGVLFFISLSSLAQPVXX

SEQ ID NO: 44721 - protein, 36 aa, Artificial Sequence
  GFR-binding peptide
  MOD_RES (1)..(3): Xaa is C or S
  MOD_RES (15)..(16)..(17)..(18)..(19): Xaa is A or G
  MOD_RES (20)..(21)..(22)..(23): Xaa is A or G or is absent
XGXRDVVMGPYVKLXXXXXXXXXFFLMSLSSMKTPT

SEQ ID NO: 44722 - protein, 40 aa, Artificial Sequence
  GFR-binding peptide
  MOD_RES (2)..(4)..(36): Xaa is C or S
HXGXSRVVMNPYVKLIVNSSDDFFLVSLSSLKTPAXTPKT

SEQ ID NO: 44723 - protein, 36 aa, Artificial Sequence
  GFR-binding peptide
  MOD_RES (31)..(32): Xaa is C or S
RVVMNPYVKLIVNSSDDFFLVSLSSLQTPAXXPKPV

SEQ ID NO: 44724 - protein, 41 aa, Artificial Sequence
  GFR-binding peptide
  MOD_RES (1)..(3)..(35)..(36): Xaa is C or S
XGXESVAMGPYVKLYTVVGKDFFLISLSSLKTPVXXAKSAK

SEQ ID NO: 44725 - protein, 40 aa, Artificial Sequence
  GFR-binding peptide
  MOD_RES (2)..(36)..(37): Xaa is C or S
  MOD_RES (14)..(15)..(16)..(17)..(18): Xaa is A or G
  MOD_RES (19)..(20)..(21)..(22): Xaa is A or G or is absent
GXRDVVMGPYVKLXXXXXXXXXFFLMSLSSMKTPTXXPGA

SEQ ID NO: 44726 - protein, 40 aa, Artificial Sequence
  GFR-binding peptide
  MOD_RES (2)..(4)..(39)..(40): Xaa is C or S
  MOD_RES (17)..(18)..(19)..(20)..(21): Xaa is A or G
  MOD_RES (22)..(23)..(24)..(25): Xaa is A or G or is absent
RXGXEAVSMGEPYVKLXXXXXXXXXFFLVSLSSLKTPVXX

SEQ ID NO: 44727 - protein, 36 aa, Artificial Sequence
  GFR-binding peptide
  MOD_RES (31)..(32): Xaa is C or S
EVTMNPYVKLVVNKNEDFFLISLSSMKEPVXXPEPI

SEQ ID NO: 44728 - protein, 35 aa, Artificial Sequence
  GFR-binding peptide
  MOD_RES (31)..(32): Xaa is C or S
SRVIMPYVKLVKPKRGVLFFISLSSLAQPVXXPAA

SEQ ID NO: 44729 - protein, 37 aa, Artificial Sequence
  GFR-binding peptide
  MOD_RES (31)..(32): Xaa is C or S
KVVMNPYVKLIVNNSSDFFLVSLSSLKTPAXXAKPVA

SEQ ID NO: 44730 - protein, 39 aa, Artificial Sequence
  GFR-binding peptide
  MOD_RES (2)..(4)..(37)..(38): Xaa is C or S
RXGXEAVSMGEPYVKLTPVGMDDFFLVSLSSLKTPVXXA

SEQ ID NO: 44731 - protein, 39 aa, Artificial Sequence
  GFR-binding peptide
  MOD_RES (1)..(33)..(34): Xaa is C or S
XESVAMGPYVKLYTVVGKDFFLISLSSLKTPVXXAKSAK

SEQ ID NO: 44732 - protein, 33 aa, Artificial Sequence
  GFR-binding peptide
  MOD_RES (1)..(33): Xaa is C or S
XESVAMGPYVKLYTVVGKDFFLISLSSLKTPVX

SEQ ID NO: 44733 - protein, 41 aa, Artificial Sequence
  GFR-binding peptide
  MOD_RES (2)..(4)..(37)..(38): Xaa is C or S
  MOD_RES (15)..(16)..(17)..(18)..(19): Xaa is A or G
  MOD_RES (20)..(21)..(22)..(23): Xaa is A or G or is absent
SXKXSKVIMPYVKLXXXXXXXXXFFLISLSSLDQSVXXPSA

SEQ ID NO: 44734 - protein, 36 aa, Artificial Sequence
  GFR-binding peptide
  MOD_RES (1)..(3)..(35)..(36): Xaa is C or S
XGXESVAMGPYVKLYTVVGKDFFLISLSSLKTPVXX

SEQ ID NO: 44735 - protein, 37 aa, Artificial Sequence
  GFR-binding peptide
  MOD_RES (2)..(36)..(37): Xaa is C or S
  MOD_RES (14)..(15)..(16)..(17)..(18): Xaa is A or G
  MOD_RES (19)..(20)..(21)..(22): Xaa is A or G or is absent
GXESVAMGPYVKLXXXXXXXXXFFLISLSSLKTPVXX

SEQ ID NO: 44736 - protein, 35 aa, Artificial Sequence
  GFR-binding peptide
  MOD_RES (1)..(34)..(35): Xaa is C or S
  MOD_RES (12)..(13)..(14)..(15)..(16): Xaa is A or G
  MOD_RES (17)..(18)..(19)..(20): Xaa is A or G or is absent
XSKVVMPYVKLXXXXXXXXXFFLISLSSLDQPVXX

SEQ ID NO: 44737 - protein, 36 aa, Artificial Sequence
  GFR-binding peptide
  MOD_RES (33)..(33): Xaa is C or S
  MOD_RES (11)..(12)..(13)..(14)..(15): Xaa is A or G
  MOD_RES (16)..(17)..(18)..(19): Xaa is A or G or is absent
NHQLFPYVKLXXXXXXXXXFFLMSLSSEETPVXELG

SEQ ID NO: 44738 - protein, 35 aa, Artificial Sequence
  GFR-binding peptide
  MOD_RES (33)..(34): Xaa is C or S
  MOD_RES (11)..(12)..(13)..(14)..(15): Xaa is A or G
  MOD_RES (16)..(17)..(18)..(19): Xaa is A or G or is absent
EVTMNPYVKLXXXXXXXXXFFLISLSSMKEPVXXP

SEQ ID NO: 44739 - protein, 40 aa, Artificial Sequence
  GFR-binding peptide
  MOD_RES (1)..(34)..(35): Xaa is C or S
  MOD_RES (12)..(13)..(14)..(15)..(16): Xaa is A or G
  MOD_RES (17)..(18)..(19)..(20): Xaa is A or G or is absent
XSRVIMPYVKLXXXXXXXXXFFLISLSSLAQPVXXPAASA

SEQ ID NO: 44740 - protein, 34 aa, Artificial Sequence
  GFR-binding peptide
  MOD_RES (1)..(1): Xaa is C or S
  MOD_RES (13)..(14)..(15)..(16)..(17): Xaa is A or G
  MOD_RES (18)..(19)..(20)..(21): Xaa is A or G or is absent
XSRVVMNPYVKLXXXXXXXXXFFLVSLSSLKTPA

SEQ ID NO: 44741 - protein, 42 aa, Artificial Sequence
  GFR-binding peptide
  MOD_RES (2)..(4)..(37)..(38): Xaa is C or S
RXGXEAVSMGEPYVKLTPVGMDDFFLVSLSSLKTPVXXAKGV

SEQ ID NO: 44742 - protein, 37 aa, Artificial Sequence
  GFR-binding peptide
  MOD_RES (2)..(4)..(36)..(37): Xaa is C or S
HXGXAKVVMNPYVKLIVNNSSDFFLVSLSSLKTPAXX

SEQ ID NO: 44743 - protein, 35 aa, Artificial Sequence
  GFR-binding peptide
  MOD_RES (2)..(35): Xaa is C or S
  MOD_RES (13)..(14)..(15)..(16)..(17): Xaa is A or G
  MOD_RES (18)..(19)..(20)..(21): Xaa is A or G or is absent
GXEEVIMPYVKLXXXXXXXXXFFLMSLSSTKVPAX

SEQ ID NO: 44744 - protein, 40 aa, Artificial Sequence
  GFR-binding peptide
  MOD_RES (2)..(4)..(36)..(37): Xaa is C or S
RXGXESVAMGPYVKLYTVVGKDFFLISLSSLKTPVXXAKS

SEQ ID NO: 44745 - protein, 44 aa, Artificial Sequence
  GFR-binding peptide
  MOD_RES (2)..(4)..(38): Xaa is C or S
  MOD_RES (16)..(17)..(18)..(19)..(20): Xaa is A or G
  MOD_RES (21)..(22)..(23)..(24): Xaa is A or G or is absent
RXEXKNHQLFPYVKLXXXXXXXXXFFLMSLSSEETPVXELGEDN

SEQ ID NO: 44746 - protein, 38 aa, Artificial Sequence
  GFR-binding peptide
  MOD_RES (32)..(33): Xaa is C or S
SEVTMNPYVKLVVNKNEDFFLISLSSMKEPVXXPEPIG

SEQ ID NO: 44747 - protein, 38 aa, Artificial Sequence
  GFR-binding peptide
  MOD_RES (2)..(4)..(36)..(37): Xaa is C or S
RXGXGEVVMEPYVKLVVKDYEDFFLMSLSSLETPVXXA

SEQ ID NO: 44748 - protein, 36 aa, Artificial Sequence
  GFR-binding peptide
  MOD_RES (31)..(32): Xaa is C or S
KVVMNPYVKLIVNNSSDFFLVSLSSLKTPAXXAKPV

SEQ ID NO: 44749 - protein, 37 aa, Artificial Sequence
  GFR-binding peptide
  MOD_RES (1)..(3)..(37): Xaa is C or S
  MOD_RES (15)..(16)..(17)..(18)..(19): Xaa is A or G
  MOD_RES (20)..(21)..(22)..(23): Xaa is A or G or is absent
XGXSEVVMDPYVKLXXXXXXXXXFFLISLSSLRTPVX

SEQ ID NO: 44750 - protein, 39 aa, Artificial Sequence
  GFR-binding peptide
  MOD_RES (2)..(4)..(36): Xaa is C or S
HXGXSRVVMNPYVKLIVNSSDDFFLVSLSSLKTPAXTPK

SEQ ID NO: 44751 - protein, 34 aa, Artificial Sequence
  GFR-binding peptide
  MOD_RES (32)..(33): Xaa is C or S
SEVVMDPYVKLVVNNASDFFLISLSSLRTPVXXT

SEQ ID NO: 44752 - protein, 35 aa, Artificial Sequence
  GFR-binding peptide
  MOD_RES (31)..(32): Xaa is C or S
SKVVMPYVKLVKPTRGVLFFISLSSLDQPVXXPSA

SEQ ID NO: 44753 - protein, 37 aa, Artificial Sequence
  GFR-binding peptide
  MOD_RES (35)..(36): Xaa is C or S
  MOD_RES (13)..(14)..(15)..(16)..(17): Xaa is A or G
  MOD_RES (18)..(19)..(20)..(21): Xaa is A or G or is absent
EAVSMGEPYVKLXXXXXXXXXFFLVSLSSLKTPVXXA

SEQ ID NO: 44754 - protein, 39 aa, Artificial Sequence
  GFR-binding peptide
  MOD_RES (36)..(36): Xaa is C or S
  MOD_RES (12)..(13)..(14)..(15)..(16): Xaa is A or G
  MOD_RES (17)..(18)..(19)..(20): Xaa is A or G or is absent
LHEELRPYVKLXXXXXXXXXFFLVSLSSHHVRSPQXKVS

SEQ ID NO: 44755 - protein, 35 aa, Artificial Sequence
  GFR-binding peptide
  MOD_RES (2)..(2): Xaa is C or S
  MOD_RES (14)..(15)..(16)..(17)..(18): Xaa is A or G
  MOD_RES (19)..(20)..(21)..(22): Xaa is A or G or is absent
GXARVVMNPYVKLXXXXXXXXXFFLVSLSSLQTPA

SEQ ID NO: 44756 - protein, 35 aa, Artificial Sequence
  GFR-binding peptide
  MOD_RES (2)..(35): Xaa is C or S
  MOD_RES (13)..(14)..(15)..(16)..(17): Xaa is A or G
  MOD_RES (18)..(19)..(20)..(21): Xaa is A or G or is absent
KXSKVVMPYVKLXXXXXXXXXFFLISLSSLDQPVX

SEQ ID NO: 44757 - protein, 37 aa, Artificial Sequence
  GFR-binding peptide
  MOD_RES (31)..(32): Xaa is C or S
EVVMEPYVKLVVKDYEDFFLMSLSSLETPVXXAKPIS

SEQ ID NO: 44758 - protein, 35 aa, Artificial Sequence
  GFR-binding peptide
  MOD_RES (1)..(35): Xaa is C or S
  MOD_RES (13)..(14)..(15)..(16)..(17): Xaa is A or G
  MOD_RES (18)..(19)..(20)..(21): Xaa is A or G or is absent
XSRVVMNPYVKLXXXXXXXXXFFLVSLSSLKTPAX

SEQ ID NO: 44759 - protein, 38 aa, Artificial Sequence
  GFR-binding peptide
  MOD_RES (1)..(3)..(37): Xaa is C or S
  MOD_RES (15)..(16)..(17)..(18)..(19): Xaa is A or G
  MOD_RES (20)..(21)..(22)..(23): Xaa is A or G or is absent
XGXSRVVMNPYVKLXXXXXXXXXFFLVSLSSLKTPAXT

SEQ ID NO: 44760 - protein, 38 aa, Artificial Sequence
  GFR-binding peptide
  MOD_RES (2)..(4)..(35)..(36): Xaa is C or S
SXKXSRVIMPYVKLVKPKRGVLFFISLSSLAQPVXXPA

SEQ ID NO: 44761 - protein, 30 aa, Artificial Sequence
  GFR-binding peptide
SRVIMPYVKLVKPKRGVLFFISLSSLAQPV

SEQ ID NO: 44762 - protein, 37 aa, Artificial Sequence
  GFR-binding peptide
  MOD_RES (1)..(3)..(34)..(35): Xaa is C or S
XKXSKVIMPYVKLIKPTKGILFFISLSSLDQSVXXPS

SEQ ID NO: 44763 - protein, 34 aa, Artificial Sequence
  GFR-binding peptide
  MOD_RES (1)..(3): Xaa is C or S
XAXSEVTMNPYVKLVVNKNEDFFLISLSSMKEPV

SEQ ID NO: 44764 - protein, 40 aa, Artificial Sequence
  GFR-binding peptide
  MOD_RES (1)..(35)..(36): Xaa is C or S
  MOD_RES (13)..(14)..(15)..(16)..(17): Xaa is A or G
  MOD_RES (18)..(19)..(20)..(21): Xaa is A or G or is absent
XGEVVMEPYVKLXXXXXXXXXFFLMSLSSLETPVXXAKPI

SEQ ID NO: 44765 - protein, 37 aa, Artificial Sequence
  GFR-binding peptide
  MOD_RES (1)..(33)..(34): Xaa is C or S
XAKVVMNPYVKLIVNNSSDFFLVSLSSLKTPAXXAKP

SEQ ID NO: 44766 - protein, 37 aa, Artificial Sequence
  GFR-binding peptide
  MOD_RES (1)..(3)..(35)..(36): Xaa is C or S
XGXESVAMGPYVKLYTVVGKDFFLISLSSLKTPVXXA

SEQ ID NO: 44767 - protein, 33 aa, Artificial Sequence
  GFR-binding peptide
  MOD_RES (2)..(2): Xaa is C or S
GXSEVVMDPYVKLVVNNASDFFLISLSSLRTPV

SEQ ID NO: 44768 - protein, 40 aa, Artificial Sequence
  GFR-binding peptide
  MOD_RES (37)..(37): Xaa is C or S
  MOD_RES (13)..(14)..(15)..(16)..(17): Xaa is A or G
  MOD_RES (18)..(19)..(20)..(21): Xaa is A or G or is absent
ELHEELRPYVKLXXXXXXXXXFFLVSLSSHHVRSPQXKVS

SEQ ID NO: 44769 - protein, 37 aa, Artificial Sequence
  GFR-binding peptide
  MOD_RES (2)..(4): Xaa is C or S
  MOD_RES (16)..(17)..(18)..(19)..(20): Xaa is A or G
  MOD_RES (21)..(22)..(23)..(24): Xaa is A or G or is absent
RXGXGEVVMEPYVKLXXXXXXXXXFFLMSLSSLETPV

SEQ ID NO: 44770 - protein, 36 aa, Artificial Sequence
  GFR-binding peptide
  MOD_RES (1)..(35): Xaa is C or S
  MOD_RES (13)..(14)..(15)..(16)..(17): Xaa is A or G
  MOD_RES (18)..(19)..(20)..(21): Xaa is A or G or is absent
XKNHQLFPYVKLXXXXXXXXXFFLMSLSSEETPVXE

SEQ ID NO: 44771 - protein, 36 aa, Artificial Sequence
  GFR-binding peptide
  MOD_RES (33)..(33): Xaa is C or S
NHQLFPYVKLHQGQHPKIRFFLMSLSSEETPVXELG

SEQ ID NO: 44772 - protein, 35 aa, Artificial Sequence
  GFR-binding peptide
  MOD_RES (2)..(34)..(35): Xaa is C or S
GXESVAMGPYVKLYTVVGKDFFLISLSSLKTPVXX

SEQ ID NO: 44773 - protein, 37 aa, Artificial Sequence
  GFR-binding peptide
  MOD_RES (1)..(3)..(35)..(36): Xaa is C or S
XGXGEVVMEPYVKLVVKDYEDFFLMSLSSLETPVXXA

SEQ ID NO: 44774 - protein, 36 aa, Artificial Sequence
  GFR-binding peptide
  MOD_RES (35)..(36): Xaa is C or S
  MOD_RES (13)..(14)..(15)..(16)..(17): Xaa is A or G
  MOD_RES (18)..(19)..(20)..(21): Xaa is A or G or is absent
EAVSMGEPYVKLXXXXXXXXXFFLVSLSSLKTPVXX

SEQ ID NO: 44775 - protein, 40 aa, Artificial Sequence
  GFR-binding peptide
  MOD_RES (2)..(34)..(35): Xaa is C or S
GXAKVVMNPYVKLIVNNSSDFFLVSLSSLKTPAXXAKPVA

SEQ ID NO: 44776 - protein, 36 aa, Artificial Sequence
  GFR-binding peptide
  MOD_RES (1)..(3)..(36): Xaa is C or S
XGXEAVSMGEPYVKLTPVGMDDFFLVSLSSLKTPVX

SEQ ID NO: 44777 - protein, 44 aa, Artificial Sequence
  GFR-binding peptide
  MOD_RES (2)..(4)..(41): Xaa is C or S
  MOD_RES (17)..(18)..(19)..(20)..(21): Xaa is A or G
  MOD_RES (22)..(23)..(24)..(25): Xaa is A or G or is absent
AXAXELHEELRPYVKLXXXXXXXXXFFLVSLSSHHVRSPQXKVS

SEQ ID NO: 44778 - protein, 35 aa, Artificial Sequence
  GFR-binding peptide
  MOD_RES (2)..(34)..(35): Xaa is C or S
GXARVVMNPYVKLIVNSSDDFFLVSLSSLQTPAXX

SEQ ID NO: 44779 - protein, 39 aa, Artificial Sequence
  GFR-binding peptide
  MOD_RES (2)..(4)..(36)..(37): Xaa is C or S
HXGXSRVVMNPYVKLIVNSSDDFFLVSLSSLKTPAXXPK

SEQ ID NO: 44780 - protein, 35 aa, Artificial Sequence
  GFR-binding peptide
  MOD_RES (1)..(3)..(35): Xaa is C or S
XGXRDVVMGPYVKLIIQQKDNFFLMSLSSMKTPTX

SEQ ID NO: 44781 - protein, 38 aa, Artificial Sequence
  GFR-binding peptide
  MOD_RES (2)..(4)..(38): Xaa is C or S
  MOD_RES (16)..(17)..(18)..(19)..(20): Xaa is A or G
  MOD_RES (21)..(22)..(23)..(24): Xaa is A or G or is absent
SXGXRDVVMGPYVKLXXXXXXXXXFFLMSLSSMKTPTX

SEQ ID NO: 44782 - protein, 32 aa, Artificial Sequence
  GFR-binding peptide
  MOD_RES (32)..(32): Xaa is C or S
AKVVMNPYVKLIVNNSSDFFLVSLSSLKTPAX

SEQ ID NO: 44783 - protein, 38 aa, Artificial Sequence
  GFR-binding peptide
  MOD_RES (32)..(33): Xaa is C or S
RDVVMGPYVKLIIQQKDNFFLMSLSSMKTPTXXPGASG

SEQ ID NO: 44784 - protein, 39 aa, Artificial Sequence
  GFR-binding peptide
  MOD_RES (1)..(38): Xaa is C or S
  MOD_RES (14)..(15)..(16)..(17)..(18): Xaa is A or G
  MOD_RES (19)..(20)..(21)..(22): Xaa is A or G or is absent
XELHEELRPYVKLXXXXXXXXXFFLVSLSSHHVRSPQXK

SEQ ID NO: 44785 - protein, 35 aa, Artificial Sequence
  GFR-binding peptide
  MOD_RES (2)..(34)..(35): Xaa is C or S
GXAEVVMDPYVKLVVNNAADFFLISLSSLRAPVXX

SEQ ID NO: 44786 - protein, 35 aa, Artificial Sequence
  GFR-binding peptide
  MOD_RES (2)..(2): Xaa is C or S
  MOD_RES (14)..(15)..(16)..(17)..(18): Xaa is A or G
  MOD_RES (19)..(20)..(21)..(22): Xaa is A or G or is absent
GXAKVVMNPYVKLXXXXXXXXXFFLVSLSSLKTPA

SEQ ID NO: 44787 - protein, 35 aa, Artificial Sequence
  GFR-binding peptide
  MOD_RES (35)..(35): Xaa is C or S
HEELRPYVKLLKPKKRVYEFFLVSLSSHHVRSPQX

SEQ ID NO: 44788 - protein, 37 aa, Artificial Sequence
  GFR-binding peptide
  MOD_RES (1)..(3)..(34)..(35): Xaa is C or S
XKXSKVVMPYVKLVKPTRGVLFFISLSSLDQPVXXPS

SEQ ID NO: 44789 - protein, 38 aa, Artificial Sequence
  GFR-binding peptide
  MOD_RES (1)..(3)..(38): Xaa is C or S
  MOD_RES (16)..(17)..(18)..(19)..(20): Xaa is A or G
  MOD_RES (21)..(22)..(23)..(24): Xaa is A or G or is absent
XGXEAVSMGEPYVKLXXXXXXXXXFFLVSLSSLKTPVX

SEQ ID NO: 44790 - protein, 36 aa, Artificial Sequence
  GFR-binding peptide
  MOD_RES (1)..(3)..(35)..(36): Xaa is C or S
XGXGEVVMEPYVKLVVKDYEDFFLMSLSSLETPVXX

SEQ ID NO: 44791 - protein, 35 aa, Artificial Sequence
  GFR-binding peptide
  MOD_RES (2)..(4): Xaa is C or S
RXGXESVAMGPYVKLYTVVGKDFFLISLSSLKTPV

SEQ ID NO: 44792 - protein, 39 aa, Artificial Sequence
  GFR-binding peptide
  MOD_RES (2)..(36)..(37): Xaa is C or S
  MOD_RES (14)..(15)..(16)..(17)..(18): Xaa is A or G
  MOD_RES (19)..(20)..(21)..(22): Xaa is A or G or is absent
GXAKVVMNPYVKLXXXXXXXXXFFLVSLSSLKTPAXXAK

SEQ ID NO: 44793 - protein, 43 aa, Artificial Sequence
  GFR-binding peptide
  MOD_RES (1)..(3)..(37): Xaa is C or S
  MOD_RES (15)..(16)..(17)..(18)..(19): Xaa is A or G
  MOD_RES (20)..(21)..(22)..(23): Xaa is A or G or is absent
XEXKNHQLFPYVKLXXXXXXXXXFFLMSLSSEETPVXELGEDN

SEQ ID NO: 44794 - protein, 33 aa, Artificial Sequence
  GFR-binding peptide
  MOD_RES (2)..(33): Xaa is C or S
KXSKVVMPYVKLVKPTRGVLFFISLSSLDQPVX

SEQ ID NO: 44795 - protein, 43 aa, Artificial Sequence
  GFR-binding peptide
  MOD_RES (5)..(6)..(40)..(42): Xaa is C or S
  MOD_RES (20)..(21)..(22)..(23)..(24): Xaa is A or G
  MOD_RES (25)..(26)..(27)..(28): Xaa is A or G or is absent
IPKAXXVPTELSSLSMLFFXXXXXXXXXLKVYPEMVVEGXGXR

SEQ ID NO: 44796 - protein, 35 aa, Artificial Sequence
  GFR-binding peptide
  MOD_RES (32)..(34): Xaa is C or S
APTQLSSLSVLFFDDSSNVILKVYPNMVVRAXGXH

SEQ ID NO: 44797 - protein, 40 aa, Artificial Sequence
  GFR-binding peptide
  MOD_RES (4)..(5)..(38)..(40): Xaa is C or S
  MOD_RES (19)..(20)..(21)..(22)..(23): Xaa is A or G
  MOD_RES (24)..(25)..(26)..(27): Xaa is A or G or is absent
AAPXXVPQALSSLSILFFXXXXXXXXXLKVYPMIVRSXKX

SEQ ID NO: 44798 - protein, 37 aa, Artificial Sequence
  GFR-binding peptide
  MOD_RES (6)..(7): Xaa is C or S
GSAGPXXTPTKMSSLSMLFFNDKQQIILKVYPGMVVD

SEQ ID NO: 44799 - protein, 38 aa, Artificial Sequence
  GFR-binding peptide
  MOD_RES (1)..(2)..(36)..(38): Xaa is C or S
  MOD_RES (16)..(17)..(18)..(19)..(20): Xaa is A or G
  MOD_RES (21)..(22)..(23)..(24): Xaa is A or G or is absent
XXAPTKLSSLSVLFFXXXXXXXXXLKVYPNMVVRSXGX

SEQ ID NO: 44800 - protein, 39 aa, Artificial Sequence
  GFR-binding peptide
  MOD_RES (2)..(3)..(37)..(39): Xaa is C or S
  MOD_RES (17)..(18)..(19)..(20)..(21): Xaa is A or G
  MOD_RES (22)..(23)..(24)..(25): Xaa is A or G or is absent
PXXTPTKMSSLSMLFFXXXXXXXXXLKVYPGMVVDRXGX

SEQ ID NO: 44801 - protein, 36 aa, Artificial Sequence
  GFR-binding peptide
  MOD_RES (34)..(36): Xaa is C or S
  MOD_RES (14)..(15)..(16)..(17)..(18): Xaa is A or G
  MOD_RES (19)..(20)..(21)..(22): Xaa is A or G or is absent
VPTRLSSLSILFFXXXXXXXXXLKVYPDMVVESXGX

SEQ ID NO: 44802 - protein, 38 aa, Artificial Sequence
  GFR-binding peptide
  MOD_RES (4)..(5)..(36)..(38): Xaa is C or S
AAPXXVPQALSSLSILFFVGRKPKVLKVYPMIVRSXKX

SEQ ID NO: 44803 - protein, 37 aa, Artificial Sequence
  GFR-binding peptide
  MOD_RES (4)..(5): Xaa is C or S
  MOD_RES (19)..(20)..(21)..(22)..(23): Xaa is A or G
  MOD_RES (24)..(25)..(26)..(27): Xaa is A or G or is absent
SKAXXVPTKLSSLSILFFXXXXXXXXXLKVYPGMAVS

SEQ ID NO: 44804 - protein, 43 aa, Artificial Sequence
  GFR-binding peptide
  MOD_RES (7)..(41)..(43): Xaa is C or S
  MOD_RES (21)..(22)..(23)..(24)..(25): Xaa is A or G
  MOD_RES (26)..(27)..(28)..(29): Xaa is A or G or is absent
HVTKPTXAPTKLSSLSVLFFXXXXXXXXXLKVYPNMVVRSXGX

SEQ ID NO: 44805 - protein, 39 aa, Artificial Sequence
  GFR-binding peptide
  MOD_RES (6)..(6): Xaa is C or S
DEGLEXVPTEESSLSMLFFRIKPHQGQHLKVYPFLQHNK

SEQ ID NO: 44806 - protein, 36 aa, Artificial Sequence
  GFR-binding peptide
  MOD_RES (1)..(2)..(36): Xaa is C or S
  MOD_RES (16)..(17)..(18)..(19)..(20): Xaa is A or G
  MOD_RES (21)..(22)..(23)..(24): Xaa is A or G or is absent
XXVPEKMSSLSILFFXXXXXXXXXLKVYPNMTVESX

SEQ ID NO: 44807 - protein, 40 aa, Artificial Sequence
  GFR-binding peptide
  MOD_RES (4)..(38)..(40): Xaa is C or S
  MOD_RES (18)..(19)..(20)..(21)..(22): Xaa is A or G
  MOD_RES (23)..(24)..(25)..(26): Xaa is A or G or is absent
GLEXVPTEESSLSMLFFXXXXXXXXXLKVYPFLQHNKXEX

SEQ ID NO: 44808 - protein, 41 aa, Artificial Sequence
  GFR-binding peptide
  MOD_RES (6)..(40): Xaa is C or S
  MOD_RES (20)..(21)..(22)..(23)..(24): Xaa is A or G
  MOD_RES (25)..(26)..(27)..(28): Xaa is A or G or is absent
DEGLEXVPTEESSLSMLFFXXXXXXXXXLKVYPFLQHNKXE

SEQ ID NO: 44809 - protein, 44 aa, Artificial Sequence
  GFR-binding peptide
  MOD_RES (6)..(7)..(41)..(43): Xaa is C or S
  MOD_RES (21)..(22)..(23)..(24)..(25): Xaa is A or G
  MOD_RES (26)..(27)..(28)..(29): Xaa is A or G or is absent
TVPKPXXAPTQLSSLSVLFFXXXXXXXXXLKVYPNMVVRAXGXH

SEQ ID NO: 44810 - protein, 39 aa, Artificial Sequence
  GFR-binding peptide
  MOD_RES (1)..(2)..(37)..(39): Xaa is C or S
  MOD_RES (16)..(17)..(18)..(19)..(20): Xaa is A or G
  MOD_RES (21)..(22)..(23)..(24): Xaa is A or G or is absent
XXVPTKLSSLSVLFFXXXXXXXXXLKVYPEGMSVAEXGX

SEQ ID NO: 44811 - protein, 35 aa, Artificial Sequence
  GFR-binding peptide
  MOD_RES (3)..(4)..(35): Xaa is C or S
SPXXVSQDLSSLSILFFIGKTPKILKVYPMIVKSX

SEQ ID NO: 44812 - protein, 33 aa, Artificial Sequence
  GFR-binding peptide
  MOD_RES (33)..(33): Xaa is C or S
  MOD_RES (14)..(15)..(16)..(17)..(18): Xaa is A or G
  MOD_RES (19)..(20)..(21)..(22): Xaa is A or G or is absent
APVKTSSLSMLFFXXXXXXXXXLKVYPMIVEEX

SEQ ID NO: 44813 - protein, 40 aa, Artificial Sequence
  GFR-binding peptide
  MOD_RES (4)..(5)..(38)..(40): Xaa is C or S
  MOD_RES (19)..(20)..(21)..(22)..(23): Xaa is A or G
  MOD_RES (24)..(25)..(26)..(27): Xaa is A or G or is absent
ASPXXVSQDLSSLSILFFXXXXXXXXXLKVYPMIVKSXKX

SEQ ID NO: 44814 - protein, 38 aa, Artificial Sequence
  GFR-binding peptide
  MOD_RES (2)..(3)..(35)..(37): Xaa is C or S
PXXVPEKMSSLSILFFDENKNVVLKVYPNMTVESXAXR

SEQ ID NO: 44815 - protein, 34 aa, Artificial Sequence
  GFR-binding peptide
  MOD_RES (33)..(33): Xaa is C or S
  MOD_RES (14)..(15)..(16)..(17)..(18): Xaa is A or G
  MOD_RES (19)..(20)..(21)..(22): Xaa is A or G or is absent
VPQDLSSLSILFFXXXXXXXXXLKVYPMVVKSXK

SEQ ID NO: 44816 - protein, 35 aa, Artificial Sequence
  GFR-binding peptide
  MOD_RES (1)..(34): Xaa is C or S
XVPTKLSSLSVLFFDDMGVPTLKVYPEGMSVAEXG

SEQ ID NO: 44817 - protein, 39 aa, Artificial Sequence
  GFR-binding peptide
  MOD_RES (6)..(7): Xaa is C or S
  MOD_RES (21)..(22)..(23)..(24)..(25): Xaa is A or G
  MOD_RES (26)..(27)..(28)..(29): Xaa is A or G or is absent
KASKAXXVPTKLSSLSILFFXXXXXXXXXLKVYPGMAVS

SEQ ID NO: 44818 - protein, 40 aa, Artificial Sequence
  GFR-binding peptide
  MOD_RES (2)..(3)..(37)..(39): Xaa is C or S
  MOD_RES (17)..(18)..(19)..(20)..(21): Xaa is A or G
  MOD_RES (22)..(23)..(24)..(25): Xaa is A or G or is absent
AXXVPTKLSSLSILFFXXXXXXXXXLKVYPGMAVSEXGXR

SEQ ID NO: 44819 - protein, 37 aa, Artificial Sequence
  GFR-binding peptide
  MOD_RES (6)..(7): Xaa is C or S
TVPKPXXAPTQLSSLSVLFFDDSSNVILKVYPNMVVR

SEQ ID NO: 44820 - protein, 44 aa, Artificial Sequence
  GFR-binding peptide
  MOD_RES (6)..(7)..(41)..(43): Xaa is C or S
  MOD_RES (21)..(22)..(23)..(24)..(25): Xaa is A or G
  MOD_RES (26)..(27)..(28)..(29): Xaa is A or G or is absent
KIPKAXXVPTELSSLSMLFFXXXXXXXXXLKVYPDMVVEGXGXR

SEQ ID NO: 44821 - protein, 40 aa, Artificial Sequence
  GFR-binding peptide
  MOD_RES (5)..(6)..(40): Xaa is C or S
  MOD_RES (20)..(21)..(22)..(23)..(24): Xaa is A or G
  MOD_RES (25)..(26)..(27)..(28): Xaa is A or G or is absent
ASKAXXVPTKLSSLSILFFXXXXXXXXXLKVYPGMAVSEX

SEQ ID NO: 44822 - protein, 38 aa, Artificial Sequence
  GFR-binding peptide
  MOD_RES (7)..(7): Xaa is C or S
HVTKPTXAPTKLSSLSVLFFDDSSNVILKVYPNMVVRS

SEQ ID NO: 44823 - protein, 37 aa, Artificial Sequence
  GFR-binding peptide
  MOD_RES (1)..(35)..(37): Xaa is C or S
  MOD_RES (15)..(16)..(17)..(18)..(19): Xaa is A or G
  MOD_RES (20)..(21)..(22)..(23): Xaa is A or G or is absent
XTPTKMSSLSMLFFXXXXXXXXXLKVYPGMVVDRXGX

SEQ ID NO: 44824 - protein, 41 aa, Artificial Sequence
  GFR-binding peptide
  MOD_RES (4)..(5)..(39)..(41): Xaa is C or S
  MOD_RES (19)..(20)..(21)..(22)..(23): Xaa is A or G
  MOD_RES (24)..(25)..(26)..(27): Xaa is A or G or is absent
PASXXVPARLSSLSILFFXXXXXXXXXLKVYPDMVVEAXGX

SEQ ID NO: 44825 - protein, 40 aa, Artificial Sequence
  GFR-binding peptide
  MOD_RES (5)..(6)..(39): Xaa is C or S
VGKAXXVPTKLSSLSVLFFDDMGVPTLKVYPEGMSVAEXG

SEQ ID NO: 44826 - protein, 36 aa, Artificial Sequence
  GFR-binding peptide
  MOD_RES (2)..(3)..(35): Xaa is C or S
PXXVPEKMSSLSILFFDENKNVVLKVYPNMTVESXA

SEQ ID NO: 44827 - protein, 37 aa, Artificial Sequence
  GFR-binding peptide
  MOD_RES (4)..(4): Xaa is C or S
  MOD_RES (18)..(19)..(20)..(21)..(22): Xaa is A or G
  MOD_RES (23)..(24)..(25)..(26): Xaa is A or G or is absent
KPTXAPTKLSSLSVLFFXXXXXXXXXLKVYPNMVVRS

SEQ ID NO: 44828 - protein, 36 aa, Artificial Sequence
  GFR-binding peptide
  MOD_RES (3)..(4)..(35): Xaa is C or S
APXXVPQALSSLSILFFVGRKPKVLKVYPMIVRSXK

SEQ ID NO: 44829 - protein, 36 aa, Artificial Sequence
  GFR-binding peptide
  MOD_RES (1)..(2)..(35): Xaa is C or S
XXVPTKLSSLSVLFFDDMGVPTLKVYPEGMSVAEXG

SEQ ID NO: 44830 - protein, 41 aa, Artificial Sequence
  GFR-binding peptide
  MOD_RES (6)..(7)..(39)..(41): Xaa is C or S
STPPTXXVPTRLSSLSILFFDSANNVVLKVYPDMVVESXGX

SEQ ID NO: 44831 - protein, 32 aa, Artificial Sequence
  GFR-binding peptide
SRVHHSSLSVLFFEYVRKKPKLLKVYPRLEEH

SEQ ID NO: 44832 - protein, 35 aa, Artificial Sequence
  GFR-binding peptide
  MOD_RES (1)..(32)..(34): Xaa is C or S
XVSQDLSSLSILFFIGKTPKILKVYPMIVKSXKXS

SEQ ID NO: 44833 - protein, 42 aa, Artificial Sequence
  GFR-binding peptide
  MOD_RES (5)..(6)..(40)..(42): Xaa is C or S
  MOD_RES (20)..(21)..(22)..(23)..(24): Xaa is A or G
  MOD_RES (25)..(26)..(27)..(28): Xaa is A or G or is absent
VPKPXXAPTQLSSLSVLFFXXXXXXXXXLKVYPNMVVRAXGX

SEQ ID NO: 44834 - protein, 34 aa, Artificial Sequence
  GFR-binding peptide
  MOD_RES (2)..(3)..(34): Xaa is C or S
PXXVPQDLSSLSILFFVGRTPKVLKVYPMVVKSX

SEQ ID NO: 44835 - protein, 33 aa, Artificial Sequence
  GFR-binding peptide
  MOD_RES (1)..(2): Xaa is C or S
XXTPTKMSSLSMLFFNDKQQIILKVYPGMVVDR

SEQ ID NO: 44836 - protein, 39 aa, Artificial Sequence
  GFR-binding peptide
  MOD_RES (4)..(5)..(38): Xaa is C or S
  MOD_RES (19)..(20)..(21)..(22)..(23): Xaa is A or G
  MOD_RES (24)..(25)..(26)..(27): Xaa is A or G or is absent
ASPXXVSQDLSSLSILFFXXXXXXXXXLKVYPMIVKSXK

SEQ ID NO: 44837 - protein, 37 aa, Artificial Sequence
  GFR-binding peptide
  MOD_RES (2)..(3)..(35)..(37): Xaa is C or S
AXXAPTKLSSLSVLFFDSSNNVILKVYPNMVVKAXGX

SEQ ID NO: 44838 - protein, 39 aa, Artificial Sequence
  GFR-binding peptide
  MOD_RES (3)..(4)..(38): Xaa is C or S
  MOD_RES (18)..(19)..(20)..(21)..(22): Xaa is A or G
  MOD_RES (23)..(24)..(25)..(26): Xaa is A or G or is absent
KPXXAPTQLSSLSVLFFXXXXXXXXXLKVYPNMVVRAXG

SEQ ID NO: 44839 - protein, 39 aa, Artificial Sequence
  GFR-binding peptide
  MOD_RES (7)..(39): Xaa is C or S
HVTKPTXAPTKLSSLSVLFFDDSSNVILKVYPNMVVRSX

SEQ ID NO: 44840 - protein, 40 aa, Artificial Sequence
  GFR-binding peptide
  MOD_RES (7)..(7): Xaa is C or S
  MOD_RES (21)..(22)..(23)..(24)..(25): Xaa is A or G
  MOD_RES (26)..(27)..(28)..(29): Xaa is A or G or is absent
HVTKPTXAPTKLSSLSVLFFXXXXXXXXXLKVYPNMVVRS

SEQ ID NO: 44841 - protein, 43 aa, Artificial Sequence
  GFR-binding peptide
  MOD_RES (5)..(42): Xaa is C or S
SSVKXQPSRVHHSSLSVLFFEYVRKKPKLLKVYPRLEEHLEXA

SEQ ID NO: 44842 - protein, 37 aa, Artificial Sequence
  GFR-binding peptide
  MOD_RES (4)..(5)..(37): Xaa is C or S
PKPXXAPTQLSSLSVLFFDDSSNVILKVYPNMVVRAX

SEQ ID NO: 44843 - protein, 35 aa, Artificial Sequence
  GFR-binding peptide
  MOD_RES (3)..(3): Xaa is C or S
LEXVPTEESSLSMLFFRIKPHQGQHLKVYPFLQHN

SEQ ID NO: 44844 - protein, 34 aa, Artificial Sequence
  GFR-binding peptide
  MOD_RES (1)..(34): Xaa is C or S
  MOD_RES (15)..(16)..(17)..(18)..(19): Xaa is A or G
  MOD_RES (20)..(21)..(22)..(23): Xaa is A or G or is absent
XAPVKTSSLSMLFFXXXXXXXXXLKVYPMIVEEX

SEQ ID NO: 44845 - protein, 36 aa, Artificial Sequence
  GFR-binding peptide
  MOD_RES (3)..(4)..(36): Xaa is C or S
EPXXVPEKMSSLSILFFDENKNVVLKVYPNMTVESX

SEQ ID NO: 44846 - protein, 40 aa, Artificial Sequence
  GFR-binding peptide
  MOD_RES (6)..(40): Xaa is C or S
  MOD_RES (20)..(21)..(22)..(23)..(24): Xaa is A or G
  MOD_RES (25)..(26)..(27)..(28): Xaa is A or G or is absent
DEGLEXVPTEESSLSMLFFXXXXXXXXXLKVYPFLQHNKX

SEQ ID NO: 44847 - protein, 41 aa, Artificial Sequence
  GFR-binding peptide
  MOD_RES (5)..(39)..(41): Xaa is C or S
  MOD_RES (19)..(20)..(21)..(22)..(23): Xaa is A or G
  MOD_RES (24)..(25)..(26)..(27): Xaa is A or G or is absent
TKPTXAPTKLSSLSVLFFXXXXXXXXXLKVYPNMVVRSXGX

SEQ ID NO: 44848 - protein, 36 aa, Artificial Sequence
  GFR-binding peptide
  MOD_RES (36)..(36): Xaa is C or S
PSRVHHSSLSVLFFEYVRKKPKLLKVYPRLEEHLEX

SEQ ID NO: 44849 - protein, 35 aa, Artificial Sequence
  GFR-binding peptide
  MOD_RES (3)..(4): Xaa is C or S
EPXXVPEKMSSLSILFFDENKNVVLKVYPNMTVES

SEQ ID NO: 44850 - protein, 34 aa, Artificial Sequence
  GFR-binding peptide
  MOD_RES (3)..(4): Xaa is C or S
SPXXVSQDLSSLSILFFIGKTPKILKVYPMIVKS

SEQ ID NO: 44851 - protein, 41 aa, Artificial Sequence
  GFR-binding peptide
  MOD_RES (5)..(6)..(40): Xaa is C or S
  MOD_RES (20)..(21)..(22)..(23)..(24): Xaa is A or G
  MOD_RES (25)..(26)..(27)..(28): Xaa is A or G or is absent
APASXXVPARLSSLSILFFXXXXXXXXXLKVYPDMVVEAXG

SEQ ID NO: 44852 - protein, 39 aa, Artificial Sequence
  GFR-binding peptide
  MOD_RES (6)..(7)..(38): Xaa is C or S
ASAAPXXVPQALSSLSILFFVGRKPKVLKVYPMIVRSXK

SEQ ID NO: 44853 - protein, 38 aa, Artificial Sequence
  GFR-binding peptide
  MOD_RES (4)..(5): Xaa is C or S
  MOD_RES (19)..(20)..(21)..(22)..(23): Xaa is A or G
  MOD_RES (24)..(25)..(26)..(27): Xaa is A or G or is absent
PKPXXAPTKLSSLSVLFFXXXXXXXXXLKVYPNMVVRS

SEQ ID NO: 44854 - protein, 34 aa, Artificial Sequence
  GFR-binding peptide
  MOD_RES (2)..(3)..(34): Xaa is C or S
TXXAPVKTSSLSMLFFDNGRVLLLKVYPMIVEEX

SEQ ID NO: 44855 - protein, 34 aa, Artificial Sequence
  GFR-binding peptide
  MOD_RES (2)..(3): Xaa is C or S
SXXVPARLSSLSILFFDAANNVVLKVYPDMVVEA

SEQ ID NO: 44856 - protein, 42 aa, Artificial Sequence
  GFR-binding peptide
  MOD_RES (5)..(6)..(40)..(42): Xaa is C or S
  MOD_RES (20)..(21)..(22)..(23)..(24): Xaa is A or G
  MOD_RES (25)..(26)..(27)..(28): Xaa is A or G or is absent
VPKAXXAPTKLSSLSVLFFXXXXXXXXXLKVYPNMVVKAXGX

SEQ ID NO: 44857 - protein, 37 aa, Artificial Sequence
  GFR-binding peptide
  MOD_RES (1)..(35)..(37): Xaa is C or S
  MOD_RES (15)..(16)..(17)..(18)..(19): Xaa is A or G
  MOD_RES (20)..(21)..(22)..(23): Xaa is A or G or is absent
XAPTQLSSLSVLFFXXXXXXXXXLKVYPNMVVRAXGX

SEQ ID NO: 44858 - protein, 38 aa, Artificial Sequence
  GFR-binding peptide
  MOD_RES (5)..(6): Xaa is C or S
  MOD_RES (20)..(21)..(22)..(23)..(24): Xaa is A or G
  MOD_RES (25)..(26)..(27)..(28): Xaa is A or G or is absent
VPSTXXAPVKTSSLSMLFFXXXXXXXXXLKVYPMIVEE

SEQ ID NO: 44859 - protein, 38 aa, Artificial Sequence
  GFR-binding peptide
  MOD_RES (1)..(35)..(37): Xaa is C or S
  MOD_RES (15)..(16)..(17)..(18)..(19): Xaa is A or G
  MOD_RES (20)..(21)..(22)..(23): Xaa is A or G or is absent
XVPEKMSSLSILFFXXXXXXXXXLKVYPNMTVESXAXR

SEQ ID NO: 44860 - protein, 36 aa, Artificial Sequence
  GFR-binding peptide
  MOD_RES (1)..(1): Xaa is C or S
XQPSRVHHSSLSVLFFEYVRKKPKLLKVYPRLEEHL

SEQ ID NO: 44861 - protein, 40 aa, Artificial Sequence
  GFR-binding peptide
  MOD_RES (4)..(5)..(37)..(39): Xaa is C or S
PKAXXAPTKLSSLSVLFFDSSNNVILKVYPNMVVKAXGXH

SEQ ID NO: 44862 - protein, 35 aa, Artificial Sequence
  GFR-binding peptide
  MOD_RES (34)..(34): Xaa is C or S
  MOD_RES (14)..(15)..(16)..(17)..(18): Xaa is A or G
  MOD_RES (19)..(20)..(21)..(22): Xaa is A or G or is absent
VPARLSSLSILFFXXXXXXXXXLKVYPDMVVEAXG

SEQ ID NO: 44863 - protein, 34 aa, Artificial Sequence
  GFR-binding peptide
  MOD_RES (1)..(2)..(34): Xaa is C or S
XXAPTKLSSLSVLFFDDSSNVILKVYPNMVVRSX

SEQ ID NO: 44864 - protein, 41 aa, Artificial Sequence
  GFR-binding peptide
  MOD_RES (4)..(5)..(38)..(40): Xaa is C or S
  MOD_RES (19)..(20)..(21)..(22)..(23): Xaa is A or G
  MOD_RES (24)..(25)..(26)..(27): Xaa is A or G or is absent
AAPXXVPQALSSLSILFFXXXXXXXXXLKVYPMIVRSXKXS

SEQ ID NO: 44865 - protein, 35 aa, Artificial Sequence
  GFR-binding peptide
  MOD_RES (1)..(2): Xaa is C or S
  MOD_RES (16)..(17)..(18)..(19)..(20): Xaa is A or G
  MOD_RES (21)..(22)..(23)..(24): Xaa is A or G or is absent
XXAPTKLSSLSVLFFXXXXXXXXXLKVYPNMVVRS

SEQ ID NO: 44866 - protein, 38 aa, Artificial Sequence
  GFR-binding peptide
  MOD_RES (5)..(6)..(38): Xaa is C or S
APASXXVPARLSSLSILFFDAANNVVLKVYPDMVVEAX

SEQ ID NO: 44867 - protein, 37 aa, Artificial Sequence
  GFR-binding peptide
  MOD_RES (2)..(2): Xaa is C or S
KXQPSRVHHSSLSVLFFEYVRKKPKLLKVYPRLEEHL

SEQ ID NO: 44868 - protein, 38 aa, Artificial Sequence
  GFR-binding peptide
  MOD_RES (3)..(4)..(38): Xaa is C or S
  MOD_RES (18)..(19)..(20)..(21)..(22): Xaa is A or G
  MOD_RES (23)..(24)..(25)..(26): Xaa is A or G or is absent
KPXXAPTKLSSLSVLFFXXXXXXXXXLKVYPNMVVRSX

SEQ ID NO: 44869 - protein, 36 aa, Artificial Sequence
  GFR-binding peptide
  MOD_RES (1)..(2)..(33)..(35): Xaa is C or S
XXVPQDLSSLSILFFVGRTPKVLKVYPMVVKSXKXS

SEQ ID NO: 44870 - protein, 42 aa, Artificial Sequence
  GFR-binding peptide
  MOD_RES (4)..(5)..(39)..(41): Xaa is C or S
  MOD_RES (19)..(20)..(21)..(22)..(23): Xaa is A or G
  MOD_RES (24)..(25)..(26)..(27): Xaa is A or G or is absent
PKPXXAPTKLSSLSVLFFXXXXXXXXXLKVYPNMVVRSXGXH

SEQ ID NO: 44871 - protein, 38 aa, Artificial Sequence
  GFR-binding peptide
  MOD_RES (1)..(2)..(36)..(38): Xaa is C or S
  MOD_RES (16)..(17)..(18)..(19)..(20): Xaa is A or G
  MOD_RES (21)..(22)..(23)..(24): Xaa is A or G or is absent
XXVPTELSSLSMLFFXXXXXXXXXLKVYPEMVVEGXGX

SEQ ID NO: 44872 - protein, 33 aa, Artificial Sequence
  GFR-binding peptide
  MOD_RES (1)..(1): Xaa is C or S
  MOD_RES (15)..(16)..(17)..(18)..(19): Xaa is A or G
  MOD_RES (20)..(21)..(22)..(23): Xaa is A or G or is absent
XVSQDLSSLSILFFXXXXXXXXXLKVYPMIVKS

SEQ ID NO: 44873 - protein, 36 aa, Artificial Sequence
  GFR-binding peptide
QPSRVHHSSLSVLFFEYVRKKPKLLKVYPRLEEHLE

SEQ ID NO: 44874 - protein, 34 aa, Artificial Sequence
  GFR-binding peptide
  MOD_RES (1)..(2): Xaa is C or S
  MOD_RES (16)..(17)..(18)..(19)..(20): Xaa is A or G
  MOD_RES (21)..(22)..(23)..(24): Xaa is A or G or is absent
XXVSQDLSSLSILFFXXXXXXXXXLKVYPMIVKS

SEQ ID NO: 44875 - protein, 38 aa, Artificial Sequence
  GFR-binding peptide
  MOD_RES (5)..(6): Xaa is C or S
  MOD_RES (20)..(21)..(22)..(23)..(24): Xaa is A or G
  MOD_RES (25)..(26)..(27)..(28): Xaa is A or G or is absent
VPKPXXAPTKLSSLSVLFFXXXXXXXXXLKVYPNMVVR

SEQ ID NO: 44876 - protein, 38 aa, Artificial Sequence
  GFR-binding peptide
  MOD_RES (5)..(6)..(38): Xaa is C or S
TPPTXXVPTRLSSLSILFFDSANNVVLKVYPDMVVESX

SEQ ID NO: 44877 - protein, 42 aa, Artificial Sequence
  GFR-binding peptide
  MOD_RES (6)..(7)..(41): Xaa is C or S
  MOD_RES (21)..(22)..(23)..(24)..(25): Xaa is A or G
  MOD_RES (26)..(27)..(28)..(29): Xaa is A or G or is absent
AAPASXXVPARLSSLSILFFXXXXXXXXXLKVYPDMVVEAXG

SEQ ID NO: 44878 - protein, 34 aa, Artificial Sequence
  GFR-binding peptide
  MOD_RES (1)..(2)..(34): Xaa is C or S
XXVPTKLSSLSILFFDKGVVTYLKVYPGMAVSEX

SEQ ID NO: 44879 - protein, 33 aa, Artificial Sequence
  GFR-binding peptide
  MOD_RES (1)..(1): Xaa is C or S
XVPTEESSLSMLFFRIKPHQGQHLKVYPFLQHN

SEQ ID NO: 44880 - protein, 40 aa, Artificial Sequence
  GFR-binding peptide
  MOD_RES (6)..(7): Xaa is C or S
  MOD_RES (21)..(22)..(23)..(24)..(25): Xaa is A or G
  MOD_RES (26)..(27)..(28)..(29): Xaa is A or G or is absent
AAPASXXVPARLSSLSILFFXXXXXXXXXLKVYPDMVVEA

SEQ ID NO: 44881 - protein, 36 aa, Artificial Sequence
  GFR-binding peptide
  MOD_RES (1)..(2)..(35): Xaa is C or S
  MOD_RES (16)..(17)..(18)..(19)..(20): Xaa is A or G
  MOD_RES (21)..(22)..(23)..(24): Xaa is A or G or is absent
XXAPVKTSSLSMLFFXXXXXXXXXLKVYPMIVEEXG

SEQ ID NO: 44882 - protein, 36 aa, Artificial Sequence
  GFR-binding peptide
  MOD_RES (1)..(35): Xaa is C or S
  MOD_RES (15)..(16)..(17)..(18)..(19): Xaa is A or G
  MOD_RES (20)..(21)..(22)..(23): Xaa is A or G or is absent
XAPTKLSSLSVLFFXXXXXXXXXLKVYPNMVVRSXG

SEQ ID NO: 44883 - protein, 35 aa, Artificial Sequence
  GFR-binding peptide
  MOD_RES (2)..(3)..(35): Xaa is C or S
PXXTPTKMSSLSMLFFNDKQQIILKVYPGMVVDRX

SEQ ID NO: 44884 - protein, 34 aa, Artificial Sequence
  GFR-binding peptide
  MOD_RES (1)..(2): Xaa is C or S
  MOD_RES (16)..(17)..(18)..(19)..(20): Xaa is A or G
  MOD_RES (21)..(22)..(23)..(24): Xaa is A or G or is absent
XXAPTKLSSLSVLFFXXXXXXXXXLKVYPNMVVK

SEQ ID NO: 44885 - protein, 39 aa, Artificial Sequence
  GFR-binding peptide
  MOD_RES (5)..(6)..(38): Xaa is C or S
ASKAXXVPTKLSSLSILFFDKGVVTYLKVYPGMAVSEXG

SEQ ID NO: 44886 - protein, 39 aa, Artificial Sequence
  GFR-binding peptide
  MOD_RES (2)..(36)..(38): Xaa is C or S
EXVPTEESSLSMLFFRIKPHQGQHLKVYPFLQHNKXEXR

SEQ ID NO: 44887 - protein, 35 aa, Artificial Sequence
  GFR-binding peptide
  MOD_RES (34)..(34): Xaa is C or S
  MOD_RES (14)..(15)..(16)..(17)..(18): Xaa is A or G
  MOD_RES (19)..(20)..(21)..(22): Xaa is A or G or is absent
VPTELSSLSMLFFXXXXXXXXXLKVYPEMVVEGXG

SEQ ID NO: 44888 - protein, 34 aa, Artificial Sequence
  GFR-binding peptide
  MOD_RES (1)..(2): Xaa is C or S
  MOD_RES (16)..(17)..(18)..(19)..(20): Xaa is A or G
  MOD_RES (21)..(22)..(23)..(24): Xaa is A or G or is absent
XXAPTKLSSLSVLFFXXXXXXXXXLKVYPNMVVR

SEQ ID NO: 44889 - protein, 32 aa, Artificial Sequence
  GFR-binding peptide
  MOD_RES (2)..(2): Xaa is C or S
TXAPTKLSSLSVLFFDDSSNVILKVYPNMVVR

SEQ ID NO: 44890 - protein, 37 aa, Artificial Sequence
  GFR-binding peptide
  MOD_RES (3)..(4)..(37): Xaa is C or S
  MOD_RES (18)..(19)..(20)..(21)..(22): Xaa is A or G
  MOD_RES (23)..(24)..(25)..(26): Xaa is A or G or is absent
STXXAPVKTSSLSMLFFXXXXXXXXXLKVYPMIVEEX

SEQ ID NO: 44891 - protein, 40 aa, Artificial Sequence
  GFR-binding peptide
  MOD_RES (3)..(37)..(39): Xaa is C or S
LEXVPTEESSLSMLFFRIKPHQGQHLKVYPFLQHNKXEXR

SEQ ID NO: 44892 - protein, 37 aa, Artificial Sequence
  GFR-binding peptide
  MOD_RES (1)..(2)..(36): Xaa is C or S
  MOD_RES (16)..(17)..(18)..(19)..(20): Xaa is A or G
  MOD_RES (21)..(22)..(23)..(24): Xaa is A or G or is absent
XXTPTKMSSLSMLFFXXXXXXXXXLKVYPGMVVDRXG

SEQ ID NO: 44893 - protein, 32 aa, Artificial Sequence
  GFR-binding peptide
  MOD_RES (14)..(15)..(16)..(17)..(18): Xaa is A or G
  MOD_RES (19)..(20)..(21)..(22): Xaa is A or G or is absent
VPQDLSSLSILFFXXXXXXXXXLKVYPMVVKS

SEQ ID NO: 44894 - protein, 33 aa, Artificial Sequence
  GFR-binding peptide
  MOD_RES (1)..(32): Xaa is C or S
XAPVKTSSLSMLFFDNGRVLLLKVYPMIVEEXG

SEQ ID NO: 44895 - protein, 35 aa, Artificial Sequence
  GFR-binding peptide
  MOD_RES (3)..(4): Xaa is C or S
GPXXTPTKMSSLSMLFFNDKQQIILKVYPGMVVDR

SEQ ID NO: 44896 - protein, 38 aa, Artificial Sequence
  GFR-binding peptide
  MOD_RES (1)..(2)..(36)..(38): Xaa is C or S
  MOD_RES (16)..(17)..(18)..(19)..(20): Xaa is A or G
  MOD_RES (21)..(22)..(23)..(24): Xaa is A or G or is absent
XXVPTKLSSLSILFFXXXXXXXXXLKVYPGMAVSEXGX

SEQ ID NO: 44897 - protein, 37 aa, Artificial Sequence
  GFR-binding peptide
  MOD_RES (1)..(2)..(36): Xaa is C or S
  MOD_RES (16)..(17)..(18)..(19)..(20): Xaa is A or G
  MOD_RES (21)..(22)..(23)..(24): Xaa is A or G or is absent
XXVPARLSSLSILFFXXXXXXXXXLKVYPDMVVEAXG

SEQ ID NO: 44898 - protein, 36 aa, Artificial Sequence
  GFR-binding peptide
  MOD_RES (3)..(4): Xaa is C or S
  MOD_RES (18)..(19)..(20)..(21)..(22): Xaa is A or G
  MOD_RES (23)..(24)..(25)..(26): Xaa is A or G or is absent
KAXXVPTKLSSLSILFFXXXXXXXXXLKVYPGMAVS

SEQ ID NO: 44899 - protein, 35 aa, Artificial Sequence
  GFR-binding peptide
  MOD_RES (1)..(35): Xaa is C or S
  MOD_RES (15)..(16)..(17)..(18)..(19): Xaa is A or G
  MOD_RES (20)..(21)..(22)..(23): Xaa is A or G or is absent
XVPTEESSLSMLFFXXXXXXXXXLKVYPFLQHNKX

SEQ ID NO: 44900 - protein, 39 aa, Artificial Sequence
  GFR-binding peptide
  MOD_RES (2)..(3)..(37)..(39): Xaa is C or S
  MOD_RES (17)..(18)..(19)..(20)..(21): Xaa is A or G
  MOD_RES (22)..(23)..(24)..(25): Xaa is A or G or is absent
PXXAPTQLSSLSVLFFXXXXXXXXXLKVYPNMVVRAXGX

SEQ ID NO: 44901 - protein, 36 aa, Artificial Sequence
  GFR-binding peptide
  MOD_RES (3)..(3): Xaa is C or S
LEXVPTEESSLSMLFFRIKPHQGQHLKVYPFLQHNK

SEQ ID NO: 44902 - protein, 35 aa, Artificial Sequence
  GFR-binding peptide
  MOD_RES (1)..(34): Xaa is C or S
  MOD_RES (15)..(16)..(17)..(18)..(19): Xaa is A or G
  MOD_RES (20)..(21)..(22)..(23): Xaa is A or G or is absent
XVSQDLSSLSILFFXXXXXXXXXLKVYPMIVKSXK

SEQ ID NO: 44903 - protein, 33 aa, Artificial Sequence
  GFR-binding peptide
  MOD_RES (33)..(33): Xaa is C or S
VPTKLSSLSVLFFDDMGVPTLKVYPEGMSVAEX

SEQ ID NO: 44904 - protein, 39 aa, Artificial Sequence
  GFR-binding peptide
  MOD_RES (5)..(6)..(38): Xaa is C or S
SAGPXXTPTKMSSLSMLFFNDKQQIILKVYPGMVVDRXG

SEQ ID NO: 44905 - protein, 43 aa, Artificial Sequence
  GFR-binding peptide
  MOD_RES (6)..(7)..(41)..(43): Xaa is C or S
  MOD_RES (21)..(22)..(23)..(24)..(25): Xaa is A or G
  MOD_RES (26)..(27)..(28)..(29): Xaa is A or G or is absent
HVPKPXXAPTKLSSLSVLFFXXXXXXXXXLKVYPNMVVRSXGX

SEQ ID NO: 44906 - protein, 34 aa, Artificial Sequence
  GFR-binding peptide
  MOD_RES (1)..(32)..(34): Xaa is C or S
XVPQALSSLSILFFVGRKPKVLKVYPMIVRSXKX

SEQ ID NO: 44907 - protein, 39 aa, Artificial Sequence
  GFR-binding peptide
  MOD_RES (4)..(5)..(38): Xaa is C or S
GKAXXVPTKLSSLSVLFFDDMGVPTLKVYPEGMSVAEXG

SEQ ID NO: 44908 - protein, 40 aa, Artificial Sequence
  GFR-binding peptide
  MOD_RES (2)..(3)..(37)..(39): Xaa is C or S
  MOD_RES (17)..(18)..(19)..(20)..(21): Xaa is A or G
  MOD_RES (22)..(23)..(24)..(25): Xaa is A or G or is absent
TXXVPTRLSSLSILFFXXXXXXXXXLKVYPDMVVESXGXR

SEQ ID NO: 44909 - protein, 32 aa, Artificial Sequence
  GFR-binding peptide
  MOD_RES (14)..(15)..(16)..(17)..(18): Xaa is A or G
  MOD_RES (19)..(20)..(21)..(22): Xaa is A or G or is absent
TPTKMSSLSMLFFXXXXXXXXXLKVYPGMVVD

SEQ ID NO: 44910 - protein, 39 aa, Artificial Sequence
  GFR-binding peptide
  MOD_RES (4)..(38): Xaa is C or S
  MOD_RES (18)..(19)..(20)..(21)..(22): Xaa is A or G
  MOD_RES (23)..(24)..(25)..(26): Xaa is A or G or is absent
KPTXAPTKLSSLSVLFFXXXXXXXXXLKVYPNMVVRSXG

SEQ ID NO: 44911 - protein, 39 aa, Artificial Sequence
  GFR-binding peptide
  MOD_RES (5)..(6): Xaa is C or S
  MOD_RES (20)..(21)..(22)..(23)..(24): Xaa is A or G
  MOD_RES (25)..(26)..(27)..(28): Xaa is A or G or is absent
IPKAXXVPTELSSLSMLFFXXXXXXXXXLKVYPEMVVEG

SEQ ID NO: 44912 - protein, 36 aa, Artificial Sequence
  GFR-binding peptide
  MOD_RES (3)..(35): Xaa is C or S
PTXAPTKLSSLSVLFFDDSSNVILKVYPNMVVRSXG

SEQ ID NO: 44913 - protein, 39 aa, Artificial Sequence
  GFR-binding peptide
  MOD_RES (6)..(7)..(39): Xaa is C or S
AVPKAXXAPTKLSSLSVLFFDSSNNVILKVYPNMVVKAX

SEQ ID NO: 44914 - protein, 42 aa, Artificial Sequence
  GFR-binding peptide
  MOD_RES (2)..(39)..(41): Xaa is C or S
KXQPSRVHHSSLSVLFFEYVRKKPKLLKVYPRLEEHLEXAXA

SEQ ID NO: 44915 - protein, 34 aa, Artificial Sequence
  GFR-binding peptide
  MOD_RES (1)..(2)..(34): Xaa is C or S
XXVPEKMSSLSILFFDENKNVVLKVYPNMTVESX

SEQ ID NO: 44916 - protein, 35 aa, Artificial Sequence
  GFR-binding peptide
  MOD_RES (33)..(35): Xaa is C or S
  MOD_RES (14)..(15)..(16)..(17)..(18): Xaa is A or G
  MOD_RES (19)..(20)..(21)..(22): Xaa is A or G or is absent
VPQDLSSLSILFFXXXXXXXXXLKVYPMVVKSXKX

SEQ ID NO: 44917 - protein, 40 aa, Artificial Sequence
  GFR-binding peptide
  MOD_RES (6)..(7)..(39): Xaa is C or S
GSAGPXXTPTKMSSLSMLFFNDKQQIILKVYPGMVVDRXG

SEQ ID NO: 44918 - protein, 41 aa, Artificial Sequence
  GFR-binding peptide
  MOD_RES (3)..(4)..(38)..(40): Xaa is C or S
  MOD_RES (18)..(19)..(20)..(21)..(22): Xaa is A or G
  MOD_RES (23)..(24)..(25)..(26): Xaa is A or G or is absent
KAXXVPTKLSSLSILFFXXXXXXXXXLKVYPGMAVSEXGXR

SEQ ID NO: 44919 - protein, 40 aa, Artificial Sequence
  GFR-binding peptide
  MOD_RES (2)..(3)..(37)..(39): Xaa is C or S
  MOD_RES (17)..(18)..(19)..(20)..(21): Xaa is A or G
  MOD_RES (22)..(23)..(24)..(25): Xaa is A or G or is absent
AXXAPTKLSSLSVLFFXXXXXXXXXLKVYPNMVVKAXGXH

SEQ ID NO: 44920 - protein, 35 aa, Artificial Sequence
  GFR-binding peptide
  MOD_RES (1)..(33)..(35): Xaa is C or S
XVPEKMSSLSILFFDENKNVVLKVYPNMTVESXAX

SEQ ID NO: 44921 - protein, 39 aa, Artificial Sequence
  GFR-binding peptide
  MOD_RES (3)..(3): Xaa is C or S
  MOD_RES (19)..(20)..(21)..(22)..(23): Xaa is A or G
  MOD_RES (24)..(25)..(26)..(27): Xaa is A or G or is absent
VKXQPSRVHHSSLSVLFFXXXXXXXXXLKVYPRLEEHLE

SEQ ID NO: 44922 - protein, 40 aa, Artificial Sequence
  GFR-binding peptide
  MOD_RES (6)..(7): Xaa is C or S
  MOD_RES (21)..(22)..(23)..(24)..(25): Xaa is A or G
  MOD_RES (26)..(27)..(28)..(29): Xaa is A or G or is absent
HVPKPXXAPTKLSSLSVLFFXXXXXXXXXLKVYPNMVVRS

SEQ ID NO: 44923 - protein, 34 aa, Artificial Sequence
  GFR-binding peptide
  MOD_RES (2)..(3): Xaa is C or S
AXXVPTKLSSLSILFFDKGVVTYLKVYPGMAVSE

SEQ ID NO: 44924 - protein, 42 aa, Artificial Sequence
  GFR-binding peptide
  MOD_RES (5)..(39)..(41): Xaa is C or S
  MOD_RES (19)..(20)..(21)..(22)..(23): Xaa is A or G
  MOD_RES (24)..(25)..(26)..(27): Xaa is A or G or is absent
TKPTXAPTKLSSLSVLFFXXXXXXXXXLKVYPNMVVRSXGXH

SEQ ID NO: 44925 - protein, 32 aa, Artificial Sequence
  GFR-binding peptide
  MOD_RES (1)..(2): Xaa is C or S
XXVSQDLSSLSILFFIGKTPKILKVYPMIVKS

SEQ ID NO: 44926 - protein, 33 aa, Artificial Sequence
  GFR-binding peptide
  MOD_RES (1)..(2): Xaa is C or S
XXAPTKLSSLSVLFFDSSNNVILKVYPNMVVKA

SEQ ID NO: 44927 - protein, 33 aa, Artificial Sequence
  GFR-binding peptide
  MOD_RES (31)..(33): Xaa is C or S
VPQDLSSLSILFFVGRTPKVLKVYPMVVKSXKX

SEQ ID NO: 44928 - protein, 37 aa, Artificial Sequence
  GFR-binding peptide
  MOD_RES (4)..(5): Xaa is C or S
  MOD_RES (19)..(20)..(21)..(22)..(23): Xaa is A or G
  MOD_RES (24)..(25)..(26)..(27): Xaa is A or G or is absent
PPTXXVPTRLSSLSILFFXXXXXXXXXLKVYPDMVVE

SEQ ID NO: 44929 - protein, 38 aa, Artificial Sequence
  GFR-binding peptide
  MOD_RES (6)..(7)..(38): Xaa is C or S
ASAAPXXVPQALSSLSILFFVGRKPKVLKVYPMIVRSX

SEQ ID NO: 44930 - protein, 38 aa, Artificial Sequence
  GFR-binding peptide
  MOD_RES (5)..(6): Xaa is C or S
  MOD_RES (20)..(21)..(22)..(23)..(24): Xaa is A or G
  MOD_RES (25)..(26)..(27)..(28): Xaa is A or G or is absent
SAAPXXVPQALSSLSILFFXXXXXXXXXLKVYPMIVRS

SEQ ID NO: 44931 - protein, 39 aa, Artificial Sequence
  GFR-binding peptide
  MOD_RES (6)..(7): Xaa is C or S
  MOD_RES (21)..(22)..(23)..(24)..(25): Xaa is A or G
  MOD_RES (26)..(27)..(28)..(29): Xaa is A or G or is absent
SIPKAXXVPTELSSLSMLFFXXXXXXXXXLKVYPEMVVE

SEQ ID NO: 44932 - protein, 33 aa, Artificial Sequence
  GFR-binding peptide
  MOD_RES (1)..(1): Xaa is C or S
  MOD_RES (15)..(16)..(17)..(18)..(19): Xaa is A or G
  MOD_RES (20)..(21)..(22)..(23): Xaa is A or G or is absent
XVPQDLSSLSILFFXXXXXXXXXLKVYPMVVKS

SEQ ID NO: 44933 - protein, 35 aa, Artificial Sequence
  GFR-binding peptide
  MOD_RES (1)..(1): Xaa is C or S
  MOD_RES (15)..(16)..(17)..(18)..(19): Xaa is A or G
  MOD_RES (20)..(21)..(22)..(23): Xaa is A or G or is absent
XVPTKLSSLSVLFFXXXXXXXXXLKVYPEGMSVAE

SEQ ID NO: 44934 - protein, 32 aa, Artificial Sequence
  GFR-binding peptide
  MOD_RES (1)..(32): Xaa is C or S
XVPQALSSLSILFFVGRKPKVLKVYPMIVRSX

SEQ ID NO: 44935 - protein, 40 aa, Artificial Sequence
  GFR-binding peptide
  MOD_RES (2)..(3)..(37)..(39): Xaa is C or S
  MOD_RES (17)..(18)..(19)..(20)..(21): Xaa is A or G
  MOD_RES (22)..(23)..(24)..(25): Xaa is A or G or is absent
PXXTPTKMSSLSMLFFXXXXXXXXXLKVYPGMVVDRXGXS

SEQ ID NO: 44936 - protein, 35 aa, Artificial Sequence
  GFR-binding peptide
  MOD_RES (1)..(2): Xaa is C or S
  MOD_RES (16)..(17)..(18)..(19)..(20): Xaa is A or G
  MOD_RES (21)..(22)..(23)..(24): Xaa is A or G or is absent
XXAPTKLSSLSVLFFXXXXXXXXXLKVYPNMVVKA

SEQ ID NO: 44937 - protein, 31 aa, Artificial Sequence
  GFR-binding peptide
  MOD_RES (31)..(31): Xaa is C or S
VPQDLSSLSILFFVGRTPKVLKVYPMVVKSX

SEQ ID NO: 44938 - protein, 38 aa, Artificial Sequence
  GFR-binding peptide
  MOD_RES (5)..(6): Xaa is C or S
  MOD_RES (20)..(21)..(22)..(23)..(24): Xaa is A or G
  MOD_RES (25)..(26)..(27)..(28): Xaa is A or G or is absent
VPKAXXAPTKLSSLSVLFFXXXXXXXXXLKVYPNMVVK

SEQ ID NO: 44939 - protein, 36 aa, Artificial Sequence
  GFR-binding peptide
  MOD_RES (4)..(5): Xaa is C or S
PASXXVPARLSSLSILFFDAANNVVLKVYPDMVVEA

SEQ ID NO: 44940 - protein, 35 aa, Artificial Sequence
  GFR-binding peptide
  MOD_RES (2)..(3)..(34): Xaa is C or S
PXXVPQALSSLSILFFVGRKPKVLKVYPMIVRSXK

SEQ ID NO: 44941 - protein, 40 aa, Artificial Sequence
  GFR-binding peptide
  MOD_RES (3)..(4)..(37)..(39): Xaa is C or S
  MOD_RES (18)..(19)..(20)..(21)..(22): Xaa is A or G
  MOD_RES (23)..(24)..(25)..(26): Xaa is A or G or is absent
APXXVPQALSSLSILFFXXXXXXXXXLKVYPMIVRSXKXS

SEQ ID NO: 44942 - protein, 38 aa, Artificial Sequence
  GFR-binding peptide
  MOD_RES (6)..(7): Xaa is C or S
YVPKPXXAPTKLSSLSVLFFDDSSNVILKVYPNMVVRS

SEQ ID NO: 44943 - protein, 35 aa, Artificial Sequence
  GFR-binding peptide
  MOD_RES (33)..(35): Xaa is C or S
  MOD_RES (14)..(15)..(16)..(17)..(18): Xaa is A or G
  MOD_RES (19)..(20)..(21)..(22): Xaa is A or G or is absent
VSQDLSSLSILFFXXXXXXXXXLKVYPMIVKSXKX

SEQ ID NO: 44944 - protein, 33 aa, Artificial Sequence
  GFR-binding peptide
  MOD_RES (2)..(3): Xaa is C or S
PXXVPQALSSLSILFFVGRKPKVLKVYPMIVRS

SEQ ID NO: 44945 - protein, 40 aa, Artificial Sequence
  GFR-binding peptide
  MOD_RES (5)..(6): Xaa is C or S
  MOD_RES (20)..(21)..(22)..(23)..(24): Xaa is A or G
  MOD_RES (25)..(26)..(27)..(28): Xaa is A or G or is absent
VGKAXXVPTKLSSLSVLFFXXXXXXXXXLKVYPEGMSVAE

SEQ ID NO: 44946 - protein, 32 aa, Artificial Sequence
  GFR-binding peptide
  MOD_RES (14)..(15)..(16)..(17)..(18): Xaa is A or G
  MOD_RES (19)..(20)..(21)..(22): Xaa is A or G or is absent
VPTKLSSLSILFFXXXXXXXXXLKVYPGMAVS

SEQ ID NO: 44947 - protein, 40 aa, Artificial Sequence
  GFR-binding peptide
  MOD_RES (5)..(39): Xaa is C or S
  MOD_RES (19)..(20)..(21)..(22)..(23): Xaa is A or G
  MOD_RES (24)..(25)..(26)..(27): Xaa is A or G or is absent
TKPTXAPTKLSSLSVLFFXXXXXXXXXLKVYPNMVVRSXG

SEQ ID NO: 44948 - protein, 40 aa, Artificial Sequence
  GFR-binding peptide
  MOD_RES (4)..(5)..(37)..(39): Xaa is C or S
PPTXXVPTRLSSLSILFFDSANNVVLKVYPDMVVESXGXR

SEQ ID NO: 44949 - protein, 40 aa, Artificial Sequence
  GFR-binding peptide
  MOD_RES (7)..(39): Xaa is C or S
HVTKPTXAPTKLSSLSVLFFDDSSNVILKVYPNMVVRSXG

SEQ ID NO: 44950 - protein, 33 aa, Artificial Sequence
  GFR-binding peptide
  MOD_RES (2)..(3): Xaa is C or S
PXXAPTKLSSLSVLFFDDSSNVILKVYPNMVVR

SEQ ID NO: 44951 - protein, 39 aa, Artificial Sequence
  GFR-binding peptide
  MOD_RES (6)..(7): Xaa is C or S
  MOD_RES (21)..(22)..(23)..(24)..(25): Xaa is A or G
  MOD_RES (26)..(27)..(28)..(29): Xaa is A or G or is absent
STPPTXXVPTRLSSLSILFFXXXXXXXXXLKVYPDMVVE

SEQ ID NO: 44952 - protein, 39 aa, Artificial Sequence
  GFR-binding peptide
  MOD_RES (3)..(4)..(38): Xaa is C or S
  MOD_RES (18)..(19)..(20)..(21)..(22): Xaa is A or G
  MOD_RES (23)..(24)..(25)..(26): Xaa is A or G or is absent
KAXXVPTKLSSLSILFFXXXXXXXXXLKVYPGMAVSEXG

SEQ ID NO: 44953 - protein, 34 aa, Artificial Sequence
  GFR-binding peptide
  MOD_RES (32)..(34): Xaa is C or S
APTKLSSLSVLFFDDSSNVILKVYPNMVVRSXGX

SEQ ID NO: 44954 - protein, 36 aa, Artificial Sequence
  GFR-binding peptide
  MOD_RES (2)..(2): Xaa is C or S
  MOD_RES (18)..(19)..(20)..(21)..(22): Xaa is A or G
  MOD_RES (23)..(24)..(25)..(26): Xaa is A or G or is absent
KXQPSRVHHSSLSVLFFXXXXXXXXXLKVYPRLEEH

SEQ ID NO: 44955 - protein, 38 aa, Artificial Sequence
  GFR-binding peptide
  MOD_RES (3)..(4)..(35)..(37): Xaa is C or S
SPXXVPQDLSSLSILFFVGRTPKVLKVYPMVVKSXKXS

SEQ ID NO: 44956 - protein, 38 aa, Artificial Sequence
  GFR-binding peptide
  MOD_RES (6)..(7)..(38): Xaa is C or S
RVPSTXXAPVKTSSLSMLFFDNGRVLLLKVYPMIVEEX

SEQ ID NO: 44957 - protein, 36 aa, Artificial Sequence
  GFR-binding peptide
  MOD_RES (1)..(2)..(34)..(36): Xaa is C or S
XXVPARLSSLSILFFDAANNVVLKVYPDMVVEAXGX

SEQ ID NO: 44958 - protein, 33 aa, Artificial Sequence
  GFR-binding peptide
  MOD_RES (2)..(3): Xaa is C or S
TXXVPTRLSSLSILFFDSANNVVLKVYPDMVVE

SEQ ID NO: 44959 - protein, 36 aa, Artificial Sequence
  GFR-binding peptide
  MOD_RES (1)..(35): Xaa is C or S
  MOD_RES (15)..(16)..(17)..(18)..(19): Xaa is A or G
  MOD_RES (20)..(21)..(22)..(23): Xaa is A or G or is absent
XAPTKLSSLSVLFFXXXXXXXXXLKVYPNMVVKAXG

SEQ ID NO: 44960 - protein, 37 aa, Artificial Sequence
  GFR-binding peptide
  MOD_RES (5)..(5): Xaa is C or S
EGLEXVPTEESSLSMLFFRIKPHQGQHLKVYPFLQHN

SEQ ID NO: 44961 - protein, 41 aa, Artificial Sequence
  GFR-binding peptide
  MOD_RES (6)..(7)..(39)..(41): Xaa is C or S
AAPASXXVPARLSSLSILFFDAANNVVLKVYPDMVVEAXGX

SEQ ID NO: 44962 - protein, 41 aa, Artificial Sequence
  GFR-binding peptide
  MOD_RES (5)..(6)..(40): Xaa is C or S
  MOD_RES (20)..(21)..(22)..(23)..(24): Xaa is A or G
  MOD_RES (25)..(26)..(27)..(28): Xaa is A or G or is absent
VPKAXXAPTKLSSLSVLFFXXXXXXXXXLKVYPNMVVKAXG

SEQ ID NO: 44963 - protein, 38 aa, Artificial Sequence
  GFR-binding peptide
  MOD_RES (3)..(4)..(37): Xaa is C or S
KAXXVPTKLSSLSVLFFDDMGVPTLKVYPEGMSVAEXG

SEQ ID NO: 44964 - protein, 38 aa, Artificial Sequence
  GFR-binding peptide
  MOD_RES (1)..(2)..(35)..(37): Xaa is C or S
  MOD_RES (16)..(17)..(18)..(19)..(20): Xaa is A or G
  MOD_RES (21)..(22)..(23)..(24): Xaa is A or G or is absent
XXAPVKTSSLSMLFFXXXXXXXXXLKVYPMIVEEXGXL

SEQ ID NO: 44965 - protein, 35 aa, Artificial Sequence
  GFR-binding peptide
  MOD_RES (1)..(35): Xaa is C or S
  MOD_RES (15)..(16)..(17)..(18)..(19): Xaa is A or G
  MOD_RES (20)..(21)..(22)..(23): Xaa is A or G or is absent
XVPEKMSSLSILFFXXXXXXXXXLKVYPNMTVESX

SEQ ID NO: 44966 - protein, 42 aa, Artificial Sequence
  GFR-binding peptide
  MOD_RES (5)..(6)..(40)..(42): Xaa is C or S
  MOD_RES (20)..(21)..(22)..(23)..(24): Xaa is A or G
  MOD_RES (25)..(26)..(27)..(28): Xaa is A or G or is absent
TPPTXXVPTRLSSLSILFFXXXXXXXXXLKVYPDMVVESXGX

SEQ ID NO: 44967 - protein, 33 aa, Artificial Sequence
  GFR-binding peptide
  MOD_RES (2)..(2): Xaa is C or S
TXAPTKLSSLSVLFFDDSSNVILKVYPNMVVRS

SEQ ID NO: 44968 - protein, 32 aa, Artificial Sequence
  GFR-binding peptide
  MOD_RES (31)..(31): Xaa is C or S
VSQDLSSLSILFFIGKTPKILKVYPMIVKSXK

SEQ ID NO: 44969 - protein, 34 aa, Artificial Sequence
  GFR-binding peptide
  MOD_RES (1)..(2): Xaa is C or S
XXVPTKLSSLSVLFFDDMGVPTLKVYPEGMSVAE

SEQ ID NO: 44970 - protein, 35 aa, Artificial Sequence
  GFR-binding peptide
  MOD_RES (35)..(35): Xaa is C or S
  MOD_RES (14)..(15)..(16)..(17)..(18): Xaa is A or G
  MOD_RES (19)..(20)..(21)..(22): Xaa is A or G or is absent
SRVHHSSLSVLFFXXXXXXXXXLKVYPRLEEHLEX

SEQ ID NO: 44971 - protein, 34 aa, Artificial Sequence
  GFR-binding peptide
  MOD_RES (32)..(34): Xaa is C or S
TPTKMSSLSMLFFNDKQQIILKVYPGMVVDRXGX

SEQ ID NO: 44972 - protein, 37 aa, Artificial Sequence
  GFR-binding peptide
  MOD_RES (4)..(5): Xaa is C or S
  MOD_RES (19)..(20)..(21)..(22)..(23): Xaa is A or G
  MOD_RES (24)..(25)..(26)..(27): Xaa is A or G or is absent
PKAXXVPTELSSLSMLFFXXXXXXXXXLKVYPEMVVE

SEQ ID NO: 44973 - protein, 38 aa, Artificial Sequence
  GFR-binding peptide
  MOD_RES (4)..(5)..(37): Xaa is C or S
PKPXXAPTQLSSLSVLFFDDSSNVILKVYPNMVVRAXG

SEQ ID NO: 44974 - protein, 39 aa, Artificial Sequence
  GFR-binding peptide
  MOD_RES (4)..(5)..(36)..(38): Xaa is C or S
ASPXXVSQDLSSLSILFFIGKTPKILKVYPMIVKSXKXS

SEQ ID NO: 44975 - protein, 34 aa, Artificial Sequence
  GFR-binding peptide
  MOD_RES (1)..(1): Xaa is C or S
  MOD_RES (15)..(16)..(17)..(18)..(19): Xaa is A or G
  MOD_RES (20)..(21)..(22)..(23): Xaa is A or G or is absent
XAPTKLSSLSVLFFXXXXXXXXXLKVYPNMVVKA

SEQ ID NO: 44976 - protein, 38 aa, Artificial Sequence
  GFR-binding peptide
  MOD_RES (4)..(5)..(37): Xaa is C or S
PEPXXVPEKMSSLSILFFDENKNVVLKVYPNMTVESXA

SEQ ID NO: 44977 - protein, 34 aa, Artificial Sequence
  GFR-binding peptide
  MOD_RES (1)..(33): Xaa is C or S
XVPEKMSSLSILFFDENKNVVLKVYPNMTVESXA

SEQ ID NO: 44978 - protein, 39 aa, Artificial Sequence
  GFR-binding peptide
  MOD_RES (5)..(6)..(37)..(39): Xaa is C or S
SASPXXVSQDLSSLSILFFIGKTPKILKVYPMIVKSXKX

SEQ ID NO: 44979 - protein, 42 aa, Artificial Sequence
  GFR-binding peptide
  MOD_RES (5)..(6)..(40)..(42): Xaa is C or S
  MOD_RES (20)..(21)..(22)..(23)..(24): Xaa is A or G
  MOD_RES (25)..(26)..(27)..(28): Xaa is A or G or is absent
IPEPXXVPEKMSSLSILFFXXXXXXXXXLKVYPNMTVESXAX

SEQ ID NO: 44980 - protein, 37 aa, Artificial Sequence
  GFR-binding peptide
  MOD_RES (1)..(2)..(34)..(36): Xaa is C or S
XXVPTRLSSLSILFFDSANNVVLKVYPDMVVESXGXR

SEQ ID NO: 44981 - protein, 37 aa, Artificial Sequence
  GFR-binding peptide
  MOD_RES (2)..(36): Xaa is C or S
  MOD_RES (16)..(17)..(18)..(19)..(20): Xaa is A or G
  MOD_RES (21)..(22)..(23)..(24): Xaa is A or G or is absent
TXAPTKLSSLSVLFFXXXXXXXXXLKVYPNMVVRSXG

SEQ ID NO: 44982 - protein, 38 aa, Artificial Sequence
  GFR-binding peptide
  MOD_RES (4)..(5)..(38): Xaa is C or S
GKAXXVPTKLSSLSVLFFDDMGVPTLKVYPEGMSVAEX

SEQ ID NO: 44983 - protein, 37 aa, Artificial Sequence
  GFR-binding peptide
  MOD_RES (4)..(5)..(36): Xaa is C or S
PSTXXAPVKTSSLSMLFFDNGRVLLLKVYPMIVEEXG

SEQ ID NO: 44984 - protein, 39 aa, Artificial Sequence
  GFR-binding peptide
  MOD_RES (5)..(6)..(38): Xaa is C or S
VPKPXXAPTQLSSLSVLFFDDSSNVILKVYPNMVVRAXG

SEQ ID NO: 44985 - protein, 41 aa, Artificial Sequence
  GFR-binding peptide
  MOD_RES (5)..(6)..(40): Xaa is C or S
  MOD_RES (20)..(21)..(22)..(23)..(24): Xaa is A or G
  MOD_RES (25)..(26)..(27)..(28): Xaa is A or G or is absent
VPKPXXAPTQLSSLSVLFFXXXXXXXXXLKVYPNMVVRAXG

SEQ ID NO: 44986 - protein, 41 aa, Artificial Sequence
  GFR-binding peptide
  MOD_RES (1)..(38)..(40): Xaa is C or S
XQPSRVHHSSLSVLFFEYVRKKPKLLKVYPRLEEHLEXAXA

SEQ ID NO: 44987 - protein, 34 aa, Artificial Sequence
  GFR-binding peptide
  MOD_RES (34)..(34): Xaa is C or S
  MOD_RES (14)..(15)..(16)..(17)..(18): Xaa is A or G
  MOD_RES (19)..(20)..(21)..(22): Xaa is A or G or is absent
TPTKMSSLSMLFFXXXXXXXXXLKVYPGMVVDRX

SEQ ID NO: 44988 - protein, 39 aa, Artificial Sequence
  GFR-binding peptide
  MOD_RES (2)..(36)..(38): Xaa is C or S
  MOD_RES (16)..(17)..(18)..(19)..(20): Xaa is A or G
  MOD_RES (21)..(22)..(23)..(24): Xaa is A or G or is absent
TXAPTKLSSLSVLFFXXXXXXXXXLKVYPNMVVRSXGXH

SEQ ID NO: 44989 - protein, 30 aa, Artificial Sequence; identical to SEQ ID NO: 661
  GFR-binding peptide

SEQ ID NO: 44990 - protein, 40 aa, Artificial Sequence
  GFR-binding peptide
  MOD_RES (3)..(40): Xaa is C or S
  MOD_RES (19)..(20)..(21)..(22)..(23): Xaa is A or G
  MOD_RES (24)..(25)..(26)..(27): Xaa is A or G or is absent
VKXQPSRVHHSSLSVLFFXXXXXXXXXLKVYPRLEEHLEX

SEQ ID NO: 44991 - protein, 37 aa, Artificial Sequence
  GFR-binding peptide
  MOD_RES (1)..(35)..(37): Xaa is C or S
  MOD_RES (15)..(16)..(17)..(18)..(19): Xaa is A or G
  MOD_RES (20)..(21)..(22)..(23): Xaa is A or G or is absent
XVPEKMSSLSILFFXXXXXXXXXLKVYPNMTVESXAX

SEQ ID NO: 44992 - protein, 38 aa, Artificial Sequence
  GFR-binding peptide
  MOD_RES (4)..(5)..(38): Xaa is C or S
  MOD_RES (19)..(20)..(21)..(22)..(23): Xaa is A or G
  MOD_RES (24)..(25)..(26)..(27): Xaa is A or G or is absent
ASPXXVSQDLSSLSILFFXXXXXXXXXLKVYPMIVKSX

SEQ ID NO: 44993 - protein, 34 aa, Artificial Sequence
  GFR-binding peptide
  MOD_RES (14)..(15)..(16)..(17)..(18): Xaa is A or G
  MOD_RES (19)..(20)..(21)..(22): Xaa is A or G or is absent
VPTKLSSLSVLFFXXXXXXXXXLKVYPEGMSVAE

SEQ ID NO: 44994 - protein, 33 aa, Artificial Sequence
  GFR-binding peptide
  MOD_RES (14)..(15)..(16)..(17)..(18): Xaa is A or G
  MOD_RES (19)..(20)..(21)..(22): Xaa is A or G or is absent
VPTEESSLSMLFFXXXXXXXXXLKVYPFLQHNK

SEQ ID NO: 44995 - protein, 40 aa, Artificial Sequence
  GFR-binding peptide
  MOD_RES (3)..(4)..(37)..(39): Xaa is C or S
  MOD_RES (18)..(19)..(20)..(21)..(22): Xaa is A or G
  MOD_RES (23)..(24)..(25)..(26): Xaa is A or G or is absent
SPXXVPQDLSSLSILFFXXXXXXXXXLKVYPMVVKSXKXS

SEQ ID NO: 44996 - protein, 39 aa, Artificial Sequence
  GFR-binding peptide
  MOD_RES (3)..(4)..(38): Xaa is C or S
  MOD_RES (18)..(19)..(20)..(21)..(22): Xaa is A or G
  MOD_RES (23)..(24)..(25)..(26): Xaa is A or G or is absent
EPXXVPEKMSSLSILFFXXXXXXXXXLKVYPNMTVESXA

SEQ ID NO: 44997 - protein, 37 aa, Artificial Sequence
  GFR-binding peptide
  MOD_RES (3)..(37): Xaa is C or S
LEXVPTEESSLSMLFFRIKPHQGQHLKVYPFLQHNKX

SEQ ID NO: 44998 - protein, 43 aa, Artificial Sequence
  GFR-binding peptide
  MOD_RES (6)..(7)..(41)..(43): Xaa is C or S
  MOD_RES (21)..(22)..(23)..(24)..(25): Xaa is A or G
  MOD_RES (26)..(27)..(28)..(29): Xaa is A or G or is absent
AVPKAXXAPTKLSSLSVLFFXXXXXXXXXLKVYPNMVVKAXGX

SEQ ID NO: 44999 - protein, 44 aa, Artificial Sequence
  GFR-binding peptide
  MOD_RES (6)..(7)..(41)..(43): Xaa is C or S
  MOD_RES (21)..(22)..(23)..(24)..(25): Xaa is A or G
  MOD_RES (26)..(27)..(28)..(29): Xaa is A or G or is absent
YVPKPXXAPTKLSSLSVLFFXXXXXXXXXLKVYPNMVVRSXGXH

SEQ ID NO: 45000 - protein, 40 aa, Artificial Sequence
  GFR-binding peptide
  MOD_RES (6)..(7): Xaa is C or S
  MOD_RES (21)..(22)..(23)..(24)..(25): Xaa is A or G
  MOD_RES (26)..(27)..(28)..(29): Xaa is A or G or is absent
SIPKAXXVPTELSSLSMLFFXXXXXXXXXLKVYPEMVVEG

SEQ ID NO: 45001 - protein, 41 aa, Artificial Sequence
  GFR-binding peptide
  MOD_RES (3)..(4)..(38)..(40): Xaa is C or S
  MOD_RES (18)..(19)..(20)..(21)..(22): Xaa is A or G
  MOD_RES (23)..(24)..(25)..(26): Xaa is A or G or is absent
KAXXAPTKLSSLSVLFFXXXXXXXXXLKVYPNMVVKAXGXH

SEQ ID NO: 45002 - protein, 42 aa, Artificial Sequence
  GFR-binding peptide
  MOD_RES (3)..(40)..(42): Xaa is C or S
  MOD_RES (19)..(20)..(21)..(22)..(23): Xaa is A or G
  MOD_RES (24)..(25)..(26)..(27): Xaa is A or G or is absent
VKXQPSRVHHSSLSVLFFXXXXXXXXXLKVYPRLEEHLEXAX

SEQ ID NO: 45003 - protein, 38 aa, Artificial Sequence
  GFR-binding peptide
  MOD_RES (3)..(4)..(37): Xaa is C or S
  MOD_RES (18)..(19)..(20)..(21)..(22): Xaa is A or G
  MOD_RES (23)..(24)..(25)..(26): Xaa is A or G or is absent
SPXXVPQDLSSLSILFFXXXXXXXXXLKVYPMVVKSXK

SEQ ID NO: 45004 - protein, 37 aa, Artificial Sequence
  GFR-binding peptide
  MOD_RES (3)..(4)..(36): Xaa is C or S
KPXXAPTKLSSLSVLFFDDSSNVILKVYPNMVVRSXG

SEQ ID NO: 45005 - protein, 34 aa, Artificial Sequence
  GFR-binding peptide
  MOD_RES (34)..(34): Xaa is C or S
  MOD_RES (14)..(15)..(16)..(17)..(18): Xaa is A or G
  MOD_RES (19)..(20)..(21)..(22): Xaa is A or G or is absent
VPTEESSLSMLFFXXXXXXXXXLKVYPFLQHNKX

SEQ ID NO: 45006 - protein, 34 aa, Artificial Sequence
  GFR-binding peptide
  MOD_RES (2)..(34): Xaa is C or S
TXAPTKLSSLSVLFFDDSSNVILKVYPNMVVRSX

SEQ ID NO: 45007 - protein, 34 aa, Artificial Sequence
  GFR-binding peptide
  MOD_RES (1)..(2)..(33): Xaa is C or S
XXAPVKTSSLSMLFFDNGRVLLLKVYPMIVEEXG

SEQ ID NO: 45008 - protein, 34 aa, Artificial Sequence
  GFR-binding peptide
  MOD_RES (1)..(2): Xaa is C or S
  MOD_RES (16)..(17)..(18)..(19)..(20): Xaa is A or G
  MOD_RES (21)..(22)..(23)..(24): Xaa is A or G or is absent
XXVPQDLSSLSILFFXXXXXXXXXLKVYPMVVKS

SEQ ID NO: 45009 - protein, 32 aa, Artificial Sequence
  GFR-binding peptide
  MOD_RES (32)..(32): Xaa is C or S
VPARLSSLSILFFDAANNVVLKVYPDMVVEAX

SEQ ID NO: 45010 - protein, 36 aa, Artificial Sequence
  GFR-binding peptide
  MOD_RES (1)..(2)..(36): Xaa is C or S
  MOD_RES (16)..(17)..(18)..(19)..(20): Xaa is A or G
  MOD_RES (21)..(22)..(23)..(24): Xaa is A or G or is absent
XXVPARLSSLSILFFXXXXXXXXXLKVYPDMVVEAX

SEQ ID NO: 45011 - protein, 34 aa, Artificial Sequence
  GFR-binding peptide
  MOD_RES (1)..(2): Xaa is C or S
  MOD_RES (16)..(17)..(18)..(19)..(20): Xaa is A or G
  MOD_RES (21)..(22)..(23)..(24): Xaa is A or G or is absent
XXTPTKMSSLSMLFFXXXXXXXXXLKVYPGMVVD

SEQ ID NO: 45012 - protein, 37 aa, Artificial Sequence
  GFR-binding peptide
  MOD_RES (34)..(36): Xaa is C or S
  MOD_RES (14)..(15)..(16)..(17)..(18): Xaa is A or G
  MOD_RES (19)..(20)..(21)..(22): Xaa is A or G or is absent
APTKLSSLSVLFFXXXXXXXXXLKVYPNMVVRSXGXH

SEQ ID NO: 45013 - protein, 40 aa, Artificial Sequence
  GFR-binding peptide
  MOD_RES (5)..(39): Xaa is C or S
EGLEXVPTEESSLSMLFFRIKPHQGQHLKVYPFLQHNKXE

SEQ ID NO: 45014 - protein, 39 aa, Artificial Sequence
  GFR-binding peptide
  MOD_RES (5)..(5): Xaa is C or S
  MOD_RES (21)..(22)..(23)..(24)..(25): Xaa is A or G
  MOD_RES (26)..(27)..(28)..(29): Xaa is A or G or is absent
SSVKXQPSRVHHSSLSVLFFXXXXXXXXXLKVYPRLEEH

SEQ ID NO: 45015 - protein, 36 aa, Artificial Sequence
  GFR-binding peptide
  MOD_RES (1)..(35): Xaa is C or S
XVPTEESSLSMLFFRIKPHQGQHLKVYPFLQHNKXE

SEQ ID NO: 45016 - protein, 38 aa, Artificial Sequence
  GFR-binding peptide
  MOD_RES (5)..(6): Xaa is C or S
VGKAXXVPTKLSSLSVLFFDDMGVPTLKVYPEGMSVAE

SEQ ID NO: 45017 - protein, 34 aa, Artificial Sequence
  GFR-binding peptide
  MOD_RES (1)..(2)..(33): Xaa is C or S
XXVSQDLSSLSILFFIGKTPKILKVYPMIVKSXK

SEQ ID NO: 45018 - protein, 42 aa, Artificial Sequence
  GFR-binding peptide
  MOD_RES (4)..(41): Xaa is C or S
SVKXQPSRVHHSSLSVLFFEYVRKKPKLLKVYPRLEEHLEXA

SEQ ID NO: 45019 - protein, 41 aa, Artificial Sequence
  GFR-binding peptide
  MOD_RES (6)..(7)..(39)..(41): Xaa is C or S
YVPKPXXAPTKLSSLSVLFFDDSSNVILKVYPNMVVRSXGX

SEQ ID NO: 45020 - protein, 38 aa, Artificial Sequence
  GFR-binding peptide
  MOD_RES (3)..(37): Xaa is C or S
LEXVPTEESSLSMLFFRIKPHQGQHLKVYPFLQHNKXE

SEQ ID NO: 45021 - protein, 38 aa, Artificial Sequence
  GFR-binding peptide
  MOD_RES (6)..(7)..(38): Xaa is C or S
ASASPXXVSQDLSSLSILFFIGKTPKILKVYPMIVKSX

SEQ ID NO: 45022 - protein, 39 aa, Artificial Sequence
  GFR-binding peptide
  MOD_RES (1)..(38): Xaa is C or S
  MOD_RES (17)..(18)..(19)..(20)..(21): Xaa is A or G
  MOD_RES (22)..(23)..(24)..(25): Xaa is A or G or is absent
XQPSRVHHSSLSVLFFXXXXXXXXXLKVYPRLEEHLEXA

SEQ ID NO: 45023 - protein, 42 aa, Artificial Sequence
  GFR-binding peptide
  MOD_RES (5)..(6)..(40)..(42): Xaa is C or S
  MOD_RES (20)..(21)..(22)..(23)..(24): Xaa is A or G
  MOD_RES (25)..(26)..(27)..(28): Xaa is A or G or is absent
APASXXVPARLSSLSILFFXXXXXXXXXLKVYPDMVVEAXGX

SEQ ID NO: 45024 - protein, 39 aa, Artificial Sequence
  GFR-binding peptide
  MOD_RES (6)..(7)..(39): Xaa is C or S
HVPKPXXAPTKLSSLSVLFFDDSSNVILKVYPNMVVRSX

SEQ ID NO: 45025 - protein, 39 aa, Artificial Sequence
  GFR-binding peptide
  MOD_RES (4)..(5)..(37)..(39): Xaa is C or S
PASXXVPARLSSLSILFFDAANNVVLKVYPDMVVEAXGX

SEQ ID NO: 45026 - protein, 38 aa, Artificial Sequence
  GFR-binding peptide
  MOD_RES (4)..(5)..(36)..(38): Xaa is C or S
ASPXXVPQDLSSLSILFFVGRTPKVLKVYPMVVKSXKX

SEQ ID NO: 45027 - protein, 39 aa, Artificial Sequence
  GFR-binding peptide
  MOD_RES (5)..(6)..(37)..(39): Xaa is C or S
SASPXXVPQDLSSLSILFFVGRTPKVLKVYPMVVKSXKX

SEQ ID NO: 45028 - protein, 35 aa, Artificial Sequence
  GFR-binding peptide
  MOD_RES (32)..(34): Xaa is C or S
TPTKMSSLSMLFFNDKQQIILKVYPGMVVDRXGXS

SEQ ID NO: 45029 - protein, 37 aa, Artificial Sequence
  GFR-binding peptide
  MOD_RES (3)..(4)..(36): Xaa is C or S
ASXXVPARLSSLSILFFDAANNVVLKVYPDMVVEAXG

SEQ ID NO: 45030 - protein, 33 aa, Artificial Sequence
  GFR-binding peptide
SRVHHSSLSVLFFEYVRKKPKLLKVYPRLEEHL

SEQ ID NO: 45031 - protein, 36 aa, Artificial Sequence
  GFR-binding peptide
  MOD_RES (2)..(3)..(36): Xaa is C or S
  MOD_RES (17)..(18)..(19)..(20)..(21): Xaa is A or G
  MOD_RES (22)..(23)..(24)..(25): Xaa is A or G or is absent
PXXVSQDLSSLSILFFXXXXXXXXXLKVYPMIVKSX

SEQ ID NO: 45032 - protein, 40 aa, Artificial Sequence
  GFR-binding peptide
  MOD_RES (5)..(6)..(39): Xaa is C or S
  MOD_RES (20)..(21)..(22)..(23)..(24): Xaa is A or G
  MOD_RES (25)..(26)..(27)..(28): Xaa is A or G or is absent
SASPXXVPQDLSSLSILFFXXXXXXXXXLKVYPMVVKSXK

SEQ ID NO: 45033 - protein, 36 aa, Artificial Sequence
  GFR-binding peptide
  MOD_RES (1)..(35): Xaa is C or S
  MOD_RES (15)..(16)..(17)..(18)..(19): Xaa is A or G
  MOD_RES (20)..(21)..(22)..(23): Xaa is A or G or is absent
XVPTRLSSLSILFFXXXXXXXXXLKVYPDMVVESXG

SEQ ID NO: 45034 - protein, 30 aa, Artificial Sequence; identical to SEQ ID NO: 658
  GFR-binding peptide

SEQ ID NO: 45035 - protein, 41 aa, Artificial Sequence
  GFR-binding peptide
  MOD_RES (6)..(7)..(41): Xaa is C or S
  MOD_RES (21)..(22)..(23)..(24)..(25): Xaa is A or G
  MOD_RES (26)..(27)..(28)..(29): Xaa is A or G or is absent
GSAGPXXTPTKMSSLSMLFFXXXXXXXXXLKVYPGMVVDRX

SEQ ID NO: 45036 - protein, 33 aa, Artificial Sequence
  GFR-binding peptide
  MOD_RES (1)..(1): Xaa is C or S
  MOD_RES (15)..(16)..(17)..(18)..(19): Xaa is A or G
  MOD_RES (20)..(21)..(22)..(23): Xaa is A or G or is absent
XTPTKMSSLSMLFFXXXXXXXXXLKVYPGMVVD

SEQ ID NO: 45037 - protein, 40 aa, Artificial Sequence
  GFR-binding peptide
  MOD_RES (4)..(5)..(39): Xaa is C or S
  MOD_RES (19)..(20)..(21)..(22)..(23): Xaa is A or G
  MOD_RES (24)..(25)..(26)..(27): Xaa is A or G or is absent
PKAXXVPTELSSLSMLFFXXXXXXXXXLKVYPEMVVEGXG

SEQ ID NO: 45038 - protein, 36 aa, Artificial Sequence
  GFR-binding peptide
  MOD_RES (34)..(36): Xaa is C or S
  MOD_RES (14)..(15)..(16)..(17)..(18): Xaa is A or G
  MOD_RES (19)..(20)..(21)..(22): Xaa is A or G or is absent
VPTKLSSLSILFFXXXXXXXXXLKVYPGMAVSEXGX

SEQ ID NO: 45039 - protein, 36 aa, Artificial Sequence
  GFR-binding peptide
  MOD_RES (4)..(5)..(36): Xaa is C or S
ASPXXVSQDLSSLSILFFIGKTPKILKVYPMIVKSX

SEQ ID NO: 45040 - protein, 38 aa, Artificial Sequence
  GFR-binding peptide
  MOD_RES (4)..(4): Xaa is C or S
SVKXQPSRVHHSSLSVLFFEYVRKKPKLLKVYPRLEEH

SEQ ID NO: 45041 - protein, 37 aa, Artificial Sequence
  GFR-binding peptide
  MOD_RES (5)..(6): Xaa is C or S
ASKAXXVPTKLSSLSILFFDKGVVTYLKVYPGMAVSE

SEQ ID NO: 45042 - protein, 37 aa, Artificial Sequence
  GFR-binding peptide
  MOD_RES (2)..(3)..(34)..(36): Xaa is C or S
TXXAPVKTSSLSMLFFDNGRVLLLKVYPMIVEEXGXL

SEQ ID NO: 45043 - protein, 37 aa, Artificial Sequence
  GFR-binding peptide
  MOD_RES (1)..(2)..(35)..(37): Xaa is C or S
  MOD_RES (16)..(17)..(18)..(19)..(20): Xaa is A or G
  MOD_RES (21)..(22)..(23)..(24): Xaa is A or G or is absent
XXVSQDLSSLSILFFXXXXXXXXXLKVYPMIVKSXKX

SEQ ID NO: 45044 - protein, 33 aa, Artificial Sequence
  GFR-binding peptide
  MOD_RES (2)..(3): Xaa is C or S
PXXAPTQLSSLSVLFFDDSSNVILKVYPNMVVR

SEQ ID NO: 45045 - protein, 35 aa, Artificial Sequence
  GFR-binding peptide
  MOD_RES (16)..(17)..(18)..(19)..(20): Xaa is A or G
  MOD_RES (21)..(22)..(23)..(24): Xaa is A or G or is absent
QPSRVHHSSLSVLFFXXXXXXXXXLKVYPRLEEHL

SEQ ID NO: 45046 - protein, 41 aa, Artificial Sequence
  GFR-binding peptide
  MOD_RES (4)..(41): Xaa is C or S
SVKXQPSRVHHSSLSVLFFEYVRKKPKLLKVYPRLEEHLEX

SEQ ID NO: 45047 - protein, 37 aa, Artificial Sequence
  GFR-binding peptide
  MOD_RES (2)..(3)..(34)..(36): Xaa is C or S
PXXVPQDLSSLSILFFVGRTPKVLKVYPMVVKSXKXS

SEQ ID NO: 45048 - protein, 39 aa, Artificial Sequence
  GFR-binding peptide
  MOD_RES (3)..(37)..(39): Xaa is C or S
  MOD_RES (17)..(18)..(19)..(20)..(21): Xaa is A or G
  MOD_RES (22)..(23)..(24)..(25): Xaa is A or G or is absent
LEXVPTEESSLSMLFFXXXXXXXXXLKVYPFLQHNKXEX

SEQ ID NO: 45049 - protein, 43 aa, Artificial Sequence
  GFR-binding peptide
  MOD_RES (4)..(5)..(40)..(42): Xaa is C or S
  MOD_RES (19)..(20)..(21)..(22)..(23): Xaa is A or G
  MOD_RES (24)..(25)..(26)..(27): Xaa is A or G or is absent
GKAXXVPTKLSSLSVLFFXXXXXXXXXLKVYPEGMSVAEXGXR

SEQ ID NO: 45050 - protein, 36 aa, Artificial Sequence
  GFR-binding peptide
  MOD_RES (3)..(4): Xaa is C or S
  MOD_RES (18)..(19)..(20)..(21)..(22): Xaa is A or G
  MOD_RES (23)..(24)..(25)..(26): Xaa is A or G or is absent
PTXXVPTRLSSLSILFFXXXXXXXXXLKVYPDMVVE

SEQ ID NO: 45051 - protein, 42 aa, Artificial Sequence
  GFR-binding peptide
  MOD_RES (7)..(39)..(41): Xaa is C or S
HVTKPTXAPTKLSSLSVLFFDDSSNVILKVYPNMVVRSXGXH

SEQ ID NO: 45052 - protein, 36 aa, Artificial Sequence
  GFR-binding peptide
  MOD_RES (2)..(36): Xaa is C or S
  MOD_RES (16)..(17)..(18)..(19)..(20): Xaa is A or G
  MOD_RES (21)..(22)..(23)..(24): Xaa is A or G or is absent
TXAPTKLSSLSVLFFXXXXXXXXXLKVYPNMVVRSX

SEQ ID NO: 45053 - protein, 41 aa, Artificial Sequence
  GFR-binding peptide
  MOD_RES (6)..(40): Xaa is C or S
  MOD_RES (20)..(21)..(22)..(23)..(24): Xaa is A or G
  MOD_RES (25)..(26)..(27)..(28): Xaa is A or G or is absent
VTKPTXAPTKLSSLSVLFFXXXXXXXXXLKVYPNMVVRSXG

SEQ ID NO: 45054 - protein, 37 aa, Artificial Sequence
  GFR-binding peptide
  MOD_RES (34)..(36): Xaa is C or S
  MOD_RES (14)..(15)..(16)..(17)..(18): Xaa is A or G
  MOD_RES (19)..(20)..(21)..(22): Xaa is A or G or is absent
VPARLSSLSILFFXXXXXXXXXLKVYPDMVVEAXGXR

SEQ ID NO: 45055 - protein, 34 aa, Artificial Sequence
  GFR-binding peptide
  MOD_RES (34)..(34): Xaa is C or S
  MOD_RES (14)..(15)..(16)..(17)..(18): Xaa is A or G
  MOD_RES (19)..(20)..(21)..(22): Xaa is A or G or is absent
APTKLSSLSVLFFXXXXXXXXXLKVYPNMVVKAX

SEQ ID NO: 45056 - protein, 34 aa, Artificial Sequence
  GFR-binding peptide
  MOD_RES (1)..(2)..(34): Xaa is C or S
XXAPTQLSSLSVLFFDDSSNVILKVYPNMVVRAX

SEQ ID NO: 45057 - protein, 39 aa, Artificial Sequence
  GFR-binding peptide
  MOD_RES (4)..(5)..(36)..(38): Xaa is C or S
PSTXXAPVKTSSLSMLFFDNGRVLLLKVYPMIVEEXGXL

SEQ ID NO: 45058 - protein, 35 aa, Artificial Sequence
  GFR-binding peptide
  MOD_RES (2)..(3)..(35): Xaa is C or S
AXXVPTKLSSLSILFFDKGVVTYLKVYPGMAVSEX

SEQ ID NO: 45059 - protein, 44 aa, Artificial Sequence
  GFR-binding peptide
  MOD_RES (6)..(7)..(41)..(43): Xaa is C or S
  MOD_RES (21)..(22)..(23)..(24)..(25): Xaa is A or G
  MOD_RES (26)..(27)..(28)..(29): Xaa is A or G or is absent
SIPKAXXVPTELSSLSMLFFXXXXXXXXXLKVYPEMVVEGXGXR

SEQ ID NO: 45060 - protein, 36 aa, Artificial Sequence
  GFR-binding peptide
  MOD_RES (5)..(6): Xaa is C or S
TPPTXXVPTRLSSLSILFFDSANNVVLKVYPDMVVE

SEQ ID NO: 45061 - protein, 39 aa, Artificial Sequence
  GFR-binding peptide
  MOD_RES (1)..(2)..(36)..(38): Xaa is C or S
  MOD_RES (16)..(17)..(18)..(19)..(20): Xaa is A or G
  MOD_RES (21)..(22)..(23)..(24): Xaa is A or G or is absent
XXVPTRLSSLSILFFXXXXXXXXXLKVYPDMVVESXGXR

SEQ ID NO: 45062 - protein, 36 aa, Artificial Sequence
  GFR-binding peptide
  MOD_RES (4)..(36): Xaa is C or S
KPTXAPTKLSSLSVLFFDDSSNVILKVYPNMVVRSX

SEQ ID NO: 45063 - protein, 36 aa, Artificial Sequence
  GFR-binding peptide
  MOD_RES (4)..(5)..(36): Xaa is C or S
PSTXXAPVKTSSLSMLFFDNGRVLLLKVYPMIVEEX

SEQ ID NO: 45064 - protein, 35 aa, Artificial Sequence
  GFR-binding peptide
  MOD_RES (1)..(35): Xaa is C or S
  MOD_RES (15)..(16)..(17)..(18)..(19): Xaa is A or G
  MOD_RES (20)..(21)..(22)..(23): Xaa is A or G or is absent
XVPARLSSLSILFFXXXXXXXXXLKVYPDMVVEAX

SEQ ID NO: 45065 - protein, 31 aa, Artificial Sequence
  GFR-binding peptide
  MOD_RES (1)..(1): Xaa is C or S
XTPTKMSSLSMLFFNDKQQIILKVYPGMVVD

SEQ ID NO: 45066 - protein, 31 aa, Artificial Sequence
  GFR-binding peptide
VPTRLSSLSILFFDSANNVVLKVYPDMVVES

SEQ ID NO: 45067 - protein, 36 aa, Artificial Sequence
  GFR-binding peptide
  MOD_RES (5)..(6): Xaa is C or S
ASKAXXVPTKLSSLSILFFDKGVVTYLKVYPGMAVS

SEQ ID NO: 45068 - protein, 34 aa, Artificial Sequence
  GFR-binding peptide
  MOD_RES (31)..(33): Xaa is C or S
VPQALSSLSILFFVGRKPKVLKVYPMIVRSXKXS

SEQ ID NO: 45069 - protein, 42 aa, Artificial Sequence
  GFR-binding peptide
  MOD_RES (5)..(6)..(39)..(41): Xaa is C or S
  MOD_RES (20)..(21)..(22)..(23)..(24): Xaa is A or G
  MOD_RES (25)..(26)..(27)..(28): Xaa is A or G or is absent
VPSTXXAPVKTSSLSMLFFXXXXXXXXXLKVYPMIVEEXGXL

SEQ ID NO: 45070 - protein, 37 aa, Artificial Sequence
  GFR-binding peptide
  MOD_RES (5)..(5): Xaa is C or S
  MOD_RES (19)..(20)..(21)..(22)..(23): Xaa is A or G
  MOD_RES (24)..(25)..(26)..(27): Xaa is A or G or is absent
TKPTXAPTKLSSLSVLFFXXXXXXXXXLKVYPNMVVR

SEQ ID NO: 45071 - protein, 41 aa, Artificial Sequence
  GFR-binding peptide
  MOD_RES (5)..(6)..(40): Xaa is C or S
  MOD_RES (20)..(21)..(22)..(23)..(24): Xaa is A or G
  MOD_RES (25)..(26)..(27)..(28): Xaa is A or G or is absent
SAGPXXTPTKMSSLSMLFFXXXXXXXXXLKVYPGMVVDRXG

SEQ ID NO: 45072 - protein, 40 aa, Artificial Sequence
  GFR-binding peptide
  MOD_RES (5)..(6)..(37)..(39): Xaa is C or S
SASPXXVPQDLSSLSILFFVGRTPKVLKVYPMVVKSXKXS

SEQ ID NO: 45073 - protein, 34 aa, Artificial Sequence
  GFR-binding peptide
  MOD_RES (32)..(34): Xaa is C or S
VPTKLSSLSILFFDKGVVTYLKVYPGMAVSEXGX

SEQ ID NO: 45074 - protein, 43 aa, Artificial Sequence
  GFR-binding peptide
  MOD_RES (6)..(7)..(40)..(42): Xaa is C or S
  MOD_RES (21)..(22)..(23)..(24)..(25): Xaa is A or G
  MOD_RES (26)..(27)..(28)..(29): Xaa is A or G or is absent
RVPSTXXAPVKTSSLSMLFFXXXXXXXXXLKVYPMIVEEXGXL

SEQ ID NO: 45075 - protein, 36 aa, Artificial Sequence
  GFR-binding peptide
  MOD_RES (2)..(3)..(36): Xaa is C or S
  MOD_RES (17)..(18)..(19)..(20)..(21): Xaa is A or G
  MOD_RES (22)..(23)..(24)..(25): Xaa is A or G or is absent
PXXVPQDLSSLSILFFXXXXXXXXXLKVYPMVVKSX

SEQ ID NO: 45076 - protein, 38 aa, Artificial Sequence
  GFR-binding peptide
  MOD_RES (5)..(37): Xaa is C or S
TKPTXAPTKLSSLSVLFFDDSSNVILKVYPNMVVRSXG

SEQ ID NO: 45077 - protein, 41 aa, Artificial Sequence
  GFR-binding peptide
  MOD_RES (6)..(7)..(39)..(41): Xaa is C or S
TVPKPXXAPTQLSSLSVLFFDDSSNVILKVYPNMVVRAXGX

SEQ ID NO: 45078 - protein, 39 aa, Artificial Sequence
  GFR-binding peptide
  MOD_RES (3)..(4)..(36)..(38): Xaa is C or S
KPXXAPTQLSSLSVLFFDDSSNVILKVYPNMVVRAXGXH

SEQ ID NO: 45079 - protein, 33 aa, Artificial Sequence
  GFR-binding peptide
  MOD_RES (1)..(33): Xaa is C or S
XAPTQLSSLSVLFFDDSSNVILKVYPNMVVRAX

SEQ ID NO: 45080 - protein, 37 aa, Artificial Sequence
  GFR-binding peptide
  MOD_RES (6)..(6): Xaa is C or S
VTKPTXAPTKLSSLSVLFFDDSSNVILKVYPNMVVRS

SEQ ID NO: 45081 - protein, 41 aa, Artificial Sequence
  GFR-binding peptide
  MOD_RES (7)..(41): Xaa is C or S
  MOD_RES (21)..(22)..(23)..(24)..(25): Xaa is A or G
  MOD_RES (26)..(27)..(28)..(29): Xaa is A or G or is absent
HVTKPTXAPTKLSSLSVLFFXXXXXXXXXLKVYPNMVVRSX

SEQ ID NO: 45082 - protein, 35 aa, Artificial Sequence
  GFR-binding peptide
  MOD_RES (2)..(2): Xaa is C or S
  MOD_RES (16)..(17)..(18)..(19)..(20): Xaa is A or G
  MOD_RES (21)..(22)..(23)..(24): Xaa is A or G or is absent
TXAPTKLSSLSVLFFXXXXXXXXXLKVYPNMVVRS

SEQ ID NO: 45083 - protein, 35 aa, Artificial Sequence
  GFR-binding peptide
  MOD_RES (34)..(34): Xaa is C or S
  MOD_RES (14)..(15)..(16)..(17)..(18): Xaa is A or G
  MOD_RES (19)..(20)..(21)..(22): Xaa is A or G or is absent
VPTEESSLSMLFFXXXXXXXXXLKVYPFLQHNKXE

SEQ ID NO: 45084 - protein, 33 aa, Artificial Sequence
  GFR-binding peptide
  MOD_RES (1)..(1): Xaa is C or S
  MOD_RES (15)..(16)..(17)..(18)..(19): Xaa is A or G
  MOD_RES (20)..(21)..(22)..(23): Xaa is A or G or is absent
XAPTKLSSLSVLFFXXXXXXXXXLKVYPNMVVR

SEQ ID NO: 45085 - protein, 41 aa, Artificial Sequence
  GFR-binding peptide
  MOD_RES (6)..(7)..(40): Xaa is C or S
  MOD_RES (21)..(22)..(23)..(24)..(25): Xaa is A or G
  MOD_RES (26)..(27)..(28)..(29): Xaa is A or G or is absent
ASAAPXXVPQALSSLSILFFXXXXXXXXXLKVYPMIVRSXK

SEQ ID NO: 45086 - protein, 33 aa, Artificial Sequence
  GFR-binding peptide
  MOD_RES (1)..(1): Xaa is C or S
  MOD_RES (15)..(16)..(17)..(18)..(19): Xaa is A or G
  MOD_RES (20)..(21)..(22)..(23): Xaa is A or G or is absent
XAPTKLSSLSVLFFXXXXXXXXXLKVYPNMVVK

SEQ ID NO: 45087 - protein, 34 aa, Artificial Sequence
  GFR-binding peptide
  MOD_RES (1)..(1): Xaa is C or S
XVPTEESSLSMLFFRIKPHQGQHLKVYPFLQHNK

SEQ ID NO: 45088 - protein, 37 aa, Artificial Sequence
  GFR-binding peptide
  MOD_RES (4)..(5)..(37): Xaa is C or S
PKPXXAPTKLSSLSVLFFDDSSNVILKVYPNMVVRSX

SEQ ID NO: 45089 - protein, 38 aa, Artificial Sequence
  GFR-binding peptide
  MOD_RES (5)..(5): Xaa is C or S
  MOD_RES (19)..(20)..(21)..(22)..(23): Xaa is A or G
  MOD_RES (24)..(25)..(26)..(27): Xaa is A or G or is absent
TKPTXAPTKLSSLSVLFFXXXXXXXXXLKVYPNMVVRS

SEQ ID NO: 45090 - protein, 38 aa, Artificial Sequence
  GFR-binding peptide
  MOD_RES (4)..(38): Xaa is C or S
GLEXVPTEESSLSMLFFRIKPHQGQHLKVYPFLQHNKX

SEQ ID NO: 45091 - protein, 42 aa, Artificial Sequence
  GFR-binding peptide
  MOD_RES (6)..(40)..(42): Xaa is C or S
DEGLEXVPTEESSLSMLFFRIKPHQGQHLKVYPFLQHNKXEX

SEQ ID NO: 45092 - protein, 41 aa, Artificial Sequence
  GFR-binding peptide
  MOD_RES (5)..(6)..(38)..(40): Xaa is C or S
ASKAXXVPTKLSSLSILFFDKGVVTYLKVYPGMAVSEXGXR

SEQ ID NO: 45093 - protein, 37 aa, Artificial Sequence
  GFR-binding peptide
  MOD_RES (5)..(37): Xaa is C or S
TKPTXAPTKLSSLSVLFFDDSSNVILKVYPNMVVRSX

SEQ ID NO: 45094 - protein, 32 aa, Artificial Sequence
  GFR-binding peptide
  MOD_RES (32)..(32): Xaa is C or S
APTKLSSLSVLFFDDSSNVILKVYPNMVVRSX

SEQ ID NO: 45095 - protein, 38 aa, Artificial Sequence
  GFR-binding peptide
  MOD_RES (4)..(5): Xaa is C or S
  MOD_RES (19)..(20)..(21)..(22)..(23): Xaa is A or G
  MOD_RES (24)..(25)..(26)..(27): Xaa is A or G or is absent
PEPXXVPEKMSSLSILFFXXXXXXXXXLKVYPNMTVES

SEQ ID NO: 45096 - protein, 36 aa, Artificial Sequence
  GFR-binding peptide
  MOD_RES (33)..(35): Xaa is C or S
  MOD_RES (14)..(15)..(16)..(17)..(18): Xaa is A or G
  MOD_RES (19)..(20)..(21)..(22): Xaa is A or G or is absent
APVKTSSLSMLFFXXXXXXXXXLKVYPMIVEEXGXL

SEQ ID NO: 45097 - protein, 43 aa, Artificial Sequence
  GFR-binding peptide
  MOD_RES (5)..(6)..(40)..(42): Xaa is C or S
  MOD_RES (20)..(21)..(22)..(23)..(24): Xaa is A or G
  MOD_RES (25)..(26)..(27)..(28): Xaa is A or G or is absent
VPKAXXAPTKLSSLSVLFFXXXXXXXXXLKVYPNMVVKAXGXH

SEQ ID NO: 45098 - protein, 39 aa, Artificial Sequence
  GFR-binding peptide
  MOD_RES (4)..(5)..(36)..(38): Xaa is C or S
AAPXXVPQALSSLSILFFVGRKPKVLKVYPMIVRSXKXS

SEQ ID NO: 45099 - protein, 35 aa, Artificial Sequence
  GFR-binding peptide
  MOD_RES (34)..(34): Xaa is C or S
  MOD_RES (14)..(15)..(16)..(17)..(18): Xaa is A or G
  MOD_RES (19)..(20)..(21)..(22): Xaa is A or G or is absent
VPTRLSSLSILFFXXXXXXXXXLKVYPDMVVESXG

SEQ ID NO: 45100 - protein, 40 aa, Artificial Sequence
  GFR-binding peptide
  MOD_RES (4)..(5)..(38)..(40): Xaa is C or S
  MOD_RES (19)..(20)..(21)..(22)..(23): Xaa is A or G
  MOD_RES (24)..(25)..(26)..(27): Xaa is A or G or is absent
ASPXXVPQDLSSLSILFFXXXXXXXXXLKVYPMVVKSXKX

SEQ ID NO: 45101 - protein, 36 aa, Artificial Sequence
  GFR-binding peptide
  MOD_RES (34)..(36): Xaa is C or S
  MOD_RES (14)..(15)..(16)..(17)..(18): Xaa is A or G
  MOD_RES (19)..(20)..(21)..(22): Xaa is A or G or is absent
APTKLSSLSVLFFXXXXXXXXXLKVYPNMVVRSXGX

SEQ ID NO: 45102 - protein, 37 aa, Artificial Sequence
  GFR-binding peptide
  MOD_RES (4)..(5)..(36): Xaa is C or S
ASPXXVSQDLSSLSILFFIGKTPKILKVYPMIVKSXK

SEQ ID NO: 45103 - protein, 35 aa, Artificial Sequence
  GFR-binding peptide
  MOD_RES (1)..(2)..(33)..(35): Xaa is C or S
XXVPQALSSLSILFFVGRKPKVLKVYPMIVRSXKX

SEQ ID NO: 45104 - protein, 33 aa, Artificial Sequence
  GFR-binding peptide
  MOD_RES (1)..(2): Xaa is C or S
XXVPEKMSSLSILFFDENKNVVLKVYPNMTVES

SEQ ID NO: 45105 - protein, 37 aa, Artificial Sequence
  GFR-binding peptide
  MOD_RES (2)..(3)..(36): Xaa is C or S
  MOD_RES (17)..(18)..(19)..(20)..(21): Xaa is A or G
  MOD_RES (22)..(23)..(24)..(25): Xaa is A or G or is absent
PXXVPQALSSLSILFFXXXXXXXXXLKVYPMIVRSXK

SEQ ID NO: 45106 - protein, 31 aa, Artificial Sequence
  GFR-binding peptide
APTKLSSLSVLFFDDSSNVILKVYPNMVVRS

SEQ ID NO: 45107 - protein, 33 aa, Artificial Sequence
  GFR-binding peptide
  MOD_RES (33)..(33): Xaa is C or S
  MOD_RES (14)..(15)..(16)..(17)..(18): Xaa is A or G
  MOD_RES (19)..(20)..(21)..(22): Xaa is A or G or is absent
VPQDLSSLSILFFXXXXXXXXXLKVYPMVVKSX

SEQ ID NO: 45108 - protein, 34 aa, Artificial Sequence
  GFR-binding peptide
  MOD_RES (4)..(4): Xaa is C or S
KPTXAPTKLSSLSVLFFDDSSNVILKVYPNMVVR

SEQ ID NO: 45109 - protein, 38 aa, Artificial Sequence
  GFR-binding peptide
  MOD_RES (4)..(5): Xaa is C or S
  MOD_RES (19)..(20)..(21)..(22)..(23): Xaa is A or G
  MOD_RES (24)..(25)..(26)..(27): Xaa is A or G or is absent
PPTXXVPTRLSSLSILFFXXXXXXXXXLKVYPDMVVES

SEQ ID NO: 45110 - protein, 33 aa, Artificial Sequence
  GFR-binding peptide
  MOD_RES (3)..(3): Xaa is C or S
PTXAPTKLSSLSVLFFDDSSNVILKVYPNMVVR

SEQ ID NO: 45111 - protein, 33 aa, Artificial Sequence
  GFR-binding peptide
  MOD_RES (1)..(2)..(33): Xaa is C or S
XXVPQALSSLSILFFVGRKPKVLKVYPMIVRSX

SEQ ID NO: 45112 - protein, 37 aa, Artificial Sequence
  GFR-binding peptide
  MOD_RES (2)..(3)..(35)..(37): Xaa is C or S
TXXVPTRLSSLSILFFDSANNVVLKVYPDMVVESXGX

SEQ ID NO: 45113 - protein, 36 aa, Artificial Sequence
  GFR-binding peptide
  MOD_RES (1)..(34)..(36): Xaa is C or S
  MOD_RES (15)..(16)..(17)..(18)..(19): Xaa is A or G
  MOD_RES (20)..(21)..(22)..(23): Xaa is A or G or is absent
XVSQDLSSLSILFFXXXXXXXXXLKVYPMIVKSXKX

SEQ ID NO: 45114 - protein, 41 aa, Artificial Sequence
  GFR-binding peptide
  MOD_RES (6)..(7)..(41): Xaa is C or S
  MOD_RES (21)..(22)..(23)..(24)..(25): Xaa is A or G
  MOD_RES (26)..(27)..(28)..(29): Xaa is A or G or is absent
TVPKPXXAPTQLSSLSVLFFXXXXXXXXXLKVYPNMVVRAX

SEQ ID NO: 45115 - protein, 36 aa, Artificial Sequence
  GFR-binding peptide
  MOD_RES (3)..(4)..(36): Xaa is C or S
KPXXAPTQLSSLSVLFFDDSSNVILKVYPNMVVRAX

SEQ ID NO: 45116 - protein, 38 aa, Artificial Sequence
  GFR-binding peptide
  MOD_RES (1)..(2)..(36)..(38): Xaa is C or S
  MOD_RES (16)..(17)..(18)..(19)..(20): Xaa is A or G
  MOD_RES (21)..(22)..(23)..(24): Xaa is A or G or is absent
XXVPTRLSSLSILFFXXXXXXXXXLKVYPDMVVESXGX

SEQ ID NO: 45117 - protein, 36 aa, Artificial Sequence
  GFR-binding peptide
  MOD_RES (1)..(33)..(35): Xaa is C or S
XVPTRLSSLSILFFDSANNVVLKVYPDMVVESXGXR

SEQ ID NO: 45118 - protein, 35 aa, Artificial Sequence
  GFR-binding peptide
  MOD_RES (2)..(3)..(35): Xaa is C or S
SXXVPARLSSLSILFFDAANNVVLKVYPDMVVEAX

SEQ ID NO: 45119 - protein, 32 aa, Artificial Sequence
  GFR-binding peptide
  MOD_RES (1)..(2): Xaa is C or S
XXTPTKMSSLSMLFFNDKQQIILKVYPGMVVD

SEQ ID NO: 45120 - protein, 40 aa, Artificial Sequence
  GFR-binding peptide
  MOD_RES (5)..(6)..(38)..(40): Xaa is C or S
APASXXVPARLSSLSILFFDAANNVVLKVYPDMVVEAXGX

SEQ ID NO: 45121 - protein, 33 aa, Artificial Sequence
  GFR-binding peptide
  MOD_RES (31)..(33): Xaa is C or S
APVKTSSLSMLFFDNGRVLLLKVYPMIVEEXGX

SEQ ID NO: 45122 - protein, 35 aa, Artificial Sequence
  GFR-binding peptide
  MOD_RES (4)..(4): Xaa is C or S
KPTXAPTKLSSLSVLFFDDSSNVILKVYPNMVVRS

SEQ ID NO: 45123 - protein, 37 aa, Artificial Sequence
  GFR-binding peptide
  MOD_RES (37)..(37): Xaa is C or S
QPSRVHHSSLSVLFFEYVRKKPKLLKVYPRLEEHLEX

SEQ ID NO: 45124 - protein, 38 aa, Artificial Sequence
  GFR-binding peptide
  MOD_RES (2)..(3)..(38): Xaa is C or S
  MOD_RES (17)..(18)..(19)..(20)..(21): Xaa is A or G
  MOD_RES (22)..(23)..(24)..(25): Xaa is A or G or is absent
AXXVPTKLSSLSVLFFXXXXXXXXXLKVYPEGMSVAEX

SEQ ID NO: 45125 - protein, 33 aa, Artificial Sequence
  GFR-binding peptide
  MOD_RES (2)..(3): Xaa is C or S
TXXAPVKTSSLSMLFFDNGRVLLLKVYPMIVEE

SEQ ID NO: 45126 - protein, 35 aa, Artificial Sequence
  GFR-binding peptide
  MOD_RES (34)..(34): Xaa is C or S
  MOD_RES (14)..(15)..(16)..(17)..(18): Xaa is A or G
  MOD_RES (19)..(20)..(21)..(22): Xaa is A or G or is absent
VPEKMSSLSILFFXXXXXXXXXLKVYPNMTVESXA

SEQ ID NO: 45127 - protein, 36 aa, Artificial Sequence
  GFR-binding peptide
  MOD_RES (1)..(2)..(34)..(36): Xaa is C or S
XXAPTKLSSLSVLFFDDSSNVILKVYPNMVVRSXGX

SEQ ID NO: 45128 - protein, 37 aa, Artificial Sequence
  GFR-binding peptide
  MOD_RES (3)..(4)..(36): Xaa is C or S
KAXXAPTKLSSLSVLFFDSSNNVILKVYPNMVVKAXG

SEQ ID NO: 45129 - protein, 41 aa, Artificial Sequence
  GFR-binding peptide
  MOD_RES (6)..(7)..(41): Xaa is C or S
  MOD_RES (21)..(22)..(23)..(24)..(25): Xaa is A or G
  MOD_RES (26)..(27)..(28)..(29): Xaa is A or G or is absent
SIPKAXXVPTELSSLSMLFFXXXXXXXXXLKVYPEMVVEGX

SEQ ID NO: 45130 - protein, 34 aa, Artificial Sequence
  GFR-binding peptide
  MOD_RES (31)..(33): Xaa is C or S
VPQDLSSLSILFFVGRTPKVLKVYPMVVKSXKXS

SEQ ID NO: 45131 - protein, 38 aa, Artificial Sequence
  GFR-binding peptide
  MOD_RES (2)..(3)..(36)..(38): Xaa is C or S
AXXVPTKLSSLSVLFFDDMGVPTLKVYPEGMSVAEXGX

SEQ ID NO: 45132 - protein, 34 aa, Artificial Sequence
  GFR-binding peptide
  MOD_RES (1)..(1): Xaa is C or S
  MOD_RES (15)..(16)..(17)..(18)..(19): Xaa is A or G
  MOD_RES (20)..(21)..(22)..(23): Xaa is A or G or is absent
XVPARLSSLSILFFXXXXXXXXXLKVYPDMVVEA

SEQ ID NO: 45133 - protein, 37 aa, Artificial Sequence
  GFR-binding peptide
  MOD_RES (3)..(35)..(37): Xaa is C or S
PTXAPTKLSSLSVLFFDDSSNVILKVYPNMVVRSXGX

SEQ ID NO: 45134 - protein, 36 aa, Artificial Sequence
  GFR-binding peptide
  MOD_RES (4)..(5)..(36): Xaa is C or S
AAPXXVPQALSSLSILFFVGRKPKVLKVYPMIVRSX

SEQ ID NO: 45135 - protein, 34 aa, Artificial Sequence
  GFR-binding peptide
  MOD_RES (3)..(4): Xaa is C or S
KAXXAPTKLSSLSVLFFDSSNNVILKVYPNMVVK

SEQ ID NO: 45136 - protein, 41 aa, Artificial Sequence
  GFR-binding peptide
  MOD_RES (4)..(5)..(39)..(41): Xaa is C or S
  MOD_RES (19)..(20)..(21)..(22)..(23): Xaa is A or G
  MOD_RES (24)..(25)..(26)..(27): Xaa is A or G or is absent
PEPXXVPEKMSSLSILFFXXXXXXXXXLKVYPNMTVESXAX

SEQ ID NO: 45137 - protein, 33 aa, Artificial Sequence
  GFR-binding peptide
  MOD_RES (1)..(2): Xaa is C or S
XXVPTRLSSLSILFFDSANNVVLKVYPDMVVES

SEQ ID NO: 45138 - protein, 37 aa, Artificial Sequence
  GFR-binding peptide
  MOD_RES (3)..(4)..(36): Xaa is C or S
KPXXAPTQLSSLSVLFFDDSSNVILKVYPNMVVRAXG

SEQ ID NO: 45139 - protein, 37 aa, Artificial Sequence
  GFR-binding peptide
  MOD_RES (1)..(35)..(37): Xaa is C or S
  MOD_RES (15)..(16)..(17)..(18)..(19): Xaa is A or G
  MOD_RES (20)..(21)..(22)..(23): Xaa is A or G or is absent
XAPTKLSSLSVLFFXXXXXXXXXLKVYPNMVVKAXGX

SEQ ID NO: 45140 - protein, 34 aa, Artificial Sequence
  GFR-binding peptide
  MOD_RES (34)..(34): Xaa is C or S
  MOD_RES (14)..(15)..(16)..(17)..(18): Xaa is A or G
  MOD_RES (19)..(20)..(21)..(22): Xaa is A or G or is absent
VPTELSSLSMLFFXXXXXXXXXLKVYPEMVVEGX

SEQ ID NO: 45141 - protein, 44 aa, Artificial Sequence
  GFR-binding peptide
  MOD_RES (5)..(42)..(44): Xaa is C or S
SSVKXQPSRVHHSSLSVLFFEYVRKKPKLLKVYPRLEEHLEXAX

SEQ ID NO: 45142 - protein, 38 aa, Artificial Sequence
  GFR-binding peptide
  MOD_RES (2)..(3)..(37): Xaa is C or S
  MOD_RES (17)..(18)..(19)..(20)..(21): Xaa is A or G
  MOD_RES (22)..(23)..(24)..(25): Xaa is A or G or is absent
PXXTPTKMSSLSMLFFXXXXXXXXXLKVYPGMVVDRXG

SEQ ID NO: 45143 - protein, 38 aa, Artificial Sequence
  GFR-binding peptide
  MOD_RES (2)..(3)..(35)..(37): Xaa is C or S
PXXAPTKLSSLSVLFFDDSSNVILKVYPNMVVRSXGXH

SEQ ID NO: 45144 - protein, 36 aa, Artificial Sequence
  GFR-binding peptide
  MOD_RES (1)..(2)..(34)..(36): Xaa is C or S
XXTPTKMSSLSMLFFNDKQQIILKVYPGMVVDRXGX

SEQ ID NO: 45145 - protein, 34 aa, Artificial Sequence
  GFR-binding peptide
  MOD_RES (1)..(1): Xaa is C or S
  MOD_RES (15)..(16)..(17)..(18)..(19): Xaa is A or G
  MOD_RES (20)..(21)..(22)..(23): Xaa is A or G or is absent
XVPTELSSLSMLFFXXXXXXXXXLKVYPEMVVEG

SEQ ID NO: 45146 - protein, 34 aa, Artificial Sequence
  GFR-binding peptide
  MOD_RES (1)..(34): Xaa is C or S
XVPTKLSSLSVLFFDDMGVPTLKVYPEGMSVAEX

SEQ ID NO: 45147 - protein, 33 aa, Artificial Sequence
  GFR-binding peptide
  MOD_RES (14)..(15)..(16)..(17)..(18): Xaa is A or G
  MOD_RES (19)..(20)..(21)..(22): Xaa is A or G or is absent
VPEKMSSLSILFFXXXXXXXXXLKVYPNMTVES

SEQ ID NO: 45148 - protein, 39 aa, Artificial Sequence
  GFR-binding peptide
  MOD_RES (2)..(3)..(37)..(39): Xaa is C or S
  MOD_RES (17)..(18)..(19)..(20)..(21): Xaa is A or G
  MOD_RES (22)..(23)..(24)..(25): Xaa is A or G or is absent
AXXAPTKLSSLSVLFFXXXXXXXXXLKVYPNMVVKAXGX

SEQ ID NO: 45149 - protein, 36 aa, Artificial Sequence
  GFR-binding peptide
  MOD_RES (4)..(5): Xaa is C or S
AGPXXTPTKMSSLSMLFFNDKQQIILKVYPGMVVDR

SEQ ID NO: 45150 - protein, 34 aa, Artificial Sequence
  GFR-binding peptide
  MOD_RES (33)..(33): Xaa is C or S
VPTKLSSLSVLFFDDMGVPTLKVYPEGMSVAEXG

SEQ ID NO: 45151 - protein, 35 aa, Artificial Sequence
  GFR-binding peptide
  MOD_RES (34)..(34): Xaa is C or S
  MOD_RES (14)..(15)..(16)..(17)..(18): Xaa is A or G
  MOD_RES (19)..(20)..(21)..(22): Xaa is A or G or is absent
TPTKMSSLSMLFFXXXXXXXXXLKVYPGMVVDRXG

SEQ ID NO: 45152 - protein, 38 aa, Artificial Sequence
  GFR-binding peptide
  MOD_RES (37)..(37): Xaa is C or S
  MOD_RES (16)..(17)..(18)..(19)..(20): Xaa is A or G
  MOD_RES (21)..(22)..(23)..(24): Xaa is A or G or is absent
QPSRVHHSSLSVLFFXXXXXXXXXLKVYPRLEEHLEXA

SEQ ID NO: 45153 - protein, 35 aa, Artificial Sequence
  GFR-binding peptide
  MOD_RES (1)..(2): Xaa is C or S
  MOD_RES (16)..(17)..(18)..(19)..(20): Xaa is A or G
  MOD_RES (21)..(22)..(23)..(24): Xaa is A or G or is absent
XXVPTELSSLSMLFFXXXXXXXXXLKVYPEMVVEG

SEQ ID NO: 45154 - protein, 40 aa, Artificial Sequence
  GFR-binding peptide
  MOD_RES (4)..(5)..(37)..(39): Xaa is C or S
PEPXXVPEKMSSLSILFFDENKNVVLKVYPNMTVESXAXR

SEQ ID NO: 45155 - protein, 38 aa, Artificial Sequence
  GFR-binding peptide
  MOD_RES (4)..(5)..(38): Xaa is C or S
  MOD_RES (19)..(20)..(21)..(22)..(23): Xaa is A or G
  MOD_RES (24)..(25)..(26)..(27): Xaa is A or G or is absent
ASPXXVPQDLSSLSILFFXXXXXXXXXLKVYPMVVKSX

SEQ ID NO: 45156 - protein, 36 aa, Artificial Sequence
  GFR-binding peptide
  MOD_RES (1)..(2)..(35): Xaa is C or S
  MOD_RES (16)..(17)..(18)..(19)..(20): Xaa is A or G
  MOD_RES (21)..(22)..(23)..(24): Xaa is A or G or is absent
XXVSQDLSSLSILFFXXXXXXXXXLKVYPMIVKSXK

SEQ ID NO: 45157 - protein, 40 aa, Artificial Sequence
  GFR-binding peptide
  MOD_RES (3)..(4)..(38)..(40): Xaa is C or S
  MOD_RES (18)..(19)..(20)..(21)..(22): Xaa is A or G
  MOD_RES (23)..(24)..(25)..(26): Xaa is A or G or is absent
PTXXVPTRLSSLSILFFXXXXXXXXXLKVYPDMVVESXGX

SEQ ID NO: 45158 - protein, 37 aa, Artificial Sequence
  GFR-binding peptide
  MOD_RES (1)..(1): Xaa is C or S
  MOD_RES (17)..(18)..(19)..(20)..(21): Xaa is A or G
  MOD_RES (22)..(23)..(24)..(25): Xaa is A or G or is absent
XQPSRVHHSSLSVLFFXXXXXXXXXLKVYPRLEEHLE

SEQ ID NO: 45159 - protein, 31 aa, Artificial Sequence
  GFR-binding peptide
TPTKMSSLSMLFFNDKQQIILKVYPGMVVDR

SEQ ID NO: 45160 - protein, 41 aa, Artificial Sequence
  GFR-binding peptide
  MOD_RES (6)..(7)..(41): Xaa is C or S
  MOD_RES (21)..(22)..(23)..(24)..(25): Xaa is A or G
  MOD_RES (26)..(27)..(28)..(29): Xaa is A or G or is absent
STPPTXXVPTRLSSLSILFFXXXXXXXXXLKVYPDMVVESX

SEQ ID NO: 45161 - protein, 36 aa, Artificial Sequence
  GFR-binding peptide
  MOD_RES (2)..(3)..(35): Xaa is C or S
PXXAPTKLSSLSVLFFDDSSNVILKVYPNMVVRSXG

SEQ ID NO: 45162 - protein, 30 aa, Artificial Sequence
  GFR-binding peptide
APTKLSSLSVLFFDDSSNVILKVYPNMVVR

SEQ ID NO: 45163 - protein, 33 aa, Artificial Sequence
  GFR-binding peptide
  MOD_RES (1)..(2): Xaa is C or S
XXAPTQLSSLSVLFFDDSSNVILKVYPNMVVRA

SEQ ID NO: 45164 - protein, 36 aa, Artificial Sequence
  GFR-binding peptide
  MOD_RES (1)..(35): Xaa is C or S
  MOD_RES (15)..(16)..(17)..(18)..(19): Xaa is A or G
  MOD_RES (20)..(21)..(22)..(23): Xaa is A or G or is absent
XVPTKLSSLSILFFXXXXXXXXXLKVYPGMAVSEXG

SEQ ID NO: 45165 - protein, 36 aa, Artificial Sequence
  GFR-binding peptide
  MOD_RES (4)..(5): Xaa is C or S
SKAXXVPTKLSSLSILFFDKGVVTYLKVYPGMAVSE

SEQ ID NO: 45166 - protein, 31 aa, Artificial Sequence
  GFR-binding peptide
  MOD_RES (1)..(1): Xaa is C or S
XAPTKLSSLSVLFFDSSNNVILKVYPNMVVK

SEQ ID NO: 45167 - protein, 36 aa, Artificial Sequence
  GFR-binding peptide
  MOD_RES (3)..(4)..(36): Xaa is C or S
GPXXTPTKMSSLSMLFFNDKQQIILKVYPGMVVDRX

SEQ ID NO: 45168 - protein, 40 aa, Artificial Sequence
  GFR-binding peptide
  MOD_RES (5)..(6)..(38)..(40): Xaa is C or S
VPKPXXAPTQLSSLSVLFFDDSSNVILKVYPNMVVRAXGX

SEQ ID NO: 45169 - protein, 39 aa, Artificial Sequence
  GFR-binding peptide
  MOD_RES (5)..(6)..(39): Xaa is C or S
  MOD_RES (20)..(21)..(22)..(23)..(24): Xaa is A or G
  MOD_RES (25)..(26)..(27)..(28): Xaa is A or G or is absent
SAAPXXVPQALSSLSILFFXXXXXXXXXLKVYPMIVRSX

SEQ ID NO: 45170 - protein, 39 aa, Artificial Sequence
  GFR-binding peptide
  MOD_RES (2)..(39): Xaa is C or S
KXQPSRVHHSSLSVLFFEYVRKKPKLLKVYPRLEEHLEX

SEQ ID NO: 45171 - protein, 38 aa, Artificial Sequence
  GFR-binding peptide
  MOD_RES (6)..(6): Xaa is C or S
  MOD_RES (20)..(21)..(22)..(23)..(24): Xaa is A or G
  MOD_RES (25)..(26)..(27)..(28): Xaa is A or G or is absent
DEGLEXVPTEESSLSMLFFXXXXXXXXXLKVYPFLQHN

SEQ ID NO: 45172 - protein, 38 aa, Artificial Sequence
  GFR-binding peptide
  MOD_RES (1)..(35)..(37): Xaa is C or S
  MOD_RES (15)..(16)..(17)..(18)..(19): Xaa is A or G
  MOD_RES (20)..(21)..(22)..(23): Xaa is A or G or is absent
XVPARLSSLSILFFXXXXXXXXXLKVYPDMVVEAXGXR

SEQ ID NO: 45173 - protein, 38 aa, Artificial Sequence
  GFR-binding peptide
  MOD_RES (3)..(4)..(38): Xaa is C or S
  MOD_RES (18)..(19)..(20)..(21)..(22): Xaa is A or G
  MOD_RES (23)..(24)..(25)..(26): Xaa is A or G or is absent
ASXXVPARLSSLSILFFXXXXXXXXXLKVYPDMVVEAX

SEQ ID NO: 45174 - protein, 33 aa, Artificial Sequence
  GFR-binding peptide
  MOD_RES (33)..(33): Xaa is C or S
  MOD_RES (14)..(15)..(16)..(17)..(18): Xaa is A or G
  MOD_RES (19)..(20)..(21)..(22): Xaa is A or G or is absent
VSQDLSSLSILFFXXXXXXXXXLKVYPMIVKSX

SEQ ID NO: 45175 - protein, 32 aa, Artificial Sequence
  GFR-binding peptide
  MOD_RES (32)..(32): Xaa is C or S
TPTKMSSLSMLFFNDKQQIILKVYPGMVVDRX

SEQ ID NO: 45176 - protein, 39 aa, Artificial Sequence
  GFR-binding peptide
  MOD_RES (6)..(7): Xaa is C or S
  MOD_RES (21)..(22)..(23)..(24)..(25): Xaa is A or G
  MOD_RES (26)..(27)..(28)..(29): Xaa is A or G or is absent
YVPKPXXAPTKLSSLSVLFFXXXXXXXXXLKVYPNMVVR

SEQ ID NO: 45177 - protein, 36 aa, Artificial Sequence
  GFR-binding peptide
  MOD_RES (33)..(35): Xaa is C or S
VPTKLSSLSVLFFDDMGVPTLKVYPEGMSVAEXGXR

SEQ ID NO: 45178 - protein, 36 aa, Artificial Sequence
  GFR-binding peptide
  MOD_RES (1)..(2)..(36): Xaa is C or S
  MOD_RES (16)..(17)..(18)..(19)..(20): Xaa is A or G
  MOD_RES (21)..(22)..(23)..(24): Xaa is A or G or is absent
XXVPTRLSSLSILFFXXXXXXXXXLKVYPDMVVESX

SEQ ID NO: 45179 - protein, 39 aa, Artificial Sequence
  GFR-binding peptide
  MOD_RES (3)..(4)..(38): Xaa is C or S
  MOD_RES (18)..(19)..(20)..(21)..(22): Xaa is A or G
  MOD_RES (23)..(24)..(25)..(26): Xaa is A or G or is absent
GPXXTPTKMSSLSMLFFXXXXXXXXXLKVYPGMVVDRXG

SEQ ID NO: 45180 - protein, 39 aa, Artificial Sequence
  GFR-binding peptide
  MOD_RES (6)..(7): Xaa is C or S
  MOD_RES (21)..(22)..(23)..(24)..(25): Xaa is A or G
  MOD_RES (26)..(27)..(28)..(29): Xaa is A or G or is absent
GIPEPXXVPEKMSSLSILFFXXXXXXXXXLKVYPNMTVE

SEQ ID NO: 45181 - protein, 35 aa, Artificial Sequence
  GFR-binding peptide
  MOD_RES (1)..(2)..(34): Xaa is C or S
XXVPTRLSSLSILFFDSANNVVLKVYPDMVVESXG

SEQ ID NO: 45182 - protein, 40 aa, Artificial Sequence
  GFR-binding peptide
  MOD_RES (7)..(7): Xaa is C or S
NDEGLEXVPTEESSLSMLFFRIKPHQGQHLKVYPFLQHNK

SEQ ID NO: 45183 - protein, 32 aa, Artificial Sequence
  GFR-binding peptide
  MOD_RES (1)..(1): Xaa is C or S
XVPARLSSLSILFFDAANNVVLKVYPDMVVEA

SEQ ID NO: 45184 - protein, 39 aa, Artificial Sequence
  GFR-binding peptide
  MOD_RES (3)..(4)..(36)..(38): Xaa is C or S
EPXXVPEKMSSLSILFFDENKNVVLKVYPNMTVESXAXR

SEQ ID NO: 45185 - protein, 43 aa, Artificial Sequence
  GFR-binding peptide
  MOD_RES (7)..(41)..(43): Xaa is C or S
NDEGLEXVPTEESSLSMLFFRIKPHQGQHLKVYPFLQHNKXEX

SEQ ID NO: 45186 - protein, 34 aa, Artificial Sequence
  GFR-binding peptide
  MOD_RES (1)..(1): Xaa is C or S
  MOD_RES (15)..(16)..(17)..(18)..(19): Xaa is A or G
  MOD_RES (20)..(21)..(22)..(23): Xaa is A or G or is absent
XTPTKMSSLSMLFFXXXXXXXXXLKVYPGMVVDR

SEQ ID NO: 45187 - protein, 38 aa, Artificial Sequence
  GFR-binding peptide
  MOD_RES (4)..(5)..(38): Xaa is C or S
  MOD_RES (19)..(20)..(21)..(22)..(23): Xaa is A or G
  MOD_RES (24)..(25)..(26)..(27): Xaa is A or G or is absent
PSTXXAPVKTSSLSMLFFXXXXXXXXXLKVYPMIVEEX

SEQ ID NO: 45188 - protein, 37 aa, Artificial Sequence
  GFR-binding peptide
  MOD_RES (3)..(4): Xaa is C or S
  MOD_RES (18)..(19)..(20)..(21)..(22): Xaa is A or G
  MOD_RES (23)..(24)..(25)..(26): Xaa is A or G or is absent
EPXXVPEKMSSLSILFFXXXXXXXXXLKVYPNMTVES

SEQ ID NO: 45189 - protein, 36 aa, Artificial Sequence
  GFR-binding peptide
  MOD_RES (3)..(4)..(36): Xaa is C or S
ASXXVPARLSSLSILFFDAANNVVLKVYPDMVVEAX

SEQ ID NO: 45190 - protein, 40 aa, Artificial Sequence
  GFR-binding peptide
  MOD_RES (4)..(5)..(39): Xaa is C or S
  MOD_RES (19)..(20)..(21)..(22)..(23): Xaa is A or G
  MOD_RES (24)..(25)..(26)..(27): Xaa is A or G or is absent
PPTXXVPTRLSSLSILFFXXXXXXXXXLKVYPDMVVESXG

SEQ ID NO: 45191 - protein, 34 aa, Artificial Sequence
  GFR-binding peptide
  MOD_RES (15)..(16)..(17)..(18)..(19): Xaa is A or G
  MOD_RES (20)..(21)..(22)..(23): Xaa is A or G or is absent
PSRVHHSSLSVLFFXXXXXXXXXLKVYPRLEEHL

SEQ ID NO: 45192 - protein, 41 aa, Artificial Sequence
  GFR-binding peptide
  MOD_RES (3)..(40): Xaa is C or S
  MOD_RES (19)..(20)..(21)..(22)..(23): Xaa is A or G
  MOD_RES (24)..(25)..(26)..(27): Xaa is A or G or is absent
VKXQPSRVHHSSLSVLFFXXXXXXXXXLKVYPRLEEHLEXA

SEQ ID NO: 45193 - protein, 38 aa, Artificial Sequence
  GFR-binding peptide
  MOD_RES (1)..(35)..(37): Xaa is C or S
XVPTEESSLSMLFFRIKPHQGQHLKVYPFLQHNKXEXR

SEQ ID NO: 45194 - protein, 36 aa, Artificial Sequence
  GFR-binding peptide
  MOD_RES (2)..(3)..(36): Xaa is C or S
  MOD_RES (17)..(18)..(19)..(20)..(21): Xaa is A or G
  MOD_RES (22)..(23)..(24)..(25): Xaa is A or G or is absent
PXXVPQALSSLSILFFXXXXXXXXXLKVYPMIVRSX

SEQ ID NO: 45195 - protein, 32 aa, Artificial Sequence
  GFR-binding peptide
  MOD_RES (14)..(15)..(16)..(17)..(18): Xaa is A or G
  MOD_RES (19)..(20)..(21)..(22): Xaa is A or G or is absent
APTKLSSLSVLFFXXXXXXXXXLKVYPNMVVR

SEQ ID NO: 45196 - protein, 37 aa, Artificial Sequence
  GFR-binding peptide
  MOD_RES (1)..(2)..(36): Xaa is C or S
  MOD_RES (16)..(17)..(18)..(19)..(20): Xaa is A or G
  MOD_RES (21)..(22)..(23)..(24): Xaa is A or G or is absent
XXAPTQLSSLSVLFFXXXXXXXXXLKVYPNMVVRAXG

SEQ ID NO: 45197 - protein, 38 aa, Artificial Sequence
  GFR-binding peptide
  MOD_RES (5)..(6)..(38): Xaa is C or S
VPKPXXAPTQLSSLSVLFFDDSSNVILKVYPNMVVRAX

SEQ ID NO: 45198 - protein, 33 aa, Artificial Sequence
  GFR-binding peptide
  MOD_RES (14)..(15)..(16)..(17)..(18): Xaa is A or G
  MOD_RES (19)..(20)..(21)..(22): Xaa is A or G or is absent
VPTKLSSLSILFFXXXXXXXXXLKVYPGMAVSE

SEQ ID NO: 45199 - protein, 39 aa, Artificial Sequence
  GFR-binding peptide
  MOD_RES (3)..(4)..(36)..(38): Xaa is C or S
KAXXAPTKLSSLSVLFFDSSNNVILKVYPNMVVKAXGXH

SEQ ID NO: 45200 - protein, 35 aa, Artificial Sequence
  GFR-binding peptide
  MOD_RES (1)..(2)..(33)..(35): Xaa is C or S
XXVPQDLSSLSILFFVGRTPKVLKVYPMVVKSXKX

SEQ ID NO: 45201 - protein, 35 aa, Artificial Sequence
  GFR-binding peptide
  MOD_RES (1)..(33)..(35): Xaa is C or S
XVPTKLSSLSILFFDKGVVTYLKVYPGMAVSEXGX

SEQ ID NO: 45202 - protein, 35 aa, Artificial Sequence
  GFR-binding peptide
  MOD_RES (4)..(5): Xaa is C or S
PEPXXVPEKMSSLSILFFDENKNVVLKVYPNMTVE

SEQ ID NO: 45203 - protein, 41 aa, Artificial Sequence
  GFR-binding peptide
  MOD_RES (4)..(5)..(39)..(41): Xaa is C or S
  MOD_RES (19)..(20)..(21)..(22)..(23): Xaa is A or G
  MOD_RES (24)..(25)..(26)..(27): Xaa is A or G or is absent
PKAXXVPTELSSLSMLFFXXXXXXXXXLKVYPEMVVEGXGX

SEQ ID NO: 45204 - protein, 44 aa, Artificial Sequence
  GFR-binding peptide
  MOD_RES (7)..(41)..(43): Xaa is C or S
  MOD_RES (21)..(22)..(23)..(24)..(25): Xaa is A or G
  MOD_RES (26)..(27)..(28)..(29): Xaa is A or G or is absent
HVTKPTXAPTKLSSLSVLFFXXXXXXXXXLKVYPNMVVRSXGXH

SEQ ID NO: 45205 - protein, 37 aa, Artificial Sequence
  GFR-binding peptide
  MOD_RES (3)..(4)..(35)..(37): Xaa is C or S
APXXVPQALSSLSILFFVGRKPKVLKVYPMIVRSXKX

SEQ ID NO: 45206 - protein, 32 aa, Artificial Sequence
  GFR-binding peptide
  MOD_RES (1)..(2): Xaa is C or S
XXVPQDLSSLSILFFVGRTPKVLKVYPMVVKS

SEQ ID NO: 45207 - protein, 41 aa, Artificial Sequence
  GFR-binding peptide
  MOD_RES (3)..(4)..(38)..(40): Xaa is C or S
  MOD_RES (18)..(19)..(20)..(21)..(22): Xaa is A or G
  MOD_RES (23)..(24)..(25)..(26): Xaa is A or G or is absent
KPXXAPTKLSSLSVLFFXXXXXXXXXLKVYPNMVVRSXGXH

SEQ ID NO: 45208 - protein, 35 aa, Artificial Sequence
  GFR-binding peptide
  MOD_RES (2)..(3): Xaa is C or S
  MOD_RES (17)..(18)..(19)..(20)..(21): Xaa is A or G
  MOD_RES (22)..(23)..(24)..(25): Xaa is A or G or is absent
TXXAPVKTSSLSMLFFXXXXXXXXXLKVYPMIVEE

SEQ ID NO: 45209 - protein, 37 aa, Artificial Sequence
  GFR-binding peptide
  MOD_RES (5)..(6): Xaa is C or S
VPKPXXAPTKLSSLSVLFFDDSSNVILKVYPNMVVRS

SEQ ID NO: 45210 - protein, 39 aa, Artificial Sequence
  GFR-binding peptide
  MOD_RES (5)..(5): Xaa is C or S
SSVKXQPSRVHHSSLSVLFFEYVRKKPKLLKVYPRLEEH

SEQ ID NO: 45211 - protein, 37 aa, Artificial Sequence
  GFR-binding peptide
  MOD_RES (5)..(6)..(37): Xaa is C or S
VPSTXXAPVKTSSLSMLFFDNGRVLLLKVYPMIVEEX

SEQ ID NO: 45212 - protein, 40 aa, Artificial Sequence
  GFR-binding peptide
  MOD_RES (5)..(6)..(38)..(40): Xaa is C or S
SAGPXXTPTKMSSLSMLFFNDKQQIILKVYPGMVVDRXGX

SEQ ID NO: 45213 - protein, 38 aa, Artificial Sequence
  GFR-binding peptide
  MOD_RES (6)..(7): Xaa is C or S
STPPTXXVPTRLSSLSILFFDSANNVVLKVYPDMVVES

SEQ ID NO: 45214 - protein, 40 aa, Artificial Sequence
  GFR-binding peptide
  MOD_RES (5)..(6)..(38)..(40): Xaa is C or S
IPEPXXVPEKMSSLSILFFDENKNVVLKVYPNMTVESXAX

SEQ ID NO: 45215 - protein, 37 aa, Artificial Sequence
  GFR-binding peptide
  MOD_RES (36)..(36): Xaa is C or S
  MOD_RES (15)..(16)..(17)..(18)..(19): Xaa is A or G
  MOD_RES (20)..(21)..(22)..(23): Xaa is A or G or is absent
PSRVHHSSLSVLFFXXXXXXXXXLKVYPRLEEHLEXA

SEQ ID NO: 45216 - protein, 34 aa, Artificial Sequence
  GFR-binding peptide
  MOD_RES (1)..(1): Xaa is C or S
  MOD_RES (15)..(16)..(17)..(18)..(19): Xaa is A or G
  MOD_RES (20)..(21)..(22)..(23): Xaa is A or G or is absent
XAPTQLSSLSVLFFXXXXXXXXXLKVYPNMVVRA

SEQ ID NO: 45217 - protein, 40 aa, Artificial Sequence
  GFR-binding peptide
  MOD_RES (4)..(5)..(37)..(39): Xaa is C or S
AGPXXTPTKMSSLSMLFFNDKQQIILKVYPGMVVDRXGXS

SEQ ID NO: 45218 - protein, 40 aa, Artificial Sequence
  GFR-binding peptide
  MOD_RES (5)..(5): Xaa is C or S
SSVKXQPSRVHHSSLSVLFFEYVRKKPKLLKVYPRLEEHL

SEQ ID NO: 45219 - protein, 40 aa, Artificial Sequence
  GFR-binding peptide
  MOD_RES (5)..(6)..(40): Xaa is C or S
  MOD_RES (20)..(21)..(22)..(23)..(24): Xaa is A or G
  MOD_RES (25)..(26)..(27)..(28): Xaa is A or G or is absent
TPPTXXVPTRLSSLSILFFXXXXXXXXXLKVYPDMVVESX

SEQ ID NO: 45220 - protein, 38 aa, Artificial Sequence
  GFR-binding peptide
  MOD_RES (2)..(3)..(37): Xaa is C or S
  MOD_RES (17)..(18)..(19)..(20)..(21): Xaa is A or G
  MOD_RES (22)..(23)..(24)..(25): Xaa is A or G or is absent
PXXAPTKLSSLSVLFFXXXXXXXXXLKVYPNMVVRSXG

SEQ ID NO: 45221 - protein, 38 aa, Artificial Sequence
  GFR-binding peptide
  MOD_RES (3)..(4)..(36)..(38): Xaa is C or S
GPXXTPTKMSSLSMLFFNDKQQIILKVYPGMVVDRXGX

SEQ ID NO: 45222 - protein, 39 aa, Artificial Sequence
  GFR-binding peptide
  MOD_RES (2)..(3)..(36)..(38): Xaa is C or S
  MOD_RES (17)..(18)..(19)..(20)..(21): Xaa is A or G
  MOD_RES (22)..(23)..(24)..(25): Xaa is A or G or is absent
PXXVPQALSSLSILFFXXXXXXXXXLKVYPMIVRSXKXS

SEQ ID NO: 45223 - protein, 40 aa, Artificial Sequence
  GFR-binding peptide
  MOD_RES (3)..(4)..(38)..(40): Xaa is C or S
  MOD_RES (18)..(19)..(20)..(21)..(22): Xaa is A or G
  MOD_RES (23)..(24)..(25)..(26): Xaa is A or G or is absent
KAXXAPTKLSSLSVLFFXXXXXXXXXLKVYPNMVVKAXGX

SEQ ID NO: 45224 - protein, 40 aa, Artificial Sequence
  GFR-binding peptide
  MOD_RES (5)..(6)..(40): Xaa is C or S
  MOD_RES (20)..(21)..(22)..(23)..(24): Xaa is A or G
  MOD_RES (25)..(26)..(27)..(28): Xaa is A or G or is absent
SAGPXXTPTKMSSLSMLFFXXXXXXXXXLKVYPGMVVDRX

SEQ ID NO: 45225 - protein, 42 aa, Artificial Sequence
  GFR-binding peptide
  MOD_RES (3)..(40)..(42): Xaa is C or S
VKXQPSRVHHSSLSVLFFEYVRKKPKLLKVYPRLEEHLEXAX

SEQ ID NO: 45226 - protein, 37 aa, Artificial Sequence
  GFR-binding peptide
  MOD_RES (1)..(2)..(37): Xaa is C or S
  MOD_RES (16)..(17)..(18)..(19)..(20): Xaa is A or G
  MOD_RES (21)..(22)..(23)..(24): Xaa is A or G or is absent
XXVPTKLSSLSVLFFXXXXXXXXXLKVYPEGMSVAEX

SEQ ID NO: 45227 - protein, 36 aa, Artificial Sequence
  GFR-binding peptide
  MOD_RES (1)..(35): Xaa is C or S
  MOD_RES (15)..(16)..(17)..(18)..(19): Xaa is A or G
  MOD_RES (20)..(21)..(22)..(23): Xaa is A or G or is absent
XTPTKMSSLSMLFFXXXXXXXXXLKVYPGMVVDRXG

SEQ ID NO: 45228 - protein, 36 aa, Artificial Sequence
  GFR-binding peptide
  MOD_RES (2)..(3)..(35): Xaa is C or S
TXXVPTRLSSLSILFFDSANNVVLKVYPDMVVESXG

SEQ ID NO: 45229 - protein, 42 aa, Artificial Sequence
  GFR-binding peptide
  MOD_RES (6)..(7)..(41): Xaa is C or S
  MOD_RES (21)..(22)..(23)..(24)..(25): Xaa is A or G
  MOD_RES (26)..(27)..(28)..(29): Xaa is A or G or is absent
GIPEPXXVPEKMSSLSILFFXXXXXXXXXLKVYPNMTVESXA

SEQ ID NO: 45230 - protein, 33 aa, Artificial Sequence
  GFR-binding peptide
  MOD_RES (15)..(16)..(17)..(18)..(19): Xaa is A or G
  MOD_RES (20)..(21)..(22)..(23): Xaa is A or G or is absent
PSRVHHSSLSVLFFXXXXXXXXXLKVYPRLEEH

SEQ ID NO: 45231 - protein, 42 aa, Artificial Sequence
  GFR-binding peptide
  MOD_RES (5)..(39)..(41): Xaa is C or S
  MOD_RES (19)..(20)..(21)..(22)..(23): Xaa is A or G
  MOD_RES (24)..(25)..(26)..(27): Xaa is A or G or is absent
EGLEXVPTEESSLSMLFFXXXXXXXXXLKVYPFLQHNKXEXR

SEQ ID NO: 45232 - protein, 33 aa, Artificial Sequence
  GFR-binding peptide
  MOD_RES (31)..(33): Xaa is C or S
VPQALSSLSILFFVGRKPKVLKVYPMIVRSXKX

SEQ ID NO: 45233 - protein, 39 aa, Artificial Sequence
  GFR-binding peptide
  MOD_RES (37)..(39): Xaa is C or S
  MOD_RES (16)..(17)..(18)..(19)..(20): Xaa is A or G
  MOD_RES (21)..(22)..(23)..(24): Xaa is A or G or is absent
QPSRVHHSSLSVLFFXXXXXXXXXLKVYPRLEEHLEXAX

SEQ ID NO: 45234 - protein, 43 aa, Artificial Sequence
  GFR-binding peptide
  MOD_RES (4)..(41)..(43): Xaa is C or S
SVKXQPSRVHHSSLSVLFFEYVRKKPKLLKVYPRLEEHLEXAX

SEQ ID NO: 45235 - protein, 33 aa, Artificial Sequence
  GFR-binding peptide
  MOD_RES (31)..(33): Xaa is C or S
VSQDLSSLSILFFIGKTPKILKVYPMIVKSXKX

SEQ ID NO: 45236 - protein, 40 aa, Artificial Sequence
  GFR-binding peptide
  MOD_RES (3)..(4)..(38)..(40): Xaa is C or S
  MOD_RES (18)..(19)..(20)..(21)..(22): Xaa is A or G
  MOD_RES (23)..(24)..(25)..(26): Xaa is A or G or is absent
KPXXAPTQLSSLSVLFFXXXXXXXXXLKVYPNMVVRAXGX

SEQ ID NO: 45237 - protein, 41 aa, Artificial Sequence
  GFR-binding peptide
  MOD_RES (2)..(39)..(41): Xaa is C or S
  MOD_RES (18)..(19)..(20)..(21)..(22): Xaa is A or G
  MOD_RES (23)..(24)..(25)..(26): Xaa is A or G or is absent
KXQPSRVHHSSLSVLFFXXXXXXXXXLKVYPRLEEHLEXAX

SEQ ID NO: 45238 - protein, 39 aa, Artificial Sequence
  GFR-binding peptide
  MOD_RES (5)..(6)..(37)..(39): Xaa is C or S
SAAPXXVPQALSSLSILFFVGRKPKVLKVYPMIVRSXKX

SEQ ID NO: 45239 - protein, 36 aa, Artificial Sequence
  GFR-binding peptide
  MOD_RES (2)..(3)..(35): Xaa is C or S
SXXVPARLSSLSILFFDAANNVVLKVYPDMVVEAXG

SEQ ID NO: 45240 - protein, 41 aa, Artificial Sequence
  GFR-binding peptide
  MOD_RES (7)..(41): Xaa is C or S
  MOD_RES (21)..(22)..(23)..(24)..(25): Xaa is A or G
  MOD_RES (26)..(27)..(28)..(29): Xaa is A or G or is absent
NDEGLEXVPTEESSLSMLFFXXXXXXXXXLKVYPFLQHNKX

SEQ ID NO: 45241 - protein, 38 aa, Artificial Sequence
  GFR-binding peptide
  MOD_RES (3)..(4)..(38): Xaa is C or S
  MOD_RES (18)..(19)..(20)..(21)..(22): Xaa is A or G
  MOD_RES (23)..(24)..(25)..(26): Xaa is A or G or is absent
EPXXVPEKMSSLSILFFXXXXXXXXXLKVYPNMTVESX

SEQ ID NO: 45242 - protein, 35 aa, Artificial Sequence
  GFR-binding peptide
  MOD_RES (1)..(32)..(34): Xaa is C or S
XVPQDLSSLSILFFVGRTPKVLKVYPMVVKSXKXS

SEQ ID NO: 45243 - protein, 34 aa, Artificial Sequence
  GFR-binding peptide
  MOD_RES (2)..(2): Xaa is C or S
  MOD_RES (16)..(17)..(18)..(19)..(20): Xaa is A or G
  MOD_RES (21)..(22)..(23)..(24): Xaa is A or G or is absent
EXVPTEESSLSMLFFXXXXXXXXXLKVYPFLQHN

SEQ ID NO: 45244 - protein, 39 aa, Artificial Sequence
  GFR-binding peptide
  MOD_RES (3)..(4)..(38): Xaa is C or S
  MOD_RES (18)..(19)..(20)..(21)..(22): Xaa is A or G
  MOD_RES (23)..(24)..(25)..(26): Xaa is A or G or is absent
PTXXVPTRLSSLSILFFXXXXXXXXXLKVYPDMVVESXG

SEQ ID NO: 45245 - protein, 37 aa, Artificial Sequence
  GFR-binding peptide
  MOD_RES (35)..(37): Xaa is C or S
  MOD_RES (14)..(15)..(16)..(17)..(18): Xaa is A or G
  MOD_RES (19)..(20)..(21)..(22): Xaa is A or G or is absent
VPTKLSSLSVLFFXXXXXXXXXLKVYPEGMSVAEXGX

SEQ ID NO: 45246 - protein, 32 aa, Artificial Sequence
  GFR-binding peptide
  MOD_RES (14)..(15)..(16)..(17)..(18): Xaa is A or G
  MOD_RES (19)..(20)..(21)..(22): Xaa is A or G or is absent
APVKTSSLSMLFFXXXXXXXXXLKVYPMIVEE

SEQ ID NO: 45247 - protein, 38 aa, Artificial Sequence
  GFR-binding peptide
  MOD_RES (3)..(4)..(36)..(38): Xaa is C or S
KAXXVPTKLSSLSILFFDKGVVTYLKVYPGMAVSEXGX

SEQ ID NO: 45248 - protein, 41 aa, Artificial Sequence
  GFR-binding peptide
  MOD_RES (7)..(41): Xaa is C or S
NDEGLEXVPTEESSLSMLFFRIKPHQGQHLKVYPFLQHNKX

SEQ ID NO: 45249 - protein, 37 aa, Artificial Sequence
  GFR-binding peptide
  MOD_RES (2)..(3)..(37): Xaa is C or S
  MOD_RES (17)..(18)..(19)..(20)..(21): Xaa is A or G
  MOD_RES (22)..(23)..(24)..(25): Xaa is A or G or is absent
PXXVPEKMSSLSILFFXXXXXXXXXLKVYPNMTVESX

SEQ ID NO: 45250 - protein, 38 aa, Artificial Sequence
  GFR-binding peptide
  MOD_RES (1)..(35)..(37): Xaa is C or S
  MOD_RES (15)..(16)..(17)..(18)..(19): Xaa is A or G
  MOD_RES (20)..(21)..(22)..(23): Xaa is A or G or is absent
XVPTELSSLSMLFFXXXXXXXXXLKVYPEMVVEGXGXR

SEQ ID NO: 45251 - protein, 38 aa, Artificial Sequence
  GFR-binding peptide
  MOD_RES (5)..(6)..(37): Xaa is C or S
SAAPXXVPQALSSLSILFFVGRKPKVLKVYPMIVRSXK

SEQ ID NO: 45252 - protein, 36 aa, Artificial Sequence
  GFR-binding peptide
  MOD_RES (5)..(6): Xaa is C or S
SAAPXXVPQALSSLSILFFVGRKPKVLKVYPMIVRS

SEQ ID NO: 45253 - protein, 42 aa, Artificial Sequence
  GFR-binding peptide
  MOD_RES (6)..(40)..(42): Xaa is C or S
  MOD_RES (20)..(21)..(22)..(23)..(24): Xaa is A or G
  MOD_RES (25)..(26)..(27)..(28): Xaa is A or G or is absent
DEGLEXVPTEESSLSMLFFXXXXXXXXXLKVYPFLQHNKXEX

SEQ ID NO: 45254 - protein, 33 aa, Artificial Sequence
  GFR-binding peptide
  MOD_RES (1)..(2): Xaa is C or S
XXAPTKLSSLSVLFFDDSSNVILKVYPNMVVRS

SEQ ID NO: 45255 - protein, 36 aa, Artificial Sequence
  GFR-binding peptide
  MOD_RES (35)..(35): Xaa is C or S
  MOD_RES (14)..(15)..(16)..(17)..(18): Xaa is A or G
  MOD_RES (19)..(20)..(21)..(22): Xaa is A or G or is absent
SRVHHSSLSVLFFXXXXXXXXXLKVYPRLEEHLEXA

SEQ ID NO: 45256 - protein, 34 aa, Artificial Sequence
  GFR-binding peptide
  MOD_RES (3)..(4): Xaa is C or S
KPXXAPTQLSSLSVLFFDDSSNVILKVYPNMVVR

SEQ ID NO: 45257 - protein, 36 aa, Artificial Sequence
  GFR-binding peptide
  MOD_RES (1)..(2)..(34)..(36): Xaa is C or S
XXVPEKMSSLSILFFDENKNVVLKVYPNMTVESXAX

SEQ ID NO: 45258 - protein, 33 aa, Artificial Sequence
  GFR-binding peptide
  MOD_RES (1)..(33): Xaa is C or S
XAPTKLSSLSVLFFDDSSNVILKVYPNMVVRSX

SEQ ID NO: 45259 - protein, 40 aa, Artificial Sequence
  GFR-binding peptide
  MOD_RES (5)..(6)..(38)..(40): Xaa is C or S
ASKAXXVPTKLSSLSILFFDKGVVTYLKVYPGMAVSEXGX

SEQ ID NO: 45260 - protein, 40 aa, Artificial Sequence
  GFR-binding peptide
  MOD_RES (7)..(7): Xaa is C or S
  MOD_RES (21)..(22)..(23)..(24)..(25): Xaa is A or G
  MOD_RES (26)..(27)..(28)..(29): Xaa is A or G or is absent
NDEGLEXVPTEESSLSMLFFXXXXXXXXXLKVYPFLQHNK

SEQ ID NO: 45261 - protein, 38 aa, Artificial Sequence
  GFR-binding peptide
  MOD_RES (3)..(4)..(38): Xaa is C or S
  MOD_RES (18)..(19)..(20)..(21)..(22): Xaa is A or G
  MOD_RES (23)..(24)..(25)..(26): Xaa is A or G or is absent
KAXXVPTKLSSLSILFFXXXXXXXXXLKVYPGMAVSEX

SEQ ID NO: 45262 - protein, 36 aa, Artificial Sequence
  GFR-binding peptide
  MOD_RES (3)..(4)..(36): Xaa is C or S
PTXXVPTRLSSLSILFFDSANNVVLKVYPDMVVESX

SEQ ID NO: 45263 - protein, 38 aa, Artificial Sequence
  GFR-binding peptide
  MOD_RES (5)..(6): Xaa is C or S
  MOD_RES (20)..(21)..(22)..(23)..(24): Xaa is A or G
  MOD_RES (25)..(26)..(27)..(28): Xaa is A or G or is absent
TPPTXXVPTRLSSLSILFFXXXXXXXXXLKVYPDMVVE

SEQ ID NO: 45264 - protein, 37 aa, Artificial Sequence
  GFR-binding peptide
  MOD_RES (4)..(5): Xaa is C or S
  MOD_RES (19)..(20)..(21)..(22)..(23): Xaa is A or G
  MOD_RES (24)..(25)..(26)..(27): Xaa is A or G or is absent
PEPXXVPEKMSSLSILFFXXXXXXXXXLKVYPNMTVE

SEQ ID NO: 45265 - protein, 39 aa, Artificial Sequence
  GFR-binding peptide
  MOD_RES (6)..(7)..(39): Xaa is C or S
GSAGPXXTPTKMSSLSMLFFNDKQQIILKVYPGMVVDRX

SEQ ID NO: 45266 - protein, 36 aa, Artificial Sequence
  GFR-binding peptide
  MOD_RES (3)..(4): Xaa is C or S
  MOD_RES (18)..(19)..(20)..(21)..(22): Xaa is A or G
  MOD_RES (23)..(24)..(25)..(26): Xaa is A or G or is absent
SPXXVSQDLSSLSILFFXXXXXXXXXLKVYPMIVKS

SEQ ID NO: 45267 - protein, 32 aa, Artificial Sequence
  GFR-binding peptide
  MOD_RES (14)..(15)..(16)..(17)..(18): Xaa is A or G
  MOD_RES (19)..(20)..(21)..(22): Xaa is A or G or is absent
APTKLSSLSVLFFXXXXXXXXXLKVYPNMVVK

SEQ ID NO: 45268 - protein, 36 aa, Artificial Sequence
  GFR-binding peptide
  MOD_RES (3)..(4): Xaa is C or S
  MOD_RES (18)..(19)..(20)..(21)..(22): Xaa is A or G
  MOD_RES (23)..(24)..(25)..(26): Xaa is A or G or is absent
GPXXTPTKMSSLSMLFFXXXXXXXXXLKVYPGMVVD

SEQ ID NO: 45269 - protein, 39 aa, Artificial Sequence
  GFR-binding peptide
  MOD_RES (5)..(6)..(39): Xaa is C or S
  MOD_RES (20)..(21)..(22)..(23)..(24): Xaa is A or G
  MOD_RES (25)..(26)..(27)..(28): Xaa is A or G or is absent
SASPXXVPQDLSSLSILFFXXXXXXXXXLKVYPMVVKSX

SEQ ID NO: 45270 - protein, 37 aa, Artificial Sequence
  GFR-binding peptide
  MOD_RES (5)..(6): Xaa is C or S
SAGPXXTPTKMSSLSMLFFNDKQQIILKVYPGMVVDR

SEQ ID NO: 45271 - protein, 36 aa, Artificial Sequence
  GFR-binding peptide
  MOD_RES (2)..(3): Xaa is C or S
  MOD_RES (17)..(18)..(19)..(20)..(21): Xaa is A or G
  MOD_RES (22)..(23)..(24)..(25): Xaa is A or G or is absent
SXXVPARLSSLSILFFXXXXXXXXXLKVYPDMVVEA

SEQ ID NO: 45272 - protein, 37 aa, Artificial Sequence
  GFR-binding peptide
  MOD_RES (4)..(5): Xaa is C or S
  MOD_RES (19)..(20)..(21)..(22)..(23): Xaa is A or G
  MOD_RES (24)..(25)..(26)..(27): Xaa is A or G or is absent
PKPXXAPTQLSSLSVLFFXXXXXXXXXLKVYPNMVVR

SEQ ID NO: 45273 - protein, 33 aa, Artificial Sequence
  GFR-binding peptide
  MOD_RES (1)..(2): Xaa is C or S
XXVPTKLSSLSILFFDKGVVTYLKVYPGMAVSE

SEQ ID NO: 45274 - protein, 42 aa, Artificial Sequence; identical to SEQ ID NO: 148
  GFR-binding peptide
  MOD_RES (6)..(7)..(39)..(41): Xaa is C or S

SEQ ID NO: 45275 - protein, 33 aa, Artificial Sequence
  GFR-binding peptide
  MOD_RES (1)..(32): Xaa is C or S
XVPQALSSLSILFFVGRKPKVLKVYPMIVRSXK

SEQ ID NO: 45276 - protein, 35 aa, Artificial Sequence
  GFR-binding peptide
  MOD_RES (1)..(35): Xaa is C or S
  MOD_RES (15)..(16)..(17)..(18)..(19): Xaa is A or G
  MOD_RES (20)..(21)..(22)..(23): Xaa is A or G or is absent
XVPTRLSSLSILFFXXXXXXXXXLKVYPDMVVESX

SEQ ID NO: 45277 - protein, 38 aa, Artificial Sequence
  GFR-binding peptide
  MOD_RES (2)..(3)..(35)..(37): Xaa is C or S
TXXVPTRLSSLSILFFDSANNVVLKVYPDMVVESXGXR

SEQ ID NO: 45278 - protein, 36 aa, Artificial Sequence
  GFR-binding peptide
  MOD_RES (2)..(3)..(34)..(36): Xaa is C or S
TXXAPVKTSSLSMLFFDNGRVLLLKVYPMIVEEXGX

SEQ ID NO: 45279 - protein, 41 aa, Artificial Sequence
  GFR-binding peptide
  MOD_RES (5)..(6)..(38)..(40): Xaa is C or S
VPKAXXAPTKLSSLSVLFFDSSNNVILKVYPNMVVKAXGXH

SEQ ID NO: 45280 - protein, 39 aa, Artificial Sequence
  GFR-binding peptide
  MOD_RES (6)..(7)..(39): Xaa is C or S
TVPKPXXAPTQLSSLSVLFFDDSSNVILKVYPNMVVRAX

SEQ ID NO: 45281 - protein, 36 aa, Artificial Sequence
  GFR-binding peptide
  MOD_RES (5)..(6): Xaa is C or S
SASPXXVPQDLSSLSILFFVGRTPKVLKVYPMVVKS

SEQ ID NO: 45282 - protein, 43 aa, Artificial Sequence
  GFR-binding peptide
  MOD_RES (5)..(6)..(40)..(42): Xaa is C or S
  MOD_RES (20)..(21)..(22)..(23)..(24): Xaa is A or G
  MOD_RES (25)..(26)..(27)..(28): Xaa is A or G or is absent
IPEPXXVPEKMSSLSILFFXXXXXXXXXLKVYPNMTVESXAXR

SEQ ID NO: 45283 - protein, 37 aa, Artificial Sequence
  GFR-binding peptide
  MOD_RES (6)..(7): Xaa is C or S
ASAAPXXVPQALSSLSILFFVGRKPKVLKVYPMIVRS

SEQ ID NO: 45284 - protein, 37 aa, Artificial Sequence
  GFR-binding peptide
  MOD_RES (4)..(5): Xaa is C or S
  MOD_RES (19)..(20)..(21)..(22)..(23): Xaa is A or G
  MOD_RES (24)..(25)..(26)..(27): Xaa is A or G or is absent
AAPXXVPQALSSLSILFFXXXXXXXXXLKVYPMIVRS

SEQ ID NO: 45285 - protein, 33 aa, Artificial Sequence
  GFR-binding peptide
  MOD_RES (1)..(1): Xaa is C or S
  MOD_RES (15)..(16)..(17)..(18)..(19): Xaa is A or G
  MOD_RES (20)..(21)..(22)..(23): Xaa is A or G or is absent
XVPTRLSSLSILFFXXXXXXXXXLKVYPDMVVE

SEQ ID NO: 45286 - protein, 37 aa, Artificial Sequence
  GFR-binding peptide
  MOD_RES (2)..(3)..(37): Xaa is C or S
  MOD_RES (17)..(18)..(19)..(20)..(21): Xaa is A or G
  MOD_RES (22)..(23)..(24)..(25): Xaa is A or G or is absent
AXXAPTKLSSLSVLFFXXXXXXXXXLKVYPNMVVKAX

SEQ ID NO: 45287 - protein, 32 aa, Artificial Sequence
  GFR-binding peptide
  MOD_RES (1)..(1): Xaa is C or S
XAPTQLSSLSVLFFDDSSNVILKVYPNMVVRA

SEQ ID NO: 45288 - protein, 39 aa, Artificial Sequence
  GFR-binding peptide
  MOD_RES (4)..(5)..(36)..(38): Xaa is C or S
ASPXXVPQDLSSLSILFFVGRTPKVLKVYPMVVKSXKXS

SEQ ID NO: 45289 - protein, 39 aa, Artificial Sequence
  GFR-binding peptide
  MOD_RES (3)..(4)..(36)..(38): Xaa is C or S
PTXXVPTRLSSLSILFFDSANNVVLKVYPDMVVESXGXR

SEQ ID NO: 45290 - protein, 39 aa, Artificial Sequence
  GFR-binding peptide
  MOD_RES (4)..(5): Xaa is C or S
  MOD_RES (19)..(20)..(21)..(22)..(23): Xaa is A or G
  MOD_RES (24)..(25)..(26)..(27): Xaa is A or G or is absent
GKAXXVPTKLSSLSVLFFXXXXXXXXXLKVYPEGMSVAE

SEQ ID NO: 45291 - protein, 35 aa, Artificial Sequence
  GFR-binding peptide
  MOD_RES (4)..(5): Xaa is C or S
PKPXXAPTKLSSLSVLFFDDSSNVILKVYPNMVVR

SEQ ID NO: 45292 - protein, 37 aa, Artificial Sequence
  GFR-binding peptide
  MOD_RES (2)..(3)..(35)..(37): Xaa is C or S
PXXAPTKLSSLSVLFFDDSSNVILKVYPNMVVRSXGX

SEQ ID NO: 45293 - protein, 38 aa, Artificial Sequence
  GFR-binding peptide
  MOD_RES (4)..(5)..(37): Xaa is C or S
PKAXXAPTKLSSLSVLFFDSSNNVILKVYPNMVVKAXG

SEQ ID NO: 45294 - protein, 37 aa, Artificial Sequence
  GFR-binding peptide
  MOD_RES (4)..(5): Xaa is C or S
  MOD_RES (19)..(20)..(21)..(22)..(23): Xaa is A or G
  MOD_RES (24)..(25)..(26)..(27): Xaa is A or G or is absent
ASPXXVSQDLSSLSILFFXXXXXXXXXLKVYPMIVKS

SEQ ID NO: 45295 - protein, 41 aa, Artificial Sequence
  GFR-binding peptide
  MOD_RES (3)..(4)..(38)..(40): Xaa is C or S
  MOD_RES (18)..(19)..(20)..(21)..(22): Xaa is A or G
  MOD_RES (23)..(24)..(25)..(26): Xaa is A or G or is absent
KAXXVPTELSSLSMLFFXXXXXXXXXLKVYPEMVVEGXGXR

SEQ ID NO: 45296 - protein, 40 aa, Artificial Sequence
  GFR-binding peptide
  MOD_RES (4)..(5)..(38)..(40): Xaa is C or S
GKAXXVPTKLSSLSVLFFDDMGVPTLKVYPEGMSVAEXGX

SEQ ID NO: 45297 - protein, 40 aa, Artificial Sequence
  GFR-binding peptide
  MOD_RES (5)..(6)..(39): Xaa is C or S
  MOD_RES (20)..(21)..(22)..(23)..(24): Xaa is A or G
  MOD_RES (25)..(26)..(27)..(28): Xaa is A or G or is absent
SASPXXVSQDLSSLSILFFXXXXXXXXXLKVYPMIVKSXK

SEQ ID NO: 45298 - protein, 36 aa, Artificial Sequence
  GFR-binding peptide
  MOD_RES (2)..(3)..(34)..(36): Xaa is C or S
PXXVSQDLSSLSILFFIGKTPKILKVYPMIVKSXKX

SEQ ID NO: 45299 - protein, 36 aa, Artificial Sequence
  GFR-binding peptide
  MOD_RES (2)..(3)..(34)..(36): Xaa is C or S
PXXVPQALSSLSILFFVGRKPKVLKVYPMIVRSXKX

SEQ ID NO: 45300 - protein, 41 aa, Artificial Sequence
  GFR-binding peptide
  MOD_RES (6)..(7)..(40): Xaa is C or S
KVGKAXXVPTKLSSLSVLFFDDMGVPTLKVYPEGMSVAEXG

SEQ ID NO: 45301 - protein, 37 aa, Artificial Sequence
  GFR-binding peptide
  MOD_RES (1)..(2)..(34)..(36): Xaa is C or S
XXTPTKMSSLSMLFFNDKQQIILKVYPGMVVDRXGXS

SEQ ID NO: 45302 - protein, 41 aa, Artificial Sequence
  GFR-binding peptide
  MOD_RES (2)..(3)..(38)..(40): Xaa is C or S
  MOD_RES (17)..(18)..(19)..(20)..(21): Xaa is A or G
  MOD_RES (22)..(23)..(24)..(25): Xaa is A or G or is absent
AXXVPTKLSSLSVLFFXXXXXXXXXLKVYPEGMSVAEXGXR

SEQ ID NO: 45303 - protein, 42 aa, Artificial Sequence
  GFR-binding peptide
  MOD_RES (6)..(7)..(41): Xaa is C or S
  MOD_RES (21)..(22)..(23)..(24)..(25): Xaa is A or G
  MOD_RES (26)..(27)..(28)..(29): Xaa is A or G or is absent
HVPKPXXAPTKLSSLSVLFFXXXXXXXXXLKVYPNMVVRSXG

SEQ ID NO: 45304 - protein, 37 aa, Artificial Sequence
  GFR-binding peptide
  MOD_RES (4)..(5)..(37): Xaa is C or S
SKAXXVPTKLSSLSILFFDKGVVTYLKVYPGMAVSEX

SEQ ID NO: 45305 - protein, 39 aa, Artificial Sequence
  GFR-binding peptide
  MOD_RES (1)..(2)..(36)..(38): Xaa is C or S
  MOD_RES (16)..(17)..(18)..(19)..(20): Xaa is A or G
  MOD_RES (21)..(22)..(23)..(24): Xaa is A or G or is absent
XXVPEKMSSLSILFFXXXXXXXXXLKVYPNMTVESXAXR

SEQ ID NO: 45306 - protein, 42 aa, Artificial Sequence
  GFR-binding peptide
  MOD_RES (5)..(6)..(41): Xaa is C or S
  MOD_RES (20)..(21)..(22)..(23)..(24): Xaa is A or G
  MOD_RES (25)..(26)..(27)..(28): Xaa is A or G or is absent
VGKAXXVPTKLSSLSVLFFXXXXXXXXXLKVYPEGMSVAEXG

SEQ ID NO: 45307 - protein, 36 aa, Artificial Sequence
  GFR-binding peptide
  MOD_RES (16)..(17)..(18)..(19)..(20): Xaa is A or G
  MOD_RES (21)..(22)..(23)..(24): Xaa is A or G or is absent
QPSRVHHSSLSVLFFXXXXXXXXXLKVYPRLEEHLE

SEQ ID NO: 45308 - protein, 40 aa, Artificial Sequence
  GFR-binding peptide
  MOD_RES (6)..(7)..(38)..(40): Xaa is C or S
ASASPXXVPQDLSSLSILFFVGRTPKVLKVYPMVVKSXKX

SEQ ID NO: 45309 - protein, 41 aa, Artificial Sequence
  GFR-binding peptide
  MOD_RES (4)..(5)..(39)..(41): Xaa is C or S
  MOD_RES (19)..(20)..(21)..(22)..(23): Xaa is A or G
  MOD_RES (24)..(25)..(26)..(27): Xaa is A or G or is absent
PPTXXVPTRLSSLSILFFXXXXXXXXXLKVYPDMVVESXGX

SEQ ID NO: 45310 - protein, 38 aa, Artificial Sequence
  GFR-binding peptide
  MOD_RES (5)..(6)..(38): Xaa is C or S
ASKAXXVPTKLSSLSILFFDKGVVTYLKVYPGMAVSEX

SEQ ID NO: 45311 - protein, 40 aa, Artificial Sequence
  GFR-binding peptide
  MOD_RES (2)..(3)..(38)..(40): Xaa is C or S
  MOD_RES (17)..(18)..(19)..(20)..(21): Xaa is A or G
  MOD_RES (22)..(23)..(24)..(25): Xaa is A or G or is absent
AXXVPTKLSSLSVLFFXXXXXXXXXLKVYPEGMSVAEXGX

SEQ ID NO: 45312 - protein, 37 aa, Artificial Sequence
  GFR-binding peptide
  MOD_RES (1)..(2)..(36): Xaa is C or S
  MOD_RES (16)..(17)..(18)..(19)..(20): Xaa is A or G
  MOD_RES (21)..(22)..(23)..(24): Xaa is A or G or is absent
XXAPTKLSSLSVLFFXXXXXXXXXLKVYPNMVVKAXG

SEQ ID NO: 45313 - protein, 35 aa, Artificial Sequence
  GFR-binding peptide
  MOD_RES (1)..(2)..(35): Xaa is C or S
XXVPTKLSSLSVLFFDDMGVPTLKVYPEGMSVAEX

SEQ ID NO: 45314 - protein, 37 aa, Artificial Sequence
  GFR-binding peptide
  MOD_RES (1)..(34)..(36): Xaa is C or S
  MOD_RES (15)..(16)..(17)..(18)..(19): Xaa is A or G
  MOD_RES (20)..(21)..(22)..(23): Xaa is A or G or is absent
XVSQDLSSLSILFFXXXXXXXXXLKVYPMIVKSXKXS

SEQ ID NO: 45315 - protein, 38 aa, Artificial Sequence
  GFR-binding peptide
  MOD_RES (3)..(3): Xaa is C or S
  MOD_RES (19)..(20)..(21)..(22)..(23): Xaa is A or G
  MOD_RES (24)..(25)..(26)..(27): Xaa is A or G or is absent
VKXQPSRVHHSSLSVLFFXXXXXXXXXLKVYPRLEEHL

SEQ ID NO: 45316 - protein, 39 aa, Artificial Sequence
  GFR-binding peptide
  MOD_RES (5)..(6): Xaa is C or S
  MOD_RES (20)..(21)..(22)..(23)..(24): Xaa is A or G
  MOD_RES (25)..(26)..(27)..(28): Xaa is A or G or is absent
SAGPXXTPTKMSSLSMLFFXXXXXXXXXLKVYPGMVVDR

SEQ ID NO: 45317 - protein, 35 aa, Artificial Sequence
  GFR-binding peptide
  MOD_RES (3)..(4): Xaa is C or S
KPXXAPTKLSSLSVLFFDDSSNVILKVYPNMVVRS

SEQ ID NO: 45318 - protein, 32 aa, Artificial Sequence
  GFR-binding peptide
  MOD_RES (14)..(15)..(16)..(17)..(18): Xaa is A or G
  MOD_RES (19)..(20)..(21)..(22): Xaa is A or G or is absent
VPTRLSSLSILFFXXXXXXXXXLKVYPDMVVE

SEQ ID NO: 45319 - protein, 37 aa, Artificial Sequence
  GFR-binding peptide
  MOD_RES (5)..(6)..(37): Xaa is C or S
SAAPXXVPQALSSLSILFFVGRKPKVLKVYPMIVRSX

SEQ ID NO: 45320 - protein, 37 aa, Artificial Sequence
  GFR-binding peptide
  MOD_RES (2)..(3)..(34)..(36): Xaa is C or S
PXXVSQDLSSLSILFFIGKTPKILKVYPMIVKSXKXS

SEQ ID NO: 45321 - protein, 31 aa, Artificial Sequence
  GFR-binding peptide
  MOD_RES (1)..(1): Xaa is C or S
XVSQDLSSLSILFFIGKTPKILKVYPMIVKS

SEQ ID NO: 45322 - protein, 40 aa, Artificial Sequence
  GFR-binding peptide
  MOD_RES (37)..(39): Xaa is C or S
  MOD_RES (16)..(17)..(18)..(19)..(20): Xaa is A or G
  MOD_RES (21)..(22)..(23)..(24): Xaa is A or G or is absent
QPSRVHHSSLSVLFFXXXXXXXXXLKVYPRLEEHLEXAXA

SEQ ID NO: 45323 - protein, 32 aa, Artificial Sequence
  GFR-binding peptide
  MOD_RES (1)..(2): Xaa is C or S
XXAPVKTSSLSMLFFDNGRVLLLKVYPMIVEE

SEQ ID NO: 45324 - protein, 31 aa, Artificial Sequence
  GFR-binding peptide
  MOD_RES (1)..(1): Xaa is C or S
XVPQALSSLSILFFVGRKPKVLKVYPMIVRS

SEQ ID NO: 45325 - protein, 34 aa, Artificial Sequence
  GFR-binding peptide
  MOD_RES (1)..(33): Xaa is C or S
XAPTKLSSLSVLFFDDSSNVILKVYPNMVVRSXG

SEQ ID NO: 45326 - protein, 38 aa, Artificial Sequence
  GFR-binding peptide
  MOD_RES (5)..(6)..(37): Xaa is C or S
VPSTXXAPVKTSSLSMLFFDNGRVLLLKVYPMIVEEXG

SEQ ID NO: 45327 - protein, 31 aa, Artificial Sequence
  GFR-binding peptide
  MOD_RES (1)..(1): Xaa is C or S
XAPTKLSSLSVLFFDDSSNVILKVYPNMVVR

SEQ ID NO: 45328 - protein, 38 aa, Artificial Sequence
  GFR-binding peptide
  MOD_RES (3)..(4)..(38): Xaa is C or S
  MOD_RES (18)..(19)..(20)..(21)..(22): Xaa is A or G
  MOD_RES (23)..(24)..(25)..(26): Xaa is A or G or is absent
GPXXTPTKMSSLSMLFFXXXXXXXXXLKVYPGMVVDRX

SEQ ID NO: 45329 - protein, 42 aa, Artificial Sequence
  GFR-binding peptide
  MOD_RES (6)..(7)..(40)..(42): Xaa is C or S
  MOD_RES (21)..(22)..(23)..(24)..(25): Xaa is A or G
  MOD_RES (26)..(27)..(28)..(29): Xaa is A or G or is absent
ASASPXXVSQDLSSLSILFFXXXXXXXXXLKVYPMIVKSXKX

SEQ ID NO: 45330 - protein, 41 aa, Artificial Sequence
  GFR-binding peptide
  MOD_RES (5)..(6)..(39)..(41): Xaa is C or S
  MOD_RES (20)..(21)..(22)..(23)..(24): Xaa is A or G
  MOD_RES (25)..(26)..(27)..(28): Xaa is A or G or is absent
SASPXXVSQDLSSLSILFFXXXXXXXXXLKVYPMIVKSXKX

SEQ ID NO: 45331 - protein, 41 aa, Artificial Sequence
  GFR-binding peptide
  MOD_RES (4)..(5)..(39)..(41): Xaa is C or S
  MOD_RES (19)..(20)..(21)..(22)..(23): Xaa is A or G
  MOD_RES (24)..(25)..(26)..(27): Xaa is A or G or is absent
PKPXXAPTQLSSLSVLFFXXXXXXXXXLKVYPNMVVRAXGX

SEQ ID NO: 45332 - protein, 34 aa, Artificial Sequence
  GFR-binding peptide
  MOD_RES (34)..(34): Xaa is C or S
  MOD_RES (14)..(15)..(16)..(17)..(18): Xaa is A or G
  MOD_RES (19)..(20)..(21)..(22): Xaa is A or G or is absent
VPEKMSSLSILFFXXXXXXXXXLKVYPNMTVESX

SEQ ID NO: 45333 - protein, 34 aa, Artificial Sequence
  GFR-binding peptide
  MOD_RES (2)..(3): Xaa is C or S
AXXAPTKLSSLSVLFFDSSNNVILKVYPNMVVKA

SEQ ID NO: 45334 - protein, 36 aa, Artificial Sequence
  GFR-binding peptide
  MOD_RES (3)..(4): Xaa is C or S
  MOD_RES (18)..(19)..(20)..(21)..(22): Xaa is A or G
  MOD_RES (23)..(24)..(25)..(26): Xaa is A or G or is absent
SPXXVPQDLSSLSILFFXXXXXXXXXLKVYPMVVKS

SEQ ID NO: 45335 - protein, 41 aa, Artificial Sequence
  GFR-binding peptide
  MOD_RES (5)..(6)..(40): Xaa is C or S
  MOD_RES (20)..(21)..(22)..(23)..(24): Xaa is A or G
  MOD_RES (25)..(26)..(27)..(28): Xaa is A or G or is absent
IPEPXXVPEKMSSLSILFFXXXXXXXXXLKVYPNMTVESXA

SEQ ID NO: 45336 - protein, 41 aa, Artificial Sequence
  GFR-binding peptide
  MOD_RES (5)..(6)..(38)..(40): Xaa is C or S
VPKPXXAPTQLSSLSVLFFDDSSNVILKVYPNMVVRAXGXH

SEQ ID NO: 45337 - protein, 38 aa, Artificial Sequence
  GFR-binding peptide
  MOD_RES (6)..(7): Xaa is C or S
HVPKPXXAPTKLSSLSVLFFDDSSNVILKVYPNMVVRS

SEQ ID NO: 45338 - protein, 43 aa, Artificial Sequence
  GFR-binding peptide
  MOD_RES (5)..(6)..(41)..(43): Xaa is C or S
  MOD_RES (20)..(21)..(22)..(23)..(24): Xaa is A or G
  MOD_RES (25)..(26)..(27)..(28): Xaa is A or G or is absent
VGKAXXVPTKLSSLSVLFFXXXXXXXXXLKVYPEGMSVAEXGX

SEQ ID NO: 45339 - protein, 35 aa, Artificial Sequence
  GFR-binding peptide
  MOD_RES (2)..(3): Xaa is C or S
  MOD_RES (17)..(18)..(19)..(20)..(21): Xaa is A or G
  MOD_RES (22)..(23)..(24)..(25): Xaa is A or G or is absent
TXXVPTRLSSLSILFFXXXXXXXXXLKVYPDMVVE

SEQ ID NO: 45340 - protein, 32 aa, Artificial Sequence
  GFR-binding peptide
  MOD_RES (14)..(15)..(16)..(17)..(18): Xaa is A or G
  MOD_RES (19)..(20)..(21)..(22): Xaa is A or G or is absent
VPEKMSSLSILFFXXXXXXXXXLKVYPNMTVE

SEQ ID NO: 45341 - protein, 37 aa, Artificial Sequence
  GFR-binding peptide
  MOD_RES (1)..(36): Xaa is C or S
  MOD_RES (15)..(16)..(17)..(18)..(19): Xaa is A or G
  MOD_RES (20)..(21)..(22)..(23): Xaa is A or G or is absent
XVPTKLSSLSVLFFXXXXXXXXXLKVYPEGMSVAEXG

SEQ ID NO: 45342 - protein, 35 aa, Artificial Sequence
  GFR-binding peptide
  MOD_RES (2)..(2): Xaa is C or S
EXVPTEESSLSMLFFRIKPHQGQHLKVYPFLQHNK

SEQ ID NO: 45343 - protein, 42 aa, Artificial Sequence
  GFR-binding peptide
  MOD_RES (6)..(7)..(40)..(42): Xaa is C or S
  MOD_RES (21)..(22)..(23)..(24)..(25): Xaa is A or G
  MOD_RES (26)..(27)..(28)..(29): Xaa is A or G or is absent
ASAAPXXVPQALSSLSILFFXXXXXXXXXLKVYPMIVRSXKX

SEQ ID NO: 45344 - protein, 42 aa, Artificial Sequence
  GFR-binding peptide
  MOD_RES (5)..(6)..(40)..(42): Xaa is C or S
  MOD_RES (20)..(21)..(22)..(23)..(24): Xaa is A or G
  MOD_RES (25)..(26)..(27)..(28): Xaa is A or G or is absent
SAGPXXTPTKMSSLSMLFFXXXXXXXXXLKVYPGMVVDRXGX

SEQ ID NO: 45345 - protein, 38 aa, Artificial Sequence
  GFR-binding peptide
  MOD_RES (1)..(2)..(35)..(37): Xaa is C or S
  MOD_RES (16)..(17)..(18)..(19)..(20): Xaa is A or G
  MOD_RES (21)..(22)..(23)..(24): Xaa is A or G or is absent
XXVPQALSSLSILFFXXXXXXXXXLKVYPMIVRSXKXS

SEQ ID NO: 45346 - protein, 38 aa, Artificial Sequence
  GFR-binding peptide
  MOD_RES (2)..(3)..(35)..(37): Xaa is C or S
AXXVPTKLSSLSILFFDKGVVTYLKVYPGMAVSEXGXR

SEQ ID NO: 45347 - protein, 37 aa, Artificial Sequence
  GFR-binding peptide
  MOD_RES (3)..(4): Xaa is C or S
  MOD_RES (18)..(19)..(20)..(21)..(22): Xaa is A or G
  MOD_RES (23)..(24)..(25)..(26): Xaa is A or G or is absent
KAXXVPTKLSSLSILFFXXXXXXXXXLKVYPGMAVSE

SEQ ID NO: 45348 - protein, 37 aa, Artificial Sequence
  GFR-binding peptide
  MOD_RES (3)..(4): Xaa is C or S
  MOD_RES (18)..(19)..(20)..(21)..(22): Xaa is A or G
  MOD_RES (23)..(24)..(25)..(26): Xaa is A or G or is absent
PTXXVPTRLSSLSILFFXXXXXXXXXLKVYPDMVVES

SEQ ID NO: 45349 - protein, 41 aa, Artificial Sequence
  GFR-binding peptide
  MOD_RES (5)..(39)..(41): Xaa is C or S
  MOD_RES (19)..(20)..(21)..(22)..(23): Xaa is A or G
  MOD_RES (24)..(25)..(26)..(27): Xaa is A or G or is absent
EGLEXVPTEESSLSMLFFXXXXXXXXXLKVYPFLQHNKXEX

SEQ ID NO: 45350 - protein, 34 aa, Artificial Sequence
  GFR-binding peptide
  MOD_RES (1)..(33): Xaa is C or S
XVPTKLSSLSILFFDKGVVTYLKVYPGMAVSEXG

SEQ ID NO: 45351 - protein, 38 aa, Artificial Sequence
  GFR-binding peptide
  MOD_RES (3)..(4)..(37): Xaa is C or S
  MOD_RES (18)..(19)..(20)..(21)..(22): Xaa is A or G
  MOD_RES (23)..(24)..(25)..(26): Xaa is A or G or is absent
STXXAPVKTSSLSMLFFXXXXXXXXXLKVYPMIVEEXG

SEQ ID NO: 45352 - protein, 39 aa, Artificial Sequence
  GFR-binding peptide
  MOD_RES (6)..(6): Xaa is C or S
  MOD_RES (20)..(21)..(22)..(23)..(24): Xaa is A or G
  MOD_RES (25)..(26)..(27)..(28): Xaa is A or G or is absent
VTKPTXAPTKLSSLSVLFFXXXXXXXXXLKVYPNMVVRS

SEQ ID NO: 45353 - protein, 34 aa, Artificial Sequence
  GFR-binding peptide
  MOD_RES (1)..(32)..(34): Xaa is C or S
XVPQDLSSLSILFFVGRTPKVLKVYPMVVKSXKX

SEQ ID NO: 45354 - protein, 42 aa, Artificial Sequence
  GFR-binding peptide
  MOD_RES (6)..(7)..(42): Xaa is C or S
  MOD_RES (21)..(22)..(23)..(24)..(25): Xaa is A or G
  MOD_RES (26)..(27)..(28)..(29): Xaa is A or G or is absent
KVGKAXXVPTKLSSLSVLFFXXXXXXXXXLKVYPEGMSVAEX

SEQ ID NO: 45355 - protein, 32 aa, Artificial Sequence
  GFR-binding peptide
  MOD_RES (1)..(1): Xaa is C or S
XVPEKMSSLSILFFDENKNVVLKVYPNMTVES

SEQ ID NO: 45356 - protein, 35 aa, Artificial Sequence
  GFR-binding peptide
  MOD_RES (35)..(35): Xaa is C or S
SRVHHSSLSVLFFEYVRKKPKLLKVYPRLEEHLEX

SEQ ID NO: 45357 - protein, 38 aa, Artificial Sequence
  GFR-binding peptide
  MOD_RES (2)..(36)..(38): Xaa is C or S
  MOD_RES (16)..(17)..(18)..(19)..(20): Xaa is A or G
  MOD_RES (21)..(22)..(23)..(24): Xaa is A or G or is absent
EXVPTEESSLSMLFFXXXXXXXXXLKVYPFLQHNKXEX

SEQ ID NO: 45358 - protein, 34 aa, Artificial Sequence
  GFR-binding peptide
QPSRVHHSSLSVLFFEYVRKKPKLLKVYPRLEEH

SEQ ID NO: 45359 - protein, 30 aa, Artificial Sequence
  GFR-binding peptide
APTKLSSLSVLFFDSSNNVILKVYPNMVVK

SEQ ID NO: 45360 - protein, 38 aa, Artificial Sequence
  GFR-binding peptide
  MOD_RES (1)..(35)..(37): Xaa is C or S
  MOD_RES (15)..(16)..(17)..(18)..(19): Xaa is A or G
  MOD_RES (20)..(21)..(22)..(23): Xaa is A or G or is absent
XAPTQLSSLSVLFFXXXXXXXXXLKVYPNMVVRAXGXH

SEQ ID NO: 45361 - protein, 38 aa, Artificial Sequence
  GFR-binding peptide
  MOD_RES (3)..(4)..(38): Xaa is C or S
  MOD_RES (18)..(19)..(20)..(21)..(22): Xaa is A or G
  MOD_RES (23)..(24)..(25)..(26): Xaa is A or G or is absent
KPXXAPTQLSSLSVLFFXXXXXXXXXLKVYPNMVVRAX

SEQ ID NO: 45362 - protein, 35 aa, Artificial Sequence
  GFR-binding peptide
  MOD_RES (34)..(34): Xaa is C or S
  MOD_RES (14)..(15)..(16)..(17)..(18): Xaa is A or G
  MOD_RES (19)..(20)..(21)..(22): Xaa is A or G or is absent
VPTKLSSLSILFFXXXXXXXXXLKVYPGMAVSEXG

SEQ ID NO: 45363 - protein, 38 aa, Artificial Sequence
  GFR-binding peptide
  MOD_RES (1)..(2)..(36)..(38): Xaa is C or S
  MOD_RES (16)..(17)..(18)..(19)..(20): Xaa is A or G
  MOD_RES (21)..(22)..(23)..(24): Xaa is A or G or is absent
XXVPARLSSLSILFFXXXXXXXXXLKVYPDMVVEAXGX

SEQ ID NO: 45364 - protein, 39 aa, Artificial Sequence
  GFR-binding peptide
  MOD_RES (1)..(2)..(36)..(38): Xaa is C or S
  MOD_RES (16)..(17)..(18)..(19)..(20): Xaa is A or G
  MOD_RES (21)..(22)..(23)..(24): Xaa is A or G or is absent
XXTPTKMSSLSMLFFXXXXXXXXXLKVYPGMVVDRXGXS

SEQ ID NO: 45365 - protein, 36 aa, Artificial Sequence
  GFR-binding peptide
  MOD_RES (4)..(4): Xaa is C or S
  MOD_RES (18)..(19)..(20)..(21)..(22): Xaa is A or G
  MOD_RES (23)..(24)..(25)..(26): Xaa is A or G or is absent
KPTXAPTKLSSLSVLFFXXXXXXXXXLKVYPNMVVR

SEQ ID NO: 45366 - protein, 38 aa, Artificial Sequence
  GFR-binding peptide
  MOD_RES (35)..(37): Xaa is C or S
SRVHHSSLSVLFFEYVRKKPKLLKVYPRLEEHLEXAXA

SEQ ID NO: 45367 - protein, 39 aa, Artificial Sequence
  GFR-binding peptide
  MOD_RES (1)..(2)..(36)..(38): Xaa is C or S
  MOD_RES (16)..(17)..(18)..(19)..(20): Xaa is A or G
  MOD_RES (21)..(22)..(23)..(24): Xaa is A or G or is absent
XXVPARLSSLSILFFXXXXXXXXXLKVYPDMVVEAXGXR

SEQ ID NO: 45368 - protein, 42 aa, Artificial Sequence
  GFR-binding peptide
  MOD_RES (3)..(4)..(39)..(41): Xaa is C or S
  MOD_RES (18)..(19)..(20)..(21)..(22): Xaa is A or G
  MOD_RES (23)..(24)..(25)..(26): Xaa is A or G or is absent
KAXXVPTKLSSLSVLFFXXXXXXXXXLKVYPEGMSVAEXGXR

SEQ ID NO: 45369 - protein, 37 aa, Artificial Sequence
  GFR-binding peptide
  MOD_RES (2)..(3)..(37): Xaa is C or S
  MOD_RES (17)..(18)..(19)..(20)..(21): Xaa is A or G
  MOD_RES (22)..(23)..(24)..(25): Xaa is A or G or is absent
AXXVPTELSSLSMLFFXXXXXXXXXLKVYPEMVVEGX

SEQ ID NO: 45370 - protein, 36 aa, Artificial Sequence
  GFR-binding peptide
  MOD_RES (3)..(4)..(36): Xaa is C or S
KPXXAPTKLSSLSVLFFDDSSNVILKVYPNMVVRSX

SEQ ID NO: 45371 - protein, 40 aa, Artificial Sequence
  GFR-binding peptide
  MOD_RES (3)..(4)..(38)..(40): Xaa is C or S
  MOD_RES (18)..(19)..(20)..(21)..(22): Xaa is A or G
  MOD_RES (23)..(24)..(25)..(26): Xaa is A or G or is absent
EPXXVPEKMSSLSILFFXXXXXXXXXLKVYPNMTVESXAX

SEQ ID NO: 45372 - protein, 34 aa, Artificial Sequence
  GFR-binding peptide
  MOD_RES (1)..(33): Xaa is C or S
XVPTRLSSLSILFFDSANNVVLKVYPDMVVESXG

SEQ ID NO: 45373 - protein, 38 aa, Artificial Sequence
  GFR-binding peptide
  MOD_RES (4)..(5): Xaa is C or S
  MOD_RES (19)..(20)..(21)..(22)..(23): Xaa is A or G
  MOD_RES (24)..(25)..(26)..(27): Xaa is A or G or is absent
PKPXXAPTQLSSLSVLFFXXXXXXXXXLKVYPNMVVRA

SEQ ID NO: 45374 - protein, 43 aa, Artificial Sequence
  GFR-binding peptide
  MOD_RES (6)..(7)..(40)..(42): Xaa is C or S
  MOD_RES (21)..(22)..(23)..(24)..(25): Xaa is A or G
  MOD_RES (26)..(27)..(28)..(29): Xaa is A or G or is absent
ASASPXXVSQDLSSLSILFFXXXXXXXXXLKVYPMIVKSXKXS

SEQ ID NO: 45375 - protein, 35 aa, Artificial Sequence
  GFR-binding peptide
  MOD_RES (3)..(35): Xaa is C or S
PTXAPTKLSSLSVLFFDDSSNVILKVYPNMVVRSX

SEQ ID NO: 45376 - protein, 37 aa, Artificial Sequence
  GFR-binding peptide
  MOD_RES (34)..(36): Xaa is C or S
  MOD_RES (14)..(15)..(16)..(17)..(18): Xaa is A or G
  MOD_RES (19)..(20)..(21)..(22): Xaa is A or G or is absent
VPTRLSSLSILFFXXXXXXXXXLKVYPDMVVESXGXR

SEQ ID NO: 45377 - protein, 36 aa, Artificial Sequence
  GFR-binding peptide
  MOD_RES (3)..(4): Xaa is C or S
  MOD_RES (18)..(19)..(20)..(21)..(22): Xaa is A or G
  MOD_RES (23)..(24)..(25)..(26): Xaa is A or G or is absent
KAXXVPTELSSLSMLFFXXXXXXXXXLKVYPEMVVE

SEQ ID NO: 45378 - protein, 35 aa, Artificial Sequence
  GFR-binding peptide
  MOD_RES (3)..(4)..(35): Xaa is C or S
SPXXVPQDLSSLSILFFVGRTPKVLKVYPMVVKSX

SEQ ID NO: 45379 - protein, 39 aa, Artificial Sequence
  GFR-binding peptide
  MOD_RES (6)..(7): Xaa is C or S
  MOD_RES (21)..(22)..(23)..(24)..(25): Xaa is A or G
  MOD_RES (26)..(27)..(28)..(29): Xaa is A or G or is absent
TVPKPXXAPTQLSSLSVLFFXXXXXXXXXLKVYPNMVVR

SEQ ID NO: 45380 - protein, 35 aa, Artificial Sequence
  GFR-binding peptide
  MOD_RES (1)..(33)..(35): Xaa is C or S
XAPTKLSSLSVLFFDDSSNVILKVYPNMVVRSXGX

SEQ ID NO: 45381 - protein, 34 aa, Artificial Sequence
  GFR-binding peptide
  MOD_RES (1)..(33): Xaa is C or S
XVPARLSSLSILFFDAANNVVLKVYPDMVVEAXG

SEQ ID NO: 45382 - protein, 35 aa, Artificial Sequence
  GFR-binding peptide
  MOD_RES (3)..(4): Xaa is C or S
KPXXAPTQLSSLSVLFFDDSSNVILKVYPNMVVRA

SEQ ID NO: 45383 - protein, 38 aa, Artificial Sequence
  GFR-binding peptide
  MOD_RES (3)..(4): Xaa is C or S
  MOD_RES (18)..(19)..(20)..(21)..(22): Xaa is A or G
  MOD_RES (23)..(24)..(25)..(26): Xaa is A or G or is absent
KAXXVPTKLSSLSVLFFXXXXXXXXXLKVYPEGMSVAE

SEQ ID NO: 45384 - protein, 34 aa, Artificial Sequence
  GFR-binding peptide
PSRVHHSSLSVLFFEYVRKKPKLLKVYPRLEEHL

SEQ ID NO: 45385 - protein, 33 aa, Artificial Sequence
  GFR-binding peptide
  MOD_RES (1)..(2)..(33): Xaa is C or S
XXVSQDLSSLSILFFIGKTPKILKVYPMIVKSX

SEQ ID NO: 45386 - protein, 35 aa, Artificial Sequence
  GFR-binding peptide
  MOD_RES (1)..(2)..(35): Xaa is C or S
  MOD_RES (16)..(17)..(18)..(19)..(20): Xaa is A or G
  MOD_RES (21)..(22)..(23)..(24): Xaa is A or G or is absent
XXVSQDLSSLSILFFXXXXXXXXXLKVYPMIVKSX

SEQ ID NO: 45387 - protein, 40 aa, Artificial Sequence
  GFR-binding peptide
  MOD_RES (3)..(4)..(39): Xaa is C or S
  MOD_RES (18)..(19)..(20)..(21)..(22): Xaa is A or G
  MOD_RES (23)..(24)..(25)..(26): Xaa is A or G or is absent
KAXXVPTKLSSLSVLFFXXXXXXXXXLKVYPEGMSVAEXG

SEQ ID NO: 45388 - protein, 37 aa, Artificial Sequence
  GFR-binding peptide
  MOD_RES (4)..(5): Xaa is C or S
  MOD_RES (19)..(20)..(21)..(22)..(23): Xaa is A or G
  MOD_RES (24)..(25)..(26)..(27): Xaa is A or G or is absent
AGPXXTPTKMSSLSMLFFXXXXXXXXXLKVYPGMVVD

SEQ ID NO: 45389 - protein, 35 aa, Artificial Sequence
  GFR-binding peptide
  MOD_RES (2)..(3)..(34): Xaa is C or S
PXXVSQDLSSLSILFFIGKTPKILKVYPMIVKSXK

SEQ ID NO: 45390 - protein, 38 aa, Artificial Sequence
  GFR-binding peptide
  MOD_RES (2)..(3)..(37): Xaa is C or S
  MOD_RES (17)..(18)..(19)..(20)..(21): Xaa is A or G
  MOD_RES (22)..(23)..(24)..(25): Xaa is A or G or is absent
PXXAPTQLSSLSVLFFXXXXXXXXXLKVYPNMVVRAXG

SEQ ID NO: 45391 - protein, 37 aa, Artificial Sequence
  GFR-binding peptide
  MOD_RES (3)..(4): Xaa is C or S
  MOD_RES (18)..(19)..(20)..(21)..(22): Xaa is A or G
  MOD_RES (23)..(24)..(25)..(26): Xaa is A or G or is absent
ASXXVPARLSSLSILFFXXXXXXXXXLKVYPDMVVEA

SEQ ID NO: 45392 - protein, 43 aa, Artificial Sequence
  GFR-binding peptide
  MOD_RES (6)..(7)..(41)..(43): Xaa is C or S
  MOD_RES (21)..(22)..(23)..(24)..(25): Xaa is A or G
  MOD_RES (26)..(27)..(28)..(29): Xaa is A or G or is absent
STPPTXXVPTRLSSLSILFFXXXXXXXXXLKVYPDMVVESXGX

SEQ ID NO: 45393 - protein, 40 aa, Artificial Sequence
  GFR-binding peptide
  MOD_RES (5)..(5): Xaa is C or S
  MOD_RES (21)..(22)..(23)..(24)..(25): Xaa is A or G
  MOD_RES (26)..(27)..(28)..(29): Xaa is A or G or is absent
SSVKXQPSRVHHSSLSVLFFXXXXXXXXXLKVYPRLEEHL

SEQ ID NO: 45394 - protein, 39 aa, Artificial Sequence
  GFR-binding peptide
  MOD_RES (4)..(5)..(38): Xaa is C or S
  MOD_RES (19)..(20)..(21)..(22)..(23): Xaa is A or G
  MOD_RES (24)..(25)..(26)..(27): Xaa is A or G or is absent
ASPXXVPQDLSSLSILFFXXXXXXXXXLKVYPMVVKSXK

SEQ ID NO: 45395 - protein, 33 aa, Artificial Sequence
  GFR-binding peptide
  MOD_RES (1)..(1): Xaa is C or S
  MOD_RES (15)..(16)..(17)..(18)..(19): Xaa is A or G
  MOD_RES (20)..(21)..(22)..(23): Xaa is A or G or is absent
XVPEKMSSLSILFFXXXXXXXXXLKVYPNMTVE

SEQ ID NO: 45396 - protein, 38 aa, Artificial Sequence
  GFR-binding peptide
  MOD_RES (4)..(36)..(38): Xaa is C or S
KPTXAPTKLSSLSVLFFDDSSNVILKVYPNMVVRSXGX

SEQ ID NO: 45397 - protein, 44 aa, Artificial Sequence
  GFR-binding peptide
  MOD_RES (6)..(7)..(41)..(43): Xaa is C or S
  MOD_RES (21)..(22)..(23)..(24)..(25): Xaa is A or G
  MOD_RES (26)..(27)..(28)..(29): Xaa is A or G or is absent
GSAGPXXTPTKMSSLSMLFFXXXXXXXXXLKVYPGMVVDRXGXS

SEQ ID NO: 45398 - protein, 37 aa, Artificial Sequence
  GFR-binding peptide
  MOD_RES (1)..(35)..(37): Xaa is C or S
  MOD_RES (15)..(16)..(17)..(18)..(19): Xaa is A or G
  MOD_RES (20)..(21)..(22)..(23): Xaa is A or G or is absent
XVPTEESSLSMLFFXXXXXXXXXLKVYPFLQHNKXEX

SEQ ID NO: 45399 - protein, 38 aa, Artificial Sequence
  GFR-binding peptide
  MOD_RES (3)..(37): Xaa is C or S
  MOD_RES (17)..(18)..(19)..(20)..(21): Xaa is A or G
  MOD_RES (22)..(23)..(24)..(25): Xaa is A or G or is absent
LEXVPTEESSLSMLFFXXXXXXXXXLKVYPFLQHNKXE

SEQ ID NO: 45400 - protein, 39 aa, Artificial Sequence
  GFR-binding peptide
  MOD_RES (2)..(3)..(37)..(39): Xaa is C or S
  MOD_RES (17)..(18)..(19)..(20)..(21): Xaa is A or G
  MOD_RES (22)..(23)..(24)..(25): Xaa is A or G or is absent
PXXVPEKMSSLSILFFXXXXXXXXXLKVYPNMTVESXAX

SEQ ID NO: 45401 - protein, 37 aa, Artificial Sequence
  GFR-binding peptide
  MOD_RES (4)..(5)..(36): Xaa is C or S
ASPXXVPQDLSSLSILFFVGRTPKVLKVYPMVVKSXK

SEQ ID NO: 45402 - protein, 35 aa, Artificial Sequence
  GFR-binding peptide
  MOD_RES (3)..(4): Xaa is C or S
KAXXVPTKLSSLSILFFDKGVVTYLKVYPGMAVSE

SEQ ID NO: 45403 - protein, 40 aa, Artificial Sequence
  GFR-binding peptide
  MOD_RES (3)..(4)..(38)..(40): Xaa is C or S
  MOD_RES (18)..(19)..(20)..(21)..(22): Xaa is A or G
  MOD_RES (23)..(24)..(25)..(26): Xaa is A or G or is absent
GPXXTPTKMSSLSMLFFXXXXXXXXXLKVYPGMVVDRXGX

SEQ ID NO: 45404 - protein, 40 aa, Artificial Sequence
  GFR-binding peptide
  MOD_RES (3)..(37)..(39): Xaa is C or S
  MOD_RES (17)..(18)..(19)..(20)..(21): Xaa is A or G
  MOD_RES (22)..(23)..(24)..(25): Xaa is A or G or is absent
LEXVPTEESSLSMLFFXXXXXXXXXLKVYPFLQHNKXEXR

SEQ ID NO: 45405 - protein, 32 aa, Artificial Sequence
  GFR-binding peptide
  MOD_RES (1)..(1): Xaa is C or S
XVPTKLSSLSILFFDKGVVTYLKVYPGMAVSE

SEQ ID NO: 45406 - protein, 43 aa, Artificial Sequence
  GFR-binding peptide
  MOD_RES (6)..(7)..(41)..(43): Xaa is C or S
  MOD_RES (21)..(22)..(23)..(24)..(25): Xaa is A or G
  MOD_RES (26)..(27)..(28)..(29): Xaa is A or G or is absent
KASKAXXVPTKLSSLSILFFXXXXXXXXXLKVYPGMAVSEXGX

SEQ ID NO: 45407 - protein, 39 aa, Artificial Sequence
  GFR-binding peptide
  MOD_RES (4)..(5)..(39): Xaa is C or S
  MOD_RES (19)..(20)..(21)..(22)..(23): Xaa is A or G
  MOD_RES (24)..(25)..(26)..(27): Xaa is A or G or is absent
PPTXXVPTRLSSLSILFFXXXXXXXXXLKVYPDMVVESX

SEQ ID NO: 45408 - protein, 41 aa, Artificial Sequence; identical to SEQ ID NO: 153
  GFR-binding peptide
  MOD_RES (6)..(7)..(38)..(40): Xaa is C or S

SEQ ID NO: 45409 - protein, 44 aa, Artificial Sequence
  GFR-binding peptide
  MOD_RES (6)..(7)..(41)..(43): Xaa is C or S
  MOD_RES (21)..(22)..(23)..(24)..(25): Xaa is A or G
  MOD_RES (26)..(27)..(28)..(29): Xaa is A or G or is absent
AVPKAXXAPTKLSSLSVLFFXXXXXXXXXLKVYPNMVVKAXGXH

SEQ ID NO: 45410 - protein, 39 aa, Artificial Sequence
  GFR-binding peptide
  MOD_RES (4)..(5)..(39): Xaa is C or S
  MOD_RES (19)..(20)..(21)..(22)..(23): Xaa is A or G
  MOD_RES (24)..(25)..(26)..(27): Xaa is A or G or is absent
PKPXXAPTKLSSLSVLFFXXXXXXXXXLKVYPNMVVRSX

SEQ ID NO: 45411 - protein, 34 aa, Artificial Sequence
  GFR-binding peptide
  MOD_RES (34)..(34): Xaa is C or S
  MOD_RES (14)..(15)..(16)..(17)..(18): Xaa is A or G
  MOD_RES (19)..(20)..(21)..(22): Xaa is A or G or is absent
VPTRLSSLSILFFXXXXXXXXXLKVYPDMVVESX

SEQ ID NO: 45412 - protein, 36 aa, Artificial Sequence
  GFR-binding peptide
  MOD_RES (3)..(4)..(35): Xaa is C or S
STXXAPVKTSSLSMLFFDNGRVLLLKVYPMIVEEXG

SEQ ID NO: 45413 - protein, 39 aa, Artificial Sequence
  GFR-binding peptide
  MOD_RES (5)..(39): Xaa is C or S
  MOD_RES (19)..(20)..(21)..(22)..(23): Xaa is A or G
  MOD_RES (24)..(25)..(26)..(27): Xaa is A or G or is absent
EGLEXVPTEESSLSMLFFXXXXXXXXXLKVYPFLQHNKX

SEQ ID NO: 45414 - protein, 40 aa, Artificial Sequence
  GFR-binding peptide
  MOD_RES (3)..(40): Xaa is C or S
VKXQPSRVHHSSLSVLFFEYVRKKPKLLKVYPRLEEHLEX

SEQ ID NO: 45415 - protein, 42 aa, Artificial Sequence; identical to SEQ ID NO: 145
  GFR-binding peptide
  MOD_RES (6)..(7)..(39)..(41): Xaa is C or S

SEQ ID NO: 45416 - protein, 35 aa, Artificial Sequence
  GFR-binding peptide
  MOD_RES (1)..(2)..(33)..(35): Xaa is C or S
XXAPVKTSSLSMLFFDNGRVLLLKVYPMIVEEXGX

SEQ ID NO: 45417 - protein, 40 aa, Artificial Sequence
  GFR-binding peptide
  MOD_RES (4)..(38)..(40): Xaa is C or S
  MOD_RES (18)..(19)..(20)..(21)..(22): Xaa is A or G
  MOD_RES (23)..(24)..(25)..(26): Xaa is A or G or is absent
KPTXAPTKLSSLSVLFFXXXXXXXXXLKVYPNMVVRSXGX

SEQ ID NO: 45418 - protein, 37 aa, Artificial Sequence
  GFR-binding peptide
  MOD_RES (2)..(3)..(35)..(37): Xaa is C or S
PXXVPEKMSSLSILFFDENKNVVLKVYPNMTVESXAX

SEQ ID NO: 45419 - protein, 38 aa, Artificial Sequence
  GFR-binding peptide
  MOD_RES (2)..(2): Xaa is C or S
  MOD_RES (18)..(19)..(20)..(21)..(22): Xaa is A or G
  MOD_RES (23)..(24)..(25)..(26): Xaa is A or G or is absent
KXQPSRVHHSSLSVLFFXXXXXXXXXLKVYPRLEEHLE

SEQ ID NO: 45420 - protein, 37 aa, Artificial Sequence
  GFR-binding peptide
  MOD_RES (1)..(2)..(35)..(37): Xaa is C or S
XXVPTKLSSLSVLFFDDMGVPTLKVYPEGMSVAEXGX

SEQ ID NO: 45421 - protein, 37 aa, Artificial Sequence
  GFR-binding peptide
  MOD_RES (1)..(2)..(35)..(37): Xaa is C or S
  MOD_RES (16)..(17)..(18)..(19)..(20): Xaa is A or G
  MOD_RES (21)..(22)..(23)..(24): Xaa is A or G or is absent
XXVPQDLSSLSILFFXXXXXXXXXLKVYPMVVKSXKX

SEQ ID NO: 45422 - protein, 39 aa, Artificial Sequence
  GFR-binding peptide
  MOD_RES (2)..(3)..(37)..(39): Xaa is C or S
  MOD_RES (17)..(18)..(19)..(20)..(21): Xaa is A or G
  MOD_RES (22)..(23)..(24)..(25): Xaa is A or G or is absent
SXXVPARLSSLSILFFXXXXXXXXXLKVYPDMVVEAXGX

SEQ ID NO: 45423 - protein, 40 aa, Artificial Sequence
  GFR-binding peptide
  MOD_RES (6)..(7)..(40): Xaa is C or S
  MOD_RES (21)..(22)..(23)..(24)..(25): Xaa is A or G
  MOD_RES (26)..(27)..(28)..(29): Xaa is A or G or is absent
RVPSTXXAPVKTSSLSMLFFXXXXXXXXXLKVYPMIVEEX

SEQ ID NO: 45424 - protein, 34 aa, Artificial Sequence
  GFR-binding peptide
  MOD_RES (1)..(34): Xaa is C or S
  MOD_RES (15)..(16)..(17)..(18)..(19): Xaa is A or G
  MOD_RES (20)..(21)..(22)..(23): Xaa is A or G or is absent
XVPQDLSSLSILFFXXXXXXXXXLKVYPMVVKSX

SEQ ID NO: 45425 - protein, 39 aa, Artificial Sequence
  GFR-binding peptide
  MOD_RES (3)..(4)..(37)..(39): Xaa is C or S
  MOD_RES (18)..(19)..(20)..(21)..(22): Xaa is A or G
  MOD_RES (23)..(24)..(25)..(26): Xaa is A or G or is absent
STXXAPVKTSSLSMLFFXXXXXXXXXLKVYPMIVEEXGX

SEQ ID NO: 45426 - protein, 37 aa, Artificial Sequence
  GFR-binding peptide
  MOD_RES (1)..(34)..(36): Xaa is C or S
XVPTKLSSLSVLFFDDMGVPTLKVYPEGMSVAEXGXR

SEQ ID NO: 45427 - protein, 35 aa, Artificial Sequence
  GFR-binding peptide
  MOD_RES (2)..(3)..(35): Xaa is C or S
PXXAPTQLSSLSVLFFDDSSNVILKVYPNMVVRAX

SEQ ID NO: 45428 - protein, 43 aa, Artificial Sequence
  GFR-binding peptide
  MOD_RES (5)..(6)..(40)..(42): Xaa is C or S
  MOD_RES (20)..(21)..(22)..(23)..(24): Xaa is A or G
  MOD_RES (25)..(26)..(27)..(28): Xaa is A or G or is absent
VPKPXXAPTQLSSLSVLFFXXXXXXXXXLKVYPNMVVRAXGXH

SEQ ID NO: 45429 - protein, 39 aa, Artificial Sequence
  GFR-binding peptide
  MOD_RES (5)..(39): Xaa is C or S
EGLEXVPTEESSLSMLFFRIKPHQGQHLKVYPFLQHNKX

SEQ ID NO: 45430 - protein, 35 aa, Artificial Sequence
  GFR-binding peptide
  MOD_RES (3)..(4): Xaa is C or S
ASXXVPARLSSLSILFFDAANNVVLKVYPDMVVEA

SEQ ID NO: 45431 - protein, 34 aa, Artificial Sequence
  GFR-binding peptide
  MOD_RES (1)..(33): Xaa is C or S
XTPTKMSSLSMLFFNDKQQIILKVYPGMVVDRXG

SEQ ID NO: 45432 - protein, 39 aa, Artificial Sequence
  GFR-binding peptide
  MOD_RES (3)..(3): Xaa is C or S
VKXQPSRVHHSSLSVLFFEYVRKKPKLLKVYPRLEEHLE

SEQ ID NO: 45433 - protein, 34 aa, Artificial Sequence
  GFR-binding peptide
  MOD_RES (1)..(2): Xaa is C or S
  MOD_RES (16)..(17)..(18)..(19)..(20): Xaa is A or G
  MOD_RES (21)..(22)..(23)..(24): Xaa is A or G or is absent
XXVPARLSSLSILFFXXXXXXXXXLKVYPDMVVE

SEQ ID NO: 45434 - protein, 35 aa, Artificial Sequence
  GFR-binding peptide
  MOD_RES (1)..(1): Xaa is C or S
  MOD_RES (17)..(18)..(19)..(20)..(21): Xaa is A or G
  MOD_RES (22)..(23)..(24)..(25): Xaa is A or G or is absent
XQPSRVHHSSLSVLFFXXXXXXXXXLKVYPRLEEH

SEQ ID NO: 45435 - protein, 33 aa, Artificial Sequence
  GFR-binding peptide
  MOD_RES (14)..(15)..(16)..(17)..(18): Xaa is A or G
  MOD_RES (19)..(20)..(21)..(22): Xaa is A or G or is absent
APTQLSSLSVLFFXXXXXXXXXLKVYPNMVVRA

SEQ ID NO: 45436 - protein, 39 aa, Artificial Sequence
  GFR-binding peptide
  MOD_RES (1)..(2)..(36)..(38): Xaa is C or S
  MOD_RES (16)..(17)..(18)..(19)..(20): Xaa is A or G
  MOD_RES (21)..(22)..(23)..(24): Xaa is A or G or is absent
XXAPTKLSSLSVLFFXXXXXXXXXLKVYPNMVVRSXGXH

SEQ ID NO: 45437 - protein, 32 aa, Artificial Sequence
  GFR-binding peptide
  MOD_RES (14)..(15)..(16)..(17)..(18): Xaa is A or G
  MOD_RES (19)..(20)..(21)..(22): Xaa is A or G or is absent
SRVHHSSLSVLFFXXXXXXXXXLKVYPRLEEH

SEQ ID NO: 45438 - protein, 32 aa, Artificial Sequence
  GFR-binding peptide
  MOD_RES (1)..(1): Xaa is C or S
XAPTKLSSLSVLFFDDSSNVILKVYPNMVVRS

SEQ ID NO: 45439 - protein, 40 aa, Artificial Sequence
  GFR-binding peptide
  MOD_RES (4)..(5)..(39): Xaa is C or S
  MOD_RES (19)..(20)..(21)..(22)..(23): Xaa is A or G
  MOD_RES (24)..(25)..(26)..(27): Xaa is A or G or is absent
SKAXXVPTKLSSLSILFFXXXXXXXXXLKVYPGMAVSEXG

SEQ ID NO: 45440 - protein, 37 aa, Artificial Sequence
  GFR-binding peptide
  MOD_RES (2)..(3)..(37): Xaa is C or S
  MOD_RES (17)..(18)..(19)..(20)..(21): Xaa is A or G
  MOD_RES (22)..(23)..(24)..(25): Xaa is A or G or is absent
AXXVPTKLSSLSILFFXXXXXXXXXLKVYPGMAVSEX

SEQ ID NO: 45441 - protein, 40 aa, Artificial Sequence
  GFR-binding peptide
  MOD_RES (6)..(7): Xaa is C or S
  MOD_RES (21)..(22)..(23)..(24)..(25): Xaa is A or G
  MOD_RES (26)..(27)..(28)..(29): Xaa is A or G or is absent
YVPKPXXAPTKLSSLSVLFFXXXXXXXXXLKVYPNMVVRS

SEQ ID NO: 45442 - protein, 40 aa, Artificial Sequence
  GFR-binding peptide
  MOD_RES (6)..(7): Xaa is C or S
  MOD_RES (21)..(22)..(23)..(24)..(25): Xaa is A or G
  MOD_RES (26)..(27)..(28)..(29): Xaa is A or G or is absent
AVPKAXXAPTKLSSLSVLFFXXXXXXXXXLKVYPNMVVKA

SEQ ID NO: 45443 - protein, 40 aa, Artificial Sequence
  GFR-binding peptide
  MOD_RES (6)..(7)..(38)..(40): Xaa is C or S
ASASPXXVSQDLSSLSILFFIGKTPKILKVYPMIVKSXKX

SEQ ID NO: 45444 - protein, 42 aa, Artificial Sequence
  GFR-binding peptide
  MOD_RES (6)..(7)..(40)..(42): Xaa is C or S
KVGKAXXVPTKLSSLSVLFFDDMGVPTLKVYPEGMSVAEXGX

SEQ ID NO: 45445 - protein, 37 aa, Artificial Sequence
  GFR-binding peptide
  MOD_RES (1)..(35)..(37): Xaa is C or S
  MOD_RES (15)..(16)..(17)..(18)..(19): Xaa is A or G
  MOD_RES (20)..(21)..(22)..(23): Xaa is A or G or is absent
XVPARLSSLSILFFXXXXXXXXXLKVYPDMVVEAXGX

SEQ ID NO: 45446 - protein, 36 aa, Artificial Sequence
  GFR-binding peptide
  MOD_RES (1)..(35): Xaa is C or S
  MOD_RES (15)..(16)..(17)..(18)..(19): Xaa is A or G
  MOD_RES (20)..(21)..(22)..(23): Xaa is A or G or is absent
XVPTEESSLSMLFFXXXXXXXXXLKVYPFLQHNKXE

SEQ ID NO: 45447 - protein, 35 aa, Artificial Sequence
  GFR-binding peptide
  MOD_RES (2)..(3): Xaa is C or S
  MOD_RES (17)..(18)..(19)..(20)..(21): Xaa is A or G
  MOD_RES (22)..(23)..(24)..(25): Xaa is A or G or is absent
SXXVPARLSSLSILFFXXXXXXXXXLKVYPDMVVE

SEQ ID NO: 45448 - protein, 38 aa, Artificial Sequence
  GFR-binding peptide
  MOD_RES (4)..(5): Xaa is C or S
  MOD_RES (19)..(20)..(21)..(22)..(23): Xaa is A or G
  MOD_RES (24)..(25)..(26)..(27): Xaa is A or G or is absent
PASXXVPARLSSLSILFFXXXXXXXXXLKVYPDMVVEA

SEQ ID NO: 45449 - protein, 42 aa, Artificial Sequence; identical to SEQ ID NO: 147
  GFR-binding peptide
  MOD_RES (6)..(7)..(39)..(41): Xaa is C or S

SEQ ID NO: 45450 - protein, 40 aa, Artificial Sequence
  GFR-binding peptide
  MOD_RES (4)..(5)..(39): Xaa is C or S
  MOD_RES (19)..(20)..(21)..(22)..(23): Xaa is A or G
  MOD_RES (24)..(25)..(26)..(27): Xaa is A or G or is absent
PKPXXAPTKLSSLSVLFFXXXXXXXXXLKVYPNMVVRSXG

SEQ ID NO: 45451 - protein, 37 aa, Artificial Sequence
  GFR-binding peptide
  MOD_RES (4)..(5): Xaa is C or S
  MOD_RES (19)..(20)..(21)..(22)..(23): Xaa is A or G
  MOD_RES (24)..(25)..(26)..(27): Xaa is A or G or is absent
ASPXXVPQDLSSLSILFFXXXXXXXXXLKVYPMVVKS

SEQ ID NO: 45452 - protein, 39 aa, Artificial Sequence
  GFR-binding peptide
  MOD_RES (4)..(5)..(38): Xaa is C or S
  MOD_RES (19)..(20)..(21)..(22)..(23): Xaa is A or G
  MOD_RES (24)..(25)..(26)..(27): Xaa is A or G or is absent
AAPXXVPQALSSLSILFFXXXXXXXXXLKVYPMIVRSXK

SEQ ID NO: 45453 - protein, 33 aa, Artificial Sequence
  GFR-binding peptide
  MOD_RES (32)..(32): Xaa is C or S
APTKLSSLSVLFFDSSNNVILKVYPNMVVKAXG

SEQ ID NO: 45454 - protein, 40 aa, Artificial Sequence
  GFR-binding peptide
  MOD_RES (6)..(7)..(40): Xaa is C or S
  MOD_RES (21)..(22)..(23)..(24)..(25): Xaa is A or G
  MOD_RES (26)..(27)..(28)..(29): Xaa is A or G or is absent
ASASPXXVSQDLSSLSILFFXXXXXXXXXLKVYPMIVKSX

SEQ ID NO: 45455 - protein, 41 aa, Artificial Sequence
  GFR-binding peptide
  MOD_RES (3)..(40): Xaa is C or S
VKXQPSRVHHSSLSVLFFEYVRKKPKLLKVYPRLEEHLEXA

SEQ ID NO: 45456 - protein, 37 aa, Artificial Sequence
  GFR-binding peptide
  MOD_RES (2)..(3)..(35)..(37): Xaa is C or S
SXXVPARLSSLSILFFDAANNVVLKVYPDMVVEAXGX

SEQ ID NO: 45457 - protein, 38 aa, Artificial Sequence
  GFR-binding peptide
  MOD_RES (3)..(4)..(36)..(38): Xaa is C or S
EPXXVPEKMSSLSILFFDENKNVVLKVYPNMTVESXAX

SEQ ID NO: 45458 - protein, 37 aa, Artificial Sequence
  GFR-binding peptide
  MOD_RES (1)..(2)..(36): Xaa is C or S
  MOD_RES (16)..(17)..(18)..(19)..(20): Xaa is A or G
  MOD_RES (21)..(22)..(23)..(24): Xaa is A or G or is absent
XXAPTKLSSLSVLFFXXXXXXXXXLKVYPNMVVRSXG

SEQ ID NO: 45459 - protein, 36 aa, Artificial Sequence
  GFR-binding peptide
  MOD_RES (2)..(3): Xaa is C or S
  MOD_RES (17)..(18)..(19)..(20)..(21): Xaa is A or G
  MOD_RES (22)..(23)..(24)..(25): Xaa is A or G or is absent
AXXVPTKLSSLSILFFXXXXXXXXXLKVYPGMAVSE

SEQ ID NO: 45460 - protein, 40 aa, Artificial Sequence
  GFR-binding peptide
  MOD_RES (6)..(7)..(39): Xaa is C or S
YVPKPXXAPTKLSSLSVLFFDDSSNVILKVYPNMVVRSXG

SEQ ID NO: 45461 - protein, 38 aa, Artificial Sequence
  GFR-binding peptide
  MOD_RES (1)..(2)..(36)..(38): Xaa is C or S
  MOD_RES (16)..(17)..(18)..(19)..(20): Xaa is A or G
  MOD_RES (21)..(22)..(23)..(24): Xaa is A or G or is absent
XXVPEKMSSLSILFFXXXXXXXXXLKVYPNMTVESXAX

SEQ ID NO: 45462 - protein, 42 aa, Artificial Sequence
  GFR-binding peptide
  MOD_RES (6)..(7)..(41): Xaa is C or S
  MOD_RES (21)..(22)..(23)..(24)..(25): Xaa is A or G
  MOD_RES (26)..(27)..(28)..(29): Xaa is A or G or is absent
SIPKAXXVPTELSSLSMLFFXXXXXXXXXLKVYPEMVVEGXG

SEQ ID NO: 45463 - protein, 35 aa, Artificial Sequence
  GFR-binding peptide
  MOD_RES (1)..(2): Xaa is C or S
  MOD_RES (16)..(17)..(18)..(19)..(20): Xaa is A or G
  MOD_RES (21)..(22)..(23)..(24): Xaa is A or G or is absent
XXAPTQLSSLSVLFFXXXXXXXXXLKVYPNMVVRA

SEQ ID NO: 45464 - protein, 35 aa, Artificial Sequence
  GFR-binding peptide
  MOD_RES (1)..(33)..(35): Xaa is C or S
XAPTQLSSLSVLFFDDSSNVILKVYPNMVVRAXGX

SEQ ID NO: 45465 - protein, 39 aa, Artificial Sequence
  GFR-binding peptide
  MOD_RES (5)..(6): Xaa is C or S
  MOD_RES (20)..(21)..(22)..(23)..(24): Xaa is A or G
  MOD_RES (25)..(26)..(27)..(28): Xaa is A or G or is absent
VPKPXXAPTQLSSLSVLFFXXXXXXXXXLKVYPNMVVRA

SEQ ID NO: 45466 - protein, 36 aa, Artificial Sequence
  GFR-binding peptide
  MOD_RES (34)..(36): Xaa is C or S
  MOD_RES (14)..(15)..(16)..(17)..(18): Xaa is A or G
  MOD_RES (19)..(20)..(21)..(22): Xaa is A or G or is absent
APTKLSSLSVLFFXXXXXXXXXLKVYPNMVVKAXGX

SEQ ID NO: 45467 - protein, 37 aa, Artificial Sequence
  GFR-binding peptide
  MOD_RES (2)..(3)..(35)..(37): Xaa is C or S
PXXAPTQLSSLSVLFFDDSSNVILKVYPNMVVRAXGX

SEQ ID NO: 45468 - protein, 43 aa, Artificial Sequence
  GFR-binding peptide
  MOD_RES (3)..(40)..(42): Xaa is C or S
VKXQPSRVHHSSLSVLFFEYVRKKPKLLKVYPRLEEHLEXAXA

SEQ ID NO: 45469 - protein, 38 aa, Artificial Sequence
  GFR-binding peptide
  MOD_RES (36)..(38): Xaa is C or S
PSRVHHSSLSVLFFEYVRKKPKLLKVYPRLEEHLEXAX

SEQ ID NO: 45470 - protein, 35 aa, Artificial Sequence
  GFR-binding peptide
  MOD_RES (2)..(3): Xaa is C or S
  MOD_RES (17)..(18)..(19)..(20)..(21): Xaa is A or G
  MOD_RES (22)..(23)..(24)..(25): Xaa is A or G or is absent
PXXTPTKMSSLSMLFFXXXXXXXXXLKVYPGMVVD

SEQ ID NO: 45471 - protein, 32 aa, Artificial Sequence
  GFR-binding peptide
  MOD_RES (14)..(15)..(16)..(17)..(18): Xaa is A or G
  MOD_RES (19)..(20)..(21)..(22): Xaa is A or G or is absent
VSQDLSSLSILFFXXXXXXXXXLKVYPMIVKS

SEQ ID NO: 45472 - protein, 41 aa, Artificial Sequence
  GFR-binding peptide
  MOD_RES (5)..(6)..(39)..(41): Xaa is C or S
  MOD_RES (20)..(21)..(22)..(23)..(24): Xaa is A or G
  MOD_RES (25)..(26)..(27)..(28): Xaa is A or G or is absent
SAAPXXVPQALSSLSILFFXXXXXXXXXLKVYPMIVRSXKX

SEQ ID NO: 45473 - protein, 35 aa, Artificial Sequence
  GFR-binding peptide
  MOD_RES (2)..(3): Xaa is C or S
  MOD_RES (17)..(18)..(19)..(20)..(21): Xaa is A or G
  MOD_RES (22)..(23)..(24)..(25): Xaa is A or G or is absent
AXXVPTKLSSLSILFFXXXXXXXXXLKVYPGMAVS

SEQ ID NO: 45474 - protein, 37 aa, Artificial Sequence
  GFR-binding peptide
  MOD_RES (1)..(1): Xaa is C or S
XQPSRVHHSSLSVLFFEYVRKKPKLLKVYPRLEEHLE

SEQ ID NO: 45475 - protein, 39 aa, Artificial Sequence
  GFR-binding peptide
  MOD_RES (4)..(5)..(37)..(39): Xaa is C or S
PEPXXVPEKMSSLSILFFDENKNVVLKVYPNMTVESXAX

SEQ ID NO: 45476 - protein, 33 aa, Artificial Sequence
  GFR-binding peptide
  MOD_RES (1)..(1): Xaa is C or S
  MOD_RES (15)..(16)..(17)..(18)..(19): Xaa is A or G
  MOD_RES (20)..(21)..(22)..(23): Xaa is A or G or is absent
XVPQALSSLSILFFXXXXXXXXXLKVYPMIVRS

SEQ ID NO: 45477 - protein, 38 aa, Artificial Sequence
  GFR-binding peptide
  MOD_RES (2)..(3)..(37): Xaa is C or S
  MOD_RES (17)..(18)..(19)..(20)..(21): Xaa is A or G
  MOD_RES (22)..(23)..(24)..(25): Xaa is A or G or is absent
AXXVPTELSSLSMLFFXXXXXXXXXLKVYPEMVVEGXG

SEQ ID NO: 45478 - protein, 37 aa, Artificial Sequence
  GFR-binding peptide
  MOD_RES (2)..(36): Xaa is C or S
  MOD_RES (16)..(17)..(18)..(19)..(20): Xaa is A or G
  MOD_RES (21)..(22)..(23)..(24): Xaa is A or G or is absent
EXVPTEESSLSMLFFXXXXXXXXXLKVYPFLQHNKXE

SEQ ID NO: 45479 - protein, 42 aa, Artificial Sequence
  GFR-binding peptide
  MOD_RES (6)..(7)..(39)..(41): Xaa is C or S
AVPKAXXAPTKLSSLSVLFFDSSNNVILKVYPNMVVKAXGXH

SEQ ID NO: 45480 - protein, 36 aa, Artificial Sequence
  GFR-binding peptide
  MOD_RES (1)..(34)..(36): Xaa is C or S
  MOD_RES (15)..(16)..(17)..(18)..(19): Xaa is A or G
  MOD_RES (20)..(21)..(22)..(23): Xaa is A or G or is absent
XAPVKTSSLSMLFFXXXXXXXXXLKVYPMIVEEXGX

SEQ ID NO: 45481 - protein, 34 aa, Artificial Sequence
  GFR-binding peptide
  MOD_RES (3)..(4): Xaa is C or S
KPXXAPTKLSSLSVLFFDDSSNVILKVYPNMVVR

SEQ ID NO: 45482 - protein, 34 aa, Artificial Sequence
  GFR-binding peptide
  MOD_RES (31)..(33): Xaa is C or S
APVKTSSLSMLFFDNGRVLLLKVYPMIVEEXGXL

SEQ ID NO: 45483 - protein, 32 aa, Artificial Sequence
  GFR-binding peptide
  MOD_RES (1)..(32): Xaa is C or S
XAPVKTSSLSMLFFDNGRVLLLKVYPMIVEEX

SEQ ID NO: 45484 - protein, 35 aa, Artificial Sequence
  GFR-binding peptide
  MOD_RES (1)..(2)..(33)..(35): Xaa is C or S
XXVSQDLSSLSILFFIGKTPKILKVYPMIVKSXKX

SEQ ID NO: 45485 - protein, 40 aa, Artificial Sequence
  GFR-binding peptide
  MOD_RES (1)..(38)..(40): Xaa is C or S
XQPSRVHHSSLSVLFFEYVRKKPKLLKVYPRLEEHLEXAX

SEQ ID NO: 45486 - protein, 37 aa, Artificial Sequence
  GFR-binding peptide
  MOD_RES (3)..(4)..(36): Xaa is C or S
EPXXVPEKMSSLSILFFDENKNVVLKVYPNMTVESXA

SEQ ID NO: 45487 - protein, 42 aa, Artificial Sequence
  GFR-binding peptide
  MOD_RES (6)..(7)..(41): Xaa is C or S
  MOD_RES (21)..(22)..(23)..(24)..(25): Xaa is A or G
  MOD_RES (26)..(27)..(28)..(29): Xaa is A or G or is absent
AVPKAXXAPTKLSSLSVLFFXXXXXXXXXLKVYPNMVVKAXG

SEQ ID NO: 45488 - protein, 39 aa, Artificial Sequence
  GFR-binding peptide
  MOD_RES (4)..(5)..(37)..(39): Xaa is C or S
SKAXXVPTKLSSLSILFFDKGVVTYLKVYPGMAVSEXGX

SEQ ID NO: 45489 - protein, 38 aa, Artificial Sequence
  GFR-binding peptide
  MOD_RES (1)..(2)..(36)..(38): Xaa is C or S
  MOD_RES (16)..(17)..(18)..(19)..(20): Xaa is A or G
  MOD_RES (21)..(22)..(23)..(24): Xaa is A or G or is absent
XXAPTKLSSLSVLFFXXXXXXXXXLKVYPNMVVKAXGX

SEQ ID NO: 45490 - protein, 38 aa, Artificial Sequence
  GFR-binding peptide
  MOD_RES (6)..(7): Xaa is C or S
TVPKPXXAPTQLSSLSVLFFDDSSNVILKVYPNMVVRA

SEQ ID NO: 45491 - protein, 36 aa, Artificial Sequence
  GFR-binding peptide
  MOD_RES (2)..(3): Xaa is C or S
  MOD_RES (17)..(18)..(19)..(20)..(21): Xaa is A or G
  MOD_RES (22)..(23)..(24)..(25): Xaa is A or G or is absent
AXXAPTKLSSLSVLFFXXXXXXXXXLKVYPNMVVKA

SEQ ID NO: 45492 - protein, 39 aa, Artificial Sequence
  GFR-binding peptide
  MOD_RES (5)..(6): Xaa is C or S
  MOD_RES (20)..(21)..(22)..(23)..(24): Xaa is A or G
  MOD_RES (25)..(26)..(27)..(28): Xaa is A or G or is absent
APASXXVPARLSSLSILFFXXXXXXXXXLKVYPDMVVEA

SEQ ID NO: 45493 - protein, 38 aa, Artificial Sequence
  GFR-binding peptide
  MOD_RES (2)..(3)..(35)..(37): Xaa is C or S
PXXAPTQLSSLSVLFFDDSSNVILKVYPNMVVRAXGXH

SEQ ID NO: 45494 - protein, 37 aa, Artificial Sequence
  GFR-binding peptide
  MOD_RES (36)..(36): Xaa is C or S
PSRVHHSSLSVLFFEYVRKKPKLLKVYPRLEEHLEXA

SEQ ID NO: 45495 - protein, 36 aa, Artificial Sequence
  GFR-binding peptide
  MOD_RES (4)..(5): Xaa is C or S
PPTXXVPTRLSSLSILFFDSANNVVLKVYPDMVVES

SEQ ID NO: 45496 - protein, 36 aa, Artificial Sequence
  GFR-binding peptide
  MOD_RES (1)..(33)..(35): Xaa is C or S
XVPEKMSSLSILFFDENKNVVLKVYPNMTVESXAXR

SEQ ID NO: 45497 - protein, 44 aa, Artificial Sequence
  GFR-binding peptide
  MOD_RES (6)..(7)..(41)..(43): Xaa is C or S
  MOD_RES (21)..(22)..(23)..(24)..(25): Xaa is A or G
  MOD_RES (26)..(27)..(28)..(29): Xaa is A or G or is absent
HVPKPXXAPTKLSSLSVLFFXXXXXXXXXLKVYPNMVVRSXGXH

SEQ ID NO: 45498 - protein, 37 aa, Artificial Sequence
  GFR-binding peptide
  MOD_RES (1)..(2)..(34)..(36): Xaa is C or S
XXVPTKLSSLSILFFDKGVVTYLKVYPGMAVSEXGXR

SEQ ID NO: 45499 - protein, 34 aa, Artificial Sequence
  GFR-binding peptide
  MOD_RES (2)..(3)..(34): Xaa is C or S
PXXVPQALSSLSILFFVGRKPKVLKVYPMIVRSX

SEQ ID NO: 45500 - protein, 33 aa, Artificial Sequence
  GFR-binding peptide
  MOD_RES (1)..(1): Xaa is C or S
  MOD_RES (15)..(16)..(17)..(18)..(19): Xaa is A or G
  MOD_RES (20)..(21)..(22)..(23): Xaa is A or G or is absent
XVPTELSSLSMLFFXXXXXXXXXLKVYPEMVVE

SEQ ID NO: 45501 - protein, 35 aa, Artificial Sequence
  GFR-binding peptide
  MOD_RES (5)..(5): Xaa is C or S
TKPTXAPTKLSSLSVLFFDDSSNVILKVYPNMVVR

SEQ ID NO: 45502 - protein, 34 aa, Artificial Sequence
  GFR-binding peptide
  MOD_RES (32)..(34): Xaa is C or S
VPARLSSLSILFFDAANNVVLKVYPDMVVEAXGX

SEQ ID NO: 45503 - protein, 35 aa, Artificial Sequence
  GFR-binding peptide
  MOD_RES (1)..(33)..(35): Xaa is C or S
XVPTRLSSLSILFFDSANNVVLKVYPDMVVESXGX

SEQ ID NO: 45504 - protein, 39 aa, Artificial Sequence
  GFR-binding peptide
  MOD_RES (3)..(4)..(37)..(39): Xaa is C or S
  MOD_RES (18)..(19)..(20)..(21)..(22): Xaa is A or G
  MOD_RES (23)..(24)..(25)..(26): Xaa is A or G or is absent
SPXXVSQDLSSLSILFFXXXXXXXXXLKVYPMIVKSXKX

SEQ ID NO: 45505 - protein, 37 aa, Artificial Sequence
  GFR-binding peptide
  MOD_RES (34)..(36): Xaa is C or S
  MOD_RES (14)..(15)..(16)..(17)..(18): Xaa is A or G
  MOD_RES (19)..(20)..(21)..(22): Xaa is A or G or is absent
VPEKMSSLSILFFXXXXXXXXXLKVYPNMTVESXAXR

SEQ ID NO: 45506 - protein, 40 aa, Artificial Sequence
  GFR-binding peptide
  MOD_RES (5)..(6)..(38)..(40): Xaa is C or S
TPPTXXVPTRLSSLSILFFDSANNVVLKVYPDMVVESXGX

SEQ ID NO: 45507 - protein, 35 aa, Artificial Sequence
  GFR-binding peptide
  MOD_RES (4)..(5): Xaa is C or S
PSTXXAPVKTSSLSMLFFDNGRVLLLKVYPMIVEE

SEQ ID NO: 45508 - protein, 36 aa, Artificial Sequence
  GFR-binding peptide
  MOD_RES (5)..(6): Xaa is C or S
SASPXXVSQDLSSLSILFFIGKTPKILKVYPMIVKS

SEQ ID NO: 45509 - protein, 41 aa, Artificial Sequence
  GFR-binding peptide
  MOD_RES (4)..(38)..(40): Xaa is C or S
  MOD_RES (18)..(19)..(20)..(21)..(22): Xaa is A or G
  MOD_RES (23)..(24)..(25)..(26): Xaa is A or G or is absent
KPTXAPTKLSSLSVLFFXXXXXXXXXLKVYPNMVVRSXGXH

SEQ ID NO: 45510 - protein, 43 aa, Artificial Sequence
  GFR-binding peptide
  MOD_RES (5)..(6)..(40)..(42): Xaa is C or S
  MOD_RES (20)..(21)..(22)..(23)..(24): Xaa is A or G
  MOD_RES (25)..(26)..(27)..(28): Xaa is A or G or is absent
TPPTXXVPTRLSSLSILFFXXXXXXXXXLKVYPDMVVESXGXR

SEQ ID NO: 45511 - protein, 37 aa, Artificial Sequence
  GFR-binding peptide
  MOD_RES (3)..(4)..(36): Xaa is C or S
KAXXVPTKLSSLSILFFDKGVVTYLKVYPGMAVSEXG

SEQ ID NO: 45512 - protein, 34 aa, Artificial Sequence
  GFR-binding peptide
  MOD_RES (1)..(34): Xaa is C or S
  MOD_RES (15)..(16)..(17)..(18)..(19): Xaa is A or G
  MOD_RES (20)..(21)..(22)..(23): Xaa is A or G or is absent
XVPQALSSLSILFFXXXXXXXXXLKVYPMIVRSX

SEQ ID NO: 45513 - protein, 42 aa, Artificial Sequence
  GFR-binding peptide
  MOD_RES (6)..(40)..(42): Xaa is C or S
  MOD_RES (20)..(21)..(22)..(23)..(24): Xaa is A or G
  MOD_RES (25)..(26)..(27)..(28): Xaa is A or G or is absent
VTKPTXAPTKLSSLSVLFFXXXXXXXXXLKVYPNMVVRSXGX

SEQ ID NO: 45514 - protein, 37 aa, Artificial Sequence
  GFR-binding peptide
  MOD_RES (5)..(6): Xaa is C or S
VPKPXXAPTQLSSLSVLFFDDSSNVILKVYPNMVVRA

SEQ ID NO: 45515 - protein, 40 aa, Artificial Sequence
  GFR-binding peptide
  MOD_RES (4)..(5)..(37)..(39): Xaa is C or S
PKPXXAPTKLSSLSVLFFDDSSNVILKVYPNMVVRSXGXH

SEQ ID NO: 45516 - protein, 32 aa, Artificial Sequence
  GFR-binding peptide
  MOD_RES (14)..(15)..(16)..(17)..(18): Xaa is A or G
  MOD_RES (19)..(20)..(21)..(22): Xaa is A or G or is absent
VPTELSSLSMLFFXXXXXXXXXLKVYPEMVVE

SEQ ID NO: 45517 - protein, 37 aa, Artificial Sequence
  GFR-binding peptide
  MOD_RES (35)..(37): Xaa is C or S
SRVHHSSLSVLFFEYVRKKPKLLKVYPRLEEHLEXAX

SEQ ID NO: 45518 - protein, 37 aa, Artificial Sequence
  GFR-binding peptide
  MOD_RES (3)..(37): Xaa is C or S
  MOD_RES (17)..(18)..(19)..(20)..(21): Xaa is A or G
  MOD_RES (22)..(23)..(24)..(25): Xaa is A or G or is absent
PTXAPTKLSSLSVLFFXXXXXXXXXLKVYPNMVVRSX

SEQ ID NO: 45519 - protein, 36 aa, Artificial Sequence
  GFR-binding peptide
  MOD_RES (2)..(3)..(35): Xaa is C or S
PXXTPTKMSSLSMLFFNDKQQIILKVYPGMVVDRXG

SEQ ID NO: 45520 - protein, 39 aa, Artificial Sequence
  GFR-binding peptide
  MOD_RES (6)..(7)..(39): Xaa is C or S
STPPTXXVPTRLSSLSILFFDSANNVVLKVYPDMVVESX

SEQ ID NO: 45521 - protein, 40 aa, Artificial Sequence
  GFR-binding peptide
  MOD_RES (2)..(3)..(37)..(39): Xaa is C or S
  MOD_RES (17)..(18)..(19)..(20)..(21): Xaa is A or G
  MOD_RES (22)..(23)..(24)..(25): Xaa is A or G or is absent
PXXAPTQLSSLSVLFFXXXXXXXXXLKVYPNMVVRAXGXH

SEQ ID NO: 45522 - protein, 37 aa, Artificial Sequence
  GFR-binding peptide
  MOD_RES (4)..(5)..(37): Xaa is C or S
PPTXXVPTRLSSLSILFFDSANNVVLKVYPDMVVESX

SEQ ID NO: 45523 - protein, 38 aa, Artificial Sequence
  GFR-binding peptide
  MOD_RES (4)..(5)..(36)..(38): Xaa is C or S
PSTXXAPVKTSSLSMLFFDNGRVLLLKVYPMIVEEXGX

SEQ ID NO: 45524 - protein, 30 aa, Artificial Sequence
  GFR-binding peptide
VPEKMSSLSILFFDENKNVVLKVYPNMTVE

SEQ ID NO: 45525 - protein, 40 aa, Artificial Sequence
  GFR-binding peptide
  MOD_RES (6)..(7)..(39): Xaa is C or S
GIPEPXXVPEKMSSLSILFFDENKNVVLKVYPNMTVESXA

SEQ ID NO: 45526 - protein, 37 aa, Artificial Sequence
  GFR-binding peptide
  MOD_RES (1)..(2)..(36): Xaa is C or S
  MOD_RES (16)..(17)..(18)..(19)..(20): Xaa is A or G
  MOD_RES (21)..(22)..(23)..(24): Xaa is A or G or is absent
XXVPTELSSLSMLFFXXXXXXXXXLKVYPEMVVEGXG

SEQ ID NO: 45527 - protein, 34 aa, Artificial Sequence
  GFR-binding peptide
  MOD_RES (1)..(2): Xaa is C or S
  MOD_RES (16)..(17)..(18)..(19)..(20): Xaa is A or G
  MOD_RES (21)..(22)..(23)..(24): Xaa is A or G or is absent
XXVPTKLSSLSILFFXXXXXXXXXLKVYPGMAVS

SEQ ID NO: 45528 - protein, 37 aa, Artificial Sequence
  GFR-binding peptide
  MOD_RES (6)..(7): Xaa is C or S
ASASPXXVSQDLSSLSILFFIGKTPKILKVYPMIVKS

SEQ ID NO: 45529 - protein, 39 aa, Artificial Sequence
  GFR-binding peptide
  MOD_RES (36)..(38): Xaa is C or S
PSRVHHSSLSVLFFEYVRKKPKLLKVYPRLEEHLEXAXA

SEQ ID NO: 45530 - protein, 36 aa, Artificial Sequence
  GFR-binding peptide
  MOD_RES (34)..(36): Xaa is C or S
VPTEESSLSMLFFRIKPHQGQHLKVYPFLQHNKXEX

SEQ ID NO: 45531 - protein, 38 aa, Artificial Sequence
  GFR-binding peptide
  MOD_RES (1)..(38): Xaa is C or S
XQPSRVHHSSLSVLFFEYVRKKPKLLKVYPRLEEHLEX

SEQ ID NO: 45532 - protein, 33 aa, Artificial Sequence
  GFR-binding peptide
  MOD_RES (32)..(32): Xaa is C or S
VPEKMSSLSILFFDENKNVVLKVYPNMTVESXA

SEQ ID NO: 45533 - protein, 39 aa, Artificial Sequence
  GFR-binding peptide
  MOD_RES (2)..(36)..(38): Xaa is C or S
  MOD_RES (16)..(17)..(18)..(19)..(20): Xaa is A or G
  MOD_RES (21)..(22)..(23)..(24): Xaa is A or G or is absent
EXVPTEESSLSMLFFXXXXXXXXXLKVYPFLQHNKXEXR

SEQ ID NO: 45534 - protein, 43 aa, Artificial Sequence
  GFR-binding peptide
  MOD_RES (6)..(7)..(40)..(42): Xaa is C or S
  MOD_RES (21)..(22)..(23)..(24)..(25): Xaa is A or G
  MOD_RES (26)..(27)..(28)..(29): Xaa is A or G or is absent
ASASPXXVPQDLSSLSILFFXXXXXXXXXLKVYPMVVKSXKXS

SEQ ID NO: 45535 - protein, 37 aa, Artificial Sequence
  GFR-binding peptide
  MOD_RES (3)..(4): Xaa is C or S
  MOD_RES (18)..(19)..(20)..(21)..(22): Xaa is A or G
  MOD_RES (23)..(24)..(25)..(26): Xaa is A or G or is absent
KPXXAPTQLSSLSVLFFXXXXXXXXXLKVYPNMVVRA

SEQ ID NO: 45536 - protein, 41 aa, Artificial Sequence
  GFR-binding peptide
  MOD_RES (4)..(5)..(39)..(41): Xaa is C or S
  MOD_RES (19)..(20)..(21)..(22)..(23): Xaa is A or G
  MOD_RES (24)..(25)..(26)..(27): Xaa is A or G or is absent
PKPXXAPTKLSSLSVLFFXXXXXXXXXLKVYPNMVVRSXGX

SEQ ID NO: 45537 - protein, 41 aa, Artificial Sequence
  GFR-binding peptide
  MOD_RES (5)..(6)..(40): Xaa is C or S
  MOD_RES (20)..(21)..(22)..(23)..(24): Xaa is A or G
  MOD_RES (25)..(26)..(27)..(28): Xaa is A or G or is absent
VPKPXXAPTKLSSLSVLFFXXXXXXXXXLKVYPNMVVRSXG

SEQ ID NO: 45538 - protein, 31 aa, Artificial Sequence
  GFR-binding peptide
  MOD_RES (1)..(1): Xaa is C or S
XVPQDLSSLSILFFVGRTPKVLKVYPMVVKS

SEQ ID NO: 45539 - protein, 36 aa, Artificial Sequence
  GFR-binding peptide
  MOD_RES (2)..(3): Xaa is C or S
  MOD_RES (17)..(18)..(19)..(20)..(21): Xaa is A or G
  MOD_RES (22)..(23)..(24)..(25): Xaa is A or G or is absent
PXXTPTKMSSLSMLFFXXXXXXXXXLKVYPGMVVDR

SEQ ID NO: 45540 - protein, 38 aa, Artificial Sequence
  GFR-binding peptide
  MOD_RES (6)..(7): Xaa is C or S
AVPKAXXAPTKLSSLSVLFFDSSNNVILKVYPNMVVKA

SEQ ID NO: 45541 - protein, 42 aa, Artificial Sequence
  GFR-binding peptide
  MOD_RES (4)..(5)..(39)..(41): Xaa is C or S
  MOD_RES (19)..(20)..(21)..(22)..(23): Xaa is A or G
  MOD_RES (24)..(25)..(26)..(27): Xaa is A or G or is absent
PKPXXAPTQLSSLSVLFFXXXXXXXXXLKVYPNMVVRAXGXH

SEQ ID NO: 45542 - protein, 36 aa, Artificial Sequence
  GFR-binding peptide
  MOD_RES (5)..(6): Xaa is C or S
VPSTXXAPVKTSSLSMLFFDNGRVLLLKVYPMIVEE

SEQ ID NO: 45543 - protein, 39 aa, Artificial Sequence
  GFR-binding peptide
  MOD_RES (4)..(5)..(39): Xaa is C or S
  MOD_RES (19)..(20)..(21)..(22)..(23): Xaa is A or G
  MOD_RES (24)..(25)..(26)..(27): Xaa is A or G or is absent
AGPXXTPTKMSSLSMLFFXXXXXXXXXLKVYPGMVVDRX

SEQ ID NO: 45544 - protein, 33 aa, Artificial Sequence
  GFR-binding peptide
  MOD_RES (1)..(2)..(33): Xaa is C or S
XXVPQDLSSLSILFFVGRTPKVLKVYPMVVKSX

SEQ ID NO: 45545 - protein, 42 aa, Artificial Sequence
  GFR-binding peptide
  MOD_RES (7)..(41): Xaa is C or S
  MOD_RES (21)..(22)..(23)..(24)..(25): Xaa is A or G
  MOD_RES (26)..(27)..(28)..(29): Xaa is A or G or is absent
HVTKPTXAPTKLSSLSVLFFXXXXXXXXXLKVYPNMVVRSXG

SEQ ID NO: 45546 - protein, 38 aa, Artificial Sequence
  GFR-binding peptide
  MOD_RES (5)..(6): Xaa is C or S
  MOD_RES (20)..(21)..(22)..(23)..(24): Xaa is A or G
  MOD_RES (25)..(26)..(27)..(28): Xaa is A or G or is absent
VPKPXXAPTQLSSLSVLFFXXXXXXXXXLKVYPNMVVR

SEQ ID NO: 45547 - protein, 33 aa, Artificial Sequence
  GFR-binding peptide
  MOD_RES (1)..(1): Xaa is C or S
XVPTKLSSLSVLFFDDMGVPTLKVYPEGMSVAE

SEQ ID NO: 45548 - protein, 43 aa, Artificial Sequence
  GFR-binding peptide
  MOD_RES (6)..(40)..(42): Xaa is C or S
  MOD_RES (20)..(21)..(22)..(23)..(24): Xaa is A or G
  MOD_RES (25)..(26)..(27)..(28): Xaa is A or G or is absent
VTKPTXAPTKLSSLSVLFFXXXXXXXXXLKVYPNMVVRSXGXH

SEQ ID NO: 45549 - protein, 33 aa, Artificial Sequence
  GFR-binding peptide
  MOD_RES (2)..(3): Xaa is C or S
PXXVPQDLSSLSILFFVGRTPKVLKVYPMVVKS

SEQ ID NO: 45550 - protein, 37 aa, Artificial Sequence
  GFR-binding peptide
  MOD_RES (4)..(4): Xaa is C or S
GLEXVPTEESSLSMLFFRIKPHQGQHLKVYPFLQHNK

SEQ ID NO: 45551 - protein, 45 aa, Artificial Sequence
  GFR-binding peptide
  MOD_RES (5)..(42)..(44): Xaa is C or S
  MOD_RES (21)..(22)..(23)..(24)..(25): Xaa is A or G
  MOD_RES (26)..(27)..(28)..(29): Xaa is A or G or is absent
SSVKXQPSRVHHSSLSVLFFXXXXXXXXXLKVYPRLEEHLEXAXA

SEQ ID NO: 45552 - protein, 31 aa, Artificial Sequence
  GFR-binding peptide
  MOD_RES (31)..(31): Xaa is C or S
APVKTSSLSMLFFDNGRVLLLKVYPMIVEEX

SEQ ID NO: 45553 - protein, 30 aa, Artificial Sequence
  GFR-binding peptide
APTQLSSLSVLFFDDSSNVILKVYPNMVVR

SEQ ID NO: 45554 - protein, 32 aa, Artificial Sequence
  GFR-binding peptide
  MOD_RES (31)..(31): Xaa is C or S
VPQALSSLSILFFVGRKPKVLKVYPMIVRSXK

SEQ ID NO: 45555 - protein, 41 aa, Artificial Sequence
  GFR-binding peptide
  MOD_RES (5)..(6)..(39)..(41): Xaa is C or S
  MOD_RES (20)..(21)..(22)..(23)..(24): Xaa is A or G
  MOD_RES (25)..(26)..(27)..(28): Xaa is A or G or is absent
VPSTXXAPVKTSSLSMLFFXXXXXXXXXLKVYPMIVEEXGX

SEQ ID NO: 45556 - protein, 43 aa, Artificial Sequence
  GFR-binding peptide
  MOD_RES (6)..(7)..(41)..(43): Xaa is C or S
  MOD_RES (21)..(22)..(23)..(24)..(25): Xaa is A or G
  MOD_RES (26)..(27)..(28)..(29): Xaa is A or G or is absent
AAPASXXVPARLSSLSILFFXXXXXXXXXLKVYPDMVVEAXGX

SEQ ID NO: 45557 - protein, 41 aa, Artificial Sequence
  GFR-binding peptide
  MOD_RES (3)..(4)..(38)..(40): Xaa is C or S
  MOD_RES (18)..(19)..(20)..(21)..(22): Xaa is A or G
  MOD_RES (23)..(24)..(25)..(26): Xaa is A or G or is absent
PTXXVPTRLSSLSILFFXXXXXXXXXLKVYPDMVVESXGXR

SEQ ID NO: 45558 - protein, 37 aa, Artificial Sequence
  GFR-binding peptide
  MOD_RES (37)..(37): Xaa is C or S
  MOD_RES (16)..(17)..(18)..(19)..(20): Xaa is A or G
  MOD_RES (21)..(22)..(23)..(24): Xaa is A or G or is absent
QPSRVHHSSLSVLFFXXXXXXXXXLKVYPRLEEHLEX

SEQ ID NO: 45559 - protein, 39 aa, Artificial Sequence
  GFR-binding peptide
  MOD_RES (3)..(4)..(37)..(39): Xaa is C or S
  MOD_RES (18)..(19)..(20)..(21)..(22): Xaa is A or G
  MOD_RES (23)..(24)..(25)..(26): Xaa is A or G or is absent
APXXVPQALSSLSILFFXXXXXXXXXLKVYPMIVRSXKX

SEQ ID NO: 45560 - protein, 38 aa, Artificial Sequence
  GFR-binding peptide
  MOD_RES (1)..(35)..(37): Xaa is C or S
  MOD_RES (15)..(16)..(17)..(18)..(19): Xaa is A or G
  MOD_RES (20)..(21)..(22)..(23): Xaa is A or G or is absent
XVPTEESSLSMLFFXXXXXXXXXLKVYPFLQHNKXEXR

SEQ ID NO: 45561 - protein, 36 aa, Artificial Sequence
  GFR-binding peptide
  MOD_RES (1)..(33)..(35): Xaa is C or S
XAPTQLSSLSVLFFDDSSNVILKVYPNMVVRAXGXH

SEQ ID NO: 45562 - protein, 39 aa, Artificial Sequence
  GFR-binding peptide
  MOD_RES (5)..(6): Xaa is C or S
  MOD_RES (20)..(21)..(22)..(23)..(24): Xaa is A or G
  MOD_RES (25)..(26)..(27)..(28): Xaa is A or G or is absent
IPEPXXVPEKMSSLSILFFXXXXXXXXXLKVYPNMTVES

SEQ ID NO: 45563 - protein, 37 aa, Artificial Sequence
  GFR-binding peptide
  MOD_RES (3)..(3): Xaa is C or S
VKXQPSRVHHSSLSVLFFEYVRKKPKLLKVYPRLEEH

SEQ ID NO: 45564 - protein, 32 aa, Artificial Sequence
  GFR-binding peptide
  MOD_RES (14)..(15)..(16)..(17)..(18): Xaa is A or G
  MOD_RES (19)..(20)..(21)..(22): Xaa is A or G or is absent
APTQLSSLSVLFFXXXXXXXXXLKVYPNMVVR

SEQ ID NO: 45565 - protein, 40 aa, Artificial Sequence
  GFR-binding peptide
  MOD_RES (3)..(4)..(38)..(40): Xaa is C or S
  MOD_RES (18)..(19)..(20)..(21)..(22): Xaa is A or G
  MOD_RES (23)..(24)..(25)..(26): Xaa is A or G or is absent
KAXXVPTKLSSLSILFFXXXXXXXXXLKVYPGMAVSEXGX

SEQ ID NO: 45566 - protein, 37 aa, Artificial Sequence
  GFR-binding peptide
  MOD_RES (4)..(5): Xaa is C or S
  MOD_RES (19)..(20)..(21)..(22)..(23): Xaa is A or G
  MOD_RES (24)..(25)..(26)..(27): Xaa is A or G or is absent
PASXXVPARLSSLSILFFXXXXXXXXXLKVYPDMVVE

SEQ ID NO: 45567 - protein, 41 aa, Artificial Sequence
  GFR-binding peptide
  MOD_RES (1)..(38)..(40): Xaa is C or S
  MOD_RES (17)..(18)..(19)..(20)..(21): Xaa is A or G
  MOD_RES (22)..(23)..(24)..(25): Xaa is A or G or is absent
XQPSRVHHSSLSVLFFXXXXXXXXXLKVYPRLEEHLEXAXA

SEQ ID NO: 45568 - protein, 35 aa, Artificial Sequence
  GFR-binding peptide
  MOD_RES (4)..(5): Xaa is C or S
PPTXXVPTRLSSLSILFFDSANNVVLKVYPDMVVE

SEQ ID NO: 45569 - protein, 32 aa, Artificial Sequence
  GFR-binding peptide
VPTKLSSLSVLFFDDMGVPTLKVYPEGMSVAE

SEQ ID NO: 45570 - protein, 42 aa, Artificial Sequence
  GFR-binding peptide
  MOD_RES (6)..(7)..(39)..(41): Xaa is C or S
YVPKPXXAPTKLSSLSVLFFDDSSNVILKVYPNMVVRSXGXH

SEQ ID NO: 45571 - protein, 35 aa, Artificial Sequence
  GFR-binding peptide
  MOD_RES (1)..(33)..(35): Xaa is C or S
XAPTKLSSLSVLFFDSSNNVILKVYPNMVVKAXGX

SEQ ID NO: 45572 - protein, 33 aa, Artificial Sequence
  GFR-binding peptide
  MOD_RES (1)..(1): Xaa is C or S
  MOD_RES (15)..(16)..(17)..(18)..(19): Xaa is A or G
  MOD_RES (20)..(21)..(22)..(23): Xaa is A or G or is absent
XAPTQLSSLSVLFFXXXXXXXXXLKVYPNMVVR

SEQ ID NO: 45573 - protein, 43 aa, Artificial Sequence
  GFR-binding peptide
  MOD_RES (5)..(6)..(40)..(42): Xaa is C or S
  MOD_RES (20)..(21)..(22)..(23)..(24): Xaa is A or G
  MOD_RES (25)..(26)..(27)..(28): Xaa is A or G or is absent
APASXXVPARLSSLSILFFXXXXXXXXXLKVYPDMVVEAXGXR

SEQ ID NO: 45574 - protein, 39 aa, Artificial Sequence
  GFR-binding peptide
  MOD_RES (6)..(7)..(38): Xaa is C or S
RVPSTXXAPVKTSSLSMLFFDNGRVLLLKVYPMIVEEXG

SEQ ID NO: 45575 - protein, 35 aa, Artificial Sequence
  GFR-binding peptide
  MOD_RES (2)..(3): Xaa is C or S
  MOD_RES (17)..(18)..(19)..(20)..(21): Xaa is A or G
  MOD_RES (22)..(23)..(24)..(25): Xaa is A or G or is absent
PXXAPTQLSSLSVLFFXXXXXXXXXLKVYPNMVVR

SEQ ID NO: 45576 - protein, 35 aa, Artificial Sequence
  GFR-binding peptide
  MOD_RES (1)..(35): Xaa is C or S
  MOD_RES (15)..(16)..(17)..(18)..(19): Xaa is A or G
  MOD_RES (20)..(21)..(22)..(23): Xaa is A or G or is absent
XAPTQLSSLSVLFFXXXXXXXXXLKVYPNMVVRAX

SEQ ID NO: 45577 - protein, 39 aa, Artificial Sequence
  GFR-binding peptide
  MOD_RES (6)..(7): Xaa is C or S
  MOD_RES (21)..(22)..(23)..(24)..(25): Xaa is A or G
  MOD_RES (26)..(27)..(28)..(29): Xaa is A or G or is absent
AVPKAXXAPTKLSSLSVLFFXXXXXXXXXLKVYPNMVVK

SEQ ID NO: 45578 - protein, 40 aa, Artificial Sequence
  GFR-binding peptide
  MOD_RES (4)..(4): Xaa is C or S
SVKXQPSRVHHSSLSVLFFEYVRKKPKLLKVYPRLEEHLE

SEQ ID NO: 45579 - protein, 35 aa, Artificial Sequence
  GFR-binding peptide
  MOD_RES (1)..(2)..(35): Xaa is C or S
  MOD_RES (16)..(17)..(18)..(19)..(20): Xaa is A or G
  MOD_RES (21)..(22)..(23)..(24): Xaa is A or G or is absent
XXVPQALSSLSILFFXXXXXXXXXLKVYPMIVRSX

SEQ ID NO: 45580 - protein, 38 aa, Artificial Sequence
  GFR-binding peptide
  MOD_RES (1)..(2)..(36)..(38): Xaa is C or S
  MOD_RES (16)..(17)..(18)..(19)..(20): Xaa is A or G
  MOD_RES (21)..(22)..(23)..(24): Xaa is A or G or is absent
XXTPTKMSSLSMLFFXXXXXXXXXLKVYPGMVVDRXGX

SEQ ID NO: 45581 - protein, 38 aa, Artificial Sequence
  GFR-binding peptide
  MOD_RES (36)..(38): Xaa is C or S
  MOD_RES (15)..(16)..(17)..(18)..(19): Xaa is A or G
  MOD_RES (20)..(21)..(22)..(23): Xaa is A or G or is absent
PSRVHHSSLSVLFFXXXXXXXXXLKVYPRLEEHLEXAX

SEQ ID NO: 45582 - protein, 36 aa, Artificial Sequence
  GFR-binding peptide
  MOD_RES (1)..(33)..(35): Xaa is C or S
XVPTKLSSLSILFFDKGVVTYLKVYPGMAVSEXGXR

SEQ ID NO: 45583 - protein, 36 aa, Artificial Sequence
  GFR-binding peptide
  MOD_RES (1)..(33)..(35): Xaa is C or S
XAPTKLSSLSVLFFDDSSNVILKVYPNMVVRSXGXH

SEQ ID NO: 45584 - protein, 32 aa, Artificial Sequence
  GFR-binding peptide
  MOD_RES (1)..(2): Xaa is C or S
XXVPQALSSLSILFFVGRKPKVLKVYPMIVRS

SEQ ID NO: 45585 - protein, 41 aa, Artificial Sequence
  GFR-binding peptide
  MOD_RES (4)..(5)..(40): Xaa is C or S
  MOD_RES (19)..(20)..(21)..(22)..(23): Xaa is A or G
  MOD_RES (24)..(25)..(26)..(27): Xaa is A or G or is absent
GKAXXVPTKLSSLSVLFFXXXXXXXXXLKVYPEGMSVAEXG

SEQ ID NO: 45586 - protein, 40 aa, Artificial Sequence
  GFR-binding peptide
  MOD_RES (5)..(6)..(38)..(40): Xaa is C or S
VPKAXXAPTKLSSLSVLFFDSSNNVILKVYPNMVVKAXGX

SEQ ID NO: 45587 - protein, 36 aa, Artificial Sequence
  GFR-binding peptide
  MOD_RES (1)..(35): Xaa is C or S
  MOD_RES (15)..(16)..(17)..(18)..(19): Xaa is A or G
  MOD_RES (20)..(21)..(22)..(23): Xaa is A or G or is absent
XVPEKMSSLSILFFXXXXXXXXXLKVYPNMTVESXA

SEQ ID NO: 45588 - protein, 40 aa, Artificial Sequence
  GFR-binding peptide
  MOD_RES (5)..(6)..(37)..(39): Xaa is C or S
SAAPXXVPQALSSLSILFFVGRKPKVLKVYPMIVRSXKXS

SEQ ID NO: 45589 - protein, 39 aa, Artificial Sequence
  GFR-binding peptide
  MOD_RES (3)..(4)..(39): Xaa is C or S
  MOD_RES (18)..(19)..(20)..(21)..(22): Xaa is A or G
  MOD_RES (23)..(24)..(25)..(26): Xaa is A or G or is absent
KAXXVPTKLSSLSVLFFXXXXXXXXXLKVYPEGMSVAEX

SEQ ID NO: 45590 - protein, 41 aa, Artificial Sequence; identical to SEQ ID NO: 151
  GFR-binding peptide
  MOD_RES (6)..(7)..(38)..(40): Xaa is C or S

SEQ ID NO: 45591 - protein, 36 aa, Artificial Sequence
  GFR-binding peptide
  MOD_RES (2)..(3)..(35): Xaa is C or S
PXXAPTQLSSLSVLFFDDSSNVILKVYPNMVVRAXG

SEQ ID NO: 45592 - protein, 37 aa, Artificial Sequence
  GFR-binding peptide
  MOD_RES (7)..(7): Xaa is C or S
HVTKPTXAPTKLSSLSVLFFDDSSNVILKVYPNMVVR

SEQ ID NO: 45593 - protein, 35 aa, Artificial Sequence
  GFR-binding peptide
  MOD_RES (2)..(3): Xaa is C or S
  MOD_RES (17)..(18)..(19)..(20)..(21): Xaa is A or G
  MOD_RES (22)..(23)..(24)..(25): Xaa is A or G or is absent
PXXVPQALSSLSILFFXXXXXXXXXLKVYPMIVRS

SEQ ID NO: 45594 - protein, 34 aa, Artificial Sequence
  GFR-binding peptide
  MOD_RES (3)..(4): Xaa is C or S
EPXXVPEKMSSLSILFFDENKNVVLKVYPNMTVE

SEQ ID NO: 45595 - protein, 39 aa, Artificial Sequence
  GFR-binding peptide
  MOD_RES (1)..(2)..(36)..(38): Xaa is C or S
  MOD_RES (16)..(17)..(18)..(19)..(20): Xaa is A or G
  MOD_RES (21)..(22)..(23)..(24): Xaa is A or G or is absent
XXAPTQLSSLSVLFFXXXXXXXXXLKVYPNMVVRAXGXH

SEQ ID NO: 45596 - protein, 38 aa, Artificial Sequence
  GFR-binding peptide
  MOD_RES (2)..(2): Xaa is C or S
KXQPSRVHHSSLSVLFFEYVRKKPKLLKVYPRLEEHLE

SEQ ID NO: 45597 - protein, 35 aa, Artificial Sequence
  GFR-binding peptide
  MOD_RES (2)..(3): Xaa is C or S
AXXVPTKLSSLSVLFFDDMGVPTLKVYPEGMSVAE

SEQ ID NO: 45598 - protein, 41 aa, Artificial Sequence
  GFR-binding peptide
  MOD_RES (6)..(7): Xaa is C or S
  MOD_RES (21)..(22)..(23)..(24)..(25): Xaa is A or G
  MOD_RES (26)..(27)..(28)..(29): Xaa is A or G or is absent
KVGKAXXVPTKLSSLSVLFFXXXXXXXXXLKVYPEGMSVAE

SEQ ID NO: 45599 - protein, 32 aa, Artificial Sequence
  GFR-binding peptide
  MOD_RES (1)..(1): Xaa is C or S
XVPTRLSSLSILFFDSANNVVLKVYPDMVVES

SEQ ID NO: 45600 - protein, 36 aa, Artificial Sequence
  GFR-binding peptide
  MOD_RES (4)..(5)..(36): Xaa is C or S
ASPXXVPQDLSSLSILFFVGRTPKVLKVYPMVVKSX

SEQ ID NO: 45601 - protein, 31 aa, Artificial Sequence
  GFR-binding peptide
  MOD_RES (1)..(1): Xaa is C or S
XAPTQLSSLSVLFFDDSSNVILKVYPNMVVR

SEQ ID NO: 45602 - protein, 36 aa, Artificial Sequence
  GFR-binding peptide
  MOD_RES (4)..(5): Xaa is C or S
PEPXXVPEKMSSLSILFFDENKNVVLKVYPNMTVES

SEQ ID NO: 45603 - protein, 40 aa, Artificial Sequence
  GFR-binding peptide
  MOD_RES (6)..(40): Xaa is C or S
DEGLEXVPTEESSLSMLFFRIKPHQGQHLKVYPFLQHNKX

SEQ ID NO: 45604 - protein, 37 aa, Artificial Sequence
  GFR-binding peptide
  MOD_RES (1)..(35)..(37): Xaa is C or S
  MOD_RES (15)..(16)..(17)..(18)..(19): Xaa is A or G
  MOD_RES (20)..(21)..(22)..(23): Xaa is A or G or is absent
XAPTKLSSLSVLFFXXXXXXXXXLKVYPNMVVRSXGX

SEQ ID NO: 45605 - protein, 42 aa, Artificial Sequence
  GFR-binding peptide
  MOD_RES (5)..(6)..(39)..(41): Xaa is C or S
  MOD_RES (20)..(21)..(22)..(23)..(24): Xaa is A or G
  MOD_RES (25)..(26)..(27)..(28): Xaa is A or G or is absent
SAAPXXVPQALSSLSILFFXXXXXXXXXLKVYPMIVRSXKXS

SEQ ID NO: 45606 - protein, 40 aa, Artificial Sequence
  GFR-binding peptide
  MOD_RES (5)..(6)..(37)..(39): Xaa is C or S
VPSTXXAPVKTSSLSMLFFDNGRVLLLKVYPMIVEEXGXL

SEQ ID NO: 45607 - protein, 36 aa, Artificial Sequence
  GFR-binding peptide
  MOD_RES (1)..(33)..(35): Xaa is C or S
XAPTKLSSLSVLFFDSSNNVILKVYPNMVVKAXGXH

SEQ ID NO: 45608 - protein, 41 aa, Artificial Sequence
  GFR-binding peptide
  MOD_RES (6)..(7)..(40): Xaa is C or S
  MOD_RES (21)..(22)..(23)..(24)..(25): Xaa is A or G
  MOD_RES (26)..(27)..(28)..(29): Xaa is A or G or is absent
ASASPXXVSQDLSSLSILFFXXXXXXXXXLKVYPMIVKSXK

SEQ ID NO: 45609 - protein, 39 aa, Artificial Sequence
  GFR-binding peptide
  MOD_RES (2)..(3)..(37)..(39): Xaa is C or S
  MOD_RES (17)..(18)..(19)..(20)..(21): Xaa is A or G
  MOD_RES (22)..(23)..(24)..(25): Xaa is A or G or is absent
PXXAPTKLSSLSVLFFXXXXXXXXXLKVYPNMVVRSXGX

SEQ ID NO: 45610 - protein, 35 aa, Artificial Sequence
  GFR-binding peptide
  MOD_RES (32)..(34): Xaa is C or S
APTKLSSLSVLFFDDSSNVILKVYPNMVVRSXGXH

SEQ ID NO: 45611 - protein, 39 aa, Artificial Sequence
  GFR-binding peptide
  MOD_RES (6)..(7): Xaa is C or S
KVGKAXXVPTKLSSLSVLFFDDMGVPTLKVYPEGMSVAE

SEQ ID NO: 45612 - protein, 41 aa, Artificial Sequence
  GFR-binding peptide
  MOD_RES (5)..(6)..(38)..(40): Xaa is C or S
APASXXVPARLSSLSILFFDAANNVVLKVYPDMVVEAXGXR

SEQ ID NO: 45613 - protein, 37 aa, Artificial Sequence
  GFR-binding peptide
  MOD_RES (3)..(4)..(36): Xaa is C or S
PTXXVPTRLSSLSILFFDSANNVVLKVYPDMVVESXG

SEQ ID NO: 45614 - protein, 38 aa, Artificial Sequence
  GFR-binding peptide
  MOD_RES (2)..(3)..(36)..(38): Xaa is C or S
  MOD_RES (17)..(18)..(19)..(20)..(21): Xaa is A or G
  MOD_RES (22)..(23)..(24)..(25): Xaa is A or G or is absent
PXXVPQDLSSLSILFFXXXXXXXXXLKVYPMVVKSXKX

SEQ ID NO: 45615 - protein, 39 aa, Artificial Sequence
  GFR-binding peptide
  MOD_RES (5)..(6)..(38): Xaa is C or S
APASXXVPARLSSLSILFFDAANNVVLKVYPDMVVEAXG

SEQ ID NO: 45616 - protein, 37 aa, Artificial Sequence
  GFR-binding peptide
  MOD_RES (5)..(6)..(37): Xaa is C or S
SASPXXVSQDLSSLSILFFIGKTPKILKVYPMIVKSX

SEQ ID NO: 45617 - protein, 39 aa, Artificial Sequence
  GFR-binding peptide
  MOD_RES (6)..(7)..(38): Xaa is C or S
ASASPXXVSQDLSSLSILFFIGKTPKILKVYPMIVKSXK

SEQ ID NO: 45618 - protein, 40 aa, Artificial Sequence
  GFR-binding peptide
  MOD_RES (4)..(5)..(39): Xaa is C or S
  MOD_RES (19)..(20)..(21)..(22)..(23): Xaa is A or G
  MOD_RES (24)..(25)..(26)..(27): Xaa is A or G or is absent
PKPXXAPTQLSSLSVLFFXXXXXXXXXLKVYPNMVVRAXG

SEQ ID NO: 45619 - protein, 35 aa, Artificial Sequence
  GFR-binding peptide
  MOD_RES (1)..(2): Xaa is C or S
  MOD_RES (16)..(17)..(18)..(19)..(20): Xaa is A or G
  MOD_RES (21)..(22)..(23)..(24): Xaa is A or G or is absent
XXVPTKLSSLSILFFXXXXXXXXXLKVYPGMAVSE

SEQ ID NO: 45620 - protein, 41 aa, Artificial Sequence
  GFR-binding peptide
  MOD_RES (6)..(7)..(41): Xaa is C or S
  MOD_RES (21)..(22)..(23)..(24)..(25): Xaa is A or G
  MOD_RES (26)..(27)..(28)..(29): Xaa is A or G or is absent
YVPKPXXAPTKLSSLSVLFFXXXXXXXXXLKVYPNMVVRSX

SEQ ID NO: 45621 - protein, 42 aa, Artificial Sequence
  GFR-binding peptide
  MOD_RES (6)..(7)..(41): Xaa is C or S
  MOD_RES (21)..(22)..(23)..(24)..(25): Xaa is A or G
  MOD_RES (26)..(27)..(28)..(29): Xaa is A or G or is absent
STPPTXXVPTRLSSLSILFFXXXXXXXXXLKVYPDMVVESXG

SEQ ID NO: 45622 - protein, 33 aa, Artificial Sequence
  GFR-binding peptide
  MOD_RES (2)..(3): Xaa is C or S
PXXTPTKMSSLSMLFFNDKQQIILKVYPGMVVD

SEQ ID NO: 45623 - protein, 43 aa, Artificial Sequence
  GFR-binding peptide
  MOD_RES (6)..(7)..(41)..(43): Xaa is C or S
  MOD_RES (21)..(22)..(23)..(24)..(25): Xaa is A or G
  MOD_RES (26)..(27)..(28)..(29): Xaa is A or G or is absent
GIPEPXXVPEKMSSLSILFFXXXXXXXXXLKVYPNMTVESXAX

SEQ ID NO: 45624 - protein, 35 aa, Artificial Sequence
  GFR-binding peptide
  MOD_RES (32)..(34): Xaa is C or S
VPARLSSLSILFFDAANNVVLKVYPDMVVEAXGXR

SEQ ID NO: 45625 - protein, 37 aa, Artificial Sequence
  GFR-binding peptide
  MOD_RES (5)..(6): Xaa is C or S
IPEPXXVPEKMSSLSILFFDENKNVVLKVYPNMTVES

SEQ ID NO: 45626 - protein, 35 aa, Artificial Sequence
  GFR-binding peptide
  MOD_RES (1)..(32)..(34): Xaa is C or S
XVPQALSSLSILFFVGRKPKVLKVYPMIVRSXKXS

SEQ ID NO: 45627 - protein, 36 aa, Artificial Sequence
  GFR-binding peptide
  MOD_RES (33)..(35): Xaa is C or S
  MOD_RES (14)..(15)..(16)..(17)..(18): Xaa is A or G
  MOD_RES (19)..(20)..(21)..(22): Xaa is A or G or is absent
VPQALSSLSILFFXXXXXXXXXLKVYPMIVRSXKXS

SEQ ID NO: 45628 - protein, 37 aa, Artificial Sequence
  GFR-binding peptide
  MOD_RES (2)..(3)..(36): Xaa is C or S
  MOD_RES (17)..(18)..(19)..(20)..(21): Xaa is A or G
  MOD_RES (22)..(23)..(24)..(25): Xaa is A or G or is absent
PXXVPQDLSSLSILFFXXXXXXXXXLKVYPMVVKSXK

SEQ ID NO: 45629 - protein, 37 aa, Artificial Sequence
  GFR-binding peptide
  MOD_RES (6)..(7): Xaa is C or S
HVPKPXXAPTKLSSLSVLFFDDSSNVILKVYPNMVVR

SEQ ID NO: 45630 - protein, 35 aa, Artificial Sequence
  GFR-binding peptide
  MOD_RES (32)..(34): Xaa is C or S
APTKLSSLSVLFFDSSNNVILKVYPNMVVKAXGXH

SEQ ID NO: 45631 - protein, 40 aa, Artificial Sequence
  GFR-binding peptide
  MOD_RES (2)..(3)..(37)..(39): Xaa is C or S
  MOD_RES (17)..(18)..(19)..(20)..(21): Xaa is A or G
  MOD_RES (22)..(23)..(24)..(25): Xaa is A or G or is absent
PXXVPEKMSSLSILFFXXXXXXXXXLKVYPNMTVESXAXR

SEQ ID NO: 45632 - protein, 38 aa, Artificial Sequence
  GFR-binding peptide
  MOD_RES (35)..(37): Xaa is C or S
  MOD_RES (14)..(15)..(16)..(17)..(18): Xaa is A or G
  MOD_RES (19)..(20)..(21)..(22): Xaa is A or G or is absent
SRVHHSSLSVLFFXXXXXXXXXLKVYPRLEEHLEXAXA

SEQ ID NO: 45633 - protein, 36 aa, Artificial Sequence
  GFR-binding peptide
  MOD_RES (1)..(2)..(36): Xaa is C or S
  MOD_RES (16)..(17)..(18)..(19)..(20): Xaa is A or G
  MOD_RES (21)..(22)..(23)..(24): Xaa is A or G or is absent
XXAPTQLSSLSVLFFXXXXXXXXXLKVYPNMVVRAX

SEQ ID NO: 45634 - protein, 42 aa, Artificial Sequence
  GFR-binding peptide
  MOD_RES (6)..(7)..(41): Xaa is C or S
  MOD_RES (21)..(22)..(23)..(24)..(25): Xaa is A or G
  MOD_RES (26)..(27)..(28)..(29): Xaa is A or G or is absent
KASKAXXVPTKLSSLSILFFXXXXXXXXXLKVYPGMAVSEXG

SEQ ID NO: 45635 - protein, 33 aa, Artificial Sequence
  GFR-binding peptide
VPTEESSLSMLFFRIKPHQGQHLKVYPFLQHNK

SEQ ID NO: 45636 - protein, 36 aa, Artificial Sequence
  GFR-binding peptide
  MOD_RES (2)..(3): Xaa is C or S
  MOD_RES (17)..(18)..(19)..(20)..(21): Xaa is A or G
  MOD_RES (22)..(23)..(24)..(25): Xaa is A or G or is absent
PXXAPTKLSSLSVLFFXXXXXXXXXLKVYPNMVVRS

SEQ ID NO: 45637 - protein, 35 aa, Artificial Sequence
  GFR-binding peptide
  MOD_RES (2)..(3)..(35): Xaa is C or S
PXXAPTKLSSLSVLFFDDSSNVILKVYPNMVVRSX

SEQ ID NO: 45638 - protein, 38 aa, Artificial Sequence
  GFR-binding peptide
  MOD_RES (4)..(4): Xaa is C or S
  MOD_RES (20)..(21)..(22)..(23)..(24): Xaa is A or G
  MOD_RES (25)..(26)..(27)..(28): Xaa is A or G or is absent
SVKXQPSRVHHSSLSVLFFXXXXXXXXXLKVYPRLEEH

SEQ ID NO: 45639 - protein, 42 aa, Artificial Sequence
  GFR-binding peptide
  MOD_RES (6)..(7)..(39)..(41): Xaa is C or S
TVPKPXXAPTQLSSLSVLFFDDSSNVILKVYPNMVVRAXGXH

SEQ ID NO: 45640 - protein, 42 aa, Artificial Sequence
  GFR-binding peptide
  MOD_RES (5)..(6)..(40)..(42): Xaa is C or S
  MOD_RES (20)..(21)..(22)..(23)..(24): Xaa is A or G
  MOD_RES (25)..(26)..(27)..(28): Xaa is A or G or is absent
ASKAXXVPTKLSSLSILFFXXXXXXXXXLKVYPGMAVSEXGX

SEQ ID NO: 45641 - protein, 39 aa, Artificial Sequence
  GFR-binding peptide
  MOD_RES (7)..(7): Xaa is C or S
  MOD_RES (21)..(22)..(23)..(24)..(25): Xaa is A or G
  MOD_RES (26)..(27)..(28)..(29): Xaa is A or G or is absent
NDEGLEXVPTEESSLSMLFFXXXXXXXXXLKVYPFLQHN

SEQ ID NO: 45642 - protein, 39 aa, Artificial Sequence
  GFR-binding peptide
  MOD_RES (6)..(7)..(38): Xaa is C or S
ASASPXXVPQDLSSLSILFFVGRTPKVLKVYPMVVKSXK

SEQ ID NO: 45643 - protein, 41 aa, Artificial Sequence
  GFR-binding peptide
  MOD_RES (6)..(7)..(41): Xaa is C or S
  MOD_RES (21)..(22)..(23)..(24)..(25): Xaa is A or G
  MOD_RES (26)..(27)..(28)..(29): Xaa is A or G or is absent
AAPASXXVPARLSSLSILFFXXXXXXXXXLKVYPDMVVEAX

SEQ ID NO: 45644 - protein, 36 aa, Artificial Sequence
  GFR-binding peptide
  MOD_RES (3)..(4)..(35): Xaa is C or S
SPXXVPQDLSSLSILFFVGRTPKVLKVYPMVVKSXK

SEQ ID NO: 45645 - protein, 42 aa, Artificial Sequence
  GFR-binding peptide
  MOD_RES (4)..(5)..(39)..(41): Xaa is C or S
  MOD_RES (19)..(20)..(21)..(22)..(23): Xaa is A or G
  MOD_RES (24)..(25)..(26)..(27): Xaa is A or G or is absent
SKAXXVPTKLSSLSILFFXXXXXXXXXLKVYPGMAVSEXGXR

SEQ ID NO: 45646 - protein, 34 aa, Artificial Sequence
  GFR-binding peptide
  MOD_RES (32)..(34): Xaa is C or S
APTQLSSLSVLFFDDSSNVILKVYPNMVVRAXGX

SEQ ID NO: 45647 - protein, 34 aa, Artificial Sequence
  GFR-binding peptide
  MOD_RES (1)..(2): Xaa is C or S
  MOD_RES (16)..(17)..(18)..(19)..(20): Xaa is A or G
  MOD_RES (21)..(22)..(23)..(24): Xaa is A or G or is absent
XXAPVKTSSLSMLFFXXXXXXXXXLKVYPMIVEE

SEQ ID NO: 45648 - protein, 39 aa, Artificial Sequence
  GFR-binding peptide
  MOD_RES (3)..(37)..(39): Xaa is C or S
LEXVPTEESSLSMLFFRIKPHQGQHLKVYPFLQHNKXEX

SEQ ID NO: 45649 - protein, 36 aa, Artificial Sequence
  GFR-binding peptide
  MOD_RES (2)..(2): Xaa is C or S
KXQPSRVHHSSLSVLFFEYVRKKPKLLKVYPRLEEH

SEQ ID NO: 45650 - protein, 36 aa, Artificial Sequence
  GFR-binding peptide
  MOD_RES (2)..(3)..(34)..(36): Xaa is C or S
PXXVPQDLSSLSILFFVGRTPKVLKVYPMVVKSXKX

SEQ ID NO: 45651 - protein, 38 aa, Artificial Sequence
  GFR-binding peptide
  MOD_RES (1)..(35)..(37): Xaa is C or S
  MOD_RES (15)..(16)..(17)..(18)..(19): Xaa is A or G
  MOD_RES (20)..(21)..(22)..(23): Xaa is A or G or is absent
XAPTKLSSLSVLFFXXXXXXXXXLKVYPNMVVKAXGXH

SEQ ID NO: 45652 - protein, 39 aa, Artificial Sequence
  GFR-binding peptide
  MOD_RES (6)..(7): Xaa is C or S
  MOD_RES (21)..(22)..(23)..(24)..(25): Xaa is A or G
  MOD_RES (26)..(27)..(28)..(29): Xaa is A or G or is absent
AAPASXXVPARLSSLSILFFXXXXXXXXXLKVYPDMVVE

SEQ ID NO: 45653 - protein, 39 aa, Artificial Sequence
  GFR-binding peptide
  MOD_RES (4)..(5)..(38): Xaa is C or S
  MOD_RES (19)..(20)..(21)..(22)..(23): Xaa is A or G
  MOD_RES (24)..(25)..(26)..(27): Xaa is A or G or is absent
PSTXXAPVKTSSLSMLFFXXXXXXXXXLKVYPMIVEEXG

SEQ ID NO: 45654 - protein, 40 aa, Artificial Sequence
  GFR-binding peptide
  MOD_RES (4)..(5)..(37)..(39): Xaa is C or S
PASXXVPARLSSLSILFFDAANNVVLKVYPDMVVEAXGXR

SEQ ID NO: 45655 - protein, 40 aa, Artificial Sequence
  GFR-binding peptide
  MOD_RES (6)..(7)..(39): Xaa is C or S
KASKAXXVPTKLSSLSILFFDKGVVTYLKVYPGMAVSEXG

SEQ ID NO: 45656 - protein, 32 aa, Artificial Sequence
  GFR-binding peptide
  MOD_RES (14)..(15)..(16)..(17)..(18): Xaa is A or G
  MOD_RES (19)..(20)..(21)..(22): Xaa is A or G or is absent
VPQALSSLSILFFXXXXXXXXXLKVYPMIVRS

SEQ ID NO: 45657 - protein, 42 aa, Artificial Sequence
  GFR-binding peptide
  MOD_RES (6)..(7)..(41): Xaa is C or S
  MOD_RES (21)..(22)..(23)..(24)..(25): Xaa is A or G
  MOD_RES (26)..(27)..(28)..(29): Xaa is A or G or is absent
YVPKPXXAPTKLSSLSVLFFXXXXXXXXXLKVYPNMVVRSXG

SEQ ID NO: 45658 - protein, 36 aa, Artificial Sequence
  GFR-binding peptide
  MOD_RES (3)..(4): Xaa is C or S
KAXXVPTKLSSLSVLFFDDMGVPTLKVYPEGMSVAE

SEQ ID NO: 45659 - protein, 36 aa, Artificial Sequence
  GFR-binding peptide
  MOD_RES (1)..(33)..(35): Xaa is C or S
XVPARLSSLSILFFDAANNVVLKVYPDMVVEAXGXR

SEQ ID NO: 45660 - protein, 37 aa, Artificial Sequence
  GFR-binding peptide
  MOD_RES (1)..(2)..(35)..(37): Xaa is C or S
  MOD_RES (16)..(17)..(18)..(19)..(20): Xaa is A or G
  MOD_RES (21)..(22)..(23)..(24): Xaa is A or G or is absent
XXAPVKTSSLSMLFFXXXXXXXXXLKVYPMIVEEXGX

SEQ ID NO: 45661 - protein, 34 aa, Artificial Sequence
  GFR-binding peptide
  MOD_RES (1)..(2)..(34): Xaa is C or S
XXAPTKLSSLSVLFFDSSNNVILKVYPNMVVKAX

SEQ ID NO: 45662 - protein, 36 aa, Artificial Sequence
  GFR-binding peptide
  MOD_RES (1)..(36): Xaa is C or S
  MOD_RES (15)..(16)..(17)..(18)..(19): Xaa is A or G
  MOD_RES (20)..(21)..(22)..(23): Xaa is A or G or is absent
XVPTKLSSLSVLFFXXXXXXXXXLKVYPEGMSVAEX

SEQ ID NO: 45663 - protein, 41 aa, Artificial Sequence
  GFR-binding peptide
  MOD_RES (3)..(4)..(38)..(40): Xaa is C or S
  MOD_RES (18)..(19)..(20)..(21)..(22): Xaa is A or G
  MOD_RES (23)..(24)..(25)..(26): Xaa is A or G or is absent
EPXXVPEKMSSLSILFFXXXXXXXXXLKVYPNMTVESXAXR

SEQ ID NO: 45664 - protein, 35 aa, Artificial Sequence
  GFR-binding peptide
  MOD_RES (3)..(3): Xaa is C or S
  MOD_RES (17)..(18)..(19)..(20)..(21): Xaa is A or G
  MOD_RES (22)..(23)..(24)..(25): Xaa is A or G or is absent
PTXAPTKLSSLSVLFFXXXXXXXXXLKVYPNMVVR

SEQ ID NO: 45665 - protein, 37 aa, Artificial Sequence
  GFR-binding peptide
  MOD_RES (2)..(36): Xaa is C or S
EXVPTEESSLSMLFFRIKPHQGQHLKVYPFLQHNKXE

SEQ ID NO: 45666 - protein, 41 aa, Artificial Sequence
  GFR-binding peptide
  MOD_RES (5)..(6)..(40): Xaa is C or S
  MOD_RES (20)..(21)..(22)..(23)..(24): Xaa is A or G
  MOD_RES (25)..(26)..(27)..(28): Xaa is A or G or is absent
IPKAXXVPTELSSLSMLFFXXXXXXXXXLKVYPEMVVEGXG

SEQ ID NO: 45667 - protein, 40 aa, Artificial Sequence
  GFR-binding peptide
  MOD_RES (1)..(38)..(40): Xaa is C or S
  MOD_RES (17)..(18)..(19)..(20)..(21): Xaa is A or G
  MOD_RES (22)..(23)..(24)..(25): Xaa is A or G or is absent
XQPSRVHHSSLSVLFFXXXXXXXXXLKVYPRLEEHLEXAX

SEQ ID NO: 45668 - protein, 35 aa, Artificial Sequence
  GFR-binding peptide
  MOD_RES (1)..(34): Xaa is C or S
  MOD_RES (15)..(16)..(17)..(18)..(19): Xaa is A or G
  MOD_RES (20)..(21)..(22)..(23): Xaa is A or G or is absent
XVPQALSSLSILFFXXXXXXXXXLKVYPMIVRSXK

SEQ ID NO: 45669 - protein, 35 aa, Artificial Sequence
  GFR-binding peptide
  MOD_RES (34)..(34): Xaa is C or S
VPTEESSLSMLFFRIKPHQGQHLKVYPFLQHNKXE

SEQ ID NO: 45670 - protein, 34 aa, Artificial Sequence
  GFR-binding peptide
  MOD_RES (3)..(4): Xaa is C or S
ASXXVPARLSSLSILFFDAANNVVLKVYPDMVVE

SEQ ID NO: 45671 - protein, 37 aa, Artificial Sequence
  GFR-binding peptide
  MOD_RES (34)..(36): Xaa is C or S
  MOD_RES (14)..(15)..(16)..(17)..(18): Xaa is A or G
  MOD_RES (19)..(20)..(21)..(22): Xaa is A or G or is absent
TPTKMSSLSMLFFXXXXXXXXXLKVYPGMVVDRXGXS

SEQ ID NO: 45672 - protein, 40 aa, Artificial Sequence
  GFR-binding peptide
  MOD_RES (37)..(39): Xaa is C or S
QPSRVHHSSLSVLFFEYVRKKPKLLKVYPRLEEHLEXAXA

SEQ ID NO: 45673 - protein, 36 aa, Artificial Sequence
  GFR-binding peptide
  MOD_RES (3)..(4)..(35): Xaa is C or S
SPXXVSQDLSSLSILFFIGKTPKILKVYPMIVKSXK

SEQ ID NO: 45674 - protein, 42 aa, Artificial Sequence
  GFR-binding peptide
  MOD_RES (5)..(6)..(40)..(42): Xaa is C or S
  MOD_RES (20)..(21)..(22)..(23)..(24): Xaa is A or G
  MOD_RES (25)..(26)..(27)..(28): Xaa is A or G or is absent
VPKPXXAPTKLSSLSVLFFXXXXXXXXXLKVYPNMVVRSXGX

SEQ ID NO: 45675 - protein, 39 aa, Artificial Sequence
  GFR-binding peptide
  MOD_RES (1)..(2)..(36)..(38): Xaa is C or S
  MOD_RES (16)..(17)..(18)..(19)..(20): Xaa is A or G
  MOD_RES (21)..(22)..(23)..(24): Xaa is A or G or is absent
XXVPTELSSLSMLFFXXXXXXXXXLKVYPEMVVEGXGXR

SEQ ID NO: 45676 - protein, 40 aa, Artificial Sequence
  GFR-binding peptide
  MOD_RES (2)..(3)..(37)..(39): Xaa is C or S
  MOD_RES (17)..(18)..(19)..(20)..(21): Xaa is A or G
  MOD_RES (22)..(23)..(24)..(25): Xaa is A or G or is absent
SXXVPARLSSLSILFFXXXXXXXXXLKVYPDMVVEAXGXR

SEQ ID NO: 45677 - protein, 34 aa, Artificial Sequence
  GFR-binding peptide
  MOD_RES (1)..(32)..(34): Xaa is C or S
XVSQDLSSLSILFFIGKTPKILKVYPMIVKSXKX

SEQ ID NO: 45678 - protein, 39 aa, Artificial Sequence
  GFR-binding peptide
  MOD_RES (7)..(7): Xaa is C or S
  MOD_RES (21)..(22)..(23)..(24)..(25): Xaa is A or G
  MOD_RES (26)..(27)..(28)..(29): Xaa is A or G or is absent
HVTKPTXAPTKLSSLSVLFFXXXXXXXXXLKVYPNMVVR

SEQ ID NO: 45679 - protein, 45 aa, Artificial Sequence
  GFR-binding peptide
  MOD_RES (6)..(7)..(42)..(44): Xaa is C or S
  MOD_RES (21)..(22)..(23)..(24)..(25): Xaa is A or G
  MOD_RES (26)..(27)..(28)..(29): Xaa is A or G or is absent
KVGKAXXVPTKLSSLSVLFFXXXXXXXXXLKVYPEGMSVAEXGXR

SEQ ID NO: 45680 - protein, 37 aa, Artificial Sequence
  GFR-binding peptide
  MOD_RES (6)..(7): Xaa is C or S
ASASPXXVPQDLSSLSILFFVGRTPKVLKVYPMVVKS

SEQ ID NO: 45681 - protein, 35 aa, Artificial Sequence
  GFR-binding peptide
  MOD_RES (2)..(3)..(35): Xaa is C or S
AXXAPTKLSSLSVLFFDSSNNVILKVYPNMVVKAX

SEQ ID NO: 45682 - protein, 39 aa, Artificial Sequence
  GFR-binding peptide
  MOD_RES (5)..(6): Xaa is C or S
  MOD_RES (20)..(21)..(22)..(23)..(24): Xaa is A or G
  MOD_RES (25)..(26)..(27)..(28): Xaa is A or G or is absent
TPPTXXVPTRLSSLSILFFXXXXXXXXXLKVYPDMVVES

SEQ ID NO: 45683 - protein, 35 aa, Artificial Sequence
  GFR-binding peptide
  MOD_RES (32)..(34): Xaa is C or S
VPEKMSSLSILFFDENKNVVLKVYPNMTVESXAXR

SEQ ID NO: 45684 - protein, 37 aa, Artificial Sequence
  GFR-binding peptide
  MOD_RES (5)..(5): Xaa is C or S
  MOD_RES (19)..(20)..(21)..(22)..(23): Xaa is A or G
  MOD_RES (24)..(25)..(26)..(27): Xaa is A or G or is absent
EGLEXVPTEESSLSMLFFXXXXXXXXXLKVYPFLQHN

SEQ ID NO: 45685 - protein, 38 aa, Artificial Sequence
  GFR-binding peptide
  MOD_RES (2)..(3)..(35)..(37): Xaa is C or S
PXXTPTKMSSLSMLFFNDKQQIILKVYPGMVVDRXGXS

SEQ ID NO: 45686 - protein, 38 aa, Artificial Sequence
  GFR-binding peptide
  MOD_RES (2)..(3)..(36)..(38): Xaa is C or S
  MOD_RES (17)..(18)..(19)..(20)..(21): Xaa is A or G
  MOD_RES (22)..(23)..(24)..(25): Xaa is A or G or is absent
TXXAPVKTSSLSMLFFXXXXXXXXXLKVYPMIVEEXGX

SEQ ID NO: 45687 - protein, 32 aa, Artificial Sequence
  GFR-binding peptide
  MOD_RES (1)..(1): Xaa is C or S
XTPTKMSSLSMLFFNDKQQIILKVYPGMVVDR

SEQ ID NO: 45688 - protein, 39 aa, Artificial Sequence
  GFR-binding peptide
  MOD_RES (4)..(38): Xaa is C or S
  MOD_RES (18)..(19)..(20)..(21)..(22): Xaa is A or G
  MOD_RES (23)..(24)..(25)..(26): Xaa is A or G or is absent
GLEXVPTEESSLSMLFFXXXXXXXXXLKVYPFLQHNKXE

SEQ ID NO: 45689 - protein, 36 aa, Artificial Sequence
  GFR-binding peptide
  MOD_RES (2)..(3)..(36): Xaa is C or S
  MOD_RES (17)..(18)..(19)..(20)..(21): Xaa is A or G
  MOD_RES (22)..(23)..(24)..(25): Xaa is A or G or is absent
TXXAPVKTSSLSMLFFXXXXXXXXXLKVYPMIVEEX

SEQ ID NO: 45690 - protein, 30 aa, Artificial Sequence; identical to SEQ ID NO: 665
  GFR-binding peptide

SEQ ID NO: 45691 - protein, 33 aa, Artificial Sequence
  GFR-binding peptide
  MOD_RES (2)..(3): Xaa is C or S
PXXVSQDLSSLSILFFIGKTPKILKVYPMIVKS

SEQ ID NO: 45692 - protein, 37 aa, Artificial Sequence
  GFR-binding peptide
  MOD_RES (6)..(7): Xaa is C or S
GIPEPXXVPEKMSSLSILFFDENKNVVLKVYPNMTVE

SEQ ID NO: 45693 - protein, 42 aa, Artificial Sequence
  GFR-binding peptide
  MOD_RES (4)..(5)..(40)..(42): Xaa is C or S
  MOD_RES (19)..(20)..(21)..(22)..(23): Xaa is A or G
  MOD_RES (24)..(25)..(26)..(27): Xaa is A or G or is absent
GKAXXVPTKLSSLSVLFFXXXXXXXXXLKVYPEGMSVAEXGX

SEQ ID NO: 45694 - protein, 36 aa, Artificial Sequence
  GFR-binding peptide
  MOD_RES (3)..(4): Xaa is C or S
  MOD_RES (18)..(19)..(20)..(21)..(22): Xaa is A or G
  MOD_RES (23)..(24)..(25)..(26): Xaa is A or G or is absent
EPXXVPEKMSSLSILFFXXXXXXXXXLKVYPNMTVE

SEQ ID NO: 45695 - protein, 40 aa, Artificial Sequence
  GFR-binding peptide
  MOD_RES (3)..(4)..(37)..(39): Xaa is C or S
KAXXVPTKLSSLSVLFFDDMGVPTLKVYPEGMSVAEXGXR

SEQ ID NO: 45696 - protein, 36 aa, Artificial Sequence
  GFR-binding peptide
  MOD_RES (2)..(34)..(36): Xaa is C or S
TXAPTKLSSLSVLFFDDSSNVILKVYPNMVVRSXGX

SEQ ID NO: 45697 - protein, 42 aa, Artificial Sequence
  GFR-binding peptide
  MOD_RES (6)..(7)..(39)..(41): Xaa is C or S
GIPEPXXVPEKMSSLSILFFDENKNVVLKVYPNMTVESXAXR

SEQ ID NO: 45698 - protein, 37 aa, Artificial Sequence
  GFR-binding peptide
  MOD_RES (3)..(4): Xaa is C or S
  MOD_RES (18)..(19)..(20)..(21)..(22): Xaa is A or G
  MOD_RES (23)..(24)..(25)..(26): Xaa is A or G or is absent
KAXXVPTELSSLSMLFFXXXXXXXXXLKVYPEMVVEG

SEQ ID NO: 45699 - protein, 37 aa, Artificial Sequence
  GFR-binding peptide
  MOD_RES (6)..(7): Xaa is C or S
AAPASXXVPARLSSLSILFFDAANNVVLKVYPDMVVE

SEQ ID NO: 45700 - protein, 35 aa, Artificial Sequence
  GFR-binding peptide
  MOD_RES (1)..(2): Xaa is C or S
  MOD_RES (16)..(17)..(18)..(19)..(20): Xaa is A or G
  MOD_RES (21)..(22)..(23)..(24): Xaa is A or G or is absent
XXVPTRLSSLSILFFXXXXXXXXXLKVYPDMVVES

SEQ ID NO: 45701 - protein, 36 aa, Artificial Sequence
  GFR-binding peptide
  MOD_RES (3)..(4): Xaa is C or S
  MOD_RES (18)..(19)..(20)..(21)..(22): Xaa is A or G
  MOD_RES (23)..(24)..(25)..(26): Xaa is A or G or is absent
KAXXAPTKLSSLSVLFFXXXXXXXXXLKVYPNMVVK

SEQ ID NO: 45702 - protein, 37 aa, Artificial Sequence
  GFR-binding peptide
  MOD_RES (34)..(36): Xaa is C or S
  MOD_RES (14)..(15)..(16)..(17)..(18): Xaa is A or G
  MOD_RES (19)..(20)..(21)..(22): Xaa is A or G or is absent
VPTKLSSLSILFFXXXXXXXXXLKVYPGMAVSEXGXR

SEQ ID NO: 45703 - protein, 38 aa, Artificial Sequence
  GFR-binding peptide
  MOD_RES (6)..(7)..(38): Xaa is C or S
ASASPXXVPQDLSSLSILFFVGRTPKVLKVYPMVVKSX

SEQ ID NO: 45704 - protein, 41 aa, Artificial Sequence
  GFR-binding peptide
  MOD_RES (5)..(39)..(41): Xaa is C or S
EGLEXVPTEESSLSMLFFRIKPHQGQHLKVYPFLQHNKXEX

SEQ ID NO: 45705 - protein, 37 aa, Artificial Sequence
  GFR-binding peptide
  MOD_RES (1)..(35)..(37): Xaa is C or S
  MOD_RES (15)..(16)..(17)..(18)..(19): Xaa is A or G
  MOD_RES (20)..(21)..(22)..(23): Xaa is A or G or is absent
XVPTKLSSLSILFFXXXXXXXXXLKVYPGMAVSEXGX

SEQ ID NO: 45706 - protein, 39 aa, Artificial Sequence
  GFR-binding peptide
  MOD_RES (3)..(37)..(39): Xaa is C or S
  MOD_RES (17)..(18)..(19)..(20)..(21): Xaa is A or G
  MOD_RES (22)..(23)..(24)..(25): Xaa is A or G or is absent
PTXAPTKLSSLSVLFFXXXXXXXXXLKVYPNMVVRSXGX

SEQ ID NO: 45707 - protein, 37 aa, Artificial Sequence
  GFR-binding peptide
  MOD_RES (3)..(4): Xaa is C or S
  MOD_RES (18)..(19)..(20)..(21)..(22): Xaa is A or G
  MOD_RES (23)..(24)..(25)..(26): Xaa is A or G or is absent
GPXXTPTKMSSLSMLFFXXXXXXXXXLKVYPGMVVDR

SEQ ID NO: 45708 - protein, 41 aa, Artificial Sequence
  GFR-binding peptide
  MOD_RES (6)..(38)..(40): Xaa is C or S
VTKPTXAPTKLSSLSVLFFDDSSNVILKVYPNMVVRSXGXH

SEQ ID NO: 45709 - protein, 39 aa, Artificial Sequence
  GFR-binding peptide
  MOD_RES (5)..(6)..(38): Xaa is C or S
VPKPXXAPTKLSSLSVLFFDDSSNVILKVYPNMVVRSXG

SEQ ID NO: 45710 - protein, 33 aa, Artificial Sequence
  GFR-binding peptide
  MOD_RES (1)..(33): Xaa is C or S
XVPARLSSLSILFFDAANNVVLKVYPDMVVEAX

SEQ ID NO: 45711 - protein, 37 aa, Artificial Sequence
  GFR-binding peptide
  MOD_RES (34)..(36): Xaa is C or S
  MOD_RES (14)..(15)..(16)..(17)..(18): Xaa is A or G
  MOD_RES (19)..(20)..(21)..(22): Xaa is A or G or is absent
APTKLSSLSVLFFXXXXXXXXXLKVYPNMVVKAXGXH

SEQ ID NO: 45712 - protein, 40 aa, Artificial Sequence
  GFR-binding peptide
  MOD_RES (5)..(6)..(37)..(39): Xaa is C or S
SASPXXVSQDLSSLSILFFIGKTPKILKVYPMIVKSXKXS

SEQ ID NO: 45713 - protein, 36 aa, Artificial Sequence
  GFR-binding peptide
  MOD_RES (2)..(3)..(36): Xaa is C or S
AXXVPTKLSSLSVLFFDDMGVPTLKVYPEGMSVAEX

SEQ ID NO: 45714 - protein, 38 aa, Artificial Sequence
  GFR-binding peptide
  MOD_RES (5)..(5): Xaa is C or S
EGLEXVPTEESSLSMLFFRIKPHQGQHLKVYPFLQHNK

SEQ ID NO: 45715 - protein, 40 aa, Artificial Sequence
  GFR-binding peptide
  MOD_RES (6)..(7): Xaa is C or S
  MOD_RES (21)..(22)..(23)..(24)..(25): Xaa is A or G
  MOD_RES (26)..(27)..(28)..(29): Xaa is A or G or is absent
TVPKPXXAPTQLSSLSVLFFXXXXXXXXXLKVYPNMVVRA

SEQ ID NO: 45716 - protein, 37 aa, Artificial Sequence
  GFR-binding peptide
  MOD_RES (1)..(35)..(37): Xaa is C or S
  MOD_RES (15)..(16)..(17)..(18)..(19): Xaa is A or G
  MOD_RES (20)..(21)..(22)..(23): Xaa is A or G or is absent
XVPTELSSLSMLFFXXXXXXXXXLKVYPEMVVEGXGX

SEQ ID NO: 45717 - protein, 35 aa, Artificial Sequence
  GFR-binding peptide
  MOD_RES (4)..(5): Xaa is C or S
PKPXXAPTQLSSLSVLFFDDSSNVILKVYPNMVVR

SEQ ID NO: 45718 - protein, 32 aa, Artificial Sequence
  GFR-binding peptide
  MOD_RES (1)..(2): Xaa is C or S
XXVPARLSSLSILFFDAANNVVLKVYPDMVVE

SEQ ID NO: 45719 - protein, 40 aa, Artificial Sequence
  GFR-binding peptide
  MOD_RES (4)..(38)..(40): Xaa is C or S
GLEXVPTEESSLSMLFFRIKPHQGQHLKVYPFLQHNKXEX

SEQ ID NO: 45720 - protein, 41 aa, Artificial Sequence
  GFR-binding peptide
  MOD_RES (4)..(5)..(38)..(40): Xaa is C or S
  MOD_RES (19)..(20)..(21)..(22)..(23): Xaa is A or G
  MOD_RES (24)..(25)..(26)..(27): Xaa is A or G or is absent
PSTXXAPVKTSSLSMLFFXXXXXXXXXLKVYPMIVEEXGXL

SEQ ID NO: 45721 - protein, 35 aa, Artificial Sequence
  GFR-binding peptide
  MOD_RES (33)..(35): Xaa is C or S
VPTKLSSLSVLFFDDMGVPTLKVYPEGMSVAEXGX

SEQ ID NO: 45722 - protein, 39 aa, Artificial Sequence
  GFR-binding peptide
  MOD_RES (5)..(6)..(38): Xaa is C or S
TPPTXXVPTRLSSLSILFFDSANNVVLKVYPDMVVESXG

SEQ ID NO: 45723 - protein, 32 aa, Artificial Sequence
  GFR-binding peptide
  MOD_RES (14)..(15)..(16)..(17)..(18): Xaa is A or G
  MOD_RES (19)..(20)..(21)..(22): Xaa is A or G or is absent
VPTEESSLSMLFFXXXXXXXXXLKVYPFLQHN

SEQ ID NO: 45724 - protein, 35 aa, Artificial Sequence
  GFR-binding peptide
  MOD_RES (33)..(35): Xaa is C or S
  MOD_RES (14)..(15)..(16)..(17)..(18): Xaa is A or G
  MOD_RES (19)..(20)..(21)..(22): Xaa is A or G or is absent
APVKTSSLSMLFFXXXXXXXXXLKVYPMIVEEXGX

SEQ ID NO: 45725 - protein, 39 aa, Artificial Sequence
  GFR-binding peptide
  MOD_RES (2)..(3)..(37)..(39): Xaa is C or S
  MOD_RES (17)..(18)..(19)..(20)..(21): Xaa is A or G
  MOD_RES (22)..(23)..(24)..(25): Xaa is A or G or is absent
AXXVPTKLSSLSILFFXXXXXXXXXLKVYPGMAVSEXGX

SEQ ID NO: 45726 - protein, 37 aa, Artificial Sequence
  GFR-binding peptide
  MOD_RES (4)..(5): Xaa is C or S
  MOD_RES (19)..(20)..(21)..(22)..(23): Xaa is A or G
  MOD_RES (24)..(25)..(26)..(27): Xaa is A or G or is absent
PKPXXAPTKLSSLSVLFFXXXXXXXXXLKVYPNMVVR

SEQ ID NO: 45727 - protein, 40 aa, Artificial Sequence
  GFR-binding peptide
  MOD_RES (2)..(39): Xaa is C or S
KXQPSRVHHSSLSVLFFEYVRKKPKLLKVYPRLEEHLEXA

SEQ ID NO: 45728 - protein, 35 aa, Artificial Sequence
  GFR-binding peptide
  MOD_RES (1)..(35): Xaa is C or S
XVPTEESSLSMLFFRIKPHQGQHLKVYPFLQHNKX

SEQ ID NO: 45729 - protein, 37 aa, Artificial Sequence
  GFR-binding peptide
  MOD_RES (4)..(5): Xaa is C or S
  MOD_RES (19)..(20)..(21)..(22)..(23): Xaa is A or G
  MOD_RES (24)..(25)..(26)..(27): Xaa is A or G or is absent
PSTXXAPVKTSSLSMLFFXXXXXXXXXLKVYPMIVEE

SEQ ID NO: 45730 - protein, 37 aa, Artificial Sequence
  GFR-binding peptide
  MOD_RES (1)..(2)..(34)..(36): Xaa is C or S
XXVPEKMSSLSILFFDENKNVVLKVYPNMTVESXAXR

SEQ ID NO: 45731 - protein, 37 aa, Artificial Sequence
  GFR-binding peptide
  MOD_RES (1)..(2)..(34)..(36): Xaa is C or S
XXAPTKLSSLSVLFFDDSSNVILKVYPNMVVRSXGXH

SEQ ID NO: 45732 - protein, 39 aa, Artificial Sequence
  GFR-binding peptide
  MOD_RES (3)..(4)..(38): Xaa is C or S
  MOD_RES (18)..(19)..(20)..(21)..(22): Xaa is A or G
  MOD_RES (23)..(24)..(25)..(26): Xaa is A or G or is absent
KPXXAPTKLSSLSVLFFXXXXXXXXXLKVYPNMVVRSXG

SEQ ID NO: 45733 - protein, 36 aa, Artificial Sequence
  GFR-binding peptide
  MOD_RES (1)..(35): Xaa is C or S
  MOD_RES (15)..(16)..(17)..(18)..(19): Xaa is A or G
  MOD_RES (20)..(21)..(22)..(23): Xaa is A or G or is absent
XAPTQLSSLSVLFFXXXXXXXXXLKVYPNMVVRAXG

SEQ ID NO: 45734 - protein, 44 aa, Artificial Sequence
  GFR-binding peptide
  MOD_RES (5)..(6)..(41)..(43): Xaa is C or S
  MOD_RES (20)..(21)..(22)..(23)..(24): Xaa is A or G
  MOD_RES (25)..(26)..(27)..(28): Xaa is A or G or is absent
VGKAXXVPTKLSSLSVLFFXXXXXXXXXLKVYPEGMSVAEXGXR

SEQ ID NO: 45735 - protein, 41 aa, Artificial Sequence
  GFR-binding peptide
  MOD_RES (6)..(7)..(39)..(41): Xaa is C or S
AVPKAXXAPTKLSSLSVLFFDSSNNVILKVYPNMVVKAXGX

SEQ ID NO: 45736 - protein, 41 aa, Artificial Sequence
  GFR-binding peptide
  MOD_RES (5)..(6)..(40): Xaa is C or S
  MOD_RES (20)..(21)..(22)..(23)..(24): Xaa is A or G
  MOD_RES (25)..(26)..(27)..(28): Xaa is A or G or is absent
ASKAXXVPTKLSSLSILFFXXXXXXXXXLKVYPGMAVSEXG

SEQ ID NO: 45737 - protein, 41 aa, Artificial Sequence
  GFR-binding peptide
  MOD_RES (4)..(5)..(39)..(41): Xaa is C or S
  MOD_RES (19)..(20)..(21)..(22)..(23): Xaa is A or G
  MOD_RES (24)..(25)..(26)..(27): Xaa is A or G or is absent
AGPXXTPTKMSSLSMLFFXXXXXXXXXLKVYPGMVVDRXGX

SEQ ID NO: 45738 - protein, 36 aa, Artificial Sequence
  GFR-binding peptide
  MOD_RES (3)..(4): Xaa is C or S
  MOD_RES (18)..(19)..(20)..(21)..(22): Xaa is A or G
  MOD_RES (23)..(24)..(25)..(26): Xaa is A or G or is absent
APXXVPQALSSLSILFFXXXXXXXXXLKVYPMIVRS

SEQ ID NO: 45739 - protein, 38 aa, Artificial Sequence
  GFR-binding peptide
  MOD_RES (6)..(7): Xaa is C or S
AAPASXXVPARLSSLSILFFDAANNVVLKVYPDMVVEA

SEQ ID NO: 45740 - protein, 31 aa, Artificial Sequence
  GFR-binding peptide
  MOD_RES (1)..(1): Xaa is C or S
XAPVKTSSLSMLFFDNGRVLLLKVYPMIVEE

SEQ ID NO: 45741 - protein, 34 aa, Artificial Sequence
  GFR-binding peptide
  MOD_RES (1)..(2)..(34): Xaa is C or S
XXTPTKMSSLSMLFFNDKQQIILKVYPGMVVDRX

SEQ ID NO: 45742 - protein, 33 aa, Artificial Sequence
  GFR-binding peptide
  MOD_RES (14)..(15)..(16)..(17)..(18): Xaa is A or G
  MOD_RES (19)..(20)..(21)..(22): Xaa is A or G or is absent
TPTKMSSLSMLFFXXXXXXXXXLKVYPGMVVDR

SEQ ID NO: 45743 - protein, 40 aa, Artificial Sequence
  GFR-binding peptide
  MOD_RES (3)..(4)..(38)..(40): Xaa is C or S
  MOD_RES (18)..(19)..(20)..(21)..(22): Xaa is A or G
  MOD_RES (23)..(24)..(25)..(26): Xaa is A or G or is absent
ASXXVPARLSSLSILFFXXXXXXXXXLKVYPDMVVEAXGX

SEQ ID NO: 45744 - protein, 36 aa, Artificial Sequence
  GFR-binding peptide
  MOD_RES (34)..(36): Xaa is C or S
  MOD_RES (14)..(15)..(16)..(17)..(18): Xaa is A or G
  MOD_RES (19)..(20)..(21)..(22): Xaa is A or G or is absent
VPEKMSSLSILFFXXXXXXXXXLKVYPNMTVESXAX

SEQ ID NO: 45745 - protein, 34 aa, Artificial Sequence
  GFR-binding peptide
  MOD_RES (3)..(3): Xaa is C or S
PTXAPTKLSSLSVLFFDDSSNVILKVYPNMVVRS

SEQ ID NO: 45746 - protein, 31 aa, Artificial Sequence
  GFR-binding peptide
VPTKLSSLSILFFDKGVVTYLKVYPGMAVSE

SEQ ID NO: 45747 - protein, 37 aa, Artificial Sequence
  GFR-binding peptide
  MOD_RES (1)..(2)..(35)..(37): Xaa is C or S
  MOD_RES (16)..(17)..(18)..(19)..(20): Xaa is A or G
  MOD_RES (21)..(22)..(23)..(24): Xaa is A or G or is absent
XXVPQALSSLSILFFXXXXXXXXXLKVYPMIVRSXKX

SEQ ID NO: 45748 - protein, 34 aa, Artificial Sequence
  GFR-binding peptide
  MOD_RES (1)..(33): Xaa is C or S
XAPTQLSSLSVLFFDDSSNVILKVYPNMVVRAXG

SEQ ID NO: 45749 - protein, 32 aa, Artificial Sequence
  GFR-binding peptide
  MOD_RES (1)..(2): Xaa is C or S
XXAPTKLSSLSVLFFDDSSNVILKVYPNMVVR

SEQ ID NO: 45750 - protein, 41 aa, Artificial Sequence
  GFR-binding peptide
  MOD_RES (4)..(5)..(39)..(41): Xaa is C or S
  MOD_RES (19)..(20)..(21)..(22)..(23): Xaa is A or G
  MOD_RES (24)..(25)..(26)..(27): Xaa is A or G or is absent
SKAXXVPTKLSSLSILFFXXXXXXXXXLKVYPGMAVSEXGX

SEQ ID NO: 45751 - protein, 37 aa, Artificial Sequence
  GFR-binding peptide
  MOD_RES (2)..(3)..(37): Xaa is C or S
  MOD_RES (17)..(18)..(19)..(20)..(21): Xaa is A or G
  MOD_RES (22)..(23)..(24)..(25): Xaa is A or G or is absent
TXXVPTRLSSLSILFFXXXXXXXXXLKVYPDMVVESX

SEQ ID NO: 45752 - protein, 41 aa, Artificial Sequence
  GFR-binding peptide
  MOD_RES (5)..(6)..(38)..(40): Xaa is C or S
SAGPXXTPTKMSSLSMLFFNDKQQIILKVYPGMVVDRXGXS

SEQ ID NO: 45753 - protein, 34 aa, Artificial Sequence
  GFR-binding peptide
  MOD_RES (1)..(32)..(34): Xaa is C or S
XAPVKTSSLSMLFFDNGRVLLLKVYPMIVEEXGX

SEQ ID NO: 45754 - protein, 34 aa, Artificial Sequence
  GFR-binding peptide
  MOD_RES (2)..(3)..(34): Xaa is C or S
PXXVSQDLSSLSILFFIGKTPKILKVYPMIVKSX

SEQ ID NO: 45755 - protein, 35 aa, Artificial Sequence
  GFR-binding peptide
  MOD_RES (3)..(3): Xaa is C or S
  MOD_RES (17)..(18)..(19)..(20)..(21): Xaa is A or G
  MOD_RES (22)..(23)..(24)..(25): Xaa is A or G or is absent
LEXVPTEESSLSMLFFXXXXXXXXXLKVYPFLQHN

SEQ ID NO: 45756 - protein, 34 aa, Artificial Sequence
  GFR-binding peptide
  MOD_RES (1)..(33): Xaa is C or S
XAPTKLSSLSVLFFDSSNNVILKVYPNMVVKAXG

SEQ ID NO: 45757 - protein, 38 aa, Artificial Sequence
  GFR-binding peptide
  MOD_RES (3)..(4)..(35)..(37): Xaa is C or S
SPXXVSQDLSSLSILFFIGKTPKILKVYPMIVKSXKXS

SEQ ID NO: 45758 - protein, 33 aa, Artificial Sequence
  GFR-binding peptide
  MOD_RES (1)..(1): Xaa is C or S
  MOD_RES (15)..(16)..(17)..(18)..(19): Xaa is A or G
  MOD_RES (20)..(21)..(22)..(23): Xaa is A or G or is absent
XVPTEESSLSMLFFXXXXXXXXXLKVYPFLQHN

SEQ ID NO: 45759 - protein, 40 aa, Artificial Sequence
  GFR-binding peptide
  MOD_RES (5)..(6)..(39): Xaa is C or S
  MOD_RES (20)..(21)..(22)..(23)..(24): Xaa is A or G
  MOD_RES (25)..(26)..(27)..(28): Xaa is A or G or is absent
SAAPXXVPQALSSLSILFFXXXXXXXXXLKVYPMIVRSXK

SEQ ID NO: 45760 - protein, 38 aa, Artificial Sequence
  GFR-binding peptide
  MOD_RES (4)..(5): Xaa is C or S
  MOD_RES (19)..(20)..(21)..(22)..(23): Xaa is A or G
  MOD_RES (24)..(25)..(26)..(27): Xaa is A or G or is absent
PKAXXAPTKLSSLSVLFFXXXXXXXXXLKVYPNMVVKA

SEQ ID NO: 45761 - protein, 41 aa, Artificial Sequence
  GFR-binding peptide
  MOD_RES (4)..(5)..(38)..(40): Xaa is C or S
GKAXXVPTKLSSLSVLFFDDMGVPTLKVYPEGMSVAEXGXR

SEQ ID NO: 45762 - protein, 43 aa, Artificial Sequence
  GFR-binding peptide
  MOD_RES (6)..(40)..(42): Xaa is C or S
  MOD_RES (20)..(21)..(22)..(23)..(24): Xaa is A or G
  MOD_RES (25)..(26)..(27)..(28): Xaa is A or G or is absent
DEGLEXVPTEESSLSMLFFXXXXXXXXXLKVYPFLQHNKXEXR

SEQ ID NO: 45763 - protein, 36 aa, Artificial Sequence
  GFR-binding peptide
  MOD_RES (4)..(5): Xaa is C or S
PKAXXAPTKLSSLSVLFFDSSNNVILKVYPNMVVKA

SEQ ID NO: 45764 - protein, 33 aa, Artificial Sequence
  GFR-binding peptide
  MOD_RES (14)..(15)..(16)..(17)..(18): Xaa is A or G
  MOD_RES (19)..(20)..(21)..(22): Xaa is A or G or is absent
VPTRLSSLSILFFXXXXXXXXXLKVYPDMVVES

SEQ ID NO: 45765 - protein, 39 aa, Artificial Sequence
  GFR-binding peptide
  MOD_RES (1)..(36)..(38): Xaa is C or S
  MOD_RES (15)..(16)..(17)..(18)..(19): Xaa is A or G
  MOD_RES (20)..(21)..(22)..(23): Xaa is A or G or is absent
XVPTKLSSLSVLFFXXXXXXXXXLKVYPEGMSVAEXGXR

SEQ ID NO: 45766 - protein, 40 aa, Artificial Sequence
  GFR-binding peptide
  MOD_RES (4)..(5)..(39): Xaa is C or S
  MOD_RES (19)..(20)..(21)..(22)..(23): Xaa is A or G
  MOD_RES (24)..(25)..(26)..(27): Xaa is A or G or is absent
PEPXXVPEKMSSLSILFFXXXXXXXXXLKVYPNMTVESXA

SEQ ID NO: 45767 - protein, 38 aa, Artificial Sequence
  GFR-binding peptide
  MOD_RES (5)..(6): Xaa is C or S
  MOD_RES (20)..(21)..(22)..(23)..(24): Xaa is A or G
  MOD_RES (25)..(26)..(27)..(28): Xaa is A or G or is absent
ASKAXXVPTKLSSLSILFFXXXXXXXXXLKVYPGMAVS

SEQ ID NO: 45768 - protein, 36 aa, Artificial Sequence
  GFR-binding peptide
  MOD_RES (4)..(5): Xaa is C or S
PKPXXAPTQLSSLSVLFFDDSSNVILKVYPNMVVRA

SEQ ID NO: 45769 - protein, 42 aa, Artificial Sequence
  GFR-binding peptide
  MOD_RES (5)..(39)..(41): Xaa is C or S
EGLEXVPTEESSLSMLFFRIKPHQGQHLKVYPFLQHNKXEXR

SEQ ID NO: 45770 - protein, 37 aa, Artificial Sequence
  GFR-binding peptide
  MOD_RES (2)..(3)..(36): Xaa is C or S
AXXVPTKLSSLSVLFFDDMGVPTLKVYPEGMSVAEXG

SEQ ID NO: 45771 - protein, 37 aa, Artificial Sequence
  GFR-binding peptide
  MOD_RES (4)..(5)..(36): Xaa is C or S
AAPXXVPQALSSLSILFFVGRKPKVLKVYPMIVRSXK

SEQ ID NO: 45772 - protein, 35 aa, Artificial Sequence
  GFR-binding peptide
  MOD_RES (1)..(2): Xaa is C or S
  MOD_RES (16)..(17)..(18)..(19)..(20): Xaa is A or G
  MOD_RES (21)..(22)..(23)..(24): Xaa is A or G or is absent
XXVPARLSSLSILFFXXXXXXXXXLKVYPDMVVEA

SEQ ID NO: 45773 - protein, 38 aa, Artificial Sequence
  GFR-binding peptide
  MOD_RES (5)..(6)..(38): Xaa is C or S
SAGPXXTPTKMSSLSMLFFNDKQQIILKVYPGMVVDRX

SEQ ID NO: 45774 - protein, 36 aa, Artificial Sequence
  GFR-binding peptide
  MOD_RES (2)..(3): Xaa is C or S
  MOD_RES (17)..(18)..(19)..(20)..(21): Xaa is A or G
  MOD_RES (22)..(23)..(24)..(25): Xaa is A or G or is absent
PXXVPEKMSSLSILFFXXXXXXXXXLKVYPNMTVES

SEQ ID NO: 45775 - protein, 38 aa, Artificial Sequence
  GFR-binding peptide
  MOD_RES (5)..(6)..(38): Xaa is C or S
VPKPXXAPTKLSSLSVLFFDDSSNVILKVYPNMVVRSX

SEQ ID NO: 45776 - protein, 37 aa, Artificial Sequence
  GFR-binding peptide
  MOD_RES (3)..(4)..(37): Xaa is C or S
  MOD_RES (18)..(19)..(20)..(21)..(22): Xaa is A or G
  MOD_RES (23)..(24)..(25)..(26): Xaa is A or G or is absent
APXXVPQALSSLSILFFXXXXXXXXXLKVYPMIVRSX

SEQ ID NO: 45777 - protein, 38 aa, Artificial Sequence
  GFR-binding peptide
  MOD_RES (1)..(2)..(35)..(37): Xaa is C or S
XXVPTKLSSLSVLFFDDMGVPTLKVYPEGMSVAEXGXR

SEQ ID NO: 45778 - protein, 41 aa, Artificial Sequence
  GFR-binding peptide
  MOD_RES (5)..(6)..(40): Xaa is C or S
  MOD_RES (20)..(21)..(22)..(23)..(24): Xaa is A or G
  MOD_RES (25)..(26)..(27)..(28): Xaa is A or G or is absent
TPPTXXVPTRLSSLSILFFXXXXXXXXXLKVYPDMVVESXG

SEQ ID NO: 45779 - protein, 34 aa, Artificial Sequence
  GFR-binding peptide
  MOD_RES (1)..(2)..(33): Xaa is C or S
XXVPQALSSLSILFFVGRKPKVLKVYPMIVRSXK

SEQ ID NO: 45780 - protein, 39 aa, Artificial Sequence
  GFR-binding peptide
  MOD_RES (2)..(3)..(38): Xaa is C or S
  MOD_RES (17)..(18)..(19)..(20)..(21): Xaa is A or G
  MOD_RES (22)..(23)..(24)..(25): Xaa is A or G or is absent
AXXVPTKLSSLSVLFFXXXXXXXXXLKVYPEGMSVAEXG

SEQ ID NO: 45781 - protein, 43 aa, Artificial Sequence
  GFR-binding peptide
  MOD_RES (3)..(40)..(42): Xaa is C or S
  MOD_RES (19)..(20)..(21)..(22)..(23): Xaa is A or G
  MOD_RES (24)..(25)..(26)..(27): Xaa is A or G or is absent
VKXQPSRVHHSSLSVLFFXXXXXXXXXLKVYPRLEEHLEXAXA

SEQ ID NO: 45782 - protein, 36 aa, Artificial Sequence
  GFR-binding peptide
  MOD_RES (1)..(1): Xaa is C or S
  MOD_RES (17)..(18)..(19)..(20)..(21): Xaa is A or G
  MOD_RES (22)..(23)..(24)..(25): Xaa is A or G or is absent
XQPSRVHHSSLSVLFFXXXXXXXXXLKVYPRLEEHL

SEQ ID NO: 45783 - protein, 39 aa, Artificial Sequence
  GFR-binding peptide
  MOD_RES (4)..(5)..(39): Xaa is C or S
  MOD_RES (19)..(20)..(21)..(22)..(23): Xaa is A or G
  MOD_RES (24)..(25)..(26)..(27): Xaa is A or G or is absent
PKAXXVPTELSSLSMLFFXXXXXXXXXLKVYPEMVVEGX

SEQ ID NO: 45784 - protein, 36 aa, Artificial Sequence
  GFR-binding peptide
  MOD_RES (3)..(4): Xaa is C or S
  MOD_RES (18)..(19)..(20)..(21)..(22): Xaa is A or G
  MOD_RES (23)..(24)..(25)..(26): Xaa is A or G or is absent
STXXAPVKTSSLSMLFFXXXXXXXXXLKVYPMIVEE

SEQ ID NO: 45785 - protein, 32 aa, Artificial Sequence
  GFR-binding peptide
  MOD_RES (1)..(2): Xaa is C or S
XXAPTQLSSLSVLFFDDSSNVILKVYPNMVVR

SEQ ID NO: 45786 - protein, 38 aa, Artificial Sequence
  GFR-binding peptide
  MOD_RES (6)..(6): Xaa is C or S
DEGLEXVPTEESSLSMLFFRIKPHQGQHLKVYPFLQHN

SEQ ID NO: 45787 - protein, 40 aa, Artificial Sequence
  GFR-binding peptide
  MOD_RES (3)..(37)..(39): Xaa is C or S
  MOD_RES (17)..(18)..(19)..(20)..(21): Xaa is A or G
  MOD_RES (22)..(23)..(24)..(25): Xaa is A or G or is absent
PTXAPTKLSSLSVLFFXXXXXXXXXLKVYPNMVVRSXGXH

SEQ ID NO: 45788 - protein, 42 aa, Artificial Sequence
  GFR-binding peptide
  MOD_RES (4)..(5)..(39)..(41): Xaa is C or S
  MOD_RES (19)..(20)..(21)..(22)..(23): Xaa is A or G
  MOD_RES (24)..(25)..(26)..(27): Xaa is A or G or is absent
PKAXXAPTKLSSLSVLFFXXXXXXXXXLKVYPNMVVKAXGXH

SEQ ID NO: 45789 - protein, 35 aa, Artificial Sequence
  GFR-binding peptide
  MOD_RES (34)..(34): Xaa is C or S
  MOD_RES (14)..(15)..(16)..(17)..(18): Xaa is A or G
  MOD_RES (19)..(20)..(21)..(22): Xaa is A or G or is absent
APTKLSSLSVLFFXXXXXXXXXLKVYPNMVVRSXG

SEQ ID NO: 45790 - protein, 34 aa, Artificial Sequence
  GFR-binding peptide
  MOD_RES (33)..(33): Xaa is C or S
  MOD_RES (14)..(15)..(16)..(17)..(18): Xaa is A or G
  MOD_RES (19)..(20)..(21)..(22): Xaa is A or G or is absent
VPQALSSLSILFFXXXXXXXXXLKVYPMIVRSXK

SEQ ID NO: 45791 - protein, 39 aa, Artificial Sequence
  GFR-binding peptide
  MOD_RES (6)..(7): Xaa is C or S
  MOD_RES (21)..(22)..(23)..(24)..(25): Xaa is A or G
  MOD_RES (26)..(27)..(28)..(29): Xaa is A or G or is absent
HVPKPXXAPTKLSSLSVLFFXXXXXXXXXLKVYPNMVVR

SEQ ID NO: 45792 - protein, 34 aa, Artificial Sequence
  GFR-binding peptide
  MOD_RES (2)..(3): Xaa is C or S
PXXAPTKLSSLSVLFFDDSSNVILKVYPNMVVRS

SEQ ID NO: 45793 - protein, 38 aa, Artificial Sequence
  GFR-binding peptide
  MOD_RES (3)..(4)..(36)..(38): Xaa is C or S
ASXXVPARLSSLSILFFDAANNVVLKVYPDMVVEAXGX

SEQ ID NO: 45794 - protein, 36 aa, Artificial Sequence
  GFR-binding peptide
  MOD_RES (1)..(2)..(36): Xaa is C or S
  MOD_RES (16)..(17)..(18)..(19)..(20): Xaa is A or G
  MOD_RES (21)..(22)..(23)..(24): Xaa is A or G or is absent
XXTPTKMSSLSMLFFXXXXXXXXXLKVYPGMVVDRX

SEQ ID NO: 45795 - protein, 41 aa, Artificial Sequence
  GFR-binding peptide
  MOD_RES (5)..(6)..(39)..(41): Xaa is C or S
VGKAXXVPTKLSSLSVLFFDDMGVPTLKVYPEGMSVAEXGX

SEQ ID NO: 45796 - protein, 42 aa, Artificial Sequence
  GFR-binding peptide
  MOD_RES (5)..(42): Xaa is C or S
  MOD_RES (21)..(22)..(23)..(24)..(25): Xaa is A or G
  MOD_RES (26)..(27)..(28)..(29): Xaa is A or G or is absent
SSVKXQPSRVHHSSLSVLFFXXXXXXXXXLKVYPRLEEHLEX

SEQ ID NO: 45797 - protein, 39 aa, Artificial Sequence
  GFR-binding peptide
  MOD_RES (2)..(3)..(37)..(39): Xaa is C or S
  MOD_RES (17)..(18)..(19)..(20)..(21): Xaa is A or G
  MOD_RES (22)..(23)..(24)..(25): Xaa is A or G or is absent
AXXVPTELSSLSMLFFXXXXXXXXXLKVYPEMVVEGXGX

SEQ ID NO: 45798 - protein, 36 aa, Artificial Sequence
  GFR-binding peptide
  MOD_RES (1)..(35): Xaa is C or S
  MOD_RES (15)..(16)..(17)..(18)..(19): Xaa is A or G
  MOD_RES (20)..(21)..(22)..(23): Xaa is A or G or is absent
XVPTELSSLSMLFFXXXXXXXXXLKVYPEMVVEGXG

SEQ ID NO: 45799 - protein, 40 aa, Artificial Sequence
  GFR-binding peptide
  MOD_RES (6)..(7): Xaa is C or S
  MOD_RES (21)..(22)..(23)..(24)..(25): Xaa is A or G
  MOD_RES (26)..(27)..(28)..(29): Xaa is A or G or is absent
STPPTXXVPTRLSSLSILFFXXXXXXXXXLKVYPDMVVES

SEQ ID NO: 45800 - protein, 32 aa, Artificial Sequence
  GFR-binding peptide
  MOD_RES (31)..(31): Xaa is C or S
APVKTSSLSMLFFDNGRVLLLKVYPMIVEEXG

SEQ ID NO: 45801 - protein, 37 aa, Artificial Sequence
  GFR-binding peptide
  MOD_RES (4)..(5): Xaa is C or S
  MOD_RES (19)..(20)..(21)..(22)..(23): Xaa is A or G
  MOD_RES (24)..(25)..(26)..(27): Xaa is A or G or is absent
PKAXXAPTKLSSLSVLFFXXXXXXXXXLKVYPNMVVK

SEQ ID NO: 45802 - protein, 38 aa, Artificial Sequence
  GFR-binding peptide
  MOD_RES (5)..(6)..(38): Xaa is C or S
IPEPXXVPEKMSSLSILFFDENKNVVLKVYPNMTVESX

SEQ ID NO: 45803 - protein, 38 aa, Artificial Sequence
  GFR-binding peptide
  MOD_RES (2)..(3)..(35)..(37): Xaa is C or S
SXXVPARLSSLSILFFDAANNVVLKVYPDMVVEAXGXR

SEQ ID NO: 45804 - protein, 36 aa, Artificial Sequence
  GFR-binding peptide
  MOD_RES (1)..(2)..(35): Xaa is C or S
  MOD_RES (16)..(17)..(18)..(19)..(20): Xaa is A or G
  MOD_RES (21)..(22)..(23)..(24): Xaa is A or G or is absent
XXVPQALSSLSILFFXXXXXXXXXLKVYPMIVRSXK

SEQ ID NO: 45805 - protein, 43 aa, Artificial Sequence
  GFR-binding peptide
  MOD_RES (6)..(7)..(41)..(43): Xaa is C or S
  MOD_RES (21)..(22)..(23)..(24)..(25): Xaa is A or G
  MOD_RES (26)..(27)..(28)..(29): Xaa is A or G or is absent
GSAGPXXTPTKMSSLSMLFFXXXXXXXXXLKVYPGMVVDRXGX

SEQ ID NO: 45806 - protein, 36 aa, Artificial Sequence
  GFR-binding peptide
  MOD_RES (1)..(2)..(33)..(35): Xaa is C or S
XXAPVKTSSLSMLFFDNGRVLLLKVYPMIVEEXGXL

SEQ ID NO: 45807 - protein, 42 aa, Artificial Sequence
  GFR-binding peptide
  MOD_RES (4)..(5)..(39)..(41): Xaa is C or S
  MOD_RES (19)..(20)..(21)..(22)..(23): Xaa is A or G
  MOD_RES (24)..(25)..(26)..(27): Xaa is A or G or is absent
PASXXVPARLSSLSILFFXXXXXXXXXLKVYPDMVVEAXGXR

SEQ ID NO: 45808 - protein, 44 aa, Artificial Sequence
  GFR-binding peptide
  MOD_RES (4)..(41)..(43): Xaa is C or S
SVKXQPSRVHHSSLSVLFFEYVRKKPKLLKVYPRLEEHLEXAXA

SEQ ID NO: 45809 - protein, 37 aa, Artificial Sequence
  GFR-binding peptide
  MOD_RES (2)..(2): Xaa is C or S
  MOD_RES (18)..(19)..(20)..(21)..(22): Xaa is A or G
  MOD_RES (23)..(24)..(25)..(26): Xaa is A or G or is absent
KXQPSRVHHSSLSVLFFXXXXXXXXXLKVYPRLEEHL

SEQ ID NO: 45810 - protein, 40 aa, Artificial Sequence
  GFR-binding peptide
  MOD_RES (6)..(7): Xaa is C or S
  MOD_RES (21)..(22)..(23)..(24)..(25): Xaa is A or G
  MOD_RES (26)..(27)..(28)..(29): Xaa is A or G or is absent
GSAGPXXTPTKMSSLSMLFFXXXXXXXXXLKVYPGMVVDR

SEQ ID NO: 45811 - protein, 38 aa, Artificial Sequence
  GFR-binding peptide
  MOD_RES (2)..(3)..(37): Xaa is C or S
  MOD_RES (17)..(18)..(19)..(20)..(21): Xaa is A or G
  MOD_RES (22)..(23)..(24)..(25): Xaa is A or G or is absent
AXXAPTKLSSLSVLFFXXXXXXXXXLKVYPNMVVKAXG

SEQ ID NO: 45812 - protein, 39 aa, Artificial Sequence
  GFR-binding peptide
  MOD_RES (5)..(6)..(38): Xaa is C or S
VPKAXXAPTKLSSLSVLFFDSSNNVILKVYPNMVVKAXG

SEQ ID NO: 45813 - protein, 39 aa, Artificial Sequence
  GFR-binding peptide
  MOD_RES (3)..(4)..(38): Xaa is C or S
  MOD_RES (18)..(19)..(20)..(21)..(22): Xaa is A or G
  MOD_RES (23)..(24)..(25)..(26): Xaa is A or G or is absent
KAXXVPTELSSLSMLFFXXXXXXXXXLKVYPEMVVEGXG

SEQ ID NO: 45814 - protein, 39 aa, Artificial Sequence
  GFR-binding peptide
  MOD_RES (5)..(6): Xaa is C or S
  MOD_RES (20)..(21)..(22)..(23)..(24): Xaa is A or G
  MOD_RES (25)..(26)..(27)..(28): Xaa is A or G or is absent
VPKAXXAPTKLSSLSVLFFXXXXXXXXXLKVYPNMVVKA

SEQ ID NO: 45815 - protein, 38 aa, Artificial Sequence
  GFR-binding peptide
  MOD_RES (3)..(35)..(37): Xaa is C or S
PTXAPTKLSSLSVLFFDDSSNVILKVYPNMVVRSXGXH

SEQ ID NO: 45816 - protein, 34 aa, Artificial Sequence
  GFR-binding peptide
  MOD_RES (3)..(4): Xaa is C or S
PTXXVPTRLSSLSILFFDSANNVVLKVYPDMVVE

SEQ ID NO: 45817 - protein, 42 aa, Artificial Sequence
  GFR-binding peptide
  MOD_RES (6)..(7)..(40)..(42): Xaa is C or S
  MOD_RES (21)..(22)..(23)..(24)..(25): Xaa is A or G
  MOD_RES (26)..(27)..(28)..(29): Xaa is A or G or is absent
ASASPXXVPQDLSSLSILFFXXXXXXXXXLKVYPMVVKSXKX

SEQ ID NO: 45818 - protein, 40 aa, Artificial Sequence
  GFR-binding peptide
  MOD_RES (5)..(6)..(40): Xaa is C or S
  MOD_RES (20)..(21)..(22)..(23)..(24): Xaa is A or G
  MOD_RES (25)..(26)..(27)..(28): Xaa is A or G or is absent
VPKAXXAPTKLSSLSVLFFXXXXXXXXXLKVYPNMVVKAX

SEQ ID NO: 45819 - protein, 35 aa, Artificial Sequence
  GFR-binding peptide
  MOD_RES (2)..(3)..(35): Xaa is C or S
PXXVPEKMSSLSILFFDENKNVVLKVYPNMTVESX

SEQ ID NO: 45820 - protein, 41 aa, Artificial Sequence
  GFR-binding peptide
  MOD_RES (4)..(38)..(40): Xaa is C or S
GLEXVPTEESSLSMLFFRIKPHQGQHLKVYPFLQHNKXEXR

SEQ ID NO: 45821 - protein, 31 aa, Artificial Sequence
  GFR-binding peptide
APTQLSSLSVLFFDDSSNVILKVYPNMVVRA

SEQ ID NO: 45822 - protein, 36 aa, Artificial Sequence
  GFR-binding peptide
  MOD_RES (1)..(34)..(36): Xaa is C or S
  MOD_RES (15)..(16)..(17)..(18)..(19): Xaa is A or G
  MOD_RES (20)..(21)..(22)..(23): Xaa is A or G or is absent
XVPQALSSLSILFFXXXXXXXXXLKVYPMIVRSXKX

SEQ ID NO: 45823 - protein, 38 aa, Artificial Sequence
  GFR-binding peptide
  MOD_RES (3)..(3): Xaa is C or S
VKXQPSRVHHSSLSVLFFEYVRKKPKLLKVYPRLEEHL

SEQ ID NO: 45824 - protein, 35 aa, Artificial Sequence
  GFR-binding peptide
  MOD_RES (2)..(2): Xaa is C or S
  MOD_RES (16)..(17)..(18)..(19)..(20): Xaa is A or G
  MOD_RES (21)..(22)..(23)..(24): Xaa is A or G or is absent
EXVPTEESSLSMLFFXXXXXXXXXLKVYPFLQHNK

SEQ ID NO: 45825 - protein, 38 aa, Artificial Sequence
  GFR-binding peptide
  MOD_RES (4)..(5)..(37): Xaa is C or S
PPTXXVPTRLSSLSILFFDSANNVVLKVYPDMVVESXG

SEQ ID NO: 45826 - protein, 33 aa, Artificial Sequence
  GFR-binding peptide
  MOD_RES (1)..(1): Xaa is C or S
  MOD_RES (15)..(16)..(17)..(18)..(19): Xaa is A or G
  MOD_RES (20)..(21)..(22)..(23): Xaa is A or G or is absent
XAPVKTSSLSMLFFXXXXXXXXXLKVYPMIVEE

SEQ ID NO: 45827 - protein, 34 aa, Artificial Sequence
  GFR-binding peptide
  MOD_RES (2)..(3): Xaa is C or S
PXXVPEKMSSLSILFFDENKNVVLKVYPNMTVES

SEQ ID NO: 45828 - protein, 35 aa, Artificial Sequence
  GFR-binding peptide
  MOD_RES (1)..(2)..(35): Xaa is C or S
  MOD_RES (16)..(17)..(18)..(19)..(20): Xaa is A or G
  MOD_RES (21)..(22)..(23)..(24): Xaa is A or G or is absent
XXAPVKTSSLSMLFFXXXXXXXXXLKVYPMIVEEX

SEQ ID NO: 45829 - protein, 34 aa, Artificial Sequence
  GFR-binding peptide
  MOD_RES (2)..(3): Xaa is C or S
PXXTPTKMSSLSMLFFNDKQQIILKVYPGMVVDR

SEQ ID NO: 45830 - protein, 38 aa, Artificial Sequence
  GFR-binding peptide
  MOD_RES (5)..(6): Xaa is C or S
  MOD_RES (20)..(21)..(22)..(23)..(24): Xaa is A or G
  MOD_RES (25)..(26)..(27)..(28): Xaa is A or G or is absent
IPKAXXVPTELSSLSMLFFXXXXXXXXXLKVYPEMVVE

SEQ ID NO: 45831 - protein, 32 aa, Artificial Sequence
  GFR-binding peptide
  MOD_RES (14)..(15)..(16)..(17)..(18): Xaa is A or G
  MOD_RES (19)..(20)..(21)..(22): Xaa is A or G or is absent
VPARLSSLSILFFXXXXXXXXXLKVYPDMVVE

SEQ ID NO: 45832 - protein, 37 aa, Artificial Sequence
  GFR-binding peptide
  MOD_RES (4)..(5)..(37): Xaa is C or S
PASXXVPARLSSLSILFFDAANNVVLKVYPDMVVEAX

SEQ ID NO: 45833 - protein, 40 aa, Artificial Sequence
  GFR-binding peptide
  MOD_RES (3)..(4)..(37)..(39): Xaa is C or S
  MOD_RES (18)..(19)..(20)..(21)..(22): Xaa is A or G
  MOD_RES (23)..(24)..(25)..(26): Xaa is A or G or is absent
SPXXVSQDLSSLSILFFXXXXXXXXXLKVYPMIVKSXKXS

SEQ ID NO: 45834 - protein, 38 aa, Artificial Sequence
  GFR-binding peptide
  MOD_RES (4)..(38): Xaa is C or S
  MOD_RES (18)..(19)..(20)..(21)..(22): Xaa is A or G
  MOD_RES (23)..(24)..(25)..(26): Xaa is A or G or is absent
GLEXVPTEESSLSMLFFXXXXXXXXXLKVYPFLQHNKX

SEQ ID NO: 45835 - protein, 36 aa, Artificial Sequence
  GFR-binding peptide
  MOD_RES (3)..(3): Xaa is C or S
  MOD_RES (17)..(18)..(19)..(20)..(21): Xaa is A or G
  MOD_RES (22)..(23)..(24)..(25): Xaa is A or G or is absent
LEXVPTEESSLSMLFFXXXXXXXXXLKVYPFLQHNK

SEQ ID NO: 45836 - protein, 40 aa, Artificial Sequence
  GFR-binding peptide
  MOD_RES (5)..(39): Xaa is C or S
  MOD_RES (19)..(20)..(21)..(22)..(23): Xaa is A or G
  MOD_RES (24)..(25)..(26)..(27): Xaa is A or G or is absent
EGLEXVPTEESSLSMLFFXXXXXXXXXLKVYPFLQHNKXE

SEQ ID NO: 45837 - protein, 38 aa, Artificial Sequence
  GFR-binding peptide
  MOD_RES (1)..(2)..(37): Xaa is C or S
  MOD_RES (16)..(17)..(18)..(19)..(20): Xaa is A or G
  MOD_RES (21)..(22)..(23)..(24): Xaa is A or G or is absent
XXVPTKLSSLSVLFFXXXXXXXXXLKVYPEGMSVAEXG

SEQ ID NO: 45838 - protein, 34 aa, Artificial Sequence
  GFR-binding peptide
  MOD_RES (34)..(34): Xaa is C or S
  MOD_RES (14)..(15)..(16)..(17)..(18): Xaa is A or G
  MOD_RES (19)..(20)..(21)..(22): Xaa is A or G or is absent
VPARLSSLSILFFXXXXXXXXXLKVYPDMVVEAX

SEQ ID NO: 45839 - protein, 42 aa, Artificial Sequence
  GFR-binding peptide
  MOD_RES (7)..(41): Xaa is C or S
  MOD_RES (21)..(22)..(23)..(24)..(25): Xaa is A or G
  MOD_RES (26)..(27)..(28)..(29): Xaa is A or G or is absent
NDEGLEXVPTEESSLSMLFFXXXXXXXXXLKVYPFLQHNKXE

SEQ ID NO: 45840 - protein, 39 aa, Artificial Sequence
  GFR-binding peptide
  MOD_RES (6)..(7)..(39): Xaa is C or S
GIPEPXXVPEKMSSLSILFFDENKNVVLKVYPNMTVESX

SEQ ID NO: 45841 - protein, 34 aa, Artificial Sequence
  GFR-binding peptide
  MOD_RES (3)..(4): Xaa is C or S
STXXAPVKTSSLSMLFFDNGRVLLLKVYPMIVEE

SEQ ID NO: 45842 - protein, 39 aa, Artificial Sequence
  GFR-binding peptide
  MOD_RES (4)..(5)..(37)..(39): Xaa is C or S
AGPXXTPTKMSSLSMLFFNDKQQIILKVYPGMVVDRXGX

SEQ ID NO: 45843 - protein, 38 aa, Artificial Sequence
  GFR-binding peptide
  MOD_RES (6)..(6): Xaa is C or S
  MOD_RES (20)..(21)..(22)..(23)..(24): Xaa is A or G
  MOD_RES (25)..(26)..(27)..(28): Xaa is A or G or is absent
VTKPTXAPTKLSSLSVLFFXXXXXXXXXLKVYPNMVVR

SEQ ID NO: 45844 - protein, 34 aa, Artificial Sequence
  GFR-binding peptide
  MOD_RES (2)..(2): Xaa is C or S
EXVPTEESSLSMLFFRIKPHQGQHLKVYPFLQHN

SEQ ID NO: 45845 - protein, 45 aa, Artificial Sequence
  GFR-binding peptide
  MOD_RES (5)..(42)..(44): Xaa is C or S
SSVKXQPSRVHHSSLSVLFFEYVRKKPKLLKVYPRLEEHLEXAXA

SEQ ID NO: 45846 - protein, 35 aa, Artificial Sequence
  GFR-binding peptide
  MOD_RES (2)..(3)..(34): Xaa is C or S
PXXVPQDLSSLSILFFVGRTPKVLKVYPMVVKSXK

SEQ ID NO: 45847 - protein, 37 aa, Artificial Sequence
  GFR-binding peptide
  MOD_RES (6)..(7): Xaa is C or S
RVPSTXXAPVKTSSLSMLFFDNGRVLLLKVYPMIVEE

SEQ ID NO: 45848 - protein, 32 aa, Artificial Sequence
  GFR-binding peptide
  MOD_RES (1)..(2): Xaa is C or S
XXAPTKLSSLSVLFFDSSNNVILKVYPNMVVK

SEQ ID NO: 45849 - protein, 35 aa, Artificial Sequence
  GFR-binding peptide
  MOD_RES (2)..(3): Xaa is C or S
  MOD_RES (17)..(18)..(19)..(20)..(21): Xaa is A or G
  MOD_RES (22)..(23)..(24)..(25): Xaa is A or G or is absent
PXXAPTKLSSLSVLFFXXXXXXXXXLKVYPNMVVR

SEQ ID NO: 45850 - protein, 39 aa, Artificial Sequence
  GFR-binding peptide
  MOD_RES (4)..(5)..(39): Xaa is C or S
  MOD_RES (19)..(20)..(21)..(22)..(23): Xaa is A or G
  MOD_RES (24)..(25)..(26)..(27): Xaa is A or G or is absent
SKAXXVPTKLSSLSILFFXXXXXXXXXLKVYPGMAVSEX

SEQ ID NO: 45851 - protein, 37 aa, Artificial Sequence
  GFR-binding peptide
  MOD_RES (4)..(5): Xaa is C or S
GKAXXVPTKLSSLSVLFFDDMGVPTLKVYPEGMSVAE

SEQ ID NO: 45852 - protein, 39 aa, Artificial Sequence
  GFR-binding peptide
  MOD_RES (5)..(6)..(38): Xaa is C or S
IPEPXXVPEKMSSLSILFFDENKNVVLKVYPNMTVESXA

SEQ ID NO: 45853 - protein, 38 aa, Artificial Sequence
  GFR-binding peptide
  MOD_RES (37)..(37): Xaa is C or S
QPSRVHHSSLSVLFFEYVRKKPKLLKVYPRLEEHLEXA

SEQ ID NO: 45854 - protein, 32 aa, Artificial Sequence
  GFR-binding peptide
  MOD_RES (32)..(32): Xaa is C or S
APTQLSSLSVLFFDDSSNVILKVYPNMVVRAX

SEQ ID NO: 45855 - protein, 33 aa, Artificial Sequence
  GFR-binding peptide
  MOD_RES (14)..(15)..(16)..(17)..(18): Xaa is A or G
  MOD_RES (19)..(20)..(21)..(22): Xaa is A or G or is absent
APTKLSSLSVLFFXXXXXXXXXLKVYPNMVVKA

SEQ ID NO: 45856 - protein, 43 aa, Artificial Sequence
  GFR-binding peptide
  MOD_RES (5)..(42): Xaa is C or S
  MOD_RES (21)..(22)..(23)..(24)..(25): Xaa is A or G
  MOD_RES (26)..(27)..(28)..(29): Xaa is A or G or is absent
SSVKXQPSRVHHSSLSVLFFXXXXXXXXXLKVYPRLEEHLEXA

SEQ ID NO: 45857 - protein, 37 aa, Artificial Sequence
  GFR-binding peptide
  MOD_RES (6)..(7): Xaa is C or S
YVPKPXXAPTKLSSLSVLFFDDSSNVILKVYPNMVVR

SEQ ID NO: 45858 - protein, 37 aa, Artificial Sequence
  GFR-binding peptide
  MOD_RES (3)..(4)..(37): Xaa is C or S
  MOD_RES (18)..(19)..(20)..(21)..(22): Xaa is A or G
  MOD_RES (23)..(24)..(25)..(26): Xaa is A or G or is absent
SPXXVPQDLSSLSILFFXXXXXXXXXLKVYPMVVKSX

SEQ ID NO: 45859 - protein, 39 aa, Artificial Sequence
  GFR-binding peptide
  MOD_RES (3)..(4)..(36)..(38): Xaa is C or S
GPXXTPTKMSSLSMLFFNDKQQIILKVYPGMVVDRXGXS

SEQ ID NO: 45860 - protein, 44 aa, Artificial Sequence
  GFR-binding peptide
  MOD_RES (6)..(7)..(41)..(43): Xaa is C or S
  MOD_RES (21)..(22)..(23)..(24)..(25): Xaa is A or G
  MOD_RES (26)..(27)..(28)..(29): Xaa is A or G or is absent
AAPASXXVPARLSSLSILFFXXXXXXXXXLKVYPDMVVEAXGXR

SEQ ID NO: 45861 - protein, 36 aa, Artificial Sequence
  GFR-binding peptide
  MOD_RES (35)..(35): Xaa is C or S
SRVHHSSLSVLFFEYVRKKPKLLKVYPRLEEHLEXA

SEQ ID NO: 45862 - protein, 34 aa, Artificial Sequence
  GFR-binding peptide
  MOD_RES (1)..(1): Xaa is C or S
  MOD_RES (15)..(16)..(17)..(18)..(19): Xaa is A or G
  MOD_RES (20)..(21)..(22)..(23): Xaa is A or G or is absent
XVPTKLSSLSILFFXXXXXXXXXLKVYPGMAVSE

SEQ ID NO: 45863 - protein, 36 aa, Artificial Sequence
  GFR-binding peptide
  MOD_RES (34)..(36): Xaa is C or S
  MOD_RES (14)..(15)..(16)..(17)..(18): Xaa is A or G
  MOD_RES (19)..(20)..(21)..(22): Xaa is A or G or is absent
VPARLSSLSILFFXXXXXXXXXLKVYPDMVVEAXGX

SEQ ID NO: 45864 - protein, 38 aa, Artificial Sequence
  GFR-binding peptide
  MOD_RES (2)..(3)..(37): Xaa is C or S
  MOD_RES (17)..(18)..(19)..(20)..(21): Xaa is A or G
  MOD_RES (22)..(23)..(24)..(25): Xaa is A or G or is absent
PXXVPEKMSSLSILFFXXXXXXXXXLKVYPNMTVESXA

SEQ ID NO: 45865 - protein, 38 aa, Artificial Sequence
  GFR-binding peptide
  MOD_RES (1)..(35)..(37): Xaa is C or S
  MOD_RES (15)..(16)..(17)..(18)..(19): Xaa is A or G
  MOD_RES (20)..(21)..(22)..(23): Xaa is A or G or is absent
XVPTKLSSLSILFFXXXXXXXXXLKVYPGMAVSEXGXR

SEQ ID NO: 45866 - protein, 39 aa, Artificial Sequence
  GFR-binding peptide
  MOD_RES (6)..(7): Xaa is C or S
  MOD_RES (21)..(22)..(23)..(24)..(25): Xaa is A or G
  MOD_RES (26)..(27)..(28)..(29): Xaa is A or G or is absent
ASASPXXVSQDLSSLSILFFXXXXXXXXXLKVYPMIVKS

SEQ ID NO: 45867 - protein, 39 aa, Artificial Sequence
  GFR-binding peptide
  MOD_RES (2)..(3)..(37)..(39): Xaa is C or S
  MOD_RES (17)..(18)..(19)..(20)..(21): Xaa is A or G
  MOD_RES (22)..(23)..(24)..(25): Xaa is A or G or is absent
TXXVPTRLSSLSILFFXXXXXXXXXLKVYPDMVVESXGX

SEQ ID NO: 45868 - protein, 38 aa, Artificial Sequence
  GFR-binding peptide
  MOD_RES (1)..(38): Xaa is C or S
  MOD_RES (17)..(18)..(19)..(20)..(21): Xaa is A or G
  MOD_RES (22)..(23)..(24)..(25): Xaa is A or G or is absent
XQPSRVHHSSLSVLFFXXXXXXXXXLKVYPRLEEHLEX

SEQ ID NO: 45869 - protein, 36 aa, Artificial Sequence
  GFR-binding peptide
  MOD_RES (1)..(2)..(34)..(36): Xaa is C or S
XXAPTQLSSLSVLFFDDSSNVILKVYPNMVVRAXGX

SEQ ID NO: 45870 - protein, 37 aa, Artificial Sequence
  GFR-binding peptide
  MOD_RES (1)..(34)..(36): Xaa is C or S
  MOD_RES (15)..(16)..(17)..(18)..(19): Xaa is A or G
  MOD_RES (20)..(21)..(22)..(23): Xaa is A or G or is absent
XVPQDLSSLSILFFXXXXXXXXXLKVYPMVVKSXKXS

SEQ ID NO: 45871 - protein, 38 aa, Artificial Sequence
  GFR-binding peptide
  MOD_RES (6)..(7): Xaa is C or S
KASKAXXVPTKLSSLSILFFDKGVVTYLKVYPGMAVSE

SEQ ID NO: 45872 - protein, 34 aa, Artificial Sequence
  GFR-binding peptide
  MOD_RES (34)..(34): Xaa is C or S
  MOD_RES (14)..(15)..(16)..(17)..(18): Xaa is A or G
  MOD_RES (19)..(20)..(21)..(22): Xaa is A or G or is absent
APTQLSSLSVLFFXXXXXXXXXLKVYPNMVVRAX

SEQ ID NO: 45873 - protein, 41 aa, Artificial Sequence
  GFR-binding peptide
  MOD_RES (6)..(7)..(41): Xaa is C or S
  MOD_RES (21)..(22)..(23)..(24)..(25): Xaa is A or G
  MOD_RES (26)..(27)..(28)..(29): Xaa is A or G or is absent
AVPKAXXAPTKLSSLSVLFFXXXXXXXXXLKVYPNMVVKAX

SEQ ID NO: 45874 - protein, 40 aa, Artificial Sequence
  GFR-binding peptide
  MOD_RES (4)..(5)..(37)..(39): Xaa is C or S
PKPXXAPTQLSSLSVLFFDDSSNVILKVYPNMVVRAXGXH

SEQ ID NO: 45875 - protein, 35 aa, Artificial Sequence
  GFR-binding peptide
  MOD_RES (1)..(2)..(34): Xaa is C or S
XXAPTKLSSLSVLFFDSSNNVILKVYPNMVVKAXG

SEQ ID NO: 45876 - protein, 39 aa, Artificial Sequence
  GFR-binding peptide
  MOD_RES (4)..(5)..(39): Xaa is C or S
  MOD_RES (19)..(20)..(21)..(22)..(23): Xaa is A or G
  MOD_RES (24)..(25)..(26)..(27): Xaa is A or G or is absent
PKAXXAPTKLSSLSVLFFXXXXXXXXXLKVYPNMVVKAX

SEQ ID NO: 45877 - protein, 41 aa, Artificial Sequence
  GFR-binding peptide
  MOD_RES (6)..(7)..(41): Xaa is C or S
  MOD_RES (21)..(22)..(23)..(24)..(25): Xaa is A or G
  MOD_RES (26)..(27)..(28)..(29): Xaa is A or G or is absent
HVPKPXXAPTKLSSLSVLFFXXXXXXXXXLKVYPNMVVRSX

SEQ ID NO: 45878 - protein, 35 aa, Artificial Sequence
  GFR-binding peptide
  MOD_RES (2)..(3)..(35): Xaa is C or S
TXXVPTRLSSLSILFFDSANNVVLKVYPDMVVESX

SEQ ID NO: 45879 - protein, 34 aa, Artificial Sequence
  GFR-binding peptide
  MOD_RES (1)..(2): Xaa is C or S
  MOD_RES (16)..(17)..(18)..(19)..(20): Xaa is A or G
  MOD_RES (21)..(22)..(23)..(24): Xaa is A or G or is absent
XXVPEKMSSLSILFFXXXXXXXXXLKVYPNMTVE

SEQ ID NO: 45880 - protein, 39 aa, Artificial Sequence
  GFR-binding peptide
  MOD_RES (6)..(7): Xaa is C or S
  MOD_RES (21)..(22)..(23)..(24)..(25): Xaa is A or G
  MOD_RES (26)..(27)..(28)..(29): Xaa is A or G or is absent
GSAGPXXTPTKMSSLSMLFFXXXXXXXXXLKVYPGMVVD

SEQ ID NO: 45881 - protein, 35 aa, Artificial Sequence
  GFR-binding peptide
  MOD_RES (2)..(3): Xaa is C or S
  MOD_RES (17)..(18)..(19)..(20)..(21): Xaa is A or G
  MOD_RES (22)..(23)..(24)..(25): Xaa is A or G or is absent
AXXVPTELSSLSMLFFXXXXXXXXXLKVYPEMVVE

SEQ ID NO: 45882 - protein, 35 aa, Artificial Sequence
  GFR-binding peptide
  MOD_RES (1)..(35): Xaa is C or S
  MOD_RES (15)..(16)..(17)..(18)..(19): Xaa is A or G
  MOD_RES (20)..(21)..(22)..(23): Xaa is A or G or is absent
XTPTKMSSLSMLFFXXXXXXXXXLKVYPGMVVDRX

SEQ ID NO: 45883 - protein, 36 aa, Artificial Sequence
  GFR-binding peptide
  MOD_RES (2)..(3): Xaa is C or S
  MOD_RES (17)..(18)..(19)..(20)..(21): Xaa is A or G
  MOD_RES (22)..(23)..(24)..(25): Xaa is A or G or is absent
PXXAPTQLSSLSVLFFXXXXXXXXXLKVYPNMVVRA

SEQ ID NO: 45884 - protein, 37 aa, Artificial Sequence
  GFR-binding peptide
  MOD_RES (2)..(3)..(37): Xaa is C or S
  MOD_RES (17)..(18)..(19)..(20)..(21): Xaa is A or G
  MOD_RES (22)..(23)..(24)..(25): Xaa is A or G or is absent
PXXTPTKMSSLSMLFFXXXXXXXXXLKVYPGMVVDRX

SEQ ID NO: 45885 - protein, 37 aa, Artificial Sequence
  GFR-binding peptide
  MOD_RES (3)..(37): Xaa is C or S
  MOD_RES (17)..(18)..(19)..(20)..(21): Xaa is A or G
  MOD_RES (22)..(23)..(24)..(25): Xaa is A or G or is absent
LEXVPTEESSLSMLFFXXXXXXXXXLKVYPFLQHNKX

SEQ ID NO: 45886 - protein, 36 aa, Artificial Sequence
  GFR-binding peptide
  MOD_RES (1)..(2)..(34)..(36): Xaa is C or S
XXAPTKLSSLSVLFFDSSNNVILKVYPNMVVKAXGX

SEQ ID NO: 45887 - protein, 38 aa, Artificial Sequence
  GFR-binding peptide
  MOD_RES (3)..(4)..(37): Xaa is C or S
  MOD_RES (18)..(19)..(20)..(21)..(22): Xaa is A or G
  MOD_RES (23)..(24)..(25)..(26): Xaa is A or G or is absent
APXXVPQALSSLSILFFXXXXXXXXXLKVYPMIVRSXK

SEQ ID NO: 45888 - protein, 41 aa, Artificial Sequence; identical to SEQ ID NO: 152
  GFR-binding peptide
  MOD_RES (6)..(7)..(38)..(40): Xaa is C or S

SEQ ID NO: 45889 - protein, 40 aa, Artificial Sequence
  GFR-binding peptide
  MOD_RES (6)..(7)..(38)..(40): Xaa is C or S
ASAAPXXVPQALSSLSILFFVGRKPKVLKVYPMIVRSXKX

SEQ ID NO: 45890 - protein, 41 aa, Artificial Sequence
  GFR-binding peptide
  MOD_RES (6)..(7)..(41): Xaa is C or S
  MOD_RES (21)..(22)..(23)..(24)..(25): Xaa is A or G
  MOD_RES (26)..(27)..(28)..(29): Xaa is A or G or is absent
GIPEPXXVPEKMSSLSILFFXXXXXXXXXLKVYPNMTVESX

SEQ ID NO: 45891 - protein, 41 aa, Artificial Sequence
  GFR-binding peptide
  MOD_RES (6)..(7)..(40): Xaa is C or S
  MOD_RES (21)..(22)..(23)..(24)..(25): Xaa is A or G
  MOD_RES (26)..(27)..(28)..(29): Xaa is A or G or is absent
ASASPXXVPQDLSSLSILFFXXXXXXXXXLKVYPMVVKSXK

SEQ ID NO: 45892 - protein, 42 aa, Artificial Sequence
  GFR-binding peptide
  MOD_RES (6)..(7)..(41): Xaa is C or S
  MOD_RES (21)..(22)..(23)..(24)..(25): Xaa is A or G
  MOD_RES (26)..(27)..(28)..(29): Xaa is A or G or is absent
TVPKPXXAPTQLSSLSVLFFXXXXXXXXXLKVYPNMVVRAXG

SEQ ID NO: 45893 - protein, 36 aa, Artificial Sequence
  GFR-binding peptide
  MOD_RES (1)..(2)..(33)..(35): Xaa is C or S
XXVSQDLSSLSILFFIGKTPKILKVYPMIVKSXKXS

SEQ ID NO: 45894 - protein, 36 aa, Artificial Sequence
  GFR-binding peptide
  MOD_RES (5)..(6): Xaa is C or S
VPKPXXAPTKLSSLSVLFFDDSSNVILKVYPNMVVR

SEQ ID NO: 45895 - protein, 33 aa, Artificial Sequence
  GFR-binding peptide
  MOD_RES (32)..(32): Xaa is C or S
APTQLSSLSVLFFDDSSNVILKVYPNMVVRAXG

SEQ ID NO: 45896 - protein, 38 aa, Artificial Sequence
  GFR-binding peptide
  MOD_RES (3)..(4)..(35)..(37): Xaa is C or S
STXXAPVKTSSLSMLFFDNGRVLLLKVYPMIVEEXGXL

SEQ ID NO: 45897 - protein, 40 aa, Artificial Sequence
  GFR-binding peptide
  MOD_RES (4)..(5)..(40): Xaa is C or S
  MOD_RES (19)..(20)..(21)..(22)..(23): Xaa is A or G
  MOD_RES (24)..(25)..(26)..(27): Xaa is A or G or is absent
GKAXXVPTKLSSLSVLFFXXXXXXXXXLKVYPEGMSVAEX

SEQ ID NO: 45898 - protein, 36 aa, Artificial Sequence
  GFR-binding peptide
  MOD_RES (3)..(4): Xaa is C or S
  MOD_RES (18)..(19)..(20)..(21)..(22): Xaa is A or G
  MOD_RES (23)..(24)..(25)..(26): Xaa is A or G or is absent
KPXXAPTQLSSLSVLFFXXXXXXXXXLKVYPNMVVR

SEQ ID NO: 45899 - protein, 34 aa, Artificial Sequence
  GFR-binding peptide
  MOD_RES (1)..(1): Xaa is C or S
  MOD_RES (15)..(16)..(17)..(18)..(19): Xaa is A or G
  MOD_RES (20)..(21)..(22)..(23): Xaa is A or G or is absent
XVPTEESSLSMLFFXXXXXXXXXLKVYPFLQHNK

SEQ ID NO: 45900 - protein, 33 aa, Artificial Sequence
  GFR-binding peptide
  MOD_RES (32)..(32): Xaa is C or S
VPARLSSLSILFFDAANNVVLKVYPDMVVEAXG

SEQ ID NO: 45901 - protein, 38 aa, Artificial Sequence
  GFR-binding peptide
  MOD_RES (2)..(3)..(36)..(38): Xaa is C or S
  MOD_RES (17)..(18)..(19)..(20)..(21): Xaa is A or G
  MOD_RES (22)..(23)..(24)..(25): Xaa is A or G or is absent
PXXVSQDLSSLSILFFXXXXXXXXXLKVYPMIVKSXKX

SEQ ID NO: 45902 - protein, 42 aa, Artificial Sequence
  GFR-binding peptide
  MOD_RES (4)..(5)..(39)..(41): Xaa is C or S
  MOD_RES (19)..(20)..(21)..(22)..(23): Xaa is A or G
  MOD_RES (24)..(25)..(26)..(27): Xaa is A or G or is absent
PKAXXVPTELSSLSMLFFXXXXXXXXXLKVYPEMVVEGXGXR

SEQ ID NO: 45903 - protein, 36 aa, Artificial Sequence
  GFR-binding peptide
  MOD_RES (35)..(35): Xaa is C or S
  MOD_RES (14)..(15)..(16)..(17)..(18): Xaa is A or G
  MOD_RES (19)..(20)..(21)..(22): Xaa is A or G or is absent
VPTKLSSLSVLFFXXXXXXXXXLKVYPEGMSVAEXG

SEQ ID NO: 45904 - protein, 39 aa, Artificial Sequence
  GFR-binding peptide
  MOD_RES (36)..(38): Xaa is C or S
  MOD_RES (15)..(16)..(17)..(18)..(19): Xaa is A or G
  MOD_RES (20)..(21)..(22)..(23): Xaa is A or G or is absent
PSRVHHSSLSVLFFXXXXXXXXXLKVYPRLEEHLEXAXA

SEQ ID NO: 45905 - protein, 35 aa, Artificial Sequence
  GFR-binding peptide
  MOD_RES (15)..(16)..(17)..(18)..(19): Xaa is A or G
  MOD_RES (20)..(21)..(22)..(23): Xaa is A or G or is absent
PSRVHHSSLSVLFFXXXXXXXXXLKVYPRLEEHLE

SEQ ID NO: 45906 - protein, 37 aa, Artificial Sequence
  GFR-binding peptide
  MOD_RES (2)..(3)..(37): Xaa is C or S
  MOD_RES (17)..(18)..(19)..(20)..(21): Xaa is A or G
  MOD_RES (22)..(23)..(24)..(25): Xaa is A or G or is absent
SXXVPARLSSLSILFFXXXXXXXXXLKVYPDMVVEAX

SEQ ID NO: 45907 - protein, 40 aa, Artificial Sequence
  GFR-binding peptide
  MOD_RES (6)..(7): Xaa is C or S
  MOD_RES (21)..(22)..(23)..(24)..(25): Xaa is A or G
  MOD_RES (26)..(27)..(28)..(29): Xaa is A or G or is absent
KASKAXXVPTKLSSLSILFFXXXXXXXXXLKVYPGMAVSE

SEQ ID NO: 45908 - protein, 33 aa, Artificial Sequence
  GFR-binding peptide
  MOD_RES (2)..(3): Xaa is C or S
AXXVPTKLSSLSILFFDKGVVTYLKVYPGMAVS

SEQ ID NO: 45909 - protein, 38 aa, Artificial Sequence
  GFR-binding peptide
  MOD_RES (2)..(3)..(37): Xaa is C or S
  MOD_RES (17)..(18)..(19)..(20)..(21): Xaa is A or G
  MOD_RES (22)..(23)..(24)..(25): Xaa is A or G or is absent
SXXVPARLSSLSILFFXXXXXXXXXLKVYPDMVVEAXG

SEQ ID NO: 45910 - protein, 38 aa, Artificial Sequence
  GFR-binding peptide
  MOD_RES (3)..(4)..(37): Xaa is C or S
  MOD_RES (18)..(19)..(20)..(21)..(22): Xaa is A or G
  MOD_RES (23)..(24)..(25)..(26): Xaa is A or G or is absent
SPXXVSQDLSSLSILFFXXXXXXXXXLKVYPMIVKSXK

SEQ ID NO: 45911 - protein, 40 aa, Artificial Sequence
  GFR-binding peptide
  MOD_RES (6)..(40): Xaa is C or S
  MOD_RES (20)..(21)..(22)..(23)..(24): Xaa is A or G
  MOD_RES (25)..(26)..(27)..(28): Xaa is A or G or is absent
VTKPTXAPTKLSSLSVLFFXXXXXXXXXLKVYPNMVVRSX

SEQ ID NO: 45912 - protein, 37 aa, Artificial Sequence
  GFR-binding peptide
  MOD_RES (1)..(2)..(34)..(36): Xaa is C or S
XXVPARLSSLSILFFDAANNVVLKVYPDMVVEAXGXR

SEQ ID NO: 45913 - protein, 44 aa, Artificial Sequence
  GFR-binding peptide
  MOD_RES (6)..(7)..(41)..(43): Xaa is C or S
  MOD_RES (21)..(22)..(23)..(24)..(25): Xaa is A or G
  MOD_RES (26)..(27)..(28)..(29): Xaa is A or G or is absent
KASKAXXVPTKLSSLSILFFXXXXXXXXXLKVYPGMAVSEXGXR

SEQ ID NO: 45914 - protein, 41 aa, Artificial Sequence
  GFR-binding peptide
  MOD_RES (3)..(4)..(38)..(40): Xaa is C or S
  MOD_RES (18)..(19)..(20)..(21)..(22): Xaa is A or G
  MOD_RES (23)..(24)..(25)..(26): Xaa is A or G or is absent
ASXXVPARLSSLSILFFXXXXXXXXXLKVYPDMVVEAXGXR

SEQ ID NO: 45915 - protein, 41 aa, Artificial Sequence
  GFR-binding peptide
  MOD_RES (6)..(7)..(39)..(41): Xaa is C or S
HVPKPXXAPTKLSSLSVLFFDDSSNVILKVYPNMVVRSXGX

SEQ ID NO: 45916 - protein, 40 aa, Artificial Sequence
  GFR-binding peptide
  MOD_RES (5)..(6)..(39): Xaa is C or S
  MOD_RES (20)..(21)..(22)..(23)..(24): Xaa is A or G
  MOD_RES (25)..(26)..(27)..(28): Xaa is A or G or is absent
VPSTXXAPVKTSSLSMLFFXXXXXXXXXLKVYPMIVEEXG

SEQ ID NO: 45917 - protein, 35 aa, Artificial Sequence
  GFR-binding peptide
  MOD_RES (1)..(2)..(34): Xaa is C or S
XXVPEKMSSLSILFFDENKNVVLKVYPNMTVESXA

SEQ ID NO: 45918 - protein, 39 aa, Artificial Sequence
  GFR-binding peptide
  MOD_RES (5)..(37)..(39): Xaa is C or S
TKPTXAPTKLSSLSVLFFDDSSNVILKVYPNMVVRSXGX

SEQ ID NO: 45919 - protein, 41 aa, Artificial Sequence
  GFR-binding peptide
  MOD_RES (6)..(7)..(39)..(41): Xaa is C or S
GSAGPXXTPTKMSSLSMLFFNDKQQIILKVYPGMVVDRXGX

SEQ ID NO: 45920 - protein, 33 aa, Artificial Sequence
  GFR-binding peptide
  MOD_RES (32)..(32): Xaa is C or S
VPTKLSSLSILFFDKGVVTYLKVYPGMAVSEXG

SEQ ID NO: 45921 - protein, 33 aa, Artificial Sequence
  GFR-binding peptide
  MOD_RES (32)..(32): Xaa is C or S
APTKLSSLSVLFFDDSSNVILKVYPNMVVRSXG

SEQ ID NO: 45922 - protein, 36 aa, Artificial Sequence
  GFR-binding peptide
  MOD_RES (34)..(36): Xaa is C or S
  MOD_RES (14)..(15)..(16)..(17)..(18): Xaa is A or G
  MOD_RES (19)..(20)..(21)..(22): Xaa is A or G or is absent
VPTEESSLSMLFFXXXXXXXXXLKVYPFLQHNKXEX

SEQ ID NO: 45923 - protein, 36 aa, Artificial Sequence
  GFR-binding peptide
  MOD_RES (1)..(2)..(34)..(36): Xaa is C or S
XXVPTRLSSLSILFFDSANNVVLKVYPDMVVESXGX

SEQ ID NO: 45924 - protein, 41 aa, Artificial Sequence
  GFR-binding peptide
  MOD_RES (6)..(7)..(40): Xaa is C or S
  MOD_RES (21)..(22)..(23)..(24)..(25): Xaa is A or G
  MOD_RES (26)..(27)..(28)..(29): Xaa is A or G or is absent
RVPSTXXAPVKTSSLSMLFFXXXXXXXXXLKVYPMIVEEXG

SEQ ID NO: 45925 - protein, 40 aa, Artificial Sequence
  GFR-binding peptide
  MOD_RES (6)..(7)..(40): Xaa is C or S
KVGKAXXVPTKLSSLSVLFFDDMGVPTLKVYPEGMSVAEX

SEQ ID NO: 45926 - protein, 37 aa, Artificial Sequence
  GFR-binding peptide
  MOD_RES (3)..(4): Xaa is C or S
  MOD_RES (18)..(19)..(20)..(21)..(22): Xaa is A or G
  MOD_RES (23)..(24)..(25)..(26): Xaa is A or G or is absent
KAXXAPTKLSSLSVLFFXXXXXXXXXLKVYPNMVVKA

SEQ ID NO: 45927 - protein, 33 aa, Artificial Sequence
  GFR-binding peptide
  MOD_RES (1)..(32): Xaa is C or S
XVSQDLSSLSILFFIGKTPKILKVYPMIVKSXK

SEQ ID NO: 45928 - protein, 40 aa, Artificial Sequence
  GFR-binding peptide
  MOD_RES (5)..(6)..(40): Xaa is C or S
  MOD_RES (20)..(21)..(22)..(23)..(24): Xaa is A or G
  MOD_RES (25)..(26)..(27)..(28): Xaa is A or G or is absent
VPKPXXAPTQLSSLSVLFFXXXXXXXXXLKVYPNMVVRAX

SEQ ID NO: 45929 - protein, 36 aa, Artificial Sequence
  GFR-binding peptide
  MOD_RES (34)..(36): Xaa is C or S
  MOD_RES (14)..(15)..(16)..(17)..(18): Xaa is A or G
  MOD_RES (19)..(20)..(21)..(22): Xaa is A or G or is absent
APTQLSSLSVLFFXXXXXXXXXLKVYPNMVVRAXGX

SEQ ID NO: 45930 - protein, 37 aa, Artificial Sequence
  GFR-binding peptide
  MOD_RES (1)..(35)..(37): Xaa is C or S
XVPTEESSLSMLFFRIKPHQGQHLKVYPFLQHNKXEX

SEQ ID NO: 45931 - protein, 31 aa, Artificial Sequence
  GFR-binding peptide
  MOD_RES (1)..(1): Xaa is C or S
XVPARLSSLSILFFDAANNVVLKVYPDMVVE

SEQ ID NO: 45932 - protein, 33 aa, Artificial Sequence
  GFR-binding peptide
  MOD_RES (14)..(15)..(16)..(17)..(18): Xaa is A or G
  MOD_RES (19)..(20)..(21)..(22): Xaa is A or G or is absent
APTKLSSLSVLFFXXXXXXXXXLKVYPNMVVRS

SEQ ID NO: 45933 - protein, 30 aa, Artificial Sequence; identical to SEQ ID NO: 660
  GFR-binding peptide

SEQ ID NO: 45934 - protein, 43 aa, Artificial Sequence
  GFR-binding peptide
  MOD_RES (6)..(7)..(41)..(43): Xaa is C or S
  MOD_RES (21)..(22)..(23)..(24)..(25): Xaa is A or G
  MOD_RES (26)..(27)..(28)..(29): Xaa is A or G or is absent
YVPKPXXAPTKLSSLSVLFFXXXXXXXXXLKVYPNMVVRSXGX

SEQ ID NO: 45935 - protein, 37 aa, Artificial Sequence
  GFR-binding peptide
  MOD_RES (2)..(3)..(37): Xaa is C or S
  MOD_RES (17)..(18)..(19)..(20)..(21): Xaa is A or G
  MOD_RES (22)..(23)..(24)..(25): Xaa is A or G or is absent
PXXAPTQLSSLSVLFFXXXXXXXXXLKVYPNMVVRAX

SEQ ID NO: 45936 - protein, 36 aa, Artificial Sequence
  GFR-binding peptide
  MOD_RES (3)..(4)..(36): Xaa is C or S
KAXXAPTKLSSLSVLFFDSSNNVILKVYPNMVVKAX

SEQ ID NO: 45937 - protein, 36 aa, Artificial Sequence
  GFR-binding peptide
  MOD_RES (2)..(3): Xaa is C or S
  MOD_RES (17)..(18)..(19)..(20)..(21): Xaa is A or G
  MOD_RES (22)..(23)..(24)..(25): Xaa is A or G or is absent
AXXVPTELSSLSMLFFXXXXXXXXXLKVYPEMVVEG

SEQ ID NO: 45938 - protein, 37 aa, Artificial Sequence
  GFR-binding peptide
  MOD_RES (3)..(4): Xaa is C or S
  MOD_RES (18)..(19)..(20)..(21)..(22): Xaa is A or G
  MOD_RES (23)..(24)..(25)..(26): Xaa is A or G or is absent
KPXXAPTKLSSLSVLFFXXXXXXXXXLKVYPNMVVRS

SEQ ID NO: 45939 - protein, 38 aa, Artificial Sequence
  GFR-binding peptide
  MOD_RES (2)..(36)..(38): Xaa is C or S
EXVPTEESSLSMLFFRIKPHQGQHLKVYPFLQHNKXEX

SEQ ID NO: 45940 - protein, 41 aa, Artificial Sequence
  GFR-binding peptide
  MOD_RES (4)..(38)..(40): Xaa is C or S
  MOD_RES (18)..(19)..(20)..(21)..(22): Xaa is A or G
  MOD_RES (23)..(24)..(25)..(26): Xaa is A or G or is absent
GLEXVPTEESSLSMLFFXXXXXXXXXLKVYPFLQHNKXEXR

SEQ ID NO: 45941 - protein, 36 aa, Artificial Sequence
  GFR-binding peptide
  MOD_RES (1)..(2)..(35): Xaa is C or S
  MOD_RES (16)..(17)..(18)..(19)..(20): Xaa is A or G
  MOD_RES (21)..(22)..(23)..(24): Xaa is A or G or is absent
XXVPQDLSSLSILFFXXXXXXXXXLKVYPMVVKSXK

SEQ ID NO: 45942 - protein, 34 aa, Artificial Sequence
  GFR-binding peptide
  MOD_RES (14)..(15)..(16)..(17)..(18): Xaa is A or G
  MOD_RES (19)..(20)..(21)..(22): Xaa is A or G or is absent
SRVHHSSLSVLFFXXXXXXXXXLKVYPRLEEHLE

SEQ ID NO: 45943 - protein, 39 aa, Artificial Sequence
  GFR-binding peptide
  MOD_RES (2)..(3)..(36)..(38): Xaa is C or S
  MOD_RES (17)..(18)..(19)..(20)..(21): Xaa is A or G
  MOD_RES (22)..(23)..(24)..(25): Xaa is A or G or is absent
TXXAPVKTSSLSMLFFXXXXXXXXXLKVYPMIVEEXGXL

SEQ ID NO: 45944 - protein, 38 aa, Artificial Sequence
  GFR-binding peptide
  MOD_RES (4)..(5)..(37): Xaa is C or S
PKPXXAPTKLSSLSVLFFDDSSNVILKVYPNMVVRSXG

SEQ ID NO: 45945 - protein, 34 aa, Artificial Sequence
  GFR-binding peptide
  MOD_RES (1)..(2): Xaa is C or S
  MOD_RES (16)..(17)..(18)..(19)..(20): Xaa is A or G
  MOD_RES (21)..(22)..(23)..(24): Xaa is A or G or is absent
XXAPTQLSSLSVLFFXXXXXXXXXLKVYPNMVVR

SEQ ID NO: 45946 - protein, 39 aa, Artificial Sequence
  GFR-binding peptide
  MOD_RES (1)..(2)..(36)..(38): Xaa is C or S
  MOD_RES (16)..(17)..(18)..(19)..(20): Xaa is A or G
  MOD_RES (21)..(22)..(23)..(24): Xaa is A or G or is absent
XXAPTKLSSLSVLFFXXXXXXXXXLKVYPNMVVKAXGXH

SEQ ID NO: 45947 - protein, 41 aa, Artificial Sequence
  GFR-binding peptide
  MOD_RES (6)..(40): Xaa is C or S
DEGLEXVPTEESSLSMLFFRIKPHQGQHLKVYPFLQHNKXE

SEQ ID NO: 45948 - protein, 37 aa, Artificial Sequence
  GFR-binding peptide
  MOD_RES (34)..(36): Xaa is C or S
  MOD_RES (14)..(15)..(16)..(17)..(18): Xaa is A or G
  MOD_RES (19)..(20)..(21)..(22): Xaa is A or G or is absent
APTQLSSLSVLFFXXXXXXXXXLKVYPNMVVRAXGXH

SEQ ID NO: 45949 - protein, 36 aa, Artificial Sequence
  GFR-binding peptide
  MOD_RES (1)..(2)..(36): Xaa is C or S
  MOD_RES (16)..(17)..(18)..(19)..(20): Xaa is A or G
  MOD_RES (21)..(22)..(23)..(24): Xaa is A or G or is absent
XXVPTELSSLSMLFFXXXXXXXXXLKVYPEMVVEGX

SEQ ID NO: 45950 - protein, 39 aa, Artificial Sequence
  GFR-binding peptide
  MOD_RES (3)..(4)..(36)..(38): Xaa is C or S
ASXXVPARLSSLSILFFDAANNVVLKVYPDMVVEAXGXR

SEQ ID NO: 45951 - protein, 31 aa, Artificial Sequence
  GFR-binding peptide
  MOD_RES (31)..(31): Xaa is C or S
VPQALSSLSILFFVGRKPKVLKVYPMIVRSX

SEQ ID NO: 45952 - protein, 38 aa, Artificial Sequence
  GFR-binding peptide
  MOD_RES (2)..(3)..(37): Xaa is C or S
  MOD_RES (17)..(18)..(19)..(20)..(21): Xaa is A or G
  MOD_RES (22)..(23)..(24)..(25): Xaa is A or G or is absent
AXXVPTKLSSLSILFFXXXXXXXXXLKVYPGMAVSEXG

SEQ ID NO: 45953 - protein, 35 aa, Artificial Sequence
  GFR-binding peptide
  MOD_RES (1)..(2): Xaa is C or S
  MOD_RES (16)..(17)..(18)..(19)..(20): Xaa is A or G
  MOD_RES (21)..(22)..(23)..(24): Xaa is A or G or is absent
XXTPTKMSSLSMLFFXXXXXXXXXLKVYPGMVVDR

SEQ ID NO: 45954 - protein, 39 aa, Artificial Sequence
  GFR-binding peptide
  MOD_RES (3)..(4)..(37)..(39): Xaa is C or S
  MOD_RES (18)..(19)..(20)..(21)..(22): Xaa is A or G
  MOD_RES (23)..(24)..(25)..(26): Xaa is A or G or is absent
SPXXVPQDLSSLSILFFXXXXXXXXXLKVYPMVVKSXKX

SEQ ID NO: 45955 - protein, 35 aa, Artificial Sequence
  GFR-binding peptide
  MOD_RES (1)..(35): Xaa is C or S
  MOD_RES (15)..(16)..(17)..(18)..(19): Xaa is A or G
  MOD_RES (20)..(21)..(22)..(23): Xaa is A or G or is absent
XVPTELSSLSMLFFXXXXXXXXXLKVYPEMVVEGX

SEQ ID NO: 45956 - protein, 38 aa, Artificial Sequence
  GFR-binding peptide
  MOD_RES (4)..(5): Xaa is C or S
  MOD_RES (19)..(20)..(21)..(22)..(23): Xaa is A or G
  MOD_RES (24)..(25)..(26)..(27): Xaa is A or G or is absent
SKAXXVPTKLSSLSILFFXXXXXXXXXLKVYPGMAVSE

SEQ ID NO: 45957 - protein, 40 aa, Artificial Sequence
  GFR-binding peptide
  MOD_RES (5)..(6)..(40): Xaa is C or S
  MOD_RES (20)..(21)..(22)..(23)..(24): Xaa is A or G
  MOD_RES (25)..(26)..(27)..(28): Xaa is A or G or is absent
IPEPXXVPEKMSSLSILFFXXXXXXXXXLKVYPNMTVESX

SEQ ID NO: 45958 - protein, 36 aa, Artificial Sequence
  GFR-binding peptide
  MOD_RES (3)..(4): Xaa is C or S
  MOD_RES (18)..(19)..(20)..(21)..(22): Xaa is A or G
  MOD_RES (23)..(24)..(25)..(26): Xaa is A or G or is absent
KPXXAPTKLSSLSVLFFXXXXXXXXXLKVYPNMVVR

SEQ ID NO: 45959 - protein, 39 aa, Artificial Sequence
  GFR-binding peptide
  MOD_RES (4)..(5)..(39): Xaa is C or S
  MOD_RES (19)..(20)..(21)..(22)..(23): Xaa is A or G
  MOD_RES (24)..(25)..(26)..(27): Xaa is A or G or is absent
PASXXVPARLSSLSILFFXXXXXXXXXLKVYPDMVVEAX

SEQ ID NO: 45960 - protein, 33 aa, Artificial Sequence
  GFR-binding peptide
  MOD_RES (1)..(33): Xaa is C or S
XAPTKLSSLSVLFFDSSNNVILKVYPNMVVKAX

SEQ ID NO: 45961 - protein, 31 aa, Artificial Sequence
  GFR-binding peptide
APTKLSSLSVLFFDSSNNVILKVYPNMVVKA

SEQ ID NO: 45962 - protein, 38 aa, Artificial Sequence
  GFR-binding peptide
  MOD_RES (5)..(6)..(37): Xaa is C or S
SASPXXVSQDLSSLSILFFIGKTPKILKVYPMIVKSXK

SEQ ID NO: 45963 - protein, 36 aa, Artificial Sequence
  GFR-binding peptide
  MOD_RES (3)..(4): Xaa is C or S
  MOD_RES (18)..(19)..(20)..(21)..(22): Xaa is A or G
  MOD_RES (23)..(24)..(25)..(26): Xaa is A or G or is absent
ASXXVPARLSSLSILFFXXXXXXXXXLKVYPDMVVE

SEQ ID NO: 45964 - protein, 40 aa, Artificial Sequence
  GFR-binding peptide
  MOD_RES (2)..(3)..(37)..(39): Xaa is C or S
  MOD_RES (17)..(18)..(19)..(20)..(21): Xaa is A or G
  MOD_RES (22)..(23)..(24)..(25): Xaa is A or G or is absent
AXXVPTELSSLSMLFFXXXXXXXXXLKVYPEMVVEGXGXR

SEQ ID NO: 45965 - protein, 31 aa, Artificial Sequence
  GFR-binding peptide
VPEKMSSLSILFFDENKNVVLKVYPNMTVES

SEQ ID NO: 45966 - protein, 36 aa, Artificial Sequence
  GFR-binding peptide
  MOD_RES (5)..(6): Xaa is C or S
SAGPXXTPTKMSSLSMLFFNDKQQIILKVYPGMVVD

SEQ ID NO: 45967 - protein, 39 aa, Artificial Sequence
  GFR-binding peptide
  MOD_RES (5)..(6)..(39): Xaa is C or S
  MOD_RES (20)..(21)..(22)..(23)..(24): Xaa is A or G
  MOD_RES (25)..(26)..(27)..(28): Xaa is A or G or is absent
VPSTXXAPVKTSSLSMLFFXXXXXXXXXLKVYPMIVEEX

SEQ ID NO: 45968 - protein, 35 aa, Artificial Sequence
  GFR-binding peptide
  MOD_RES (1)..(35): Xaa is C or S
  MOD_RES (15)..(16)..(17)..(18)..(19): Xaa is A or G
  MOD_RES (20)..(21)..(22)..(23): Xaa is A or G or is absent
XVPTKLSSLSILFFXXXXXXXXXLKVYPGMAVSEX

SEQ ID NO: 45969 - protein, 41 aa, Artificial Sequence
  GFR-binding peptide
  MOD_RES (6)..(7)..(41): Xaa is C or S
  MOD_RES (21)..(22)..(23)..(24)..(25): Xaa is A or G
  MOD_RES (26)..(27)..(28)..(29): Xaa is A or G or is absent
KASKAXXVPTKLSSLSILFFXXXXXXXXXLKVYPGMAVSEX

SEQ ID NO: 45970 - protein, 43 aa, Artificial Sequence
  GFR-binding peptide
  MOD_RES (5)..(6)..(40)..(42): Xaa is C or S
  MOD_RES (20)..(21)..(22)..(23)..(24): Xaa is A or G
  MOD_RES (25)..(26)..(27)..(28): Xaa is A or G or is absent
SAGPXXTPTKMSSLSMLFFXXXXXXXXXLKVYPGMVVDRXGXS

SEQ ID NO: 45971 - protein, 39 aa, Artificial Sequence
  GFR-binding peptide
  MOD_RES (1)..(38): Xaa is C or S
XQPSRVHHSSLSVLFFEYVRKKPKLLKVYPRLEEHLEXA

SEQ ID NO: 45972 - protein, 39 aa, Artificial Sequence
  GFR-binding peptide
  MOD_RES (2)..(3)..(36)..(38): Xaa is C or S
  MOD_RES (17)..(18)..(19)..(20)..(21): Xaa is A or G
  MOD_RES (22)..(23)..(24)..(25): Xaa is A or G or is absent
PXXVSQDLSSLSILFFXXXXXXXXXLKVYPMIVKSXKXS

SEQ ID NO: 45973 - protein, 39 aa, Artificial Sequence
  GFR-binding peptide
  MOD_RES (6)..(7)..(39): Xaa is C or S
AAPASXXVPARLSSLSILFFDAANNVVLKVYPDMVVEAX

SEQ ID NO: 45974 - protein, 37 aa, Artificial Sequence
  GFR-binding peptide
  MOD_RES (2)..(3)..(36): Xaa is C or S
  MOD_RES (17)..(18)..(19)..(20)..(21): Xaa is A or G
  MOD_RES (22)..(23)..(24)..(25): Xaa is A or G or is absent
TXXAPVKTSSLSMLFFXXXXXXXXXLKVYPMIVEEXG

SEQ ID NO: 45975 - protein, 34 aa, Artificial Sequence
  GFR-binding peptide
  MOD_RES (32)..(34): Xaa is C or S
VPTRLSSLSILFFDSANNVVLKVYPDMVVESXGX

SEQ ID NO: 45976 - protein, 37 aa, Artificial Sequence
  GFR-binding peptide
  MOD_RES (5)..(6): Xaa is C or S
VPKAXXAPTKLSSLSVLFFDSSNNVILKVYPNMVVKA

SEQ ID NO: 45977 - protein, 39 aa, Artificial Sequence
  GFR-binding peptide
  MOD_RES (3)..(4)..(38): Xaa is C or S
  MOD_RES (18)..(19)..(20)..(21)..(22): Xaa is A or G
  MOD_RES (23)..(24)..(25)..(26): Xaa is A or G or is absent
ASXXVPARLSSLSILFFXXXXXXXXXLKVYPDMVVEAXG

SEQ ID NO: 45978 - protein, 37 aa, Artificial Sequence
  GFR-binding peptide
  MOD_RES (1)..(34)..(36): Xaa is C or S
  MOD_RES (15)..(16)..(17)..(18)..(19): Xaa is A or G
  MOD_RES (20)..(21)..(22)..(23): Xaa is A or G or is absent
XVPQALSSLSILFFXXXXXXXXXLKVYPMIVRSXKXS

SEQ ID NO: 45979 - protein, 38 aa, Artificial Sequence
  GFR-binding peptide
  MOD_RES (2)..(3)..(35)..(37): Xaa is C or S
AXXAPTKLSSLSVLFFDSSNNVILKVYPNMVVKAXGXH

SEQ ID NO: 45980 - protein, 37 aa, Artificial Sequence
  GFR-binding peptide
  MOD_RES (3)..(4)..(37): Xaa is C or S
  MOD_RES (18)..(19)..(20)..(21)..(22): Xaa is A or G
  MOD_RES (23)..(24)..(25)..(26): Xaa is A or G or is absent
SPXXVSQDLSSLSILFFXXXXXXXXXLKVYPMIVKSX

SEQ ID NO: 45981 - protein, 36 aa, Artificial Sequence
  GFR-binding peptide
  MOD_RES (36)..(36): Xaa is C or S
  MOD_RES (15)..(16)..(17)..(18)..(19): Xaa is A or G
  MOD_RES (20)..(21)..(22)..(23): Xaa is A or G or is absent
PSRVHHSSLSVLFFXXXXXXXXXLKVYPRLEEHLEX

SEQ ID NO: 45982 - protein, 42 aa, Artificial Sequence
  GFR-binding peptide
  MOD_RES (5)..(6)..(39)..(41): Xaa is C or S
  MOD_RES (20)..(21)..(22)..(23)..(24): Xaa is A or G
  MOD_RES (25)..(26)..(27)..(28): Xaa is A or G or is absent
SASPXXVSQDLSSLSILFFXXXXXXXXXLKVYPMIVKSXKXS

SEQ ID NO: 45983 - protein, 38 aa, Artificial Sequence
  GFR-binding peptide
  MOD_RES (2)..(3)..(36)..(38): Xaa is C or S
  MOD_RES (17)..(18)..(19)..(20)..(21): Xaa is A or G
  MOD_RES (22)..(23)..(24)..(25): Xaa is A or G or is absent
PXXVPQALSSLSILFFXXXXXXXXXLKVYPMIVRSXKX

SEQ ID NO: 45984 - protein, 39 aa, Artificial Sequence
  GFR-binding peptide
  MOD_RES (6)..(7)..(39): Xaa is C or S
YVPKPXXAPTKLSSLSVLFFDDSSNVILKVYPNMVVRSX

SEQ ID NO: 45985 - protein, 32 aa, Artificial Sequence
  GFR-binding peptide
  MOD_RES (32)..(32): Xaa is C or S
VPTKLSSLSILFFDKGVVTYLKVYPGMAVSEX

SEQ ID NO: 45986 - protein, 32 aa, Artificial Sequence
  GFR-binding peptide
  MOD_RES (1)..(2): Xaa is C or S
XXVPTRLSSLSILFFDSANNVVLKVYPDMVVE

SEQ ID NO: 45987 - protein, 35 aa, Artificial Sequence
  GFR-binding peptide
QPSRVHHSSLSVLFFEYVRKKPKLLKVYPRLEEHL

SEQ ID NO: 45988 - protein, 42 aa, Artificial Sequence
  GFR-binding peptide
  MOD_RES (4)..(5)..(39)..(41): Xaa is C or S
  MOD_RES (19)..(20)..(21)..(22)..(23): Xaa is A or G
  MOD_RES (24)..(25)..(26)..(27): Xaa is A or G or is absent
AGPXXTPTKMSSLSMLFFXXXXXXXXXLKVYPGMVVDRXGXS

SEQ ID NO: 45989 - protein, 38 aa, Artificial Sequence
  GFR-binding peptide
  MOD_RES (5)..(6): Xaa is C or S
  MOD_RES (20)..(21)..(22)..(23)..(24): Xaa is A or G
  MOD_RES (25)..(26)..(27)..(28): Xaa is A or G or is absent
SASPXXVSQDLSSLSILFFXXXXXXXXXLKVYPMIVKS

SEQ ID NO: 45990 - protein, 43 aa, Artificial Sequence
  GFR-binding peptide
  MOD_RES (6)..(40)..(42): Xaa is C or S
DEGLEXVPTEESSLSMLFFRIKPHQGQHLKVYPFLQHNKXEXR

SEQ ID NO: 45991 - protein, 34 aa, Artificial Sequence
  GFR-binding peptide
  MOD_RES (1)..(2): Xaa is C or S
  MOD_RES (16)..(17)..(18)..(19)..(20): Xaa is A or G
  MOD_RES (21)..(22)..(23)..(24): Xaa is A or G or is absent
XXVPQALSSLSILFFXXXXXXXXXLKVYPMIVRS

SEQ ID NO: 45992 - protein, 34 aa, Artificial Sequence
  GFR-binding peptide
  MOD_RES (33)..(33): Xaa is C or S
  MOD_RES (14)..(15)..(16)..(17)..(18): Xaa is A or G
  MOD_RES (19)..(20)..(21)..(22): Xaa is A or G or is absent
APVKTSSLSMLFFXXXXXXXXXLKVYPMIVEEXG

SEQ ID NO: 45993 - protein, 34 aa, Artificial Sequence
  GFR-binding peptide
  MOD_RES (3)..(4): Xaa is C or S
GPXXTPTKMSSLSMLFFNDKQQIILKVYPGMVVD

SEQ ID NO: 45994 - protein, 39 aa, Artificial Sequence
  GFR-binding peptide
  MOD_RES (4)..(5)..(39): Xaa is C or S
  MOD_RES (19)..(20)..(21)..(22)..(23): Xaa is A or G
  MOD_RES (24)..(25)..(26)..(27): Xaa is A or G or is absent
PKPXXAPTQLSSLSVLFFXXXXXXXXXLKVYPNMVVRAX

SEQ ID NO: 45995 - protein, 38 aa, Artificial Sequence
  GFR-binding peptide
  MOD_RES (4)..(5)..(38): Xaa is C or S
  MOD_RES (19)..(20)..(21)..(22)..(23): Xaa is A or G
  MOD_RES (24)..(25)..(26)..(27): Xaa is A or G or is absent
AAPXXVPQALSSLSILFFXXXXXXXXXLKVYPMIVRSX

SEQ ID NO: 45996 - protein, 43 aa, Artificial Sequence
  GFR-binding peptide
  MOD_RES (6)..(7)..(41)..(43): Xaa is C or S
  MOD_RES (21)..(22)..(23)..(24)..(25): Xaa is A or G
  MOD_RES (26)..(27)..(28)..(29): Xaa is A or G or is absent
SIPKAXXVPTELSSLSMLFFXXXXXXXXXLKVYPEMVVEGXGX

SEQ ID NO: 45997 - protein, 38 aa, Artificial Sequence
  GFR-binding peptide
  MOD_RES (5)..(6): Xaa is C or S
  MOD_RES (20)..(21)..(22)..(23)..(24): Xaa is A or G
  MOD_RES (25)..(26)..(27)..(28): Xaa is A or G or is absent
SAGPXXTPTKMSSLSMLFFXXXXXXXXXLKVYPGMVVD

SEQ ID NO: 45998 - protein, 39 aa, Artificial Sequence
  GFR-binding peptide
  MOD_RES (6)..(7): Xaa is C or S
  MOD_RES (21)..(22)..(23)..(24)..(25): Xaa is A or G
  MOD_RES (26)..(27)..(28)..(29): Xaa is A or G or is absent
RVPSTXXAPVKTSSLSMLFFXXXXXXXXXLKVYPMIVEE

SEQ ID NO: 45999 - protein, 40 aa, Artificial Sequence
  GFR-binding peptide
  MOD_RES (6)..(7)..(39): Xaa is C or S
HVPKPXXAPTKLSSLSVLFFDDSSNVILKVYPNMVVRSXG

SEQ ID NO: 46000 - protein, 38 aa, Artificial Sequence
  GFR-binding peptide
  MOD_RES (3)..(4)..(38): Xaa is C or S
  MOD_RES (18)..(19)..(20)..(21)..(22): Xaa is A or G
  MOD_RES (23)..(24)..(25)..(26): Xaa is A or G or is absent
PTXXVPTRLSSLSILFFXXXXXXXXXLKVYPDMVVESX

SEQ ID NO: 46001 - protein, 35 aa, Artificial Sequence
  GFR-binding peptide
  MOD_RES (1)..(2)..(34): Xaa is C or S
XXTPTKMSSLSMLFFNDKQQIILKVYPGMVVDRXG

SEQ ID NO: 46002 - protein, 37 aa, Artificial Sequence
  GFR-binding peptide
  MOD_RES (4)..(5)..(37): Xaa is C or S
AGPXXTPTKMSSLSMLFFNDKQQIILKVYPGMVVDRX

SEQ ID NO: 46003 - protein, 39 aa, Artificial Sequence
  GFR-binding peptide
  MOD_RES (3)..(4)..(36)..(38): Xaa is C or S
KAXXVPTKLSSLSILFFDKGVVTYLKVYPGMAVSEXGXR

SEQ ID NO: 46004 - protein, 36 aa, Artificial Sequence
  GFR-binding peptide
  MOD_RES (5)..(6): Xaa is C or S
APASXXVPARLSSLSILFFDAANNVVLKVYPDMVVE

SEQ ID NO: 46005 - protein, 37 aa, Artificial Sequence
  GFR-binding peptide
  MOD_RES (34)..(36): Xaa is C or S
VPTEESSLSMLFFRIKPHQGQHLKVYPFLQHNKXEXR

SEQ ID NO: 46006 - protein, 35 aa, Artificial Sequence
  GFR-binding peptide
  MOD_RES (35)..(35): Xaa is C or S
  MOD_RES (14)..(15)..(16)..(17)..(18): Xaa is A or G
  MOD_RES (19)..(20)..(21)..(22): Xaa is A or G or is absent
VPTKLSSLSVLFFXXXXXXXXXLKVYPEGMSVAEX

SEQ ID NO: 46007 - protein, 33 aa, Artificial Sequence
  GFR-binding peptide
  MOD_RES (14)..(15)..(16)..(17)..(18): Xaa is A or G
  MOD_RES (19)..(20)..(21)..(22): Xaa is A or G or is absent
SRVHHSSLSVLFFXXXXXXXXXLKVYPRLEEHL

SEQ ID NO: 46008 - protein, 41 aa, Artificial Sequence
  GFR-binding peptide
  MOD_RES (5)..(6)..(38)..(40): Xaa is C or S
TPPTXXVPTRLSSLSILFFDSANNVVLKVYPDMVVESXGXR

SEQ ID NO: 46009 - protein, 39 aa, Artificial Sequence
  GFR-binding peptide
  MOD_RES (6)..(38): Xaa is C or S
VTKPTXAPTKLSSLSVLFFDDSSNVILKVYPNMVVRSXG

SEQ ID NO: 46010 - protein, 38 aa, Artificial Sequence
  GFR-binding peptide
  MOD_RES (3)..(4)..(38): Xaa is C or S
  MOD_RES (18)..(19)..(20)..(21)..(22): Xaa is A or G
  MOD_RES (23)..(24)..(25)..(26): Xaa is A or G or is absent
KAXXAPTKLSSLSVLFFXXXXXXXXXLKVYPNMVVKAX

SEQ ID NO: 46011 - protein, 43 aa, Artificial Sequence
  GFR-binding peptide
  MOD_RES (6)..(7)..(42): Xaa is C or S
  MOD_RES (21)..(22)..(23)..(24)..(25): Xaa is A or G
  MOD_RES (26)..(27)..(28)..(29): Xaa is A or G or is absent
KVGKAXXVPTKLSSLSVLFFXXXXXXXXXLKVYPEGMSVAEXG

SEQ ID NO: 46012 - protein, 33 aa, Artificial Sequence
  GFR-binding peptide
  MOD_RES (1)..(33): Xaa is C or S
XVPEKMSSLSILFFDENKNVVLKVYPNMTVESX

SEQ ID NO: 46013 - protein, 40 aa, Artificial Sequence
  GFR-binding peptide
  MOD_RES (6)..(7)..(39): Xaa is C or S
STPPTXXVPTRLSSLSILFFDSANNVVLKVYPDMVVESXG

SEQ ID NO: 46014 - protein, 40 aa, Artificial Sequence
  GFR-binding peptide
  MOD_RES (6)..(7)..(39): Xaa is C or S
TVPKPXXAPTQLSSLSVLFFDDSSNVILKVYPNMVVRAXG

SEQ ID NO: 46015 - protein, 37 aa, Artificial Sequence
  GFR-binding peptide
  MOD_RES (5)..(6): Xaa is C or S
APASXXVPARLSSLSILFFDAANNVVLKVYPDMVVEA

SEQ ID NO: 46016 - protein, 40 aa, Artificial Sequence
  GFR-binding peptide
  MOD_RES (3)..(4)..(37)..(39): Xaa is C or S
  MOD_RES (18)..(19)..(20)..(21)..(22): Xaa is A or G
  MOD_RES (23)..(24)..(25)..(26): Xaa is A or G or is absent
STXXAPVKTSSLSMLFFXXXXXXXXXLKVYPMIVEEXGXL

SEQ ID NO: 46017 - protein, 40 aa, Artificial Sequence
  GFR-binding peptide
  MOD_RES (2)..(39): Xaa is C or S
  MOD_RES (18)..(19)..(20)..(21)..(22): Xaa is A or G
  MOD_RES (23)..(24)..(25)..(26): Xaa is A or G or is absent
KXQPSRVHHSSLSVLFFXXXXXXXXXLKVYPRLEEHLEXA

SEQ ID NO: 46018 - protein, 40 aa, Artificial Sequence
  GFR-binding peptide
  MOD_RES (6)..(38)..(40): Xaa is C or S
VTKPTXAPTKLSSLSVLFFDDSSNVILKVYPNMVVRSXGX

SEQ ID NO: 46019 - protein, 38 aa, Artificial Sequence
  GFR-binding peptide
  MOD_RES (4)..(5)..(37): Xaa is C or S
PASXXVPARLSSLSILFFDAANNVVLKVYPDMVVEAXG

SEQ ID NO: 46020 - protein, 38 aa, Artificial Sequence
  GFR-binding peptide
  MOD_RES (4)..(5)..(37): Xaa is C or S
AGPXXTPTKMSSLSMLFFNDKQQIILKVYPGMVVDRXG

SEQ ID NO: 46021 - protein, 39 aa, Artificial Sequence
  GFR-binding peptide
  MOD_RES (4)..(38): Xaa is C or S
GLEXVPTEESSLSMLFFRIKPHQGQHLKVYPFLQHNKXE

SEQ ID NO: 46022 - protein, 37 aa, Artificial Sequence
  GFR-binding peptide
  MOD_RES (3)..(4)..(36): Xaa is C or S
GPXXTPTKMSSLSMLFFNDKQQIILKVYPGMVVDRXG

SEQ ID NO: 46023 - protein, 37 aa, Artificial Sequence
  GFR-binding peptide
  MOD_RES (4)..(4): Xaa is C or S
  MOD_RES (18)..(19)..(20)..(21)..(22): Xaa is A or G
  MOD_RES (23)..(24)..(25)..(26): Xaa is A or G or is absent
GLEXVPTEESSLSMLFFXXXXXXXXXLKVYPFLQHNK

SEQ ID NO: 46024 - protein, 33 aa, Artificial Sequence
  GFR-binding peptide
  MOD_RES (1)..(1): Xaa is C or S
  MOD_RES (15)..(16)..(17)..(18)..(19): Xaa is A or G
  MOD_RES (20)..(21)..(22)..(23): Xaa is A or G or is absent
XVPARLSSLSILFFXXXXXXXXXLKVYPDMVVE

SEQ ID NO: 46025 - protein, 33 aa, Artificial Sequence
  GFR-binding peptide
PSRVHHSSLSVLFFEYVRKKPKLLKVYPRLEEH

SEQ ID NO: 46026 - protein, 32 aa, Artificial Sequence
  GFR-binding peptide
  MOD_RES (1)..(32): Xaa is C or S
XVPQDLSSLSILFFVGRTPKVLKVYPMVVKSX

SEQ ID NO: 46027 - protein, 38 aa, Artificial Sequence
  GFR-binding peptide
  MOD_RES (1)..(35)..(37): Xaa is C or S
  MOD_RES (15)..(16)..(17)..(18)..(19): Xaa is A or G
  MOD_RES (20)..(21)..(22)..(23): Xaa is A or G or is absent
XAPTKLSSLSVLFFXXXXXXXXXLKVYPNMVVRSXGXH

SEQ ID NO: 46028 - protein, 39 aa, Artificial Sequence
  GFR-binding peptide
  MOD_RES (3)..(4)..(37)..(39): Xaa is C or S
KAXXVPTKLSSLSVLFFDDMGVPTLKVYPEGMSVAEXGX

SEQ ID NO: 46029 - protein, 38 aa, Artificial Sequence
  GFR-binding peptide
  MOD_RES (1)..(2)..(35)..(37): Xaa is C or S
  MOD_RES (16)..(17)..(18)..(19)..(20): Xaa is A or G
  MOD_RES (21)..(22)..(23)..(24): Xaa is A or G or is absent
XXVPQDLSSLSILFFXXXXXXXXXLKVYPMVVKSXKXS

SEQ ID NO: 46030 - protein, 36 aa, Artificial Sequence
  GFR-binding peptide
  MOD_RES (1)..(2)..(36): Xaa is C or S
  MOD_RES (16)..(17)..(18)..(19)..(20): Xaa is A or G
  MOD_RES (21)..(22)..(23)..(24): Xaa is A or G or is absent
XXAPTKLSSLSVLFFXXXXXXXXXLKVYPNMVVRSX

SEQ ID NO: 46031 - protein, 39 aa, Artificial Sequence
  GFR-binding peptide
  MOD_RES (4)..(5)..(37)..(39): Xaa is C or S
PPTXXVPTRLSSLSILFFDSANNVVLKVYPDMVVESXGX

SEQ ID NO: 46032 - protein, 37 aa, Artificial Sequence
  GFR-binding peptide
  MOD_RES (2)..(3)..(35)..(37): Xaa is C or S
PXXTPTKMSSLSMLFFNDKQQIILKVYPGMVVDRXGX

SEQ ID NO: 46033 - protein, 38 aa, Artificial Sequence
  GFR-binding peptide
  MOD_RES (3)..(4)..(36)..(38): Xaa is C or S
KPXXAPTQLSSLSVLFFDDSSNVILKVYPNMVVRAXGX

SEQ ID NO: 46034 - protein, 38 aa, Artificial Sequence
  GFR-binding peptide
  MOD_RES (5)..(6): Xaa is C or S
  MOD_RES (20)..(21)..(22)..(23)..(24): Xaa is A or G
  MOD_RES (25)..(26)..(27)..(28): Xaa is A or G or is absent
IPEPXXVPEKMSSLSILFFXXXXXXXXXLKVYPNMTVE

SEQ ID NO: 46035 - protein, 44 aa, Artificial Sequence
  GFR-binding peptide
  MOD_RES (5)..(42)..(44): Xaa is C or S
  MOD_RES (21)..(22)..(23)..(24)..(25): Xaa is A or G
  MOD_RES (26)..(27)..(28)..(29): Xaa is A or G or is absent
SSVKXQPSRVHHSSLSVLFFXXXXXXXXXLKVYPRLEEHLEXAX

SEQ ID NO: 46036 - protein, 31 aa, Artificial Sequence
  GFR-binding peptide
  MOD_RES (31)..(31): Xaa is C or S
VSQDLSSLSILFFIGKTPKILKVYPMIVKSX

SEQ ID NO: 46037 - protein, 36 aa, Artificial Sequence
  GFR-binding peptide
  MOD_RES (2)..(3)..(35): Xaa is C or S
AXXAPTKLSSLSVLFFDSSNNVILKVYPNMVVKAXG

SEQ ID NO: 46038 - protein, 37 aa, Artificial Sequence
  GFR-binding peptide
  MOD_RES (4)..(5)..(37): Xaa is C or S
PEPXXVPEKMSSLSILFFDENKNVVLKVYPNMTVESX

SEQ ID NO: 46039 - protein, 42 aa, Artificial Sequence
  GFR-binding peptide
  MOD_RES (4)..(41): Xaa is C or S
  MOD_RES (20)..(21)..(22)..(23)..(24): Xaa is A or G
  MOD_RES (25)..(26)..(27)..(28): Xaa is A or G or is absent
SVKXQPSRVHHSSLSVLFFXXXXXXXXXLKVYPRLEEHLEXA

SEQ ID NO: 46040 - protein, 34 aa, Artificial Sequence
  GFR-binding peptide
  MOD_RES (31)..(33): Xaa is C or S
VSQDLSSLSILFFIGKTPKILKVYPMIVKSXKXS

SEQ ID NO: 46041 - protein, 41 aa, Artificial Sequence
  GFR-binding peptide
  MOD_RES (6)..(7)..(39)..(41): Xaa is C or S
GIPEPXXVPEKMSSLSILFFDENKNVVLKVYPNMTVESXAX

SEQ ID NO: 46042 - protein, 38 aa, Artificial Sequence
  GFR-binding peptide
  MOD_RES (5)..(5): Xaa is C or S
  MOD_RES (19)..(20)..(21)..(22)..(23): Xaa is A or G
  MOD_RES (24)..(25)..(26)..(27): Xaa is A or G or is absent
EGLEXVPTEESSLSMLFFXXXXXXXXXLKVYPFLQHNK

SEQ ID NO: 46043 - protein, 39 aa, Artificial Sequence
  GFR-binding peptide
  MOD_RES (5)..(6): Xaa is C or S
  MOD_RES (20)..(21)..(22)..(23)..(24): Xaa is A or G
  MOD_RES (25)..(26)..(27)..(28): Xaa is A or G or is absent
ASKAXXVPTKLSSLSILFFXXXXXXXXXLKVYPGMAVSE

SEQ ID NO: 46044 - protein, 33 aa, Artificial Sequence
  GFR-binding peptide
  MOD_RES (2)..(3): Xaa is C or S
SXXVPARLSSLSILFFDAANNVVLKVYPDMVVE

SEQ ID NO: 46045 - protein, 36 aa, Artificial Sequence
  GFR-binding peptide
  MOD_RES (3)..(4)..(36): Xaa is C or S
KAXXVPTKLSSLSILFFDKGVVTYLKVYPGMAVSEX

SEQ ID NO: 46046 - protein, 38 aa, Artificial Sequence
  GFR-binding peptide
  MOD_RES (5)..(6)..(37): Xaa is C or S
SASPXXVPQDLSSLSILFFVGRTPKVLKVYPMVVKSXK

SEQ ID NO: 46047 - protein, 35 aa, Artificial Sequence
  GFR-binding peptide
  MOD_RES (32)..(34): Xaa is C or S
VPTRLSSLSILFFDSANNVVLKVYPDMVVESXGXR

SEQ ID NO: 46048 - protein, 38 aa, Artificial Sequence
  GFR-binding peptide
  MOD_RES (4)..(5)..(36)..(38): Xaa is C or S
ASPXXVSQDLSSLSILFFIGKTPKILKVYPMIVKSXKX

SEQ ID NO: 46049 - protein, 42 aa, Artificial Sequence
  GFR-binding peptide
  MOD_RES (5)..(6)..(39)..(41): Xaa is C or S
  MOD_RES (20)..(21)..(22)..(23)..(24): Xaa is A or G
  MOD_RES (25)..(26)..(27)..(28): Xaa is A or G or is absent
SASPXXVPQDLSSLSILFFXXXXXXXXXLKVYPMVVKSXKXS

SEQ ID NO: 46050 - protein, 38 aa, Artificial Sequence
  GFR-binding peptide
  MOD_RES (1)..(35)..(37): Xaa is C or S
  MOD_RES (15)..(16)..(17)..(18)..(19): Xaa is A or G
  MOD_RES (20)..(21)..(22)..(23): Xaa is A or G or is absent
XVPTRLSSLSILFFXXXXXXXXXLKVYPDMVVESXGXR

SEQ ID NO: 46051 - protein, 41 aa, Artificial Sequence
  GFR-binding peptide
  MOD_RES (5)..(6)..(41): Xaa is C or S
  MOD_RES (20)..(21)..(22)..(23)..(24): Xaa is A or G
  MOD_RES (25)..(26)..(27)..(28): Xaa is A or G or is absent
VGKAXXVPTKLSSLSVLFFXXXXXXXXXLKVYPEGMSVAEX

SEQ ID NO: 46052 - protein, 42 aa, Artificial Sequence
  GFR-binding peptide
  MOD_RES (7)..(41): Xaa is C or S
NDEGLEXVPTEESSLSMLFFRIKPHQGQHLKVYPFLQHNKXE

SEQ ID NO: 46053 - protein, 37 aa, Artificial Sequence
  GFR-binding peptide
  MOD_RES (3)..(4)..(37): Xaa is C or S
KAXXVPTKLSSLSVLFFDDMGVPTLKVYPEGMSVAEX

SEQ ID NO: 46054 - protein, 35 aa, Artificial Sequence
  GFR-binding peptide
  MOD_RES (3)..(4)..(35): Xaa is C or S
APXXVPQALSSLSILFFVGRKPKVLKVYPMIVRSX

SEQ ID NO: 46055 - protein, 39 aa, Artificial Sequence
  GFR-binding peptide
  MOD_RES (5)..(6): Xaa is C or S
  MOD_RES (20)..(21)..(22)..(23)..(24): Xaa is A or G
  MOD_RES (25)..(26)..(27)..(28): Xaa is A or G or is absent
VPKPXXAPTKLSSLSVLFFXXXXXXXXXLKVYPNMVVRS

SEQ ID NO: 46056 - protein, 35 aa, Artificial Sequence
  GFR-binding peptide
  MOD_RES (3)..(4): Xaa is C or S
PTXXVPTRLSSLSILFFDSANNVVLKVYPDMVVES

SEQ ID NO: 46057 - protein, 41 aa, Artificial Sequence
  GFR-binding peptide
  MOD_RES (5)..(5): Xaa is C or S
SSVKXQPSRVHHSSLSVLFFEYVRKKPKLLKVYPRLEEHLE

SEQ ID NO: 46058 - protein, 32 aa, Artificial Sequence
  GFR-binding peptide
  MOD_RES (1)..(2): Xaa is C or S
XXVPTKLSSLSILFFDKGVVTYLKVYPGMAVS

SEQ ID NO: 46059 - protein, 36 aa, Artificial Sequence
  GFR-binding peptide
  MOD_RES (1)..(2)..(36): Xaa is C or S
  MOD_RES (16)..(17)..(18)..(19)..(20): Xaa is A or G
  MOD_RES (21)..(22)..(23)..(24): Xaa is A or G or is absent
XXVPTKLSSLSILFFXXXXXXXXXLKVYPGMAVSEX

SEQ ID NO: 46060 - protein, 34 aa, Artificial Sequence
  GFR-binding peptide
  MOD_RES (1)..(1): Xaa is C or S
  MOD_RES (15)..(16)..(17)..(18)..(19): Xaa is A or G
  MOD_RES (20)..(21)..(22)..(23): Xaa is A or G or is absent
XVPTRLSSLSILFFXXXXXXXXXLKVYPDMVVES

SEQ ID NO: 46061 - protein, 39 aa, Artificial Sequence
  GFR-binding peptide
  MOD_RES (4)..(5)..(37)..(39): Xaa is C or S
PKPXXAPTQLSSLSVLFFDDSSNVILKVYPNMVVRAXGX

SEQ ID NO: 46062 - protein, 44 aa, Artificial Sequence
  GFR-binding peptide
  MOD_RES (6)..(7)..(41)..(43): Xaa is C or S
  MOD_RES (21)..(22)..(23)..(24)..(25): Xaa is A or G
  MOD_RES (26)..(27)..(28)..(29): Xaa is A or G or is absent
GIPEPXXVPEKMSSLSILFFXXXXXXXXXLKVYPNMTVESXAXR

SEQ ID NO: 46063 - protein, 42 aa, Artificial Sequence
  GFR-binding peptide
  MOD_RES (6)..(7)..(40)..(42): Xaa is C or S
  MOD_RES (21)..(22)..(23)..(24)..(25): Xaa is A or G
  MOD_RES (26)..(27)..(28)..(29): Xaa is A or G or is absent
RVPSTXXAPVKTSSLSMLFFXXXXXXXXXLKVYPMIVEEXGX

SEQ ID NO: 46064 - protein, 31 aa, Artificial Sequence
  GFR-binding peptide
VPARLSSLSILFFDAANNVVLKVYPDMVVEA

SEQ ID NO: 46065 - protein, 37 aa, Artificial Sequence
  GFR-binding peptide
  MOD_RES (2)..(3)..(36): Xaa is C or S
  MOD_RES (17)..(18)..(19)..(20)..(21): Xaa is A or G
  MOD_RES (22)..(23)..(24)..(25): Xaa is A or G or is absent
PXXVSQDLSSLSILFFXXXXXXXXXLKVYPMIVKSXK

SEQ ID NO: 46066 - protein, 34 aa, Artificial Sequence
  GFR-binding peptide
  MOD_RES (3)..(4): Xaa is C or S
APXXVPQALSSLSILFFVGRKPKVLKVYPMIVRS

SEQ ID NO: 46067 - protein, 35 aa, Artificial Sequence
  GFR-binding peptide
  MOD_RES (4)..(5): Xaa is C or S
PASXXVPARLSSLSILFFDAANNVVLKVYPDMVVE

SEQ ID NO: 46068 - protein, 40 aa, Artificial Sequence
  GFR-binding peptide
  MOD_RES (5)..(6)..(38)..(40): Xaa is C or S
VPKPXXAPTKLSSLSVLFFDDSSNVILKVYPNMVVRSXGX

SEQ ID NO: 46069 - protein, 41 aa, Artificial Sequence
  GFR-binding peptide
  MOD_RES (5)..(6)..(39)..(41): Xaa is C or S
  MOD_RES (20)..(21)..(22)..(23)..(24): Xaa is A or G
  MOD_RES (25)..(26)..(27)..(28): Xaa is A or G or is absent
SASPXXVPQDLSSLSILFFXXXXXXXXXLKVYPMVVKSXKX

SEQ ID NO: 46070 - protein, 39 aa, Artificial Sequence
  GFR-binding peptide
  MOD_RES (6)..(7): Xaa is C or S
  MOD_RES (21)..(22)..(23)..(24)..(25): Xaa is A or G
  MOD_RES (26)..(27)..(28)..(29): Xaa is A or G or is absent
ASAAPXXVPQALSSLSILFFXXXXXXXXXLKVYPMIVRS

SEQ ID NO: 46071 - protein, 39 aa, Artificial Sequence
  GFR-binding peptide
  MOD_RES (7)..(7): Xaa is C or S
NDEGLEXVPTEESSLSMLFFRIKPHQGQHLKVYPFLQHN

SEQ ID NO: 46072 - protein, 37 aa, Artificial Sequence
  GFR-binding peptide
  MOD_RES (2)..(3)..(34)..(36): Xaa is C or S
PXXVPQALSSLSILFFVGRKPKVLKVYPMIVRSXKXS

SEQ ID NO: 46073 - protein, 39 aa, Artificial Sequence
  GFR-binding peptide
  MOD_RES (1)..(2)..(36)..(38): Xaa is C or S
  MOD_RES (16)..(17)..(18)..(19)..(20): Xaa is A or G
  MOD_RES (21)..(22)..(23)..(24): Xaa is A or G or is absent
XXVPTKLSSLSILFFXXXXXXXXXLKVYPGMAVSEXGXR

SEQ ID NO: 46074 - protein, 36 aa, Artificial Sequence
  GFR-binding peptide
  MOD_RES (5)..(5): Xaa is C or S
TKPTXAPTKLSSLSVLFFDDSSNVILKVYPNMVVRS

SEQ ID NO: 46075 - protein, 35 aa, Artificial Sequence
  GFR-binding peptide
  MOD_RES (4)..(5): Xaa is C or S
AGPXXTPTKMSSLSMLFFNDKQQIILKVYPGMVVD

SEQ ID NO: 46076 - protein, 36 aa, Artificial Sequence
  GFR-binding peptide
  MOD_RES (1)..(33)..(35): Xaa is C or S
XTPTKMSSLSMLFFNDKQQIILKVYPGMVVDRXGXS

SEQ ID NO: 46077 - protein, 34 aa, Artificial Sequence
  GFR-binding peptide
  MOD_RES (2)..(3): Xaa is C or S
PXXAPTQLSSLSVLFFDDSSNVILKVYPNMVVRA

SEQ ID NO: 46078 - protein, 31 aa, Artificial Sequence
  GFR-binding peptide
  MOD_RES (1)..(1): Xaa is C or S
XVPEKMSSLSILFFDENKNVVLKVYPNMTVE

SEQ ID NO: 46079 - protein, 40 aa, Artificial Sequence
  GFR-binding peptide
  MOD_RES (3)..(4)..(38)..(40): Xaa is C or S
  MOD_RES (18)..(19)..(20)..(21)..(22): Xaa is A or G
  MOD_RES (23)..(24)..(25)..(26): Xaa is A or G or is absent
KPXXAPTKLSSLSVLFFXXXXXXXXXLKVYPNMVVRSXGX

SEQ ID NO: 46080 - protein, 42 aa, Artificial Sequence
  GFR-binding peptide
  MOD_RES (6)..(7)..(41): Xaa is C or S
  MOD_RES (21)..(22)..(23)..(24)..(25): Xaa is A or G
  MOD_RES (26)..(27)..(28)..(29): Xaa is A or G or is absent
GSAGPXXTPTKMSSLSMLFFXXXXXXXXXLKVYPGMVVDRXG

SEQ ID NO: 46081 - protein, 34 aa, Artificial Sequence
  GFR-binding peptide
  MOD_RES (1)..(2): Xaa is C or S
  MOD_RES (16)..(17)..(18)..(19)..(20): Xaa is A or G
  MOD_RES (21)..(22)..(23)..(24): Xaa is A or G or is absent
XXVPTELSSLSMLFFXXXXXXXXXLKVYPEMVVE

SEQ ID NO: 46082 - protein, 34 aa, Artificial Sequence
  GFR-binding peptide
  MOD_RES (1)..(1): Xaa is C or S
  MOD_RES (15)..(16)..(17)..(18)..(19): Xaa is A or G
  MOD_RES (20)..(21)..(22)..(23): Xaa is A or G or is absent
XVPEKMSSLSILFFXXXXXXXXXLKVYPNMTVES

SEQ ID NO: 46083 - protein, 34 aa, Artificial Sequence
  GFR-binding peptide
  MOD_RES (3)..(4): Xaa is C or S
KAXXVPTKLSSLSILFFDKGVVTYLKVYPGMAVS

SEQ ID NO: 46084 - protein, 37 aa, Artificial Sequence
  GFR-binding peptide
  MOD_RES (35)..(37): Xaa is C or S
  MOD_RES (14)..(15)..(16)..(17)..(18): Xaa is A or G
  MOD_RES (19)..(20)..(21)..(22): Xaa is A or G or is absent
SRVHHSSLSVLFFXXXXXXXXXLKVYPRLEEHLEXAX

SEQ ID NO: 46085 - protein, 37 aa, Artificial Sequence
  GFR-binding peptide
  MOD_RES (2)..(34)..(36): Xaa is C or S
TXAPTKLSSLSVLFFDDSSNVILKVYPNMVVRSXGXH

SEQ ID NO: 46086 - protein, 41 aa, Artificial Sequence
  GFR-binding peptide
  MOD_RES (5)..(6)..(38)..(40): Xaa is C or S
IPEPXXVPEKMSSLSILFFDENKNVVLKVYPNMTVESXAXR

SEQ ID NO: 46087 - protein, 33 aa, Artificial Sequence
  GFR-binding peptide
  MOD_RES (1)..(33): Xaa is C or S
XTPTKMSSLSMLFFNDKQQIILKVYPGMVVDRX

SEQ ID NO: 46088 - protein, 35 aa, Artificial Sequence
  GFR-binding peptide
  MOD_RES (1)..(33)..(35): Xaa is C or S
XVPARLSSLSILFFDAANNVVLKVYPDMVVEAXGX

SEQ ID NO: 46089 - protein, 35 aa, Artificial Sequence
  GFR-binding peptide
  MOD_RES (4)..(5): Xaa is C or S
ASPXXVSQDLSSLSILFFIGKTPKILKVYPMIVKS

SEQ ID NO: 46090 - protein, 42 aa, Artificial Sequence
  GFR-binding peptide
  MOD_RES (5)..(42): Xaa is C or S
SSVKXQPSRVHHSSLSVLFFEYVRKKPKLLKVYPRLEEHLEX

SEQ ID NO: 46091 - protein, 40 aa, Artificial Sequence
  GFR-binding peptide
  MOD_RES (4)..(5)..(39): Xaa is C or S
  MOD_RES (19)..(20)..(21)..(22)..(23): Xaa is A or G
  MOD_RES (24)..(25)..(26)..(27): Xaa is A or G or is absent
PASXXVPARLSSLSILFFXXXXXXXXXLKVYPDMVVEAXG

SEQ ID NO: 46092 - protein, 39 aa, Artificial Sequence
  GFR-binding peptide
  MOD_RES (5)..(6)..(39): Xaa is C or S
  MOD_RES (20)..(21)..(22)..(23)..(24): Xaa is A or G
  MOD_RES (25)..(26)..(27)..(28): Xaa is A or G or is absent
SASPXXVSQDLSSLSILFFXXXXXXXXXLKVYPMIVKSX

SEQ ID NO: 46093 - protein, 38 aa, Artificial Sequence
  GFR-binding peptide
  MOD_RES (3)..(4)..(36)..(38): Xaa is C or S
KAXXAPTKLSSLSVLFFDSSNNVILKVYPNMVVKAXGX

SEQ ID NO: 46094 - protein, 35 aa, Artificial Sequence
  GFR-binding peptide
  MOD_RES (1)..(35): Xaa is C or S
  MOD_RES (15)..(16)..(17)..(18)..(19): Xaa is A or G
  MOD_RES (20)..(21)..(22)..(23): Xaa is A or G or is absent
XAPTKLSSLSVLFFXXXXXXXXXLKVYPNMVVKAX

SEQ ID NO: 46095 - protein, 34 aa, Artificial Sequence
  GFR-binding peptide
  MOD_RES (34)..(34): Xaa is C or S
VPTEESSLSMLFFRIKPHQGQHLKVYPFLQHNKX

SEQ ID NO: 46096 - protein, 33 aa, Artificial Sequence
  GFR-binding peptide
  MOD_RES (33)..(33): Xaa is C or S
  MOD_RES (14)..(15)..(16)..(17)..(18): Xaa is A or G
  MOD_RES (19)..(20)..(21)..(22): Xaa is A or G or is absent
VPQALSSLSILFFXXXXXXXXXLKVYPMIVRSX

SEQ ID NO: 46097 - protein, 38 aa, Artificial Sequence
  GFR-binding peptide
  MOD_RES (2)..(3)..(37): Xaa is C or S
  MOD_RES (17)..(18)..(19)..(20)..(21): Xaa is A or G
  MOD_RES (22)..(23)..(24)..(25): Xaa is A or G or is absent
TXXVPTRLSSLSILFFXXXXXXXXXLKVYPDMVVESXG

SEQ ID NO: 46098 - protein, 38 aa, Artificial Sequence
  GFR-binding peptide
  MOD_RES (6)..(38): Xaa is C or S
VTKPTXAPTKLSSLSVLFFDDSSNVILKVYPNMVVRSX

SEQ ID NO: 46099 - protein, 36 aa, Artificial Sequence
  GFR-binding peptide
  MOD_RES (34)..(36): Xaa is C or S
  MOD_RES (14)..(15)..(16)..(17)..(18): Xaa is A or G
  MOD_RES (19)..(20)..(21)..(22): Xaa is A or G or is absent
VPTELSSLSMLFFXXXXXXXXXLKVYPEMVVEGXGX

SEQ ID NO: 46100 - protein, 38 aa, Artificial Sequence
  GFR-binding peptide
  MOD_RES (1)..(2)..(35)..(37): Xaa is C or S
  MOD_RES (16)..(17)..(18)..(19)..(20): Xaa is A or G
  MOD_RES (21)..(22)..(23)..(24): Xaa is A or G or is absent
XXVSQDLSSLSILFFXXXXXXXXXLKVYPMIVKSXKXS

SEQ ID NO: 46101 - protein, 33 aa, Artificial Sequence
  GFR-binding peptide
  MOD_RES (1)..(1): Xaa is C or S
  MOD_RES (15)..(16)..(17)..(18)..(19): Xaa is A or G
  MOD_RES (20)..(21)..(22)..(23): Xaa is A or G or is absent
XVPTKLSSLSILFFXXXXXXXXXLKVYPGMAVS

SEQ ID NO: 46102 - protein, 34 aa, Artificial Sequence
  GFR-binding peptide
  MOD_RES (1)..(2)..(34): Xaa is C or S
XXVPARLSSLSILFFDAANNVVLKVYPDMVVEAX

SEQ ID NO: 46103 - protein, 32 aa, Artificial Sequence
  GFR-binding peptide
  MOD_RES (31)..(31): Xaa is C or S
VPQDLSSLSILFFVGRTPKVLKVYPMVVKSXK

SEQ ID NO: 46104 - protein, 38 aa, Artificial Sequence
  GFR-binding peptide
  MOD_RES (3)..(4)..(38): Xaa is C or S
  MOD_RES (18)..(19)..(20)..(21)..(22): Xaa is A or G
  MOD_RES (23)..(24)..(25)..(26): Xaa is A or G or is absent
KAXXVPTELSSLSMLFFXXXXXXXXXLKVYPEMVVEGX

SEQ ID NO: 46105 - protein, 41 aa, Artificial Sequence
  GFR-binding peptide
  MOD_RES (7)..(39)..(41): Xaa is C or S
HVTKPTXAPTKLSSLSVLFFDDSSNVILKVYPNMVVRSXGX

SEQ ID NO: 46106 - protein, 38 aa, Artificial Sequence
  GFR-binding peptide
  MOD_RES (3)..(37): Xaa is C or S
  MOD_RES (17)..(18)..(19)..(20)..(21): Xaa is A or G
  MOD_RES (22)..(23)..(24)..(25): Xaa is A or G or is absent
PTXAPTKLSSLSVLFFXXXXXXXXXLKVYPNMVVRSXG

SEQ ID NO: 46107 - protein, 40 aa, Artificial Sequence
  GFR-binding peptide
  MOD_RES (5)..(6)..(40): Xaa is C or S
  MOD_RES (20)..(21)..(22)..(23)..(24): Xaa is A or G
  MOD_RES (25)..(26)..(27)..(28): Xaa is A or G or is absent
APASXXVPARLSSLSILFFXXXXXXXXXLKVYPDMVVEAX

SEQ ID NO: 46108 - protein, 39 aa, Artificial Sequence
  GFR-binding peptide
  MOD_RES (4)..(4): Xaa is C or S
SVKXQPSRVHHSSLSVLFFEYVRKKPKLLKVYPRLEEHL

SEQ ID NO: 46109 - protein, 37 aa, Artificial Sequence
  GFR-binding peptide
  MOD_RES (1)..(2)..(36): Xaa is C or S
  MOD_RES (16)..(17)..(18)..(19)..(20): Xaa is A or G
  MOD_RES (21)..(22)..(23)..(24): Xaa is A or G or is absent
XXVPEKMSSLSILFFXXXXXXXXXLKVYPNMTVESXA

SEQ ID NO: 46110 - protein, 38 aa, Artificial Sequence
  GFR-binding peptide
  MOD_RES (3)..(4)..(36)..(38): Xaa is C or S
PTXXVPTRLSSLSILFFDSANNVVLKVYPDMVVESXGX

SEQ ID NO: 46111 - protein, 43 aa, Artificial Sequence
  GFR-binding peptide
  MOD_RES (6)..(7)..(40)..(42): Xaa is C or S
  MOD_RES (21)..(22)..(23)..(24)..(25): Xaa is A or G
  MOD_RES (26)..(27)..(28)..(29): Xaa is A or G or is absent
ASAAPXXVPQALSSLSILFFXXXXXXXXXLKVYPMIVRSXKXS

SEQ ID NO: 46112 - protein, 42 aa, Artificial Sequence
  GFR-binding peptide
  MOD_RES (4)..(5)..(39)..(41): Xaa is C or S
  MOD_RES (19)..(20)..(21)..(22)..(23): Xaa is A or G
  MOD_RES (24)..(25)..(26)..(27): Xaa is A or G or is absent
PEPXXVPEKMSSLSILFFXXXXXXXXXLKVYPNMTVESXAXR

SEQ ID NO: 46113 - protein, 32 aa, Artificial Sequence
  GFR-binding peptide
  MOD_RES (1)..(2): Xaa is C or S
XXVPEKMSSLSILFFDENKNVVLKVYPNMTVE

SEQ ID NO: 46114 - protein, 39 aa, Artificial Sequence
  GFR-binding peptide
  MOD_RES (6)..(6): Xaa is C or S
  MOD_RES (20)..(21)..(22)..(23)..(24): Xaa is A or G
  MOD_RES (25)..(26)..(27)..(28): Xaa is A or G or is absent
DEGLEXVPTEESSLSMLFFXXXXXXXXXLKVYPFLQHNK

SEQ ID NO: 46115 - protein, 38 aa, Artificial Sequence
  GFR-binding peptide
  MOD_RES (5)..(6): Xaa is C or S
  MOD_RES (20)..(21)..(22)..(23)..(24): Xaa is A or G
  MOD_RES (25)..(26)..(27)..(28): Xaa is A or G or is absent
SASPXXVPQDLSSLSILFFXXXXXXXXXLKVYPMVVKS

SEQ ID NO: 46116 - protein, 37 aa, Artificial Sequence
  GFR-binding peptide
  MOD_RES (6)..(7): Xaa is C or S
KASKAXXVPTKLSSLSILFFDKGVVTYLKVYPGMAVS

SEQ ID NO: 46117 - protein, 37 aa, Artificial Sequence
  GFR-binding peptide
  MOD_RES (4)..(36): Xaa is C or S
KPTXAPTKLSSLSVLFFDDSSNVILKVYPNMVVRSXG

SEQ ID NO: 46118 - protein, 33 aa, Artificial Sequence
  GFR-binding peptide
  MOD_RES (1)..(2)..(33): Xaa is C or S
XXAPVKTSSLSMLFFDNGRVLLLKVYPMIVEEX

SEQ ID NO: 46119 - protein, 34 aa, Artificial Sequence
  GFR-binding peptide
  MOD_RES (1)..(34): Xaa is C or S
  MOD_RES (15)..(16)..(17)..(18)..(19): Xaa is A or G
  MOD_RES (20)..(21)..(22)..(23): Xaa is A or G or is absent
XVSQDLSSLSILFFXXXXXXXXXLKVYPMIVKSX

SEQ ID NO: 46120 - protein, 33 aa, Artificial Sequence
  GFR-binding peptide
  MOD_RES (2)..(3): Xaa is C or S
PXXVPEKMSSLSILFFDENKNVVLKVYPNMTVE

SEQ ID NO: 46121 - protein, 33 aa, Artificial Sequence
  GFR-binding peptide
  MOD_RES (1)..(2): Xaa is C or S
XXVPARLSSLSILFFDAANNVVLKVYPDMVVEA

SEQ ID NO: 46122 - protein, 41 aa, Artificial Sequence
  GFR-binding peptide
  MOD_RES (3)..(4)..(38)..(40): Xaa is C or S
  MOD_RES (18)..(19)..(20)..(21)..(22): Xaa is A or G
  MOD_RES (23)..(24)..(25)..(26): Xaa is A or G or is absent
GPXXTPTKMSSLSMLFFXXXXXXXXXLKVYPGMVVDRXGXS

SEQ ID NO: 46123 - protein, 39 aa, Artificial Sequence
  GFR-binding peptide
  MOD_RES (6)..(7): Xaa is C or S
  MOD_RES (21)..(22)..(23)..(24)..(25): Xaa is A or G
  MOD_RES (26)..(27)..(28)..(29): Xaa is A or G or is absent
ASASPXXVPQDLSSLSILFFXXXXXXXXXLKVYPMVVKS

SEQ ID NO: 46124 - protein, 34 aa, Artificial Sequence
  GFR-binding peptide
  MOD_RES (1)..(2)..(34): Xaa is C or S
XXVPTRLSSLSILFFDSANNVVLKVYPDMVVESX

SEQ ID NO: 46125 - protein, 32 aa, Artificial Sequence
  GFR-binding peptide
  MOD_RES (32)..(32): Xaa is C or S
VPEKMSSLSILFFDENKNVVLKVYPNMTVESX

SEQ ID NO: 46126 - protein, 41 aa, Artificial Sequence
  GFR-binding peptide
  MOD_RES (4)..(5)..(38)..(40): Xaa is C or S
  MOD_RES (19)..(20)..(21)..(22)..(23): Xaa is A or G
  MOD_RES (24)..(25)..(26)..(27): Xaa is A or G or is absent
ASPXXVPQDLSSLSILFFXXXXXXXXXLKVYPMVVKSXKXS

SEQ ID NO: 46127 - protein, 34 aa, Artificial Sequence
  GFR-binding peptide
  MOD_RES (32)..(34): Xaa is C or S
APTKLSSLSVLFFDSSNNVILKVYPNMVVKAXGX

SEQ ID NO: 46128 - protein, 38 aa, Artificial Sequence
  GFR-binding peptide
  MOD_RES (4)..(38): Xaa is C or S
  MOD_RES (18)..(19)..(20)..(21)..(22): Xaa is A or G
  MOD_RES (23)..(24)..(25)..(26): Xaa is A or G or is absent
KPTXAPTKLSSLSVLFFXXXXXXXXXLKVYPNMVVRSX

SEQ ID NO: 46129 - protein, 40 aa, Artificial Sequence
  GFR-binding peptide
  MOD_RES (6)..(7): Xaa is C or S
  MOD_RES (21)..(22)..(23)..(24)..(25): Xaa is A or G
  MOD_RES (26)..(27)..(28)..(29): Xaa is A or G or is absent
GIPEPXXVPEKMSSLSILFFXXXXXXXXXLKVYPNMTVES

SEQ ID NO: 46130 - protein, 33 aa, Artificial Sequence
  GFR-binding peptide
  MOD_RES (14)..(15)..(16)..(17)..(18): Xaa is A or G
  MOD_RES (19)..(20)..(21)..(22): Xaa is A or G or is absent
VPTELSSLSMLFFXXXXXXXXXLKVYPEMVVEG

SEQ ID NO: 46131 - protein, 37 aa, Artificial Sequence
  GFR-binding peptide
  MOD_RES (5)..(6): Xaa is C or S
TPPTXXVPTRLSSLSILFFDSANNVVLKVYPDMVVES

SEQ ID NO: 46132 - protein, 40 aa, Artificial Sequence
  GFR-binding peptide
  MOD_RES (6)..(7)..(38)..(40): Xaa is C or S
RVPSTXXAPVKTSSLSMLFFDNGRVLLLKVYPMIVEEXGX

SEQ ID NO: 46133 - protein, 37 aa, Artificial Sequence
  GFR-binding peptide
  MOD_RES (34)..(36): Xaa is C or S
  MOD_RES (14)..(15)..(16)..(17)..(18): Xaa is A or G
  MOD_RES (19)..(20)..(21)..(22): Xaa is A or G or is absent
VPTEESSLSMLFFXXXXXXXXXLKVYPFLQHNKXEXR

SEQ ID NO: 46134 - protein, 41 aa, Artificial Sequence
  GFR-binding peptide
  MOD_RES (3)..(4)..(39)..(41): Xaa is C or S
  MOD_RES (18)..(19)..(20)..(21)..(22): Xaa is A or G
  MOD_RES (23)..(24)..(25)..(26): Xaa is A or G or is absent
KAXXVPTKLSSLSVLFFXXXXXXXXXLKVYPEGMSVAEXGX

SEQ ID NO: 46135 - protein, 33 aa, Artificial Sequence
  GFR-binding peptide
  MOD_RES (2)..(3): Xaa is C or S
AXXAPTKLSSLSVLFFDSSNNVILKVYPNMVVK

SEQ ID NO: 46136 - protein, 39 aa, Artificial Sequence
  GFR-binding peptide
  MOD_RES (5)..(39): Xaa is C or S
  MOD_RES (19)..(20)..(21)..(22)..(23): Xaa is A or G
  MOD_RES (24)..(25)..(26)..(27): Xaa is A or G or is absent
TKPTXAPTKLSSLSVLFFXXXXXXXXXLKVYPNMVVRSX

SEQ ID NO: 46137 - protein, 37 aa, Artificial Sequence
  GFR-binding peptide
  MOD_RES (3)..(3): Xaa is C or S
  MOD_RES (19)..(20)..(21)..(22)..(23): Xaa is A or G
  MOD_RES (24)..(25)..(26)..(27): Xaa is A or G or is absent
VKXQPSRVHHSSLSVLFFXXXXXXXXXLKVYPRLEEH

SEQ ID NO: 46138 - protein, 36 aa, Artificial Sequence
  GFR-binding peptide
  MOD_RES (33)..(35): Xaa is C or S
  MOD_RES (14)..(15)..(16)..(17)..(18): Xaa is A or G
  MOD_RES (19)..(20)..(21)..(22): Xaa is A or G or is absent
VPQDLSSLSILFFXXXXXXXXXLKVYPMVVKSXKXS

SEQ ID NO: 46139 - protein, 31 aa, Artificial Sequence
  GFR-binding peptide
  MOD_RES (1)..(1): Xaa is C or S
XVPTRLSSLSILFFDSANNVVLKVYPDMVVE

SEQ ID NO: 46140 - protein, 38 aa, Artificial Sequence
  GFR-binding peptide
  MOD_RES (5)..(6): Xaa is C or S
  MOD_RES (20)..(21)..(22)..(23)..(24): Xaa is A or G
  MOD_RES (25)..(26)..(27)..(28): Xaa is A or G or is absent
APASXXVPARLSSLSILFFXXXXXXXXXLKVYPDMVVE

SEQ ID NO: 46141 - protein, 39 aa, Artificial Sequence
  GFR-binding peptide
  MOD_RES (4)..(5)..(37)..(39): Xaa is C or S
PKPXXAPTKLSSLSVLFFDDSSNVILKVYPNMVVRSXGX

SEQ ID NO: 46142 - protein, 40 aa, Artificial Sequence
  GFR-binding peptide
  MOD_RES (3)..(4)..(38)..(40): Xaa is C or S
  MOD_RES (18)..(19)..(20)..(21)..(22): Xaa is A or G
  MOD_RES (23)..(24)..(25)..(26): Xaa is A or G or is absent
KAXXVPTELSSLSMLFFXXXXXXXXXLKVYPEMVVEGXGX

SEQ ID NO: 46143 - protein, 41 aa, Artificial Sequence
  GFR-binding peptide
  MOD_RES (3)..(4)..(38)..(40): Xaa is C or S
  MOD_RES (18)..(19)..(20)..(21)..(22): Xaa is A or G
  MOD_RES (23)..(24)..(25)..(26): Xaa is A or G or is absent
KPXXAPTQLSSLSVLFFXXXXXXXXXLKVYPNMVVRAXGXH

SEQ ID NO: 46144 - protein, 35 aa, Artificial Sequence
  GFR-binding peptide
  MOD_RES (1)..(2): Xaa is C or S
  MOD_RES (16)..(17)..(18)..(19)..(20): Xaa is A or G
  MOD_RES (21)..(22)..(23)..(24): Xaa is A or G or is absent
XXVPEKMSSLSILFFXXXXXXXXXLKVYPNMTVES

SEQ ID NO: 46145 - protein, 33 aa, Artificial Sequence
  GFR-binding peptide
  MOD_RES (32)..(32): Xaa is C or S
TPTKMSSLSMLFFNDKQQIILKVYPGMVVDRXG

SEQ ID NO: 46146 - protein, 35 aa, Artificial Sequence
  GFR-binding peptide
  MOD_RES (1)..(2)..(34): Xaa is C or S
XXAPTKLSSLSVLFFDDSSNVILKVYPNMVVRSXG

SEQ ID NO: 46147 - protein, 41 aa, Artificial Sequence
  GFR-binding peptide
  MOD_RES (5)..(5): Xaa is C or S
  MOD_RES (21)..(22)..(23)..(24)..(25): Xaa is A or G
  MOD_RES (26)..(27)..(28)..(29): Xaa is A or G or is absent
SSVKXQPSRVHHSSLSVLFFXXXXXXXXXLKVYPRLEEHLE

SEQ ID NO: 46148 - protein, 36 aa, Artificial Sequence
  GFR-binding peptide
  MOD_RES (1)..(34)..(36): Xaa is C or S
  MOD_RES (15)..(16)..(17)..(18)..(19): Xaa is A or G
  MOD_RES (20)..(21)..(22)..(23): Xaa is A or G or is absent
XVPQDLSSLSILFFXXXXXXXXXLKVYPMVVKSXKX

SEQ ID NO: 46149 - protein, 34 aa, Artificial Sequence
  GFR-binding peptide
  MOD_RES (16)..(17)..(18)..(19)..(20): Xaa is A or G
  MOD_RES (21)..(22)..(23)..(24): Xaa is A or G or is absent
QPSRVHHSSLSVLFFXXXXXXXXXLKVYPRLEEH

SEQ ID NO: 46150 - protein, 43 aa, Artificial Sequence
  GFR-binding peptide
  MOD_RES (5)..(6)..(40)..(42): Xaa is C or S
  MOD_RES (20)..(21)..(22)..(23)..(24): Xaa is A or G
  MOD_RES (25)..(26)..(27)..(28): Xaa is A or G or is absent
ASKAXXVPTKLSSLSILFFXXXXXXXXXLKVYPGMAVSEXGXR

SEQ ID NO: 46151 - protein, 36 aa, Artificial Sequence
  GFR-binding peptide
  MOD_RES (6)..(6): Xaa is C or S
VTKPTXAPTKLSSLSVLFFDDSSNVILKVYPNMVVR

SEQ ID NO: 46152 - protein, 34 aa, Artificial Sequence
  GFR-binding peptide
  MOD_RES (33)..(33): Xaa is C or S
  MOD_RES (14)..(15)..(16)..(17)..(18): Xaa is A or G
  MOD_RES (19)..(20)..(21)..(22): Xaa is A or G or is absent
VSQDLSSLSILFFXXXXXXXXXLKVYPMIVKSXK

SEQ ID NO: 46153 - protein, 37 aa, Artificial Sequence
  GFR-binding peptide
  MOD_RES (1)..(34)..(36): Xaa is C or S
  MOD_RES (15)..(16)..(17)..(18)..(19): Xaa is A or G
  MOD_RES (20)..(21)..(22)..(23): Xaa is A or G or is absent
XAPVKTSSLSMLFFXXXXXXXXXLKVYPMIVEEXGXL

SEQ ID NO: 46154 - protein, 38 aa, Artificial Sequence
  GFR-binding peptide
  MOD_RES (3)..(4)..(36)..(38): Xaa is C or S
KPXXAPTKLSSLSVLFFDDSSNVILKVYPNMVVRSXGX

SEQ ID NO: 46155 - protein, 40 aa, Artificial Sequence
  GFR-binding peptide
  MOD_RES (6)..(7)..(40): Xaa is C or S
  MOD_RES (21)..(22)..(23)..(24)..(25): Xaa is A or G
  MOD_RES (26)..(27)..(28)..(29): Xaa is A or G or is absent
ASASPXXVPQDLSSLSILFFXXXXXXXXXLKVYPMVVKSX

SEQ ID NO: 46156 - protein, 37 aa, Artificial Sequence
  GFR-binding peptide
  MOD_RES (5)..(6)..(37): Xaa is C or S
SASPXXVPQDLSSLSILFFVGRTPKVLKVYPMVVKSX

SEQ ID NO: 46157 - protein, 39 aa, Artificial Sequence
  GFR-binding peptide
  MOD_RES (4)..(5)..(39): Xaa is C or S
  MOD_RES (19)..(20)..(21)..(22)..(23): Xaa is A or G
  MOD_RES (24)..(25)..(26)..(27): Xaa is A or G or is absent
PEPXXVPEKMSSLSILFFXXXXXXXXXLKVYPNMTVESX

SEQ ID NO: 46158 - protein, 34 aa, Artificial Sequence
  GFR-binding peptide
  MOD_RES (2)..(2): Xaa is C or S
  MOD_RES (16)..(17)..(18)..(19)..(20): Xaa is A or G
  MOD_RES (21)..(22)..(23)..(24): Xaa is A or G or is absent
TXAPTKLSSLSVLFFXXXXXXXXXLKVYPNMVVR

SEQ ID NO: 46159 - protein, 34 aa, Artificial Sequence
  GFR-binding peptide
  MOD_RES (1)..(2): Xaa is C or S
  MOD_RES (16)..(17)..(18)..(19)..(20): Xaa is A or G
  MOD_RES (21)..(22)..(23)..(24): Xaa is A or G or is absent
XXVPTRLSSLSILFFXXXXXXXXXLKVYPDMVVE

SEQ ID NO: 46160 - protein, 42 aa, Artificial Sequence
  GFR-binding peptide
  MOD_RES (6)..(7)..(39)..(41): Xaa is C or S
HVPKPXXAPTKLSSLSVLFFDDSSNVILKVYPNMVVRSXGXH

SEQ ID NO: 46161 - protein, 36 aa, Artificial Sequence
  GFR-binding peptide
  MOD_RES (2)..(3)..(35): Xaa is C or S
AXXVPTKLSSLSILFFDKGVVTYLKVYPGMAVSEXG

SEQ ID NO: 46162 - protein, 33 aa, Artificial Sequence
  GFR-binding peptide
  MOD_RES (14)..(15)..(16)..(17)..(18): Xaa is A or G
  MOD_RES (19)..(20)..(21)..(22): Xaa is A or G or is absent
VPARLSSLSILFFXXXXXXXXXLKVYPDMVVEA

SEQ ID NO: 46163 - protein, 32 aa, Artificial Sequence
  GFR-binding peptide
  MOD_RES (32)..(32): Xaa is C or S
APTKLSSLSVLFFDSSNNVILKVYPNMVVKAX

SEQ ID NO: 46164 - protein, 39 aa, Artificial Sequence
  GFR-binding peptide
  MOD_RES (37)..(39): Xaa is C or S
QPSRVHHSSLSVLFFEYVRKKPKLLKVYPRLEEHLEXAX

SEQ ID NO: 46165 - protein, 43 aa, Artificial Sequence
  GFR-binding peptide
  MOD_RES (6)..(7)..(40)..(42): Xaa is C or S
KVGKAXXVPTKLSSLSVLFFDDMGVPTLKVYPEGMSVAEXGXR

SEQ ID NO: 46166 - protein, 37 aa, Artificial Sequence
  GFR-binding peptide
  MOD_RES (1)..(2)..(36): Xaa is C or S
  MOD_RES (16)..(17)..(18)..(19)..(20): Xaa is A or G
  MOD_RES (21)..(22)..(23)..(24): Xaa is A or G or is absent
XXVPTRLSSLSILFFXXXXXXXXXLKVYPDMVVESXG

SEQ ID NO: 46167 - protein, 41 aa, Artificial Sequence
  GFR-binding peptide
  MOD_RES (2)..(39)..(41): Xaa is C or S
KXQPSRVHHSSLSVLFFEYVRKKPKLLKVYPRLEEHLEXAX

SEQ ID NO: 46168 - protein, 38 aa, Artificial Sequence
  GFR-binding peptide
  MOD_RES (4)..(5): Xaa is C or S
  MOD_RES (19)..(20)..(21)..(22)..(23): Xaa is A or G
  MOD_RES (24)..(25)..(26)..(27): Xaa is A or G or is absent
AGPXXTPTKMSSLSMLFFXXXXXXXXXLKVYPGMVVDR

SEQ ID NO: 46169 - protein, 36 aa, Artificial Sequence
  GFR-binding peptide
  MOD_RES (2)..(3): Xaa is C or S
  MOD_RES (17)..(18)..(19)..(20)..(21): Xaa is A or G
  MOD_RES (22)..(23)..(24)..(25): Xaa is A or G or is absent
TXXVPTRLSSLSILFFXXXXXXXXXLKVYPDMVVES

SEQ ID NO: 46170 - protein, 39 aa, Artificial Sequence
  GFR-binding peptide
  MOD_RES (5)..(6)..(39): Xaa is C or S
VGKAXXVPTKLSSLSVLFFDDMGVPTLKVYPEGMSVAEX

SEQ ID NO: 46171 - protein, 41 aa, Artificial Sequence
  GFR-binding peptide
  MOD_RES (4)..(41): Xaa is C or S
  MOD_RES (20)..(21)..(22)..(23)..(24): Xaa is A or G
  MOD_RES (25)..(26)..(27)..(28): Xaa is A or G or is absent
SVKXQPSRVHHSSLSVLFFXXXXXXXXXLKVYPRLEEHLEX

SEQ ID NO: 46172 - protein, 44 aa, Artificial Sequence
  GFR-binding peptide
  MOD_RES (6)..(7)..(41)..(43): Xaa is C or S
  MOD_RES (21)..(22)..(23)..(24)..(25): Xaa is A or G
  MOD_RES (26)..(27)..(28)..(29): Xaa is A or G or is absent
STPPTXXVPTRLSSLSILFFXXXXXXXXXLKVYPDMVVESXGXR

SEQ ID NO: 46173 - protein, 40 aa, Artificial Sequence
  GFR-binding peptide
  MOD_RES (6)..(7)..(39): Xaa is C or S
AAPASXXVPARLSSLSILFFDAANNVVLKVYPDMVVEAXG

SEQ ID NO: 46174 - protein, 37 aa, Artificial Sequence
  GFR-binding peptide
  MOD_RES (2)..(3)..(37): Xaa is C or S
  MOD_RES (17)..(18)..(19)..(20)..(21): Xaa is A or G
  MOD_RES (22)..(23)..(24)..(25): Xaa is A or G or is absent
PXXAPTKLSSLSVLFFXXXXXXXXXLKVYPNMVVRSX

SEQ ID NO: 46175 - protein, 37 aa, Artificial Sequence
  GFR-binding peptide
  MOD_RES (3)..(4)..(35)..(37): Xaa is C or S
STXXAPVKTSSLSMLFFDNGRVLLLKVYPMIVEEXGX

SEQ ID NO: 46176 - protein, 37 aa, Artificial Sequence
  GFR-binding peptide
  MOD_RES (6)..(7): Xaa is C or S
STPPTXXVPTRLSSLSILFFDSANNVVLKVYPDMVVE

SEQ ID NO: 46177 - protein, 31 aa, Artificial Sequence
  GFR-binding peptide
  MOD_RES (1)..(1): Xaa is C or S
XVPTKLSSLSILFFDKGVVTYLKVYPGMAVS

SEQ ID NO: 46178 - protein, 42 aa, Artificial Sequence
  GFR-binding peptide
  MOD_RES (4)..(5)..(39)..(41): Xaa is C or S
  MOD_RES (19)..(20)..(21)..(22)..(23): Xaa is A or G
  MOD_RES (24)..(25)..(26)..(27): Xaa is A or G or is absent
PPTXXVPTRLSSLSILFFXXXXXXXXXLKVYPDMVVESXGXR

SEQ ID NO: 46179 - protein, 40 aa, Artificial Sequence
  GFR-binding peptide
  MOD_RES (5)..(6)..(40): Xaa is C or S
  MOD_RES (20)..(21)..(22)..(23)..(24): Xaa is A or G
  MOD_RES (25)..(26)..(27)..(28): Xaa is A or G or is absent
VPKPXXAPTKLSSLSVLFFXXXXXXXXXLKVYPNMVVRSX

SEQ ID NO: 46180 - protein, 35 aa, Artificial Sequence
  GFR-binding peptide
  MOD_RES (3)..(4)..(35): Xaa is C or S
STXXAPVKTSSLSMLFFDNGRVLLLKVYPMIVEEX

SEQ ID NO: 46181 - protein, 40 aa, Artificial Sequence
  GFR-binding peptide
  MOD_RES (4)..(5)..(38)..(40): Xaa is C or S
  MOD_RES (19)..(20)..(21)..(22)..(23): Xaa is A or G
  MOD_RES (24)..(25)..(26)..(27): Xaa is A or G or is absent
PSTXXAPVKTSSLSMLFFXXXXXXXXXLKVYPMIVEEXGX

SEQ ID NO: 46182 - protein, 35 aa, Artificial Sequence
  GFR-binding peptide
  MOD_RES (33)..(35): Xaa is C or S
  MOD_RES (14)..(15)..(16)..(17)..(18): Xaa is A or G
  MOD_RES (19)..(20)..(21)..(22): Xaa is A or G or is absent
VPQALSSLSILFFXXXXXXXXXLKVYPMIVRSXKX

SEQ ID NO: 46183 - protein, 32 aa, Artificial Sequence
  GFR-binding peptide
  MOD_RES (1)..(32): Xaa is C or S
XVSQDLSSLSILFFIGKTPKILKVYPMIVKSX

SEQ ID NO: 46184 - protein, 36 aa, Artificial Sequence
  GFR-binding peptide
  MOD_RES (33)..(35): Xaa is C or S
  MOD_RES (14)..(15)..(16)..(17)..(18): Xaa is A or G
  MOD_RES (19)..(20)..(21)..(22): Xaa is A or G or is absent
VSQDLSSLSILFFXXXXXXXXXLKVYPMIVKSXKXS

SEQ ID NO: 46185 - protein, 35 aa, Artificial Sequence
  GFR-binding peptide
  MOD_RES (2)..(34): Xaa is C or S
TXAPTKLSSLSVLFFDDSSNVILKVYPNMVVRSXG

SEQ ID NO: 46186 - protein, 36 aa, Artificial Sequence
  GFR-binding peptide
  MOD_RES (1)..(35): Xaa is C or S
  MOD_RES (15)..(16)..(17)..(18)..(19): Xaa is A or G
  MOD_RES (20)..(21)..(22)..(23): Xaa is A or G or is absent
XVPARLSSLSILFFXXXXXXXXXLKVYPDMVVEAXG

SEQ ID NO: 46187 - protein, 33 aa, Artificial Sequence
  GFR-binding peptide
  MOD_RES (1)..(33): Xaa is C or S
XVPTRLSSLSILFFDSANNVVLKVYPDMVVESX

SEQ ID NO: 46188 - protein, 34 aa, Artificial Sequence
  GFR-binding peptide
  MOD_RES (1)..(1): Xaa is C or S
  MOD_RES (15)..(16)..(17)..(18)..(19): Xaa is A or G
  MOD_RES (20)..(21)..(22)..(23): Xaa is A or G or is absent
XAPTKLSSLSVLFFXXXXXXXXXLKVYPNMVVRS

SEQ ID NO: 46189 - protein, 40 aa, Artificial Sequence
  GFR-binding peptide
  MOD_RES (4)..(5)..(39): Xaa is C or S
  MOD_RES (19)..(20)..(21)..(22)..(23): Xaa is A or G
  MOD_RES (24)..(25)..(26)..(27): Xaa is A or G or is absent
PKAXXAPTKLSSLSVLFFXXXXXXXXXLKVYPNMVVKAXG

SEQ ID NO: 46190 - protein, 36 aa, Artificial Sequence
  GFR-binding peptide
  MOD_RES (4)..(5): Xaa is C or S
PKPXXAPTKLSSLSVLFFDDSSNVILKVYPNMVVRS

SEQ ID NO: 46191 - protein, 38 aa, Artificial Sequence
  GFR-binding peptide
  MOD_RES (4)..(5)..(37): Xaa is C or S
SKAXXVPTKLSSLSILFFDKGVVTYLKVYPGMAVSEXG

SEQ ID NO: 46192 - protein, 35 aa, Artificial Sequence
  GFR-binding peptide
  MOD_RES (3)..(4): Xaa is C or S
KAXXAPTKLSSLSVLFFDSSNNVILKVYPNMVVKA

SEQ ID NO: 46193 - protein, 40 aa, Artificial Sequence
  GFR-binding peptide
  MOD_RES (2)..(3)..(37)..(39): Xaa is C or S
  MOD_RES (17)..(18)..(19)..(20)..(21): Xaa is A or G
  MOD_RES (22)..(23)..(24)..(25): Xaa is A or G or is absent
PXXAPTKLSSLSVLFFXXXXXXXXXLKVYPNMVVRSXGXH

SEQ ID NO: 46194 - protein, 41 aa, Artificial Sequence
  GFR-binding peptide
  MOD_RES (5)..(6)..(38)..(40): Xaa is C or S
VPKPXXAPTKLSSLSVLFFDDSSNVILKVYPNMVVRSXGXH

SEQ ID NO: 46195 - protein, 38 aa, Artificial Sequence
  GFR-binding peptide
  MOD_RES (35)..(37): Xaa is C or S
  MOD_RES (14)..(15)..(16)..(17)..(18): Xaa is A or G
  MOD_RES (19)..(20)..(21)..(22): Xaa is A or G or is absent
VPTKLSSLSVLFFXXXXXXXXXLKVYPEGMSVAEXGXR

SEQ ID NO: 46196 - protein, 41 aa, Artificial Sequence
  GFR-binding peptide
  MOD_RES (4)..(5)..(39)..(41): Xaa is C or S
  MOD_RES (19)..(20)..(21)..(22)..(23): Xaa is A or G
  MOD_RES (24)..(25)..(26)..(27): Xaa is A or G or is absent
PKAXXAPTKLSSLSVLFFXXXXXXXXXLKVYPNMVVKAXGX

SEQ ID NO: 46197 - protein, 35 aa, Artificial Sequence
  GFR-binding peptide
  MOD_RES (2)..(3)..(34): Xaa is C or S
TXXAPVKTSSLSMLFFDNGRVLLLKVYPMIVEEXG

SEQ ID NO: 46198 - protein, 35 aa, Artificial Sequence
  GFR-binding peptide
PSRVHHSSLSVLFFEYVRKKPKLLKVYPRLEEHLE

SEQ ID NO: 46199 - protein, 37 aa, Artificial Sequence
  GFR-binding peptide
  MOD_RES (1)..(2)..(34)..(36): Xaa is C or S
XXAPTQLSSLSVLFFDDSSNVILKVYPNMVVRAXGXH

SEQ ID NO: 46200 - protein, 32 aa, Artificial Sequence
  GFR-binding peptide
  MOD_RES (32)..(32): Xaa is C or S
VPTRLSSLSILFFDSANNVVLKVYPDMVVESX

SEQ ID NO: 46201 - protein, 35 aa, Artificial Sequence
  GFR-binding peptide
  MOD_RES (1)..(32)..(34): Xaa is C or S
XAPVKTSSLSMLFFDNGRVLLLKVYPMIVEEXGXL

SEQ ID NO: 46202 - protein, 44 aa, Artificial Sequence
  GFR-binding peptide
  MOD_RES (6)..(7)..(42)..(44): Xaa is C or S
  MOD_RES (21)..(22)..(23)..(24)..(25): Xaa is A or G
  MOD_RES (26)..(27)..(28)..(29): Xaa is A or G or is absent
KVGKAXXVPTKLSSLSVLFFXXXXXXXXXLKVYPEGMSVAEXGX

SEQ ID NO: 46203 - protein, 43 aa, Artificial Sequence
  GFR-binding peptide
  MOD_RES (4)..(41)..(43): Xaa is C or S
  MOD_RES (20)..(21)..(22)..(23)..(24): Xaa is A or G
  MOD_RES (25)..(26)..(27)..(28): Xaa is A or G or is absent
SVKXQPSRVHHSSLSVLFFXXXXXXXXXLKVYPRLEEHLEXAX

SEQ ID NO: 46204 - protein, 34 aa, Artificial Sequence
  GFR-binding peptide
SRVHHSSLSVLFFEYVRKKPKLLKVYPRLEEHLE

SEQ ID NO: 46205 - protein, 39 aa, Artificial Sequence
  GFR-binding peptide
  MOD_RES (5)..(6)..(37)..(39): Xaa is C or S
VPSTXXAPVKTSSLSMLFFDNGRVLLLKVYPMIVEEXGX

SEQ ID NO: 46206 - protein, 35 aa, Artificial Sequence
  GFR-binding peptide
  MOD_RES (2)..(3): Xaa is C or S
  MOD_RES (17)..(18)..(19)..(20)..(21): Xaa is A or G
  MOD_RES (22)..(23)..(24)..(25): Xaa is A or G or is absent
PXXVPQDLSSLSILFFXXXXXXXXXLKVYPMVVKS

SEQ ID NO: 46207 - protein, 39 aa, Artificial Sequence
  GFR-binding peptide
  MOD_RES (4)..(5)..(37)..(39): Xaa is C or S
PKAXXAPTKLSSLSVLFFDSSNNVILKVYPNMVVKAXGX

SEQ ID NO: 46208 - protein, 38 aa, Artificial Sequence
  GFR-binding peptide
  MOD_RES (4)..(5): Xaa is C or S
  MOD_RES (19)..(20)..(21)..(22)..(23): Xaa is A or G
  MOD_RES (24)..(25)..(26)..(27): Xaa is A or G or is absent
PKAXXVPTELSSLSMLFFXXXXXXXXXLKVYPEMVVEG

SEQ ID NO: 46209 - protein, 30 aa, Artificial Sequence; identical to SEQ ID NO: 664
  GFR-binding peptide

SEQ ID NO: 46210 - protein, 38 aa, Artificial Sequence
  GFR-binding peptide
  MOD_RES (1)..(2)..(36)..(38): Xaa is C or S
  MOD_RES (16)..(17)..(18)..(19)..(20): Xaa is A or G
  MOD_RES (21)..(22)..(23)..(24): Xaa is A or G or is absent
XXAPTQLSSLSVLFFXXXXXXXXXLKVYPNMVVRAXGX

SEQ ID NO: 46211 - protein, 42 aa, Artificial Sequence
  GFR-binding peptide
  MOD_RES (2)..(39)..(41): Xaa is C or S
  MOD_RES (18)..(19)..(20)..(21)..(22): Xaa is A or G
  MOD_RES (23)..(24)..(25)..(26): Xaa is A or G or is absent
KXQPSRVHHSSLSVLFFXXXXXXXXXLKVYPRLEEHLEXAXA

SEQ ID NO: 46212 - protein, 43 aa, Artificial Sequence
  GFR-binding peptide
  MOD_RES (6)..(7)..(41)..(43): Xaa is C or S
  MOD_RES (21)..(22)..(23)..(24)..(25): Xaa is A or G
  MOD_RES (26)..(27)..(28)..(29): Xaa is A or G or is absent
TVPKPXXAPTQLSSLSVLFFXXXXXXXXXLKVYPNMVVRAXGX

SEQ ID NO: 46213 - protein, 43 aa, Artificial Sequence
  GFR-binding peptide
  MOD_RES (5)..(6)..(40)..(42): Xaa is C or S
  MOD_RES (20)..(21)..(22)..(23)..(24): Xaa is A or G
  MOD_RES (25)..(26)..(27)..(28): Xaa is A or G or is absent
VPKPXXAPTKLSSLSVLFFXXXXXXXXXLKVYPNMVVRSXGXH

SEQ ID NO: 46214 - protein, 35 aa, Artificial Sequence
  GFR-binding peptide
  MOD_RES (4)..(5): Xaa is C or S
PKAXXAPTKLSSLSVLFFDSSNNVILKVYPNMVVK

SEQ ID NO: 46215 - protein, 38 aa, Artificial Sequence
  GFR-binding peptide
  MOD_RES (5)..(6)..(38): Xaa is C or S
VPKAXXAPTKLSSLSVLFFDSSNNVILKVYPNMVVKAX

SEQ ID NO: 46216 - protein, 36 aa, Artificial Sequence
  GFR-binding peptide
  MOD_RES (1)..(2)..(36): Xaa is C or S
  MOD_RES (16)..(17)..(18)..(19)..(20): Xaa is A or G
  MOD_RES (21)..(22)..(23)..(24): Xaa is A or G or is absent
XXAPTKLSSLSVLFFXXXXXXXXXLKVYPNMVVKAX

SEQ ID NO: 46217 - protein, 39 aa, Artificial Sequence
  GFR-binding peptide
  MOD_RES (2)..(3)..(36)..(38): Xaa is C or S
  MOD_RES (17)..(18)..(19)..(20)..(21): Xaa is A or G
  MOD_RES (22)..(23)..(24)..(25): Xaa is A or G or is absent
PXXVPQDLSSLSILFFXXXXXXXXXLKVYPMVVKSXKXS

SEQ ID NO: 46218 - protein, 35 aa, Artificial Sequence
  GFR-binding peptide
  MOD_RES (2)..(3): Xaa is C or S
  MOD_RES (17)..(18)..(19)..(20)..(21): Xaa is A or G
  MOD_RES (22)..(23)..(24)..(25): Xaa is A or G or is absent
PXXVSQDLSSLSILFFXXXXXXXXXLKVYPMIVKS

SEQ ID NO: 46219 - protein, 36 aa, Artificial Sequence
  GFR-binding peptide
  MOD_RES (3)..(3): Xaa is C or S
  MOD_RES (17)..(18)..(19)..(20)..(21): Xaa is A or G
  MOD_RES (22)..(23)..(24)..(25): Xaa is A or G or is absent
PTXAPTKLSSLSVLFFXXXXXXXXXLKVYPNMVVRS

SEQ ID NO: 46220 - protein, 34 aa, Artificial Sequence
  GFR-binding peptide
  MOD_RES (3)..(4): Xaa is C or S
SPXXVPQDLSSLSILFFVGRTPKVLKVYPMVVKS

SEQ ID NO: 46221 - protein, 35 aa, Artificial Sequence
  GFR-binding peptide
  MOD_RES (4)..(5): Xaa is C or S
SKAXXVPTKLSSLSILFFDKGVVTYLKVYPGMAVS

SEQ ID NO: 46222 - protein, 42 aa, Artificial Sequence
  GFR-binding peptide
  MOD_RES (5)..(6)..(40)..(42): Xaa is C or S
  MOD_RES (20)..(21)..(22)..(23)..(24): Xaa is A or G
  MOD_RES (25)..(26)..(27)..(28): Xaa is A or G or is absent
IPKAXXVPTELSSLSMLFFXXXXXXXXXLKVYPEMVVEGXGX

SEQ ID NO: 46223 - protein, 35 aa, Artificial Sequence
  GFR-binding peptide
  MOD_RES (2)..(3): Xaa is C or S
  MOD_RES (17)..(18)..(19)..(20)..(21): Xaa is A or G
  MOD_RES (22)..(23)..(24)..(25): Xaa is A or G or is absent
AXXAPTKLSSLSVLFFXXXXXXXXXLKVYPNMVVK

SEQ ID NO: 46224 - protein, 34 aa, Artificial Sequence
  GFR-binding peptide
  MOD_RES (34)..(34): Xaa is C or S
  MOD_RES (14)..(15)..(16)..(17)..(18): Xaa is A or G
  MOD_RES (19)..(20)..(21)..(22): Xaa is A or G or is absent
VPTKLSSLSILFFXXXXXXXXXLKVYPGMAVSEX

SEQ ID NO: 46225 - protein, 36 aa, Artificial Sequence
  GFR-binding peptide
  MOD_RES (2)..(36): Xaa is C or S
EXVPTEESSLSMLFFRIKPHQGQHLKVYPFLQHNKX

SEQ ID NO: 46226 - protein, 34 aa, Artificial Sequence
  GFR-binding peptide
  MOD_RES (1)..(2)..(33): Xaa is C or S
XXVPQDLSSLSILFFVGRTPKVLKVYPMVVKSXK

SEQ ID NO: 46227 - protein, 36 aa, Artificial Sequence
  GFR-binding peptide
  MOD_RES (1)..(2)..(33)..(35): Xaa is C or S
XXVPQALSSLSILFFVGRKPKVLKVYPMIVRSXKXS

SEQ ID NO: 46228 - protein, 36 aa, Artificial Sequence
  GFR-binding peptide
  MOD_RES (34)..(36): Xaa is C or S
  MOD_RES (14)..(15)..(16)..(17)..(18): Xaa is A or G
  MOD_RES (19)..(20)..(21)..(22): Xaa is A or G or is absent
TPTKMSSLSMLFFXXXXXXXXXLKVYPGMVVDRXGX

SEQ ID NO: 46229 - protein, 40 aa, Artificial Sequence
  GFR-binding peptide
  MOD_RES (5)..(37)..(39): Xaa is C or S
TKPTXAPTKLSSLSVLFFDDSSNVILKVYPNMVVRSXGXH

SEQ ID NO: 46230 - protein, 36 aa, Artificial Sequence
  GFR-binding peptide
  MOD_RES (5)..(6): Xaa is C or S
VPKPXXAPTQLSSLSVLFFDDSSNVILKVYPNMVVR

SEQ ID NO: 46231 - protein, 41 aa, Artificial Sequence
  GFR-binding peptide
  MOD_RES (6)..(7)..(39)..(41): Xaa is C or S
KASKAXXVPTKLSSLSILFFDKGVVTYLKVYPGMAVSEXGX

SEQ ID NO: 46232 - protein, 40 aa, Artificial Sequence
  GFR-binding peptide
  MOD_RES (4)..(5)..(39): Xaa is C or S
  MOD_RES (19)..(20)..(21)..(22)..(23): Xaa is A or G
  MOD_RES (24)..(25)..(26)..(27): Xaa is A or G or is absent
AGPXXTPTKMSSLSMLFFXXXXXXXXXLKVYPGMVVDRXG

SEQ ID NO: 46233 - protein, 40 aa, Artificial Sequence
  GFR-binding peptide
  MOD_RES (1)..(2)..(37)..(39): Xaa is C or S
  MOD_RES (16)..(17)..(18)..(19)..(20): Xaa is A or G
  MOD_RES (21)..(22)..(23)..(24): Xaa is A or G or is absent
XXVPTKLSSLSVLFFXXXXXXXXXLKVYPEGMSVAEXGXR

SEQ ID NO: 46234 - protein, 36 aa, Artificial Sequence
  GFR-binding peptide
  MOD_RES (5)..(6): Xaa is C or S
IPEPXXVPEKMSSLSILFFDENKNVVLKVYPNMTVE

SEQ ID NO: 46235 - protein, 35 aa, Artificial Sequence
  GFR-binding peptide
  MOD_RES (4)..(5): Xaa is C or S
AAPXXVPQALSSLSILFFVGRKPKVLKVYPMIVRS

SEQ ID NO: 46236 - protein, 37 aa, Artificial Sequence
  GFR-binding peptide
  MOD_RES (6)..(7): Xaa is C or S
AVPKAXXAPTKLSSLSVLFFDSSNNVILKVYPNMVVK

SEQ ID NO: 46237 - protein, 39 aa, Artificial Sequence
  GFR-binding peptide
  MOD_RES (2)..(3)..(36)..(38): Xaa is C or S
AXXVPTKLSSLSVLFFDDMGVPTLKVYPEGMSVAEXGXR

SEQ ID NO: 46238 - protein, 39 aa, Artificial Sequence
  GFR-binding peptide
  MOD_RES (6)..(7)..(39): Xaa is C or S
KASKAXXVPTKLSSLSILFFDKGVVTYLKVYPGMAVSEX

SEQ ID NO: 46239 - protein, 33 aa, Artificial Sequence
  GFR-binding peptide
  MOD_RES (1)..(33): Xaa is C or S
XVPTKLSSLSILFFDKGVVTYLKVYPGMAVSEX

SEQ ID NO: 46240 - protein, 41 aa, Artificial Sequence
  GFR-binding peptide
  MOD_RES (4)..(5)..(38)..(40): Xaa is C or S
  MOD_RES (19)..(20)..(21)..(22)..(23): Xaa is A or G
  MOD_RES (24)..(25)..(26)..(27): Xaa is A or G or is absent
ASPXXVSQDLSSLSILFFXXXXXXXXXLKVYPMIVKSXKXS

SEQ ID NO: 46241 - protein, 36 aa, Artificial Sequence
  GFR-binding peptide
  MOD_RES (1)..(2)..(34)..(36): Xaa is C or S
XXVPTKLSSLSILFFDKGVVTYLKVYPGMAVSEXGX

SEQ ID NO: 46242 - protein, 37 aa, Artificial Sequence
  GFR-binding peptide
  MOD_RES (1)..(2)..(36): Xaa is C or S
  MOD_RES (16)..(17)..(18)..(19)..(20): Xaa is A or G
  MOD_RES (21)..(22)..(23)..(24): Xaa is A or G or is absent
XXVPTKLSSLSILFFXXXXXXXXXLKVYPGMAVSEXG

SEQ ID NO: 46243 - protein, 35 aa, Artificial Sequence
  GFR-binding peptide
  MOD_RES (1)..(2)..(35): Xaa is C or S
  MOD_RES (16)..(17)..(18)..(19)..(20): Xaa is A or G
  MOD_RES (21)..(22)..(23)..(24): Xaa is A or G or is absent
XXVPQDLSSLSILFFXXXXXXXXXLKVYPMVVKSX

SEQ ID NO: 46244 - protein, 36 aa, Artificial Sequence
  GFR-binding peptide
  MOD_RES (4)..(4): Xaa is C or S
  MOD_RES (18)..(19)..(20)..(21)..(22): Xaa is A or G
  MOD_RES (23)..(24)..(25)..(26): Xaa is A or G or is absent
GLEXVPTEESSLSMLFFXXXXXXXXXLKVYPFLQHN

SEQ ID NO: 46245 - protein, 35 aa, Artificial Sequence
  GFR-binding peptide
  MOD_RES (2)..(3): Xaa is C or S
  MOD_RES (17)..(18)..(19)..(20)..(21): Xaa is A or G
  MOD_RES (22)..(23)..(24)..(25): Xaa is A or G or is absent
PXXVPEKMSSLSILFFXXXXXXXXXLKVYPNMTVE

SEQ ID NO: 46246 - protein, 40 aa, Artificial Sequence
  GFR-binding peptide
  MOD_RES (6)..(7)..(40): Xaa is C or S
  MOD_RES (21)..(22)..(23)..(24)..(25): Xaa is A or G
  MOD_RES (26)..(27)..(28)..(29): Xaa is A or G or is absent
ASAAPXXVPQALSSLSILFFXXXXXXXXXLKVYPMIVRSX

SEQ ID NO: 46247 - protein, 34 aa, Artificial Sequence
  GFR-binding peptide
  MOD_RES (34)..(34): Xaa is C or S
  MOD_RES (14)..(15)..(16)..(17)..(18): Xaa is A or G
  MOD_RES (19)..(20)..(21)..(22): Xaa is A or G or is absent
APTKLSSLSVLFFXXXXXXXXXLKVYPNMVVRSX

SEQ ID NO: 46248 - protein, 42 aa, Artificial Sequence
  GFR-binding peptide
  MOD_RES (5)..(6)..(39)..(41): Xaa is C or S
VGKAXXVPTKLSSLSVLFFDDMGVPTLKVYPEGMSVAEXGXR

SEQ ID NO: 46249 - protein, 37 aa, Artificial Sequence
  GFR-binding peptide
  MOD_RES (1)..(2)..(34)..(36): Xaa is C or S
XXAPTKLSSLSVLFFDSSNNVILKVYPNMVVKAXGXH

SEQ ID NO: 46250 - protein, 35 aa, Artificial Sequence
  GFR-binding peptide
  MOD_RES (1)..(34): Xaa is C or S
  MOD_RES (15)..(16)..(17)..(18)..(19): Xaa is A or G
  MOD_RES (20)..(21)..(22)..(23): Xaa is A or G or is absent
XAPVKTSSLSMLFFXXXXXXXXXLKVYPMIVEEXG

SEQ ID NO: 46251 - protein, 40 aa, Artificial Sequence
  GFR-binding peptide
  MOD_RES (4)..(5)..(37)..(39): Xaa is C or S
SKAXXVPTKLSSLSILFFDKGVVTYLKVYPGMAVSEXGXR

SEQ ID NO: 46252 - protein, 44 aa, Artificial Sequence
  GFR-binding peptide
  MOD_RES (7)..(41)..(43): Xaa is C or S
  MOD_RES (21)..(22)..(23)..(24)..(25): Xaa is A or G
  MOD_RES (26)..(27)..(28)..(29): Xaa is A or G or is absent
NDEGLEXVPTEESSLSMLFFXXXXXXXXXLKVYPFLQHNKXEXR

SEQ ID NO: 46253 - protein, 38 aa, Artificial Sequence
  GFR-binding peptide
  MOD_RES (6)..(7): Xaa is C or S
GIPEPXXVPEKMSSLSILFFDENKNVVLKVYPNMTVES

SEQ ID NO: 46254 - protein, 36 aa, Artificial Sequence
  GFR-binding peptide
  MOD_RES (5)..(6): Xaa is C or S
VPKAXXAPTKLSSLSVLFFDSSNNVILKVYPNMVVK

SEQ ID NO: 46255 - protein, 37 aa, Artificial Sequence
  GFR-binding peptide
  MOD_RES (1)..(35)..(37): Xaa is C or S
  MOD_RES (15)..(16)..(17)..(18)..(19): Xaa is A or G
  MOD_RES (20)..(21)..(22)..(23): Xaa is A or G or is absent
XVPTRLSSLSILFFXXXXXXXXXLKVYPDMVVESXGX

SEQ ID NO: 46256 - protein, 39 aa, Artificial Sequence
  GFR-binding peptide
  MOD_RES (4)..(36)..(38): Xaa is C or S
KPTXAPTKLSSLSVLFFDDSSNVILKVYPNMVVRSXGXH

SEQ ID NO: 46257 - protein, 34 aa, Artificial Sequence
  GFR-binding peptide
  MOD_RES (2)..(3): Xaa is C or S
TXXVPTRLSSLSILFFDSANNVVLKVYPDMVVES

SEQ ID NO: 46258 - protein, 35 aa, Artificial Sequence
  GFR-binding peptide
  MOD_RES (4)..(5): Xaa is C or S
ASPXXVPQDLSSLSILFFVGRTPKVLKVYPMVVKS

SEQ ID NO: 46259 - protein, 37 aa, Artificial Sequence
  GFR-binding peptide
  MOD_RES (2)..(3): Xaa is C or S
  MOD_RES (17)..(18)..(19)..(20)..(21): Xaa is A or G
  MOD_RES (22)..(23)..(24)..(25): Xaa is A or G or is absent
AXXVPTKLSSLSVLFFXXXXXXXXXLKVYPEGMSVAE

SEQ ID NO: 46260 - protein, 39 aa, Artificial Sequence
  GFR-binding peptide
  MOD_RES (4)..(4): Xaa is C or S
  MOD_RES (20)..(21)..(22)..(23)..(24): Xaa is A or G
  MOD_RES (25)..(26)..(27)..(28): Xaa is A or G or is absent
SVKXQPSRVHHSSLSVLFFXXXXXXXXXLKVYPRLEEHL

SEQ ID NO: 46261 - protein, 35 aa, Artificial Sequence
  GFR-binding peptide
  MOD_RES (34)..(34): Xaa is C or S
  MOD_RES (14)..(15)..(16)..(17)..(18): Xaa is A or G
  MOD_RES (19)..(20)..(21)..(22): Xaa is A or G or is absent
APTQLSSLSVLFFXXXXXXXXXLKVYPNMVVRAXG

SEQ ID NO: 46262 - protein, 35 aa, Artificial Sequence
  GFR-binding peptide
  MOD_RES (1)..(34): Xaa is C or S
  MOD_RES (15)..(16)..(17)..(18)..(19): Xaa is A or G
  MOD_RES (20)..(21)..(22)..(23): Xaa is A or G or is absent
XVPQDLSSLSILFFXXXXXXXXXLKVYPMVVKSXK

SEQ ID NO: 46263 - protein, 35 aa, Artificial Sequence
  GFR-binding peptide
  MOD_RES (1)..(35): Xaa is C or S
  MOD_RES (15)..(16)..(17)..(18)..(19): Xaa is A or G
  MOD_RES (20)..(21)..(22)..(23): Xaa is A or G or is absent
XAPTKLSSLSVLFFXXXXXXXXXLKVYPNMVVRSX

SEQ ID NO: 46264 - protein, 38 aa, Artificial Sequence
  GFR-binding peptide
  MOD_RES (2)..(36)..(38): Xaa is C or S
  MOD_RES (16)..(17)..(18)..(19)..(20): Xaa is A or G
  MOD_RES (21)..(22)..(23)..(24): Xaa is A or G or is absent
TXAPTKLSSLSVLFFXXXXXXXXXLKVYPNMVVRSXGX

SEQ ID NO: 46265 - protein, 38 aa, Artificial Sequence
  GFR-binding peptide
  MOD_RES (3)..(4)..(35)..(37): Xaa is C or S
APXXVPQALSSLSILFFVGRKPKVLKVYPMIVRSXKXS

SEQ ID NO: 46266 - protein, 30 aa, Artificial Sequence; identical to SEQ ID NO: 663
  GFR-binding peptide

SEQ ID NO: 46267 - protein, 37 aa, Artificial Sequence
  GFR-binding peptide
  MOD_RES (3)..(4)..(35)..(37): Xaa is C or S
SPXXVSQDLSSLSILFFIGKTPKILKVYPMIVKSXKX

SEQ ID NO: 46268 - protein, 34 aa, Artificial Sequence
  GFR-binding peptide
  MOD_RES (32)..(34): Xaa is C or S
VPEKMSSLSILFFDENKNVVLKVYPNMTVESXAX

SEQ ID NO: 46269 - protein, 40 aa, Artificial Sequence
  GFR-binding peptide
  MOD_RES (5)..(6)..(40): Xaa is C or S
  MOD_RES (20)..(21)..(22)..(23)..(24): Xaa is A or G
  MOD_RES (25)..(26)..(27)..(28): Xaa is A or G or is absent
IPKAXXVPTELSSLSMLFFXXXXXXXXXLKVYPEMVVEGX

SEQ ID NO: 46270 - protein, 37 aa, Artificial Sequence
  GFR-binding peptide
  MOD_RES (4)..(5)..(37): Xaa is C or S
PKAXXAPTKLSSLSVLFFDSSNNVILKVYPNMVVKAX

SEQ ID NO: 46271 - protein, 37 aa, Artificial Sequence
  GFR-binding peptide
  MOD_RES (2)..(3)..(35)..(37): Xaa is C or S
AXXVPTKLSSLSILFFDKGVVTYLKVYPGMAVSEXGX

SEQ ID NO: 46272 - protein, 33 aa, Artificial Sequence
  GFR-binding peptide
  MOD_RES (32)..(32): Xaa is C or S
VPTRLSSLSILFFDSANNVVLKVYPDMVVESXG

SEQ ID NO: 46273 - protein, 40 aa, Artificial Sequence
  GFR-binding peptide
  MOD_RES (4)..(4): Xaa is C or S
  MOD_RES (20)..(21)..(22)..(23)..(24): Xaa is A or G
  MOD_RES (25)..(26)..(27)..(28): Xaa is A or G or is absent
SVKXQPSRVHHSSLSVLFFXXXXXXXXXLKVYPRLEEHLE

SEQ ID NO: 46274 - protein, 37 aa, Artificial Sequence
  GFR-binding peptide
  MOD_RES (34)..(36): Xaa is C or S
  MOD_RES (14)..(15)..(16)..(17)..(18): Xaa is A or G
  MOD_RES (19)..(20)..(21)..(22): Xaa is A or G or is absent
VPTELSSLSMLFFXXXXXXXXXLKVYPEMVVEGXGXR

SEQ ID NO: 46275 - protein, 36 aa, Artificial Sequence
  GFR-binding peptide
  MOD_RES (2)..(36): Xaa is C or S
  MOD_RES (16)..(17)..(18)..(19)..(20): Xaa is A or G
  MOD_RES (21)..(22)..(23)..(24): Xaa is A or G or is absent
EXVPTEESSLSMLFFXXXXXXXXXLKVYPFLQHNKX

SEQ ID NO: 46276 - protein, 36 aa, Artificial Sequence
  GFR-binding peptide
  MOD_RES (4)..(4): Xaa is C or S
GLEXVPTEESSLSMLFFRIKPHQGQHLKVYPFLQHN

SEQ ID NO: 46277 - protein, 35 aa, Artificial Sequence
  GFR-binding peptide
  MOD_RES (1)..(2)..(34): Xaa is C or S
XXVPTKLSSLSILFFDKGVVTYLKVYPGMAVSEXG

SEQ ID NO: 46278 - protein, 36 aa, Artificial Sequence
  GFR-binding peptide
  MOD_RES (1)..(2): Xaa is C or S
  MOD_RES (16)..(17)..(18)..(19)..(20): Xaa is A or G
  MOD_RES (21)..(22)..(23)..(24): Xaa is A or G or is absent
XXVPTKLSSLSVLFFXXXXXXXXXLKVYPEGMSVAE

SEQ ID NO: 46279 - protein, 40 aa, Artificial Sequence
  GFR-binding peptide
  MOD_RES (6)..(7)..(39): Xaa is C or S
AVPKAXXAPTKLSSLSVLFFDSSNNVILKVYPNMVVKAXG

SEQ ID NO: 46280 - protein, 36 aa, Artificial Sequence
  GFR-binding peptide
  MOD_RES (1)..(34)..(36): Xaa is C or S
XVPTKLSSLSVLFFDDMGVPTLKVYPEGMSVAEXGX

SEQ ID NO: 46281 - protein, 44 aa, Artificial Sequence
  GFR-binding peptide
  MOD_RES (4)..(41)..(43): Xaa is C or S
  MOD_RES (20)..(21)..(22)..(23)..(24): Xaa is A or G
  MOD_RES (25)..(26)..(27)..(28): Xaa is A or G or is absent
SVKXQPSRVHHSSLSVLFFXXXXXXXXXLKVYPRLEEHLEXAXA

SEQ ID NO: 46282 - protein, 35 aa, Artificial Sequence
  GFR-binding peptide
  MOD_RES (1)..(2)..(34): Xaa is C or S
XXAPTQLSSLSVLFFDDSSNVILKVYPNMVVRAXG

SEQ ID NO: 46283 - protein, 39 aa, Artificial Sequence
  GFR-binding peptide
  MOD_RES (3)..(4)..(36)..(38): Xaa is C or S
KPXXAPTKLSSLSVLFFDDSSNVILKVYPNMVVRSXGXH

SEQ ID NO: 46284 - protein, 35 aa, Artificial Sequence
  GFR-binding peptide
  MOD_RES (1)..(33)..(35): Xaa is C or S
XTPTKMSSLSMLFFNDKQQIILKVYPGMVVDRXGX

SEQ ID NO: 46285 - protein, 38 aa, Artificial Sequence
  GFR-binding peptide
  MOD_RES (1)..(35)..(37): Xaa is C or S
  MOD_RES (15)..(16)..(17)..(18)..(19): Xaa is A or G
  MOD_RES (20)..(21)..(22)..(23): Xaa is A or G or is absent
XTPTKMSSLSMLFFXXXXXXXXXLKVYPGMVVDRXGXS

SEQ ID NO: 46286 - protein, 32 aa, Artificial Sequence
  GFR-binding peptide
  MOD_RES (1)..(1): Xaa is C or S
XAPTKLSSLSVLFFDSSNNVILKVYPNMVVKA

SEQ ID NO: 46287 - protein, 38 aa, Artificial Sequence
  GFR-binding peptide
  MOD_RES (6)..(7): Xaa is C or S
GSAGPXXTPTKMSSLSMLFFNDKQQIILKVYPGMVVDR

SEQ ID NO: 46288 - protein, 39 aa, Artificial Sequence
  GFR-binding peptide
  MOD_RES (2)..(39): Xaa is C or S
  MOD_RES (18)..(19)..(20)..(21)..(22): Xaa is A or G
  MOD_RES (23)..(24)..(25)..(26): Xaa is A or G or is absent
KXQPSRVHHSSLSVLFFXXXXXXXXXLKVYPRLEEHLEX

SEQ ID NO: 46289 - protein, 35 aa, Artificial Sequence
  GFR-binding peptide
  MOD_RES (1)..(2)..(34): Xaa is C or S
XXVPARLSSLSILFFDAANNVVLKVYPDMVVEAXG

SEQ ID NO: 46290 - protein, 35 aa, Artificial Sequence
  GFR-binding peptide
  MOD_RES (34)..(34): Xaa is C or S
  MOD_RES (14)..(15)..(16)..(17)..(18): Xaa is A or G
  MOD_RES (19)..(20)..(21)..(22): Xaa is A or G or is absent
APTKLSSLSVLFFXXXXXXXXXLKVYPNMVVKAXG

SEQ ID NO: 46291 - protein, 35 aa, Artificial Sequence
  GFR-binding peptide
  MOD_RES (1)..(1): Xaa is C or S
XQPSRVHHSSLSVLFFEYVRKKPKLLKVYPRLEEH

SEQ ID NO: 46292 - protein, 37 aa, Artificial Sequence
  GFR-binding peptide
  MOD_RES (3)..(4)..(35)..(37): Xaa is C or S
SPXXVPQDLSSLSILFFVGRTPKVLKVYPMVVKSXKX

SEQ ID NO: 46293 - protein, 38 aa, Artificial Sequence
  GFR-binding peptide
  MOD_RES (1)..(36)..(38): Xaa is C or S
  MOD_RES (15)..(16)..(17)..(18)..(19): Xaa is A or G
  MOD_RES (20)..(21)..(22)..(23): Xaa is A or G or is absent
XVPTKLSSLSVLFFXXXXXXXXXLKVYPEGMSVAEXGX

SEQ ID NO: 46294 - protein, 35 aa, Artificial Sequence
  GFR-binding peptide
  MOD_RES (32)..(34): Xaa is C or S
VPTKLSSLSILFFDKGVVTYLKVYPGMAVSEXGXR

SEQ ID NO: 46295 - protein, 39 aa, Artificial Sequence
  GFR-binding peptide
  MOD_RES (3)..(4)..(38): Xaa is C or S
  MOD_RES (18)..(19)..(20)..(21)..(22): Xaa is A or G
  MOD_RES (23)..(24)..(25)..(26): Xaa is A or G or is absent
KAXXAPTKLSSLSVLFFXXXXXXXXXLKVYPNMVVKAXG

SEQ ID NO: 46296 - protein, 43 aa, Artificial Sequence
  GFR-binding peptide
  MOD_RES (7)..(41)..(43): Xaa is C or S
  MOD_RES (21)..(22)..(23)..(24)..(25): Xaa is A or G
  MOD_RES (26)..(27)..(28)..(29): Xaa is A or G or is absent
NDEGLEXVPTEESSLSMLFFXXXXXXXXXLKVYPFLQHNKXEX

SEQ ID NO: 46297 - protein, 33 aa, Artificial Sequence
  GFR-binding peptide
  MOD_RES (1)..(32): Xaa is C or S
XVPQDLSSLSILFFVGRTPKVLKVYPMVVKSXK

SEQ ID NO: 46298 - protein, 41 aa, Artificial Sequence
  GFR-binding peptide
  MOD_RES (2)..(39): Xaa is C or S
AXELHEELRNSLQELKPKKRVYEYYLVTLPEHHVRSPQXKV

SEQ ID NO: 46299 - protein, 34 aa, Artificial Sequence
  GFR-binding peptide
  MOD_RES (1)..(33)..(34): Xaa is C or S
XGEVVMEVQVEKVVKDYEDVKAMKVSRLETPVXX

SEQ ID NO: 46300 - protein, 36 aa, Artificial Sequence; identical to SEQ ID NO: 9780
  GFR-binding peptide
  MOD_RES (2)..(4)..(36): Xaa is C or S

SEQ ID NO: 46301 - protein, 35 aa, Artificial Sequence
  GFR-binding peptide
  MOD_RES (2)..(34)..(35): Xaa is C or S
GXGEVVMEVQVEKVVKDYEDVKAMKVSRLETPVXX

SEQ ID NO: 46302 - protein, 36 aa, Artificial Sequence
  GFR-binding peptide
  MOD_RES (35)..(35): Xaa is C or S
  MOD_RES (11)..(12)..(13)..(14)..(15): Xaa is A or G
  MOD_RES (16)..(17)..(18)..(19): Xaa is A or G or is absent
HDELTNSLQEXXXXXXXXXYYLVTLPELQVQTPRXQ

SEQ ID NO: 46303 - protein, 39 aa, Artificial Sequence
  GFR-binding peptide
  MOD_RES (1)..(3)..(35)..(36): Xaa is C or S
XGXSRVVMNVQVEKIVNSSDDVKAVKVSRLKTPAXXPKP

SEQ ID NO: 46304 - protein, 34 aa, Artificial Sequence
  GFR-binding peptide
  MOD_RES (1)..(3)..(34): Xaa is C or S
XKXSRVIMVQVEKVKPKRGVVKAIKVSRLAQPVX

SEQ ID NO: 46305 - protein, 35 aa, Artificial Sequence; identical to SEQ ID NO: 9784
  GFR-binding peptide
  MOD_RES (1)..(33)..(34): Xaa is C or S

SEQ ID NO: 46306 - protein, 34 aa, Artificial Sequence; identical to SEQ ID NO: 9785
  GFR-binding peptide
  MOD_RES (2)..(34): Xaa is C or S

SEQ ID NO: 46307 - protein, 38 aa, Artificial Sequence
  GFR-binding peptide
  MOD_RES (2)..(4)..(38): Xaa is C or S
  MOD_RES (16)..(17)..(18)..(19)..(20): Xaa is A or G
  MOD_RES (21)..(22)..(23)..(24): Xaa is A or G or is absent
RXEXKNHQLFNSLQEXXXXXXXXXYYLMTLPEEETPVX

SEQ ID NO: 46308 - protein, 38 aa, Artificial Sequence
  GFR-binding peptide
  MOD_RES (2)..(4)..(36): Xaa is C or S
HXGXSRVVMNSMEGIIVNSSDDMIQVTINSLKTPAXTP

SEQ ID NO: 46309 - protein, 40 aa, Artificial Sequence; identical to SEQ ID NO: 9786
  GFR-binding peptide
  MOD_RES (2)..(34)..(35): Xaa is C or S

SEQ ID NO: 46310 - protein, 38 aa, Artificial Sequence; identical to SEQ ID NO: 17054
  GFR-binding peptide
  MOD_RES (1)..(3): Xaa is C or S
  MOD_RES (16)..(17)..(18)..(19)..(20): Xaa is A or G
  MOD_RES (21)..(22)..(23)..(24): Xaa is A or G or is absent

SEQ ID NO: 46311 - protein, 41 aa, Artificial Sequence
  GFR-binding peptide
  MOD_RES (2)..(4)..(38): Xaa is C or S
RXEXKNHQLFNSLQEHQGQHPKIRYYVMPLPEEETPVXELG

SEQ ID NO: 46312 - protein, 42 aa, Artificial Sequence
  GFR-binding peptide
  MOD_RES (1)..(3)..(37)..(38): Xaa is C or S
  MOD_RES (15)..(16)..(17)..(18)..(19): Xaa is A or G
  MOD_RES (20)..(21)..(22)..(23): Xaa is A or G or is absent
XGXARVVMNVQVEKXXXXXXXXXVKAVKVSRLQTPAXXPKPV

SEQ ID NO: 46313 - protein, 36 aa, Artificial Sequence; identical to SEQ ID NO: 9790
  GFR-binding peptide
  MOD_RES (1)..(35)..(36): Xaa is C or S
  MOD_RES (13)..(14)..(15)..(16)..(17): Xaa is A or G
  MOD_RES (18)..(19)..(20)..(21): Xaa is A or G or is absent

SEQ ID NO: 46314 - protein, 36 aa, Artificial Sequence
  GFR-binding peptide
  MOD_RES (2)..(4): Xaa is C or S
  MOD_RES (15)..(16)..(17)..(18)..(19): Xaa is A or G
  MOD_RES (20)..(21)..(22)..(23): Xaa is A or G or is absent
SXKXSKVIMVTAKKXXXXXXXXXIKRIQVPRLDQSV

SEQ ID NO: 46315 - protein, 39 aa, Artificial Sequence; identical to SEQ ID NO: 17056
  GFR-binding peptide
  MOD_RES (2)..(36): Xaa is C or S
  MOD_RES (14)..(15)..(16)..(17)..(18): Xaa is A or G
  MOD_RES (19)..(20)..(21)..(22): Xaa is A or G or is absent

SEQ ID NO: 46316 - protein, 38 aa, Artificial Sequence
  GFR-binding peptide
  MOD_RES (1)..(3)..(37): Xaa is C or S
XEXKNHQLFNSLQEHQGQHPKIRYYVMPLPEEETPVXE

SEQ ID NO: 46317 - protein, 41 aa, Artificial Sequence; identical to SEQ ID NO: 9791
  GFR-binding peptide
  MOD_RES (1)..(3)..(37)..(38): Xaa is C or S
  MOD_RES (15)..(16)..(17)..(18)..(19): Xaa is A or G
  MOD_RES (20)..(21)..(22)..(23): Xaa is A or G or is absent

SEQ ID NO: 46318 - protein, 39 aa, Artificial Sequence
  GFR-binding peptide
  MOD_RES (1)..(35): Xaa is C or S
  MOD_RES (13)..(14)..(15)..(16)..(17): Xaa is A or G
  MOD_RES (18)..(19)..(20)..(21): Xaa is A or G or is absent
XSRVVMNSMEGIXXXXXXXXXMIQVTINSLKTPAXTPKT

SEQ ID NO: 46319 - protein, 40 aa, Artificial Sequence
  GFR-binding peptide
  MOD_RES (2)..(34)..(35): Xaa is C or S
GXGEVVMEVTAKKVVKDYEDIKRMQVPRLETPVXXAKPIS

SEQ ID NO: 46320 - protein, 33 aa, Artificial Sequence
  GFR-binding peptide
  MOD_RES (33)..(33): Xaa is C or S
  MOD_RES (11)..(12)..(13)..(14)..(15): Xaa is A or G
  MOD_RES (16)..(17)..(18)..(19): Xaa is A or G or is absent
RVVMNSMEGIXXXXXXXXXMIQVTINSLQTPAX

SEQ ID NO: 46321 - protein, 36 aa, Artificial Sequence
  GFR-binding peptide
  MOD_RES (2)..(33)..(34): Xaa is C or S
KXSKVIMVQVEKIKPTKGIVKAIKVSRLDQSVXXPS

SEQ ID NO: 46322 - protein, 43 aa, Artificial Sequence
  GFR-binding peptide
  MOD_RES (1)..(3)..(40): Xaa is C or S
  MOD_RES (16)..(17)..(18)..(19)..(20): Xaa is A or G
  MOD_RES (21)..(22)..(23)..(24): Xaa is A or G or is absent
XAXELHEELRNSLQEXXXXXXXXXYYVVPLPEHHVRSPQXKVS

SEQ ID NO: 46323 - protein, 32 aa, Artificial Sequence; identical to SEQ ID NO: 17057
  GFR-binding peptide

SEQ ID NO: 46324 - protein, 42 aa, Artificial Sequence; identical to SEQ ID NO: 9793
  GFR-binding peptide
  MOD_RES (1)..(3)..(36)..(37): Xaa is C or S
  MOD_RES (14)..(15)..(16)..(17)..(18): Xaa is A or G
  MOD_RES (19)..(20)..(21)..(22): Xaa is A or G or is absent

SEQ ID NO: 46325 - protein, 42 aa, Artificial Sequence; identical to SEQ ID NO: 17058
  GFR-binding peptide
  MOD_RES (1)..(38): Xaa is C or S

SEQ ID NO: 46326 - protein, 35 aa, Artificial Sequence; identical to SEQ ID NO: 17060
  GFR-binding peptide
  MOD_RES (35)..(35): Xaa is C or S
  MOD_RES (11)..(12)..(13)..(14)..(15): Xaa is A or G
  MOD_RES (16)..(17)..(18)..(19): Xaa is A or G or is absent

SEQ ID NO: 46327 - protein, 35 aa, Artificial Sequence; identical to SEQ ID NO: 9797
  GFR-binding peptide
  MOD_RES (2)..(34)..(35): Xaa is C or S

SEQ ID NO: 46328 - protein, 35 aa, Artificial Sequence
  GFR-binding peptide
  MOD_RES (12)..(13)..(14)..(15)..(16): Xaa is A or G
  MOD_RES (17)..(18)..(19)..(20): Xaa is A or G or is absent
LHDELTNSLQEXXXXXXXXXYYLVTLPELQVQTPR

SEQ ID NO: 46329 - protein, 42 aa, Artificial Sequence
  GFR-binding peptide
  MOD_RES (1)..(3)..(40): Xaa is C or S
  MOD_RES (16)..(17)..(18)..(19)..(20): Xaa is A or G
  MOD_RES (21)..(22)..(23)..(24): Xaa is A or G or is absent
XKXALHDELTNSLQEXXXXXXXXXYYLVTLPELQVQTPRXQV

SEQ ID NO: 46330 - protein, 34 aa, Artificial Sequence
  GFR-binding peptide
  MOD_RES (33)..(34): Xaa is C or S
  MOD_RES (11)..(12)..(13)..(14)..(15): Xaa is A or G
  MOD_RES (16)..(17)..(18)..(19): Xaa is A or G or is absent
RVVMNVQVEKXXXXXXXXXVKAVKVSRLKTPAXX

SEQ ID NO: 46331 - protein, 35 aa, Artificial Sequence
  GFR-binding peptide
  MOD_RES (2)..(4): Xaa is C or S
RXGXGEVVMDVQVEKVVKENEDVKAMKVSRLETPV

SEQ ID NO: 46332 - protein, 33 aa, Artificial Sequence; identical to SEQ ID NO: 9800
  GFR-binding peptide
  MOD_RES (12)..(13)..(14)..(15)..(16): Xaa is A or G
  MOD_RES (17)..(18)..(19)..(20): Xaa is A or G or is absent

SEQ ID NO: 46333 - protein, 39 aa, Artificial Sequence; identical to SEQ ID NO: 9803
  GFR-binding peptide
  MOD_RES (1)..(3)..(34)..(35): Xaa is C or S

SEQ ID NO: 46334 - protein, 30 aa, Artificial Sequence
  GFR-binding peptide
SKVVMVTAKKVKPTRGVIKRIQVPRLDQPV

SEQ ID NO: 46335 - protein, 38 aa, Artificial Sequence
  GFR-binding peptide
  MOD_RES (34)..(34): Xaa is C or S
  MOD_RES (12)..(13)..(14)..(15)..(16): Xaa is A or G
  MOD_RES (17)..(18)..(19)..(20): Xaa is A or G or is absent
KNHQLFNSLQEXXXXXXXXXYYVMPLPEEETPVXELGE

SEQ ID NO: 46336 - protein, 39 aa, Artificial Sequence; identical to SEQ ID NO: 9805
  GFR-binding peptide
  MOD_RES (1)..(3)..(37): Xaa is C or S
  MOD_RES (15)..(16)..(17)..(18)..(19): Xaa is A or G
  MOD_RES (20)..(21)..(22)..(23): Xaa is A or G or is absent

SEQ ID NO: 46337 - protein, 39 aa, Artificial Sequence
  GFR-binding peptide
  MOD_RES (33)..(33): Xaa is C or S
  MOD_RES (11)..(12)..(13)..(14)..(15): Xaa is A or G
  MOD_RES (16)..(17)..(18)..(19): Xaa is A or G or is absent
NHQLFNSLQEXXXXXXXXXYYVMPLPEEETPVXELGEDN

SEQ ID NO: 46338 - protein, 40 aa, Artificial Sequence
  GFR-binding peptide
  MOD_RES (1)..(3)..(35): Xaa is C or S
XGXSRVVMNVTAKKIVNSSDDIKRVQVPRLKTPAXTPKTV

SEQ ID NO: 46339 - protein, 36 aa, Artificial Sequence; identical to SEQ ID NO: 35556
  GFR-binding peptide
  MOD_RES (1)..(32)..(33): Xaa is C or S

SEQ ID NO: 46340 - protein, 37 aa, Artificial Sequence; identical to SEQ ID NO: 9809
  GFR-binding peptide
  MOD_RES (32)..(33): Xaa is C or S

SEQ ID NO: 46341 - protein, 33 aa, Artificial Sequence
  GFR-binding peptide
  MOD_RES (1)..(32)..(33): Xaa is C or S
XSKVIMVQVEKIKPTKGIVKAIKVSRLDQSVXX

SEQ ID NO: 46342 - protein, 39 aa, Artificial Sequence; identical to SEQ ID NO: 17069
  GFR-binding peptide
  MOD_RES (1)..(38): Xaa is C or S

SEQ ID NO: 46343 - protein, 36 aa, Artificial Sequence; identical to SEQ ID NO: 9813
  GFR-binding peptide
  MOD_RES (33)..(34): Xaa is C or S
  MOD_RES (11)..(12)..(13)..(14)..(15): Xaa is A or G
  MOD_RES (16)..(17)..(18)..(19): Xaa is A or G or is absent

SEQ ID NO: 46344 - protein, 39 aa, Artificial Sequence
  GFR-binding peptide
  MOD_RES (2)..(33)..(34): Xaa is C or S
KXSKVIMVQVEKIKPTKGIVKAIKVSRLDQSVXXPSASA

SEQ ID NO: 46345 - protein, 38 aa, Artificial Sequence
  GFR-binding peptide
  MOD_RES (34)..(35): Xaa is C or S
  MOD_RES (12)..(13)..(14)..(15)..(16): Xaa is A or G
  MOD_RES (17)..(18)..(19)..(20): Xaa is A or G or is absent
SRVVMNSMEGIXXXXXXXXXMIQVTINSLKTPAXXPKP

SEQ ID NO: 46346 - protein, 41 aa, Artificial Sequence; identical to SEQ ID NO: 9815
  GFR-binding peptide
  MOD_RES (1)..(3)..(36)..(37): Xaa is C or S
  MOD_RES (14)..(15)..(16)..(17)..(18): Xaa is A or G
  MOD_RES (19)..(20)..(21)..(22): Xaa is A or G or is absent

SEQ ID NO: 46347 - protein, 40 aa, Artificial Sequence; identical to SEQ ID NO: 17072
  GFR-binding peptide
  MOD_RES (2)..(39): Xaa is C or S
  MOD_RES (15)..(16)..(17)..(18)..(19): Xaa is A or G
  MOD_RES (20)..(21)..(22)..(23): Xaa is A or G or is absent

SEQ ID NO: 46348 - protein, 39 aa, Artificial Sequence; identical to SEQ ID NO: 9817
  GFR-binding peptide
  MOD_RES (1)..(3)..(36)..(37): Xaa is C or S
  MOD_RES (14)..(15)..(16)..(17)..(18): Xaa is A or G
  MOD_RES (19)..(20)..(21)..(22): Xaa is A or G or is absent

SEQ ID NO: 46349 - protein, 37 aa, Artificial Sequence; identical to SEQ ID NO: 17074
  GFR-binding peptide
  MOD_RES (36)..(36): Xaa is C or S
  MOD_RES (12)..(13)..(14)..(15)..(16): Xaa is A or G
  MOD_RES (17)..(18)..(19)..(20): Xaa is A or G or is absent

SEQ ID NO: 46350 - protein, 39 aa, Artificial Sequence
  GFR-binding peptide
  MOD_RES (2)..(4)..(36)..(37): Xaa is C or S
HXGXSRVVMNSMEGIIVNSSDDMIQVTINSLKTPAXXPK

SEQ ID NO: 46351 - protein, 40 aa, Artificial Sequence
  GFR-binding peptide
  MOD_RES (1)..(35)..(36): Xaa is C or S
  MOD_RES (13)..(14)..(15)..(16)..(17): Xaa is A or G
  MOD_RES (18)..(19)..(20)..(21): Xaa is A or G or is absent
XGEVVMDVQVEKXXXXXXXXXVKAMKVSRLETPVXXAKPI

SEQ ID NO: 46352 - protein, 31 aa, Artificial Sequence
  GFR-binding peptide
  MOD_RES (31)..(31): Xaa is C or S
RVVMNVQVEKIVNSSDDVKAVKVSRLKTPAX

SEQ ID NO: 46353 - protein, 40 aa, Artificial Sequence
  GFR-binding peptide
  MOD_RES (1)..(3)..(37)..(38): Xaa is C or S
  MOD_RES (15)..(16)..(17)..(18)..(19): Xaa is A or G
  MOD_RES (20)..(21)..(22)..(23): Xaa is A or G or is absent
XGXGEVVMDVQVEKXXXXXXXXXVKAMKVSRLETPVXXAK

SEQ ID NO: 46354 - protein, 41 aa, Artificial Sequence
  GFR-binding peptide
  MOD_RES (2)..(36)..(37): Xaa is C or S
  MOD_RES (14)..(15)..(16)..(17)..(18): Xaa is A or G
  MOD_RES (19)..(20)..(21)..(22): Xaa is A or G or is absent
GXGEVVMDSMEGIXXXXXXXXXMIQMTINSLETPVXXAKPI

SEQ ID NO: 46355 - protein, 33 aa, Artificial Sequence
  GFR-binding peptide
  MOD_RES (1)..(33): Xaa is C or S
XSRVVMNSMEGIIVNSSDDMIQVTINSLKTPAX

SEQ ID NO: 46356 - protein, 36 aa, Artificial Sequence
  GFR-binding peptide
  MOD_RES (13)..(14)..(15)..(16)..(17): Xaa is A or G
  MOD_RES (18)..(19)..(20)..(21): Xaa is A or G or is absent
ELHEELRNSLQEXXXXXXXXXYYLVTLPEHHVRSPQ

SEQ ID NO: 46357 - protein, 37 aa, Artificial Sequence
  GFR-binding peptide
  MOD_RES (36)..(36): Xaa is C or S
  MOD_RES (12)..(13)..(14)..(15)..(16): Xaa is A or G
  MOD_RES (17)..(18)..(19)..(20): Xaa is A or G or is absent
LHDELTNSLQEXXXXXXXXXYYLVTLPELQVQTPRXQ

SEQ ID NO: 46358 - protein, 37 aa, Artificial Sequence
  GFR-binding peptide
  MOD_RES (34)..(35): Xaa is C or S
  MOD_RES (12)..(13)..(14)..(15)..(16): Xaa is A or G
  MOD_RES (17)..(18)..(19)..(20): Xaa is A or G or is absent
SRVVMNVTAKKXXXXXXXXXIKRVQVPRLKTPAXXPK

SEQ ID NO: 46359 - protein, 36 aa, Artificial Sequence
  GFR-binding peptide
  MOD_RES (2)..(34)..(35): Xaa is C or S
GXARVVMNVTAKKIVNSSDDIKRVQVPRLQTPAXXP

SEQ ID NO: 46360 - protein, 32 aa, Artificial Sequence
  GFR-binding peptide
  MOD_RES (1)..(1): Xaa is C or S
XGEVVMDVQVEKVVKENEDVKAMKVSRLETPV

SEQ ID NO: 46361 - protein, 36 aa, Artificial Sequence
  GFR-binding peptide
  MOD_RES (32)..(33): Xaa is C or S
GEVVMEVQVEKVVKDYEDVKAMKVSRLETPVXXAKP

SEQ ID NO: 46362 - protein, 35 aa, Artificial Sequence; identical to SEQ ID NO: 17083
  GFR-binding peptide
  MOD_RES (35)..(35): Xaa is C or S

SEQ ID NO: 46363 - protein, 40 aa, Artificial Sequence
  GFR-binding peptide
  MOD_RES (1)..(35): Xaa is C or S
  MOD_RES (13)..(14)..(15)..(16)..(17): Xaa is A or G
  MOD_RES (18)..(19)..(20)..(21): Xaa is A or G or is absent
XSRVVMNVQVEKXXXXXXXXXVKAVKVSRLKTPAXTPKTV

SEQ ID NO: 46364 - protein, 42 aa, Artificial Sequence
  GFR-binding peptide
  MOD_RES (1)..(3)..(37): Xaa is C or S
  MOD_RES (15)..(16)..(17)..(18)..(19): Xaa is A or G
  MOD_RES (20)..(21)..(22)..(23): Xaa is A or G or is absent
XEXKNHQLFNSLQEXXXXXXXXXYYVMPLPEEETPVXELGED

SEQ ID NO: 46365 - protein, 42 aa, Artificial Sequence
  GFR-binding peptide
  MOD_RES (1)..(3)..(37)..(38): Xaa is C or S
  MOD_RES (15)..(16)..(17)..(18)..(19): Xaa is A or G
  MOD_RES (20)..(21)..(22)..(23): Xaa is A or G or is absent
XGXSRVVMNSMEGIXXXXXXXXXMIQVTINSLKTPAXXPKPV

SEQ ID NO: 46366 - protein, 33 aa, Artificial Sequence
  GFR-binding peptide
  MOD_RES (2)..(2): Xaa is C or S
GXGEVVMESMEGIVVKDYEDMIQMTINSLETPV

SEQ ID NO: 46367 - protein, 38 aa, Artificial Sequence
  GFR-binding peptide
  MOD_RES (2)..(35)..(36): Xaa is C or S
  MOD_RES (13)..(14)..(15)..(16)..(17): Xaa is A or G
  MOD_RES (18)..(19)..(20)..(21): Xaa is A or G or is absent
KXSKVIMVTAKKXXXXXXXXXIKRIQVPRLDQSVXXPS

SEQ ID NO: 46368 - protein, 43 aa, Artificial Sequence
  GFR-binding peptide
  MOD_RES (1)..(3)..(37)..(38): Xaa is C or S
  MOD_RES (15)..(16)..(17)..(18)..(19): Xaa is A or G
  MOD_RES (20)..(21)..(22)..(23): Xaa is A or G or is absent
XGXGEVVMDVQVEKXXXXXXXXXVKAMKVSRLETPVXXAKPIK

SEQ ID NO: 46369 - protein, 37 aa, Artificial Sequence
  GFR-binding peptide
  MOD_RES (1)..(35)..(36): Xaa is C or S
  MOD_RES (13)..(14)..(15)..(16)..(17): Xaa is A or G
  MOD_RES (18)..(19)..(20)..(21): Xaa is A or G or is absent
XSRVVMNSMEGIXXXXXXXXXMIQVTINSLKTPAXXP

SEQ ID NO: 46370 - protein, 33 aa, Artificial Sequence
  GFR-binding peptide
  MOD_RES (1)..(3): Xaa is C or S
XKXSRVIMVTAKKVKPKRGVIKRIQVPRLAQPV

SEQ ID NO: 46371 - protein, 36 aa, Artificial Sequence; identical to SEQ ID NO: 9823
  GFR-binding peptide
  MOD_RES (1)..(3): Xaa is C or S
  MOD_RES (15)..(16)..(17)..(18)..(19): Xaa is A or G
  MOD_RES (20)..(21)..(22)..(23): Xaa is A or G or is absent

SEQ ID NO: 46372 - protein, 41 aa, Artificial Sequence
  GFR-binding peptide
  MOD_RES (37)..(37): Xaa is C or S
ELHEELRNSLQELKPKKRVYEYYVVPLPEHHVRSPQXKVSS

SEQ ID NO: 46373 - protein, 40 aa, Artificial Sequence; identical to SEQ ID NO: 17088
  GFR-binding peptide
  MOD_RES (1)..(3)..(37): Xaa is C or S
  MOD_RES (15)..(16)..(17)..(18)..(19): Xaa is A or G
  MOD_RES (20)..(21)..(22)..(23): Xaa is A or G or is absent

SEQ ID NO: 46374 - protein, 43 aa, Artificial Sequence
  GFR-binding peptide
  MOD_RES (1)..(3)..(37): Xaa is C or S
  MOD_RES (15)..(16)..(17)..(18)..(19): Xaa is A or G
  MOD_RES (20)..(21)..(22)..(23): Xaa is A or G or is absent
XGXSRVVMNVQVEKXXXXXXXXXVKAVKVSRLKTPAXTPKTVH

SEQ ID NO: 46375 - protein, 38 aa, Artificial Sequence
  GFR-binding peptide
  MOD_RES (36)..(36): Xaa is C or S
  MOD_RES (12)..(13)..(14)..(15)..(16): Xaa is A or G
  MOD_RES (17)..(18)..(19)..(20): Xaa is A or G or is absent
LHEELRNSLQEXXXXXXXXXYYVVPLPEHHVRSPQXKV

SEQ ID NO: 46376 - protein, 40 aa, Artificial Sequence
  GFR-binding peptide
  MOD_RES (1)..(3)..(37): Xaa is C or S
XEXKNHQLFNSLQEHQGQHPKIRYYLMTLPEEETPVXELG

SEQ ID NO: 46377 - protein, 38 aa, Artificial Sequence; identical to SEQ ID NO: 9824
  GFR-binding peptide
  MOD_RES (2)..(4)..(38): Xaa is C or S
  MOD_RES (16)..(17)..(18)..(19)..(20): Xaa is A or G
  MOD_RES (21)..(22)..(23)..(24): Xaa is A or G or is absent

SEQ ID NO: 46378 - protein, 34 aa, Artificial Sequence
  GFR-binding peptide
  MOD_RES (33)..(34): Xaa is C or S
  MOD_RES (11)..(12)..(13)..(14)..(15): Xaa is A or G
  MOD_RES (16)..(17)..(18)..(19): Xaa is A or G or is absent
EVVMESMEGIXXXXXXXXXMIQMTINSLETPVXX

SEQ ID NO: 46379 - protein, 35 aa, Artificial Sequence; identical to SEQ ID NO: 9827
  GFR-binding peptide
  MOD_RES (2)..(4): Xaa is C or S

SEQ ID NO: 46380 - protein, 40 aa, Artificial Sequence; identical to SEQ ID NO: 35596
  GFR-binding peptide
  MOD_RES (1)..(3)..(34)..(35): Xaa is C or S

SEQ ID NO: 46381 - protein, 35 aa, Artificial Sequence
  GFR-binding peptide
  MOD_RES (1)..(3)..(34)..(35): Xaa is C or S
XKXSRVIMVQVEKVKPKRGVVKAIKVSRLAQPVXX

SEQ ID NO: 46382 - protein, 38 aa, Artificial Sequence; identical to SEQ ID NO: 9830
  GFR-binding peptide
  MOD_RES (33)..(34): Xaa is C or S
  MOD_RES (11)..(12)..(13)..(14)..(15): Xaa is A or G
  MOD_RES (16)..(17)..(18)..(19): Xaa is A or G or is absent

SEQ ID NO: 46383 - protein, 38 aa, Artificial Sequence; identical to SEQ ID NO: 17096
  GFR-binding peptide
  MOD_RES (2)..(2): Xaa is C or S

SEQ ID NO: 46384 - protein, 38 aa, Artificial Sequence
  GFR-binding peptide
  MOD_RES (1)..(3)..(34)..(35): Xaa is C or S
XKXSKVIMSMEGIIKPTKGIMIQITINSLDQSVXXPSA

SEQ ID NO: 46385 - protein, 31 aa, Artificial Sequence; identical to SEQ ID NO: 9831
  GFR-binding peptide

SEQ ID NO: 46386 - protein, 32 aa, Artificial Sequence; identical to SEQ ID NO: 9834
  GFR-binding peptide
  MOD_RES (1)..(1): Xaa is C or S

SEQ ID NO: 46387 - protein, 37 aa, Artificial Sequence; identical to SEQ ID NO: 17100
  GFR-binding peptide
  MOD_RES (35)..(35): Xaa is C or S

SEQ ID NO: 46388 - protein, 41 aa, Artificial Sequence; identical to SEQ ID NO: 9835
  GFR-binding peptide
  MOD_RES (2)..(4)..(38)..(39): Xaa is C or S
  MOD_RES (16)..(17)..(18)..(19)..(20): Xaa is A or G
  MOD_RES (21)..(22)..(23)..(24): Xaa is A or G or is absent

SEQ ID NO: 46389 - protein, 33 aa, Artificial Sequence; identical to SEQ ID NO: 35610
  GFR-binding peptide
  MOD_RES (1)..(1): Xaa is C or S
  MOD_RES (12)..(13)..(14)..(15)..(16): Xaa is A or G
  MOD_RES (17)..(18)..(19)..(20): Xaa is A or G or is absent

SEQ ID NO: 46390 - protein, 38 aa, Artificial Sequence; identical to SEQ ID NO: 17101
  GFR-binding peptide
  MOD_RES (36)..(36): Xaa is C or S

SEQ ID NO: 46391 - protein, 34 aa, Artificial Sequence
  GFR-binding peptide
  MOD_RES (2)..(2): Xaa is C or S
  MOD_RES (13)..(14)..(15)..(16)..(17): Xaa is A or G
  MOD_RES (18)..(19)..(20)..(21): Xaa is A or G or is absent
KXSRVIMSMEGIXXXXXXXXXMIQITINSLAQPV

SEQ ID NO: 46392 - protein, 37 aa, Artificial Sequence
  GFR-binding peptide
  MOD_RES (32)..(32): Xaa is C or S
SRVVMNVTAKKIVNSSDDIKRVQVPRLKTPAXTPKTV

SEQ ID NO: 46393 - protein, 43 aa, Artificial Sequence; identical to SEQ ID NO: 17103
  GFR-binding peptide
  MOD_RES (2)..(39): Xaa is C or S
  MOD_RES (15)..(16)..(17)..(18)..(19): Xaa is A or G
  MOD_RES (20)..(21)..(22)..(23): Xaa is A or G or is absent

SEQ ID NO: 46394 - protein, 35 aa, Artificial Sequence; identical to SEQ ID NO: 9836
  GFR-binding peptide
  MOD_RES (31)..(32): Xaa is C or S

SEQ ID NO: 46395 - protein, 42 aa, Artificial Sequence; identical to SEQ ID NO: 17104
  GFR-binding peptide
  MOD_RES (1)..(3)..(37): Xaa is C or S

SEQ ID NO: 46396 - protein, 34 aa, Artificial Sequence
  GFR-binding peptide
  MOD_RES (32)..(33): Xaa is C or S
GEVVMEVTAKKVVKDYEDIKRMQVPRLETPVXXA

SEQ ID NO: 46397 - protein, 42 aa, Artificial Sequence; identical to SEQ ID NO: 9838
  GFR-binding peptide
  MOD_RES (2)..(4)..(37)..(38): Xaa is C or S
  MOD_RES (15)..(16)..(17)..(18)..(19): Xaa is A or G
  MOD_RES (20)..(21)..(22)..(23): Xaa is A or G or is absent

SEQ ID NO: 46398 - protein, 35 aa, Artificial Sequence
  GFR-binding peptide
  MOD_RES (34)..(35): Xaa is C or S
  MOD_RES (12)..(13)..(14)..(15)..(16): Xaa is A or G
  MOD_RES (17)..(18)..(19)..(20): Xaa is A or G or is absent
ARVVMNSMEGIXXXXXXXXXMIQVTINSLQTPAXX

SEQ ID NO: 46399 - protein, 35 aa, Artificial Sequence; identical to SEQ ID NO: 17106
  GFR-binding peptide
  MOD_RES (13)..(14)..(15)..(16)..(17): Xaa is A or G
  MOD_RES (18)..(19)..(20)..(21): Xaa is A or G or is absent

SEQ ID NO: 46400 - protein, 35 aa, Artificial Sequence
  GFR-binding peptide
  MOD_RES (2)..(35): Xaa is C or S
  MOD_RES (13)..(14)..(15)..(16)..(17): Xaa is A or G
  MOD_RES (18)..(19)..(20)..(21): Xaa is A or G or is absent
KXSRVIMVQVEKXXXXXXXXXVKAIKVSRLAQPVX

SEQ ID NO: 46401 - protein, 37 aa, Artificial Sequence
  GFR-binding peptide
  MOD_RES (2)..(36): Xaa is C or S
EXKNHQLFNSLQEHQGQHPKIRYYLMTLPEEETPVXE

SEQ ID NO: 46402 - protein, 35 aa, Artificial Sequence; identical to SEQ ID NO: 35621
  GFR-binding peptide
  MOD_RES (2)..(33)..(34): Xaa is C or S

SEQ ID NO: 46403 - protein, 37 aa, Artificial Sequence; identical to SEQ ID NO: 9843
  GFR-binding peptide
  MOD_RES (2)..(36)..(37): Xaa is C or S
  MOD_RES (14)..(15)..(16)..(17)..(18): Xaa is A or G
  MOD_RES (19)..(20)..(21)..(22): Xaa is A or G or is absent

SEQ ID NO: 46404 - protein, 40 aa, Artificial Sequence
  GFR-binding peptide
  MOD_RES (2)..(4)..(38)..(39): Xaa is C or S
  MOD_RES (16)..(17)..(18)..(19)..(20): Xaa is A or G
  MOD_RES (21)..(22)..(23)..(24): Xaa is A or G or is absent
HXGXSRVVMNVTAKKXXXXXXXXXIKRVQVPRLKTPAXXP

SEQ ID NO: 46405 - protein, 39 aa, Artificial Sequence; identical to SEQ ID NO: 9847
  GFR-binding peptide
  MOD_RES (2)..(4)..(38): Xaa is C or S
  MOD_RES (16)..(17)..(18)..(19)..(20): Xaa is A or G
  MOD_RES (21)..(22)..(23)..(24): Xaa is A or G or is absent

SEQ ID NO: 46406 - protein, 41 aa, Artificial Sequence
  GFR-binding peptide
  MOD_RES (2)..(39): Xaa is C or S
KXALHDELTNSLQEFIPKKRVIEYYLVTLPELQVQTPRXQV

SEQ ID NO: 46407 - protein, 39 aa, Artificial Sequence
  GFR-binding peptide
  MOD_RES (1)..(3)..(35)..(36): Xaa is C or S
XGXGEVVMDVTAKKVVKENEDIKRMQVPRLETPVXXAKP

SEQ ID NO: 46408 - protein, 37 aa, Artificial Sequence; identical to SEQ ID NO: 9850
  GFR-binding peptide
  MOD_RES (2)..(4): Xaa is C or S
  MOD_RES (16)..(17)..(18)..(19)..(20): Xaa is A or G
  MOD_RES (21)..(22)..(23)..(24): Xaa is A or G or is absent

SEQ ID NO: 46409 - protein, 35 aa, Artificial Sequence; identical to SEQ ID NO: 17114
  GFR-binding peptide
  MOD_RES (33)..(33): Xaa is C or S

SEQ ID NO: 46410 - protein, 40 aa, Artificial Sequence; identical to SEQ ID NO: 17115
  GFR-binding peptide
  MOD_RES (37)..(37): Xaa is C or S
  MOD_RES (13)..(14)..(15)..(16)..(17): Xaa is A or G
  MOD_RES (18)..(19)..(20)..(21): Xaa is A or G or is absent

SEQ ID NO: 46411 - protein, 38 aa, Artificial Sequence
  GFR-binding peptide
  MOD_RES (1)..(32)..(33): Xaa is C or S
XSKVVMVTAKKVKPTRGVIKRIQVPRLDQPVXXPSASA

SEQ ID NO: 46412 - protein, 40 aa, Artificial Sequence
  GFR-binding peptide
  MOD_RES (2)..(4)..(38)..(39): Xaa is C or S
  MOD_RES (16)..(17)..(18)..(19)..(20): Xaa is A or G
  MOD_RES (21)..(22)..(23)..(24): Xaa is A or G or is absent
HXGXSRVVMNVQVEKXXXXXXXXXVKAVKVSRLKTPAXXP

SEQ ID NO: 46413 - protein, 38 aa, Artificial Sequence; identical to SEQ ID NO: 9855
  GFR-binding peptide
  MOD_RES (2)..(33)..(34): Xaa is C or S

SEQ ID NO: 46414 - protein, 40 aa, Artificial Sequence
  GFR-binding peptide
  MOD_RES (2)..(4)..(36): Xaa is C or S
HXGXSRVVMNVQVEKIVNSSDDVKAVKVSRLKTPAXTPKT

SEQ ID NO: 46415 - protein, 39 aa, Artificial Sequence; identical to SEQ ID NO: 17120
  GFR-binding peptide
  MOD_RES (1)..(3)..(37): Xaa is C or S

SEQ ID NO: 46416 - protein, 37 aa, Artificial Sequence
  GFR-binding peptide
  MOD_RES (33)..(34): Xaa is C or S
  MOD_RES (11)..(12)..(13)..(14)..(15): Xaa is A or G
  MOD_RES (16)..(17)..(18)..(19): Xaa is A or G or is absent
SRVIMSMEGIXXXXXXXXXMIQITINSLAQPVXXPAA

SEQ ID NO: 46417 - protein, 34 aa, Artificial Sequence
  GFR-binding peptide
  MOD_RES (31)..(31): Xaa is C or S
RVVMNSMEGIIVNSSDDMIQVTINSLKTPAXTPK

SEQ ID NO: 46418 - protein, 32 aa, Artificial Sequence; identical to SEQ ID NO: 17126
  GFR-binding peptide

SEQ ID NO: 46419 - protein, 32 aa, Artificial Sequence; identical to SEQ ID NO: 9866
  GFR-binding peptide
  MOD_RES (32)..(32): Xaa is C or S

SEQ ID NO: 46420 - protein, 39 aa, Artificial Sequence; identical to SEQ ID NO: 9867
  GFR-binding peptide
  MOD_RES (1)..(3)..(35)..(36): Xaa is C or S

SEQ ID NO: 46421 - protein, 44 aa, Artificial Sequence
  GFR-binding peptide
  MOD_RES (1)..(3)..(40): Xaa is C or S
XAXELHEELRNSLQELKPKKRVYEYYLVTLPEHHVRSPQXKVSS

SEQ ID NO: 46422 - protein, 40 aa, Artificial Sequence
  GFR-binding peptide
  MOD_RES (1)..(3)..(34)..(35): Xaa is C or S
XKXSKVVMVTAKKVKPTRGVIKRIQVPRLDQPVXXPSASA

SEQ ID NO: 46423 - protein, 38 aa, Artificial Sequence
  GFR-binding peptide
  MOD_RES (35)..(35): Xaa is C or S
  MOD_RES (11)..(12)..(13)..(14)..(15): Xaa is A or G
  MOD_RES (16)..(17)..(18)..(19): Xaa is A or G or is absent
HEELRNSLQEXXXXXXXXXYYVVPLPEHHVRSPQXKVS

SEQ ID NO: 46424 - protein, 38 aa, Artificial Sequence; identical to SEQ ID NO: 9871
  GFR-binding peptide
  MOD_RES (1)..(35): Xaa is C or S
  MOD_RES (13)..(14)..(15)..(16)..(17): Xaa is A or G
  MOD_RES (18)..(19)..(20)..(21): Xaa is A or G or is absent

SEQ ID NO: 46425 - protein, 36 aa, Artificial Sequence
  GFR-binding peptide
  MOD_RES (2)..(35)..(36): Xaa is C or S
  MOD_RES (13)..(14)..(15)..(16)..(17): Xaa is A or G
  MOD_RES (18)..(19)..(20)..(21): Xaa is A or G or is absent
KXSRVIMVQVEKXXXXXXXXXVKAIKVSRLAQPVXX

SEQ ID NO: 46426 - protein, 39 aa, Artificial Sequence; identical to SEQ ID NO: 17133
  GFR-binding peptide
  MOD_RES (2)..(4): Xaa is C or S
  MOD_RES (17)..(18)..(19)..(20)..(21): Xaa is A or G
  MOD_RES (22)..(23)..(24)..(25): Xaa is A or G or is absent

SEQ ID NO: 46427 - protein, 40 aa, Artificial Sequence
  GFR-binding peptide
  MOD_RES (2)..(34)..(35): Xaa is C or S
GXGEVVMDVQVEKVVKENEDVKAMKVSRLETPVXXAKPIK

SEQ ID NO: 46428 - protein, 37 aa, Artificial Sequence
  GFR-binding peptide
  MOD_RES (1)..(3)..(37): Xaa is C or S
  MOD_RES (15)..(16)..(17)..(18)..(19): Xaa is A or G
  MOD_RES (20)..(21)..(22)..(23): Xaa is A or G or is absent
XGXSRVVMNSMEGIXXXXXXXXXMIQVTINSLKTPAX

SEQ ID NO: 46429 - protein, 39 aa, Artificial Sequence
  GFR-binding peptide
  MOD_RES (2)..(4)..(35)..(36): Xaa is C or S
SXKXSKVVMVTAKKVKPTRGVIKRIQVPRLDQPVXXPSA

SEQ ID NO: 46430 - protein, 37 aa, Artificial Sequence
  GFR-binding peptide
  MOD_RES (2)..(4)..(36): Xaa is C or S
HXGXSRVVMNVQVEKIVNSSDDVKAVKVSRLKTPAXT

SEQ ID NO: 46431 - protein, 35 aa, Artificial Sequence
  GFR-binding peptide
  MOD_RES (31)..(32): Xaa is C or S
EVVMDSMEGIVVKENEDMIQMTINSLETPVXXAKP

SEQ ID NO: 46432 - protein, 31 aa, Artificial Sequence; identical to SEQ ID NO: 9875
  GFR-binding peptide
  MOD_RES (31)..(31): Xaa is C or S

SEQ ID NO: 46433 - protein, 34 aa, Artificial Sequence
  GFR-binding peptide
  MOD_RES (33)..(34): Xaa is C or S
  MOD_RES (11)..(12)..(13)..(14)..(15): Xaa is A or G
  MOD_RES (16)..(17)..(18)..(19): Xaa is A or G or is absent
SRVIMSMEGIXXXXXXXXXMIQITINSLAQPVXX

SEQ ID NO: 46434 - protein, 36 aa, Artificial Sequence; identical to SEQ ID NO: 17135
  GFR-binding peptide
  MOD_RES (34)..(34): Xaa is C or S
  MOD_RES (12)..(13)..(14)..(15)..(16): Xaa is A or G
  MOD_RES (17)..(18)..(19)..(20): Xaa is A or G or is absent

SEQ ID NO: 46435 - protein, 35 aa, Artificial Sequence
  GFR-binding peptide
  MOD_RES (2)..(4)..(35): Xaa is C or S
SXKXSKVIMSMEGIIKPTKGIMIQITINSLDQSVX

SEQ ID NO: 46436 - protein, 38 aa, Artificial Sequence; identical to SEQ ID NO: 9881
  GFR-binding peptide
  MOD_RES (2)..(4)..(37)..(38): Xaa is C or S
  MOD_RES (15)..(16)..(17)..(18)..(19): Xaa is A or G
  MOD_RES (20)..(21)..(22)..(23): Xaa is A or G or is absent

SEQ ID NO: 46437 - protein, 41 aa, Artificial Sequence; identical to SEQ ID NO: 17140
  GFR-binding peptide
  MOD_RES (37)..(37): Xaa is C or S

SEQ ID NO: 46438 - protein, 39 aa, Artificial Sequence; identical to SEQ ID NO: 9882
  GFR-binding peptide
  MOD_RES (33)..(33): Xaa is C or S
  MOD_RES (11)..(12)..(13)..(14)..(15): Xaa is A or G
  MOD_RES (16)..(17)..(18)..(19): Xaa is A or G or is absent

SEQ ID NO: 46439 - protein, 37 aa, Artificial Sequence
  GFR-binding peptide
  MOD_RES (2)..(33)..(34): Xaa is C or S
KXSKVIMSMEGIIKPTKGIMIQITINSLDQSVXXPSA

SEQ ID NO: 46440 - protein, 39 aa, Artificial Sequence; identical to SEQ ID NO: 9883
  GFR-binding peptide
  MOD_RES (1)..(3)..(36)..(37): Xaa is C or S
  MOD_RES (14)..(15)..(16)..(17)..(18): Xaa is A or G
  MOD_RES (19)..(20)..(21)..(22): Xaa is A or G or is absent

SEQ ID NO: 46441 - protein, 35 aa, Artificial Sequence; identical to SEQ ID NO: 17141
  GFR-binding peptide
  MOD_RES (2)..(2): Xaa is C or S

SEQ ID NO: 46442 - protein, 37 aa, Artificial Sequence
  GFR-binding peptide
  MOD_RES (33)..(33): Xaa is C or S
  MOD_RES (11)..(12)..(13)..(14)..(15): Xaa is A or G
  MOD_RES (16)..(17)..(18)..(19): Xaa is A or G or is absent
NHQLFNSLQEXXXXXXXXXYYLMTLPEEETPVXELGE

SEQ ID NO: 46443 - protein, 35 aa, Artificial Sequence; identical to SEQ ID NO: 9884
  GFR-binding peptide
  MOD_RES (33)..(34): Xaa is C or S
  MOD_RES (11)..(12)..(13)..(14)..(15): Xaa is A or G
  MOD_RES (16)..(17)..(18)..(19): Xaa is A or G or is absent

SEQ ID NO: 46444 - protein, 32 aa, Artificial Sequence
  GFR-binding peptide
  MOD_RES (32)..(32): Xaa is C or S
ARVVMNVTAKKIVNSSDDIKRVQVPRLQTPAX

SEQ ID NO: 46445 - protein, 37 aa, Artificial Sequence; identical to SEQ ID NO: 9885
  GFR-binding peptide
  MOD_RES (34)..(35): Xaa is C or S
  MOD_RES (12)..(13)..(14)..(15)..(16): Xaa is A or G
  MOD_RES (17)..(18)..(19)..(20): Xaa is A or G or is absent

SEQ ID NO: 46446 - protein, 34 aa, Artificial Sequence; identical to SEQ ID NO: 9886
  GFR-binding peptide
  MOD_RES (31)..(31): Xaa is C or S

SEQ ID NO: 46447 - protein, 40 aa, Artificial Sequence
  GFR-binding peptide
  MOD_RES (1)..(3)..(40): Xaa is C or S
XAXELHEELRNSLQELKPKKRVYEYYVVPLPEHHVRSPQX

SEQ ID NO: 46448 - protein, 36 aa, Artificial Sequence
  GFR-binding peptide
  MOD_RES (2)..(2): Xaa is C or S
KXALHDELTNSLQEFIPKKRVIEYYLVTLPELQVQT

SEQ ID NO: 46449 - protein, 37 aa, Artificial Sequence
  GFR-binding peptide
  MOD_RES (37)..(37): Xaa is C or S
ELHEELRNSLQELKPKKRVYEYYVVPLPEHHVRSPQX

SEQ ID NO: 46450 - protein, 37 aa, Artificial Sequence; identical to SEQ ID NO: 17142
  GFR-binding peptide
  MOD_RES (2)..(36): Xaa is C or S
  MOD_RES (14)..(15)..(16)..(17)..(18): Xaa is A or G
  MOD_RES (19)..(20)..(21)..(22): Xaa is A or G or is absent

SEQ ID NO: 46451 - protein, 38 aa, Artificial Sequence; identical to SEQ ID NO: 17143
  GFR-binding peptide
  MOD_RES (37)..(37): Xaa is C or S
  MOD_RES (13)..(14)..(15)..(16)..(17): Xaa is A or G
  MOD_RES (18)..(19)..(20)..(21): Xaa is A or G or is absent

SEQ ID NO: 46452 - protein, 35 aa, Artificial Sequence
  GFR-binding peptide
  MOD_RES (1)..(33)..(34): Xaa is C or S
XSRVVMNVTAKKIVNSSDDIKRVQVPRLKTPAXXP

SEQ ID NO: 46453 - protein, 42 aa, Artificial Sequence; identical to SEQ ID NO: 9891
  GFR-binding peptide
  MOD_RES (1)..(3)..(37): Xaa is C or S
  MOD_RES (15)..(16)..(17)..(18)..(19): Xaa is A or G
  MOD_RES (20)..(21)..(22)..(23): Xaa is A or G or is absent

SEQ ID NO: 46454 - protein, 38 aa, Artificial Sequence
  GFR-binding peptide
  MOD_RES (35)..(35): Xaa is C or S
  MOD_RES (11)..(12)..(13)..(14)..(15): Xaa is A or G
  MOD_RES (16)..(17)..(18)..(19): Xaa is A or G or is absent
HDELTNSLQEXXXXXXXXXYYVVPLPELQVQTPRXQVN

SEQ ID NO: 46455 - protein, 39 aa, Artificial Sequence; identical to SEQ ID NO: 9892
  GFR-binding peptide
  MOD_RES (2)..(4)..(37)..(38): Xaa is C or S
  MOD_RES (15)..(16)..(17)..(18)..(19): Xaa is A or G
  MOD_RES (20)..(21)..(22)..(23): Xaa is A or G or is absent

SEQ ID NO: 46456 - protein, 40 aa, Artificial Sequence
  GFR-binding peptide
  MOD_RES (36)..(36): Xaa is C or S
  MOD_RES (12)..(13)..(14)..(15)..(16): Xaa is A or G
  MOD_RES (17)..(18)..(19)..(20): Xaa is A or G or is absent
LHEELRNSLQEXXXXXXXXXYYLVTLPEHHVRSPQXKVSS

SEQ ID NO: 46457 - protein, 31 aa, Artificial Sequence
  GFR-binding peptide
ARVVMNSMEGIIVNSSDDMIQVTINSLQTPA

SEQ ID NO: 46458 - protein, 42 aa, Artificial Sequence
  GFR-binding peptide
  MOD_RES (2)..(4)..(38): Xaa is C or S
RXEXKNHQLFNSLQEHQGQHPKIRYYVMPLPEEETPVXELGE

SEQ ID NO: 46459 - protein, 40 aa, Artificial Sequence
  GFR-binding peptide
  MOD_RES (2)..(4): Xaa is C or S
  MOD_RES (17)..(18)..(19)..(20)..(21): Xaa is A or G
  MOD_RES (22)..(23)..(24)..(25): Xaa is A or G or is absent
AXAXELHEELRNSLQEXXXXXXXXXYYLVTLPEHHVRSPQ

SEQ ID NO: 46460 - protein, 37 aa, Artificial Sequence; identical to SEQ ID NO: 9894
  GFR-binding peptide
  MOD_RES (2)..(4)..(37): Xaa is C or S
  MOD_RES (15)..(16)..(17)..(18)..(19): Xaa is A or G
  MOD_RES (20)..(21)..(22)..(23): Xaa is A or G or is absent

SEQ ID NO: 46461 - protein, 40 aa, Artificial Sequence
  GFR-binding peptide
  MOD_RES (1)..(34)..(35): Xaa is C or S
  MOD_RES (12)..(13)..(14)..(15)..(16): Xaa is A or G
  MOD_RES (17)..(18)..(19)..(20): Xaa is A or G or is absent
XSKVIMVQVEKXXXXXXXXXVKAIKVSRLDQSVXXPSASA

SEQ ID NO: 46462 - protein, 39 aa, Artificial Sequence; identical to SEQ ID NO: 9896
  GFR-binding peptide
  MOD_RES (1)..(35)..(36): Xaa is C or S
  MOD_RES (13)..(14)..(15)..(16)..(17): Xaa is A or G
  MOD_RES (18)..(19)..(20)..(21): Xaa is A or G or is absent

SEQ ID NO: 46463 - protein, 39 aa, Artificial Sequence
  GFR-binding peptide
  MOD_RES (2)..(4)..(38)..(39): Xaa is C or S
  MOD_RES (16)..(17)..(18)..(19)..(20): Xaa is A or G
  MOD_RES (21)..(22)..(23)..(24): Xaa is A or G or is absent
HXGXARVVMNSMEGIXXXXXXXXXMIQVTINSLQTPAXX

SEQ ID NO: 46464 - protein, 36 aa, Artificial Sequence; identical to SEQ ID NO: 9897
  GFR-binding peptide
  MOD_RES (33)..(34): Xaa is C or S
  MOD_RES (11)..(12)..(13)..(14)..(15): Xaa is A or G
  MOD_RES (16)..(17)..(18)..(19): Xaa is A or G or is absent

SEQ ID NO: 46465 - protein, 38 aa, Artificial Sequence; identical to SEQ ID NO: 9898
  GFR-binding peptide
  MOD_RES (1)..(3)..(37)..(38): Xaa is C or S
  MOD_RES (15)..(16)..(17)..(18)..(19): Xaa is A or G
  MOD_RES (20)..(21)..(22)..(23): Xaa is A or G or is absent

SEQ ID NO: 46466 - protein, 41 aa, Artificial Sequence; identical to SEQ ID NO: 17148
  GFR-binding peptide
  MOD_RES (1)..(38): Xaa is C or S

SEQ ID NO: 46467 - protein, 40 aa, Artificial Sequence
  GFR-binding peptide
  MOD_RES (37)..(37): Xaa is C or S
  MOD_RES (13)..(14)..(15)..(16)..(17): Xaa is A or G
  MOD_RES (18)..(19)..(20)..(21): Xaa is A or G or is absent
ELHEELRNSLQEXXXXXXXXXYYVVPLPEHHVRSPQXKVS

SEQ ID NO: 46468 - protein, 38 aa, Artificial Sequence; identical to SEQ ID NO: 17149
  GFR-binding peptide
  MOD_RES (33)..(33): Xaa is C or S
  MOD_RES (11)..(12)..(13)..(14)..(15): Xaa is A or G
  MOD_RES (16)..(17)..(18)..(19): Xaa is A or G or is absent

SEQ ID NO: 46469 - protein, 42 aa, Artificial Sequence
  GFR-binding peptide
  MOD_RES (1)..(38): Xaa is C or S
  MOD_RES (14)..(15)..(16)..(17)..(18): Xaa is A or G
  MOD_RES (19)..(20)..(21)..(22): Xaa is A or G or is absent
XELHEELRNSLQEXXXXXXXXXYYLVTLPEHHVRSPQXKVSS

SEQ ID NO: 46470 - protein, 34 aa, Artificial Sequence
  GFR-binding peptide
  MOD_RES (1)..(3)..(34): Xaa is C or S
XKXSKVIMSMEGIIKPTKGIMIQITINSLDQSVX

SEQ ID NO: 46471 - protein, 39 aa, Artificial Sequence
  GFR-binding peptide
  MOD_RES (2)..(36): Xaa is C or S
  MOD_RES (14)..(15)..(16)..(17)..(18): Xaa is A or G
  MOD_RES (19)..(20)..(21)..(22): Xaa is A or G or is absent
EXKNHQLFNSLQEXXXXXXXXXYYVMPLPEEETPVXELG

SEQ ID NO: 46472 - protein, 35 aa, Artificial Sequence
  GFR-binding peptide
  MOD_RES (2)..(2): Xaa is C or S
  MOD_RES (14)..(15)..(16)..(17)..(18): Xaa is A or G
  MOD_RES (19)..(20)..(21)..(22): Xaa is A or G or is absent
GXGEVVMESMEGIXXXXXXXXXMIQMTINSLETPV

SEQ ID NO: 46473 - protein, 36 aa, Artificial Sequence; identical to SEQ ID NO: 17151
  GFR-binding peptide
  MOD_RES (13)..(14)..(15)..(16)..(17): Xaa is A or G
  MOD_RES (18)..(19)..(20)..(21): Xaa is A or G or is absent

SEQ ID NO: 46474 - protein, 37 aa, Artificial Sequence; identical to SEQ ID NO: 9901
  GFR-binding peptide
  MOD_RES (33)..(34): Xaa is C or S
  MOD_RES (11)..(12)..(13)..(14)..(15): Xaa is A or G
  MOD_RES (16)..(17)..(18)..(19): Xaa is A or G or is absent

SEQ ID NO: 46475 - protein, 41 aa, Artificial Sequence; identical to SEQ ID NO: 9904
  GFR-binding peptide
  MOD_RES (2)..(35)..(36): Xaa is C or S
  MOD_RES (13)..(14)..(15)..(16)..(17): Xaa is A or G
  MOD_RES (18)..(19)..(20)..(21): Xaa is A or G or is absent

SEQ ID NO: 46476 - protein, 36 aa, Artificial Sequence; identical to SEQ ID NO: 17152
  GFR-binding peptide
  MOD_RES (1)..(35): Xaa is C or S

SEQ ID NO: 46477 - protein, 35 aa, Artificial Sequence; identical to SEQ ID NO: 9907
  GFR-binding peptide
  MOD_RES (1)..(3)..(34)..(35): Xaa is C or S

SEQ ID NO: 46478 - protein, 37 aa, Artificial Sequence; identical to SEQ ID NO: 17153
  GFR-binding peptide
  MOD_RES (37)..(37): Xaa is C or S

SEQ ID NO: 46479 - protein, 35 aa, Artificial Sequence
  GFR-binding peptide
  MOD_RES (33)..(34): Xaa is C or S
  MOD_RES (11)..(12)..(13)..(14)..(15): Xaa is A or G
  MOD_RES (16)..(17)..(18)..(19): Xaa is A or G or is absent
SKVVMVTAKKXXXXXXXXXIKRIQVPRLDQPVXXP

SEQ ID NO: 46480 - protein, 38 aa, Artificial Sequence; identical to SEQ ID NO: 9908
  GFR-binding peptide
  MOD_RES (2)..(4)..(36)..(37): Xaa is C or S

SEQ ID NO: 46481 - protein, 40 aa, Artificial Sequence; identical to SEQ ID NO: 17154
  GFR-binding peptide
  MOD_RES (1)..(38): Xaa is C or S

SEQ ID NO: 46482 - protein, 34 aa, Artificial Sequence; identical to SEQ ID NO: 9910
  GFR-binding peptide
  MOD_RES (32)..(33): Xaa is C or S

SEQ ID NO: 46483 - protein, 39 aa, Artificial Sequence; identical to SEQ ID NO: 17158
  GFR-binding peptide
  MOD_RES (1)..(3): Xaa is C or S
  MOD_RES (16)..(17)..(18)..(19)..(20): Xaa is A or G
  MOD_RES (21)..(22)..(23)..(24): Xaa is A or G or is absent

SEQ ID NO: 46484 - protein, 40 aa, Artificial Sequence
  GFR-binding peptide
  MOD_RES (2)..(34)..(35): Xaa is C or S
GXSRVVMNSMEGIIVNSSDDMIQVTINSLKTPAXXPKPVY

SEQ ID NO: 46485 - protein, 33 aa, Artificial Sequence; identical to SEQ ID NO: 17160
  GFR-binding peptide
  MOD_RES (11)..(12)..(13)..(14)..(15): Xaa is A or G
  MOD_RES (16)..(17)..(18)..(19): Xaa is A or G or is absent

SEQ ID NO: 46486 - protein, 35 aa, Artificial Sequence; identical to SEQ ID NO: 17162
  GFR-binding peptide
  MOD_RES (34)..(34): Xaa is C or S

SEQ ID NO: 46487 - protein, 40 aa, Artificial Sequence
  GFR-binding peptide
  MOD_RES (1)..(3)..(34)..(35): Xaa is C or S
XKXSKVIMVQVEKIKPTKGIVKAIKVSRLDQSVXXPSASA

SEQ ID NO: 46488 - protein, 35 aa, Artificial Sequence
  GFR-binding peptide
  MOD_RES (34)..(35): Xaa is C or S
  MOD_RES (12)..(13)..(14)..(15)..(16): Xaa is A or G
  MOD_RES (17)..(18)..(19)..(20): Xaa is A or G or is absent
SRVVMNSMEGIXXXXXXXXXMIQVTINSLKTPAXX

SEQ ID NO: 46489 - protein, 41 aa, Artificial Sequence; identical to SEQ ID NO: 9916
  GFR-binding peptide
  MOD_RES (1)..(35): Xaa is C or S
  MOD_RES (13)..(14)..(15)..(16)..(17): Xaa is A or G
  MOD_RES (18)..(19)..(20)..(21): Xaa is A or G or is absent

SEQ ID NO: 46490 - protein, 35 aa, Artificial Sequence; identical to SEQ ID NO: 17165
  GFR-binding peptide

SEQ ID NO: 46491 - protein, 30 aa, Artificial Sequence; identical to SEQ ID NO: 9919
  GFR-binding peptide

SEQ ID NO: 46492 - protein, 40 aa, Artificial Sequence; identical to SEQ ID NO: 9920
  GFR-binding peptide
  MOD_RES (34)..(35): Xaa is C or S
  MOD_RES (12)..(13)..(14)..(15)..(16): Xaa is A or G
  MOD_RES (17)..(18)..(19)..(20): Xaa is A or G or is absent

SEQ ID NO: 46493 - protein, 34 aa, Artificial Sequence
  GFR-binding peptide
  MOD_RES (31)..(32): Xaa is C or S
SRVIMSMEGIVKPKRGVMIQITINSLAQPVXXPA

SEQ ID NO: 46494 - protein, 39 aa, Artificial Sequence
  GFR-binding peptide
  MOD_RES (1)..(3)..(37)..(38): Xaa is C or S
  MOD_RES (15)..(16)..(17)..(18)..(19): Xaa is A or G
  MOD_RES (20)..(21)..(22)..(23): Xaa is A or G or is absent
XGXSRVVMNSMEGIXXXXXXXXXMIQVTINSLKTPAXXP

SEQ ID NO: 46495 - protein, 38 aa, Artificial Sequence; identical to SEQ ID NO: 17167
  GFR-binding peptide
  MOD_RES (36)..(36): Xaa is C or S
  MOD_RES (12)..(13)..(14)..(15)..(16): Xaa is A or G
  MOD_RES (17)..(18)..(19)..(20): Xaa is A or G or is absent

SEQ ID NO: 46496 - protein, 40 aa, Artificial Sequence
  GFR-binding peptide
  MOD_RES (1)..(35)..(36): Xaa is C or S
  MOD_RES (13)..(14)..(15)..(16)..(17): Xaa is A or G
  MOD_RES (18)..(19)..(20)..(21): Xaa is A or G or is absent
XSRVVMNSMEGIXXXXXXXXXMIQVTINSLKTPAXXPKPV

SEQ ID NO: 46497 - protein, 35 aa, Artificial Sequence
  GFR-binding peptide
  MOD_RES (33)..(34): Xaa is C or S
  MOD_RES (11)..(12)..(13)..(14)..(15): Xaa is A or G
  MOD_RES (16)..(17)..(18)..(19): Xaa is A or G or is absent
SKVVMVQVEKXXXXXXXXXVKAIKVSRLDQPVXXP

SEQ ID NO: 46498 - protein, 40 aa, Artificial Sequence; identical to SEQ ID NO: 17169
  GFR-binding peptide
  MOD_RES (2)..(4): Xaa is C or S
  MOD_RES (17)..(18)..(19)..(20)..(21): Xaa is A or G
  MOD_RES (22)..(23)..(24)..(25): Xaa is A or G or is absent

SEQ ID NO: 46499 - protein, 40 aa, Artificial Sequence; identical to SEQ ID NO: 35739
  GFR-binding peptide
  MOD_RES (2)..(4)..(37)..(38): Xaa is C or S
  MOD_RES (15)..(16)..(17)..(18)..(19): Xaa is A or G
  MOD_RES (20)..(21)..(22)..(23): Xaa is A or G or is absent

SEQ ID NO: 46500 - protein, 32 aa, Artificial Sequence; identical to SEQ ID NO: 9922
  GFR-binding peptide
  MOD_RES (11)..(12)..(13)..(14)..(15): Xaa is A or G
  MOD_RES (16)..(17)..(18)..(19): Xaa is A or G or is absent

SEQ ID NO: 46501 - protein, 42 aa, Artificial Sequence
  GFR-binding peptide
  MOD_RES (1)..(3)..(37)..(38): Xaa is C or S
  MOD_RES (15)..(16)..(17)..(18)..(19): Xaa is A or G
  MOD_RES (20)..(21)..(22)..(23): Xaa is A or G or is absent
XGXARVVMNVTAKKXXXXXXXXXIKRVQVPRLQTPAXXPKPV

SEQ ID NO: 46502 - protein, 32 aa, Artificial Sequence
  GFR-binding peptide
  MOD_RES (31)..(32): Xaa is C or S
RVVMNVTAKKIVNSSDDIKRVQVPRLQTPAXX

SEQ ID NO: 46503 - protein, 42 aa, Artificial Sequence
  GFR-binding peptide
  MOD_RES (2)..(4)..(38)..(39): Xaa is C or S
  MOD_RES (16)..(17)..(18)..(19)..(20): Xaa is A or G
  MOD_RES (21)..(22)..(23)..(24): Xaa is A or G or is absent
HXGXARVVMNVTAKKXXXXXXXXXIKRVQVPRLQTPAXXPKP

SEQ ID NO: 46504 - protein, 37 aa, Artificial Sequence
  GFR-binding peptide
  MOD_RES (2)..(35)..(36): Xaa is C or S
  MOD_RES (13)..(14)..(15)..(16)..(17): Xaa is A or G
  MOD_RES (18)..(19)..(20)..(21): Xaa is A or G or is absent
KXSKVIMSMEGIXXXXXXXXXMIQITINSLDQSVXXP

SEQ ID NO: 46505 - protein, 38 aa, Artificial Sequence; identical to SEQ ID NO: 9924
  GFR-binding peptide
  MOD_RES (2)..(4)..(36)..(37): Xaa is C or S

SEQ ID NO: 46506 - protein, 37 aa, Artificial Sequence; identical to SEQ ID NO: 9925
  GFR-binding peptide
  MOD_RES (1)..(3)..(37): Xaa is C or S
  MOD_RES (15)..(16)..(17)..(18)..(19): Xaa is A or G
  MOD_RES (20)..(21)..(22)..(23): Xaa is A or G or is absent

SEQ ID NO: 46507 - protein, 36 aa, Artificial Sequence; identical to SEQ ID NO: 35748
  GFR-binding peptide
  MOD_RES (1)..(34)..(35): Xaa is C or S
  MOD_RES (12)..(13)..(14)..(15)..(16): Xaa is A or G
  MOD_RES (17)..(18)..(19)..(20): Xaa is A or G or is absent

SEQ ID NO: 46508 - protein, 31 aa, Artificial Sequence; identical to SEQ ID NO: 9927
  GFR-binding peptide
  MOD_RES (31)..(31): Xaa is C or S

SEQ ID NO: 46509 - protein, 34 aa, Artificial Sequence
  GFR-binding peptide
  MOD_RES (2)..(33)..(34): Xaa is C or S
KXSRVIMVTAKKVKPKRGVIKRIQVPRLAQPVXX

SEQ ID NO: 46510 - protein, 38 aa, Artificial Sequence
  GFR-binding peptide
  MOD_RES (33)..(34): Xaa is C or S
  MOD_RES (11)..(12)..(13)..(14)..(15): Xaa is A or G
  MOD_RES (16)..(17)..(18)..(19): Xaa is A or G or is absent
SKVVMSMEGIXXXXXXXXXMIQITINSLDQPVXXPSAS

SEQ ID NO: 46511 - protein, 40 aa, Artificial Sequence
  GFR-binding peptide
  MOD_RES (1)..(3)..(37)..(38): Xaa is C or S
  MOD_RES (15)..(16)..(17)..(18)..(19): Xaa is A or G
  MOD_RES (20)..(21)..(22)..(23): Xaa is A or G or is absent
XGXGEVVMDVTAKKXXXXXXXXXIKRMQVPRLETPVXXAK

SEQ ID NO: 46512 - protein, 35 aa, Artificial Sequence
  GFR-binding peptide
  MOD_RES (1)..(32)..(33): Xaa is C or S
XSRVIMVQVEKVKPKRGVVKAIKVSRLAQPVXXPA

SEQ ID NO: 46513 - protein, 36 aa, Artificial Sequence; identical to SEQ ID NO: 9931
  GFR-binding peptide
  MOD_RES (2)..(36): Xaa is C or S
  MOD_RES (14)..(15)..(16)..(17)..(18): Xaa is A or G
  MOD_RES (19)..(20)..(21)..(22): Xaa is A or G or is absent

SEQ ID NO: 46514 - protein, 32 aa, Artificial Sequence; identical to SEQ ID NO: 9932
  GFR-binding peptide
  MOD_RES (1)..(32): Xaa is C or S

SEQ ID NO: 46515 - protein, 32 aa, Artificial Sequence
  GFR-binding peptide
  MOD_RES (11)..(12)..(13)..(14)..(15): Xaa is A or G
  MOD_RES (16)..(17)..(18)..(19): Xaa is A or G or is absent
RVVMNVTAKKXXXXXXXXXIKRVQVPRLKTPA

SEQ ID NO: 46516 - protein, 38 aa, Artificial Sequence
  GFR-binding peptide
  MOD_RES (1)..(3)..(37): Xaa is C or S
  MOD_RES (15)..(16)..(17)..(18)..(19): Xaa is A or G
  MOD_RES (20)..(21)..(22)..(23): Xaa is A or G or is absent
XGXSRVVMNVTAKKXXXXXXXXXIKRVQVPRLKTPAXT

SEQ ID NO: 46517 - protein, 38 aa, Artificial Sequence
  GFR-binding peptide
  MOD_RES (1)..(38): Xaa is C or S
XELHEELRNSLQELKPKKRVYEYYVVPLPEHHVRSPQX

SEQ ID NO: 46518 - protein, 37 aa, Artificial Sequence
  GFR-binding peptide
  MOD_RES (2)..(4): Xaa is C or S
  MOD_RES (16)..(17)..(18)..(19)..(20): Xaa is A or G
  MOD_RES (21)..(22)..(23)..(24): Xaa is A or G or is absent
RXEXKNHQLFNSLQEXXXXXXXXXYYLMTLPEEETPV

SEQ ID NO: 46519 - protein, 39 aa, Artificial Sequence
  GFR-binding peptide
  MOD_RES (1)..(3)..(34)..(35): Xaa is C or S
XKXSKVVMVQVEKVKPTRGVVKAIKVSRLDQPVXXPSAS

SEQ ID NO: 46520 - protein, 38 aa, Artificial Sequence
  GFR-binding peptide
  MOD_RES (37)..(37): Xaa is C or S
  MOD_RES (13)..(14)..(15)..(16)..(17): Xaa is A or G
  MOD_RES (18)..(19)..(20)..(21): Xaa is A or G or is absent
ELHEELRNSLQEXXXXXXXXXYYVVPLPEHHVRSPQXK

SEQ ID NO: 46521 - protein, 36 aa, Artificial Sequence; identical to SEQ ID NO: 9936
  GFR-binding peptide
  MOD_RES (32)..(33): Xaa is C or S

SEQ ID NO: 46522 - protein, 38 aa, Artificial Sequence; identical to SEQ ID NO: 17178
  GFR-binding peptide
  MOD_RES (34)..(34): Xaa is C or S

SEQ ID NO: 46523 - protein, 34 aa, Artificial Sequence
  GFR-binding peptide
  MOD_RES (31)..(31): Xaa is C or S
RVVMNVQVEKIVNSSDDVKAVKVSRLKTPAXTPK

SEQ ID NO: 46524 - protein, 40 aa, Artificial Sequence; identical to SEQ ID NO: 9937
  GFR-binding peptide
  MOD_RES (2)..(4)..(35)..(36): Xaa is C or S

SEQ ID NO: 46525 - protein, 37 aa, Artificial Sequence; identical to SEQ ID NO: 9938
  GFR-binding peptide
  MOD_RES (1)..(3)..(37): Xaa is C or S
  MOD_RES (15)..(16)..(17)..(18)..(19): Xaa is A or G
  MOD_RES (20)..(21)..(22)..(23): Xaa is A or G or is absent

SEQ ID NO: 46526 - protein, 39 aa, Artificial Sequence
  GFR-binding peptide
  MOD_RES (1)..(35): Xaa is C or S
XKNHQLFNSLQEHQGQHPKIRYYLMTLPEEETPVXELGE

SEQ ID NO: 46527 - protein, 31 aa, Artificial Sequence; identical to SEQ ID NO: 9940
  GFR-binding peptide
  MOD_RES (1)..(1): Xaa is C or S

SEQ ID NO: 46528 - protein, 32 aa, Artificial Sequence; identical to SEQ ID NO: 9941
  GFR-binding peptide
  MOD_RES (11)..(12)..(13)..(14)..(15): Xaa is A or G
  MOD_RES (16)..(17)..(18)..(19): Xaa is A or G or is absent

SEQ ID NO: 46529 - protein, 34 aa, Artificial Sequence; identical to SEQ ID NO: 9942
  GFR-binding peptide
  MOD_RES (1)..(3): Xaa is C or S

SEQ ID NO: 46530 - protein, 35 aa, Artificial Sequence; identical to SEQ ID NO: 17179
  GFR-binding peptide

SEQ ID NO: 46531 - protein, 38 aa, Artificial Sequence
  GFR-binding peptide
  MOD_RES (1)..(3)..(35)..(36): Xaa is C or S
XGXARVVMNVQVEKIVNSSDDVKAVKVSRLQTPAXXPK

SEQ ID NO: 46532 - protein, 40 aa, Artificial Sequence; identical to SEQ ID NO: 9944
  GFR-binding peptide
  MOD_RES (34)..(35): Xaa is C or S
  MOD_RES (12)..(13)..(14)..(15)..(16): Xaa is A or G
  MOD_RES (17)..(18)..(19)..(20): Xaa is A or G or is absent

SEQ ID NO: 46533 - protein, 34 aa, Artificial Sequence; identical to SEQ ID NO: 9946
  GFR-binding peptide
  MOD_RES (34)..(34): Xaa is C or S
  MOD_RES (12)..(13)..(14)..(15)..(16): Xaa is A or G
  MOD_RES (17)..(18)..(19)..(20): Xaa is A or G or is absent

SEQ ID NO: 46534 - protein, 41 aa, Artificial Sequence
  GFR-binding peptide
  MOD_RES (1)..(3)..(40): Xaa is C or S
XAXELHEELRNSLQELKPKKRVYEYYLVTLPEHHVRSPQXK

SEQ ID NO: 46535 - protein, 40 aa, Artificial Sequence
  GFR-binding peptide
  MOD_RES (1)..(3)..(35): Xaa is C or S
XGXSRVVMNVQVEKIVNSSDDVKAVKVSRLKTPAXTPKTV

SEQ ID NO: 46536 - protein, 36 aa, Artificial Sequence; identical to SEQ ID NO: 17180
  GFR-binding peptide
  MOD_RES (1)..(3): Xaa is C or S
  MOD_RES (15)..(16)..(17)..(18)..(19): Xaa is A or G
  MOD_RES (20)..(21)..(22)..(23): Xaa is A or G or is absent

SEQ ID NO: 46537 - protein, 38 aa, Artificial Sequence; identical to SEQ ID NO: 17181
  GFR-binding peptide
  MOD_RES (1)..(35): Xaa is C or S

SEQ ID NO: 46538 - protein, 36 aa, Artificial Sequence
  GFR-binding peptide
  MOD_RES (2)..(4): Xaa is C or S
  MOD_RES (15)..(16)..(17)..(18)..(19): Xaa is A or G
  MOD_RES (20)..(21)..(22)..(23): Xaa is A or G or is absent
SXKXSKVIMVQVEKXXXXXXXXXVKAIKVSRLDQSV

SEQ ID NO: 46539 - protein, 37 aa, Artificial Sequence
  GFR-binding peptide
  MOD_RES (34)..(35): Xaa is C or S
  MOD_RES (12)..(13)..(14)..(15)..(16): Xaa is A or G
  MOD_RES (17)..(18)..(19)..(20): Xaa is A or G or is absent
GEVVMDSMEGIXXXXXXXXXMIQMTINSLETPVXXAK

SEQ ID NO: 46540 - protein, 39 aa, Artificial Sequence; identical to SEQ ID NO: 9951
  GFR-binding peptide
  MOD_RES (34)..(35): Xaa is C or S
  MOD_RES (12)..(13)..(14)..(15)..(16): Xaa is A or G
  MOD_RES (17)..(18)..(19)..(20): Xaa is A or G or is absent

SEQ ID NO: 46541 - protein, 37 aa, Artificial Sequence
  GFR-binding peptide
  MOD_RES (34)..(35): Xaa is C or S
  MOD_RES (12)..(13)..(14)..(15)..(16): Xaa is A or G
  MOD_RES (17)..(18)..(19)..(20): Xaa is A or G or is absent
GEVVMEVQVEKXXXXXXXXXVKAMKVSRLETPVXXAK

SEQ ID NO: 46542 - protein, 41 aa, Artificial Sequence; identical to SEQ ID NO: 17183
  GFR-binding peptide
  MOD_RES (2)..(39): Xaa is C or S

SEQ ID NO: 46543 - protein, 33 aa, Artificial Sequence
  GFR-binding peptide
LHEELRNSLQELKPKKRVYEYYVVPLPEHHVRS

SEQ ID NO: 46544 - protein, 37 aa, Artificial Sequence; identical to SEQ ID NO: 17184
  GFR-binding peptide
  MOD_RES (1)..(1): Xaa is C or S
  MOD_RES (14)..(15)..(16)..(17)..(18): Xaa is A or G
  MOD_RES (19)..(20)..(21)..(22): Xaa is A or G or is absent

SEQ ID NO: 46545 - protein, 42 aa, Artificial Sequence
  GFR-binding peptide
  MOD_RES (2)..(36)..(37): Xaa is C or S
  MOD_RES (14)..(15)..(16)..(17)..(18): Xaa is A or G
  MOD_RES (19)..(20)..(21)..(22): Xaa is A or G or is absent
GXGEVVMEVTAKKXXXXXXXXXIKRMQVPRLETPVXXAKPIS

SEQ ID NO: 46546 - protein, 38 aa, Artificial Sequence
  GFR-binding peptide
  MOD_RES (2)..(36)..(37): Xaa is C or S
  MOD_RES (14)..(15)..(16)..(17)..(18): Xaa is A or G
  MOD_RES (19)..(20)..(21)..(22): Xaa is A or G or is absent
GXGEVVMEVTAKKXXXXXXXXXIKRMQVPRLETPVXXA

SEQ ID NO: 46547 - protein, 42 aa, Artificial Sequence
  GFR-binding peptide
  MOD_RES (2)..(4)..(38)..(39): Xaa is C or S
  MOD_RES (16)..(17)..(18)..(19)..(20): Xaa is A or G
  MOD_RES (21)..(22)..(23)..(24): Xaa is A or G or is absent
HXGXARVVMNSMEGIXXXXXXXXXMIQVTINSLQTPAXXPKP

SEQ ID NO: 46548 - protein, 35 aa, Artificial Sequence
  GFR-binding peptide
  MOD_RES (31)..(32): Xaa is C or S
SKVIMVTAKKIKPTKGIIKRIQVPRLDQSVXXPSA

SEQ ID NO: 46549 - protein, 42 aa, Artificial Sequence; identical to SEQ ID NO: 9955
  GFR-binding peptide
  MOD_RES (2)..(4)..(37)..(38): Xaa is C or S
  MOD_RES (15)..(16)..(17)..(18)..(19): Xaa is A or G
  MOD_RES (20)..(21)..(22)..(23): Xaa is A or G or is absent

SEQ ID NO: 46550 - protein, 37 aa, Artificial Sequence
  GFR-binding peptide
  MOD_RES (2)..(36)..(37): Xaa is C or S
  MOD_RES (14)..(15)..(16)..(17)..(18): Xaa is A or G
  MOD_RES (19)..(20)..(21)..(22): Xaa is A or G or is absent
GXSRVVMNVQVEKXXXXXXXXXVKAVKVSRLKTPAXX

SEQ ID NO: 46551 - protein, 33 aa, Artificial Sequence; identical to SEQ ID NO: 9957
  GFR-binding peptide
  MOD_RES (1)..(33): Xaa is C or S

SEQ ID NO: 46552 - protein, 37 aa, Artificial Sequence; identical to SEQ ID NO: 9960
  GFR-binding peptide
  MOD_RES (32)..(33): Xaa is C or S

SEQ ID NO: 46553 - protein, 32 aa, Artificial Sequence
  GFR-binding peptide
  MOD_RES (31)..(32): Xaa is C or S
SKVVMVQVEKVKPTRGVVKAIKVSRLDQPVXX

SEQ ID NO: 46554 - protein, 38 aa, Artificial Sequence; identical to SEQ ID NO: 9962
  GFR-binding peptide
  MOD_RES (2)..(4)..(37)..(38): Xaa is C or S
  MOD_RES (15)..(16)..(17)..(18)..(19): Xaa is A or G
  MOD_RES (20)..(21)..(22)..(23): Xaa is A or G or is absent

SEQ ID NO: 46555 - protein, 35 aa, Artificial Sequence
  GFR-binding peptide
  MOD_RES (2)..(4): Xaa is C or S
RXGXGEVVMEVTAKKVVKDYEDIKRMQVPRLETPV

SEQ ID NO: 46556 - protein, 37 aa, Artificial Sequence; identical to SEQ ID NO: 9965
  GFR-binding peptide
  MOD_RES (1)..(3)..(34)..(35): Xaa is C or S

SEQ ID NO: 46557 - protein, 35 aa, Artificial Sequence; identical to SEQ ID NO: 9966
  GFR-binding peptide
  MOD_RES (1)..(32)..(33): Xaa is C or S

SEQ ID NO: 46558 - protein, 40 aa, Artificial Sequence; identical to SEQ ID NO: 17196
  GFR-binding peptide
  MOD_RES (2)..(39): Xaa is C or S
  MOD_RES (15)..(16)..(17)..(18)..(19): Xaa is A or G
  MOD_RES (20)..(21)..(22)..(23): Xaa is A or G or is absent

SEQ ID NO: 46559 - protein, 43 aa, Artificial Sequence; identical to SEQ ID NO: 17197
  GFR-binding peptide
  MOD_RES (2)..(39): Xaa is C or S

SEQ ID NO: 46560 - protein, 42 aa, Artificial Sequence
  GFR-binding peptide
  MOD_RES (1)..(3)..(36)..(37): Xaa is C or S
  MOD_RES (14)..(15)..(16)..(17)..(18): Xaa is A or G
  MOD_RES (19)..(20)..(21)..(22): Xaa is A or G or is absent
XKXSKVVMVQVEKXXXXXXXXXVKAIKVSRLDQPVXXPSASA

SEQ ID NO: 46561 - protein, 37 aa, Artificial Sequence
  GFR-binding peptide
  MOD_RES (2)..(4): Xaa is C or S
  MOD_RES (16)..(17)..(18)..(19)..(20): Xaa is A or G
  MOD_RES (21)..(22)..(23)..(24): Xaa is A or G or is absent
HXGXARVVMNVTAKKXXXXXXXXXIKRVQVPRLQTPA

SEQ ID NO: 46562 - protein, 40 aa, Artificial Sequence; identical to SEQ ID NO: 9969
  GFR-binding peptide
  MOD_RES (2)..(4)..(38)..(39): Xaa is C or S
  MOD_RES (16)..(17)..(18)..(19)..(20): Xaa is A or G
  MOD_RES (21)..(22)..(23)..(24): Xaa is A or G or is absent

SEQ ID NO: 46563 - protein, 35 aa, Artificial Sequence; identical to SEQ ID NO: 17200
  GFR-binding peptide
  MOD_RES (1)..(1): Xaa is C or S
  MOD_RES (14)..(15)..(16)..(17)..(18): Xaa is A or G
  MOD_RES (19)..(20)..(21)..(22): Xaa is A or G or is absent

SEQ ID NO: 46564 - protein, 34 aa, Artificial Sequence
  GFR-binding peptide
  MOD_RES (1)..(3): Xaa is C or S
XGXSRVVMNSMEGIIVNSSDDMIQVTINSLKTPA

SEQ ID NO: 46565 - protein, 39 aa, Artificial Sequence
  GFR-binding peptide
  MOD_RES (1)..(35)..(36): Xaa is C or S
  MOD_RES (13)..(14)..(15)..(16)..(17): Xaa is A or G
  MOD_RES (18)..(19)..(20)..(21): Xaa is A or G or is absent
XARVVMNVTAKKXXXXXXXXXIKRVQVPRLQTPAXXPKP

SEQ ID NO: 46566 - protein, 31 aa, Artificial Sequence
  GFR-binding peptide
  MOD_RES (1)..(1): Xaa is C or S
XSRVIMVQVEKVKPKRGVVKAIKVSRLAQPV

SEQ ID NO: 46567 - protein, 37 aa, Artificial Sequence
  GFR-binding peptide
  MOD_RES (2)..(4)..(36)..(37): Xaa is C or S
RXGXGEVVMEVTAKKVVKDYEDIKRMQVPRLETPVXX

SEQ ID NO: 46568 - protein, 32 aa, Artificial Sequence
  GFR-binding peptide
  MOD_RES (11)..(12)..(13)..(14)..(15): Xaa is A or G
  MOD_RES (16)..(17)..(18)..(19): Xaa is A or G or is absent
SKVIMVTAKKXXXXXXXXXIKRIQVPRLDQSV

SEQ ID NO: 46569 - protein, 35 aa, Artificial Sequence
  GFR-binding peptide
  MOD_RES (2)..(34): Xaa is C or S
GXSRVVMNVTAKKIVNSSDDIKRVQVPRLKTPAXT

SEQ ID NO: 46570 - protein, 35 aa, Artificial Sequence
  GFR-binding peptide
  MOD_RES (2)..(2): Xaa is C or S
  MOD_RES (14)..(15)..(16)..(17)..(18): Xaa is A or G
  MOD_RES (19)..(20)..(21)..(22): Xaa is A or G or is absent
GXGEVVMDVTAKKXXXXXXXXXIKRMQVPRLETPV

SEQ ID NO: 46571 - protein, 36 aa, Artificial Sequence; identical to SEQ ID NO: 17205
  GFR-binding peptide
  MOD_RES (36)..(36): Xaa is C or S
  MOD_RES (12)..(13)..(14)..(15)..(16): Xaa is A or G
  MOD_RES (17)..(18)..(19)..(20): Xaa is A or G or is absent

SEQ ID NO: 46572 - protein, 36 aa, Artificial Sequence
  GFR-binding peptide
  MOD_RES (34)..(35): Xaa is C or S
  MOD_RES (12)..(13)..(14)..(15)..(16): Xaa is A or G
  MOD_RES (17)..(18)..(19)..(20): Xaa is A or G or is absent
GEVVMDVTAKKXXXXXXXXXIKRMQVPRLETPVXXA

SEQ ID NO: 46573 - protein, 35 aa, Artificial Sequence; identical to SEQ ID NO: 9976
  GFR-binding peptide
  MOD_RES (33)..(34): Xaa is C or S
  MOD_RES (11)..(12)..(13)..(14)..(15): Xaa is A or G
  MOD_RES (16)..(17)..(18)..(19): Xaa is A or G or is absent

SEQ ID NO: 46574 - protein, 34 aa, Artificial Sequence; identical to SEQ ID NO: 9977
  GFR-binding peptide
  MOD_RES (1)..(33)..(34): Xaa is C or S

SEQ ID NO: 46575 - protein, 34 aa, Artificial Sequence; identical to SEQ ID NO: 9978
  GFR-binding peptide
  MOD_RES (1)..(34): Xaa is C or S
  MOD_RES (12)..(13)..(14)..(15)..(16): Xaa is A or G
  MOD_RES (17)..(18)..(19)..(20): Xaa is A or G or is absent

SEQ ID NO: 46576 - protein, 39 aa, Artificial Sequence
  GFR-binding peptide
  MOD_RES (1)..(34)..(35): Xaa is C or S
  MOD_RES (12)..(13)..(14)..(15)..(16): Xaa is A or G
  MOD_RES (17)..(18)..(19)..(20): Xaa is A or G or is absent
XSRVIMVQVEKXXXXXXXXXVKAIKVSRLAQPVXXPAAS

SEQ ID NO: 46577 - protein, 34 aa, Artificial Sequence
  GFR-binding peptide
  MOD_RES (31)..(32): Xaa is C or S
SKVVMVQVEKVKPTRGVVKAIKVSRLDQPVXXPS

SEQ ID NO: 46578 - protein, 39 aa, Artificial Sequence; identical to SEQ ID NO: 9980
  GFR-binding peptide
  MOD_RES (2)..(4)..(35)..(36): Xaa is C or S

SEQ ID NO: 46579 - protein, 40 aa, Artificial Sequence
  GFR-binding peptide
  MOD_RES (2)..(36): Xaa is C or S
  MOD_RES (14)..(15)..(16)..(17)..(18): Xaa is A or G
  MOD_RES (19)..(20)..(21)..(22): Xaa is A or G or is absent
EXKNHQLFNSLQEXXXXXXXXXYYLMTLPEEETPVXELGE

SEQ ID NO: 46580 - protein, 38 aa, Artificial Sequence
  GFR-binding peptide
  MOD_RES (1)..(3)..(37): Xaa is C or S
  MOD_RES (15)..(16)..(17)..(18)..(19): Xaa is A or G
  MOD_RES (20)..(21)..(22)..(23): Xaa is A or G or is absent
XEXKNHQLFNSLQEXXXXXXXXXYYLMTLPEEETPVXE

SEQ ID NO: 46581 - protein, 31 aa, Artificial Sequence; identical to SEQ ID NO: 9982
  GFR-binding peptide
  MOD_RES (1)..(1): Xaa is C or S

SEQ ID NO: 46582 - protein, 34 aa, Artificial Sequence; identical to SEQ ID NO: 9986
  GFR-binding peptide
  MOD_RES (32)..(32): Xaa is C or S

SEQ ID NO: 46583 - protein, 36 aa, Artificial Sequence
  GFR-binding peptide
  MOD_RES (33)..(34): Xaa is C or S
  MOD_RES (11)..(12)..(13)..(14)..(15): Xaa is A or G
  MOD_RES (16)..(17)..(18)..(19): Xaa is A or G or is absent
RVVMNSMEGIXXXXXXXXXMIQVTINSLKTPAXXPK

SEQ ID NO: 46584 - protein, 33 aa, Artificial Sequence
  GFR-binding peptide
  MOD_RES (12)..(13)..(14)..(15)..(16): Xaa is A or G
  MOD_RES (17)..(18)..(19)..(20): Xaa is A or G or is absent
GEVVMEVQVEKXXXXXXXXXVKAMKVSRLETPV

SEQ ID NO: 46585 - protein, 32 aa, Artificial Sequence
  GFR-binding peptide
  MOD_RES (11)..(12)..(13)..(14)..(15): Xaa is A or G
  MOD_RES (16)..(17)..(18)..(19): Xaa is A or G or is absent
SKVIMVQVEKXXXXXXXXXVKAIKVSRLDQSV

SEQ ID NO: 46586 - protein, 37 aa, Artificial Sequence; identical to SEQ ID NO: 9989
  GFR-binding peptide
  MOD_RES (1)..(34)..(35): Xaa is C or S
  MOD_RES (12)..(13)..(14)..(15)..(16): Xaa is A or G
  MOD_RES (17)..(18)..(19)..(20): Xaa is A or G or is absent

SEQ ID NO: 46587 - protein, 37 aa, Artificial Sequence
  GFR-binding peptide
  MOD_RES (2)..(2): Xaa is C or S
  MOD_RES (15)..(16)..(17)..(18)..(19): Xaa is A or G
  MOD_RES (20)..(21)..(22)..(23): Xaa is A or G or is absent
AXELHEELRNSLQEXXXXXXXXXYYLVTLPEHHVRSP

SEQ ID NO: 46588 - protein, 38 aa, Artificial Sequence
  GFR-binding peptide
  MOD_RES (33)..(33): Xaa is C or S
NHQLFNSLQEHQGQHPKIRYYVMPLPEEETPVXELGED

SEQ ID NO: 46589 - protein, 34 aa, Artificial Sequence
  GFR-binding peptide
  MOD_RES (1)..(34): Xaa is C or S
  MOD_RES (12)..(13)..(14)..(15)..(16): Xaa is A or G
  MOD_RES (17)..(18)..(19)..(20): Xaa is A or G or is absent
XSKVVMSMEGIXXXXXXXXXMIQITINSLDQPVX

SEQ ID NO: 46590 - protein, 39 aa, Artificial Sequence
  GFR-binding peptide
  MOD_RES (2)..(4)..(38): Xaa is C or S
RXEXKNHQLFNSLQEHQGQHPKIRYYLMTLPEEETPVXE

SEQ ID NO: 46591 - protein, 38 aa, Artificial Sequence
  GFR-binding peptide
  MOD_RES (1)..(33)..(34): Xaa is C or S
XGEVVMEVTAKKVVKDYEDIKRMQVPRLETPVXXAKPI

SEQ ID NO: 46592 - protein, 40 aa, Artificial Sequence
  GFR-binding peptide
  MOD_RES (1)..(3)..(35)..(36): Xaa is C or S
XGXARVVMNVTAKKIVNSSDDIKRVQVPRLQTPAXXPKPV

SEQ ID NO: 46593 - protein, 37 aa, Artificial Sequence; identical to SEQ ID NO: 17217
  GFR-binding peptide
  MOD_RES (34)..(34): Xaa is C or S

SEQ ID NO: 46594 - protein, 43 aa, Artificial Sequence; identical to SEQ ID NO: 17219
  GFR-binding peptide
  MOD_RES (2)..(4)..(38): Xaa is C or S
  MOD_RES (16)..(17)..(18)..(19)..(20): Xaa is A or G
  MOD_RES (21)..(22)..(23)..(24): Xaa is A or G or is absent

SEQ ID NO: 46595 - protein, 39 aa, Artificial Sequence; identical to SEQ ID NO: 9995
  GFR-binding peptide
  MOD_RES (34)..(35): Xaa is C or S
  MOD_RES (12)..(13)..(14)..(15)..(16): Xaa is A or G
  MOD_RES (17)..(18)..(19)..(20): Xaa is A or G or is absent

SEQ ID NO: 46596 - protein, 34 aa, Artificial Sequence
  GFR-binding peptide
  MOD_RES (13)..(14)..(15)..(16)..(17): Xaa is A or G
  MOD_RES (18)..(19)..(20)..(21): Xaa is A or G or is absent
ELHEELRNSLQEXXXXXXXXXYYVVPLPEHHVRS

SEQ ID NO: 46597 - protein, 37 aa, Artificial Sequence
  GFR-binding peptide
  MOD_RES (34)..(35): Xaa is C or S
  MOD_RES (12)..(13)..(14)..(15)..(16): Xaa is A or G
  MOD_RES (17)..(18)..(19)..(20): Xaa is A or G or is absent
ARVVMNVTAKKXXXXXXXXXIKRVQVPRLQTPAXXPK

SEQ ID NO: 46598 - protein, 33 aa, Artificial Sequence
  GFR-binding peptide
  MOD_RES (31)..(32): Xaa is C or S
RVVMNSMEGIIVNSSDDMIQVTINSLQTPAXXP

SEQ ID NO: 46599 - protein, 32 aa, Artificial Sequence
  GFR-binding peptide
  MOD_RES (11)..(12)..(13)..(14)..(15): Xaa is A or G
  MOD_RES (16)..(17)..(18)..(19): Xaa is A or G or is absent
EVVMDVQVEKXXXXXXXXXVKAMKVSRLETPV

SEQ ID NO: 46600 - protein, 38 aa, Artificial Sequence; identical to SEQ ID NO: 17222
  GFR-binding peptide
  MOD_RES (37)..(37): Xaa is C or S

SEQ ID NO: 46601 - protein, 38 aa, Artificial Sequence
  GFR-binding peptide
  MOD_RES (2)..(35)..(36): Xaa is C or S
  MOD_RES (13)..(14)..(15)..(16)..(17): Xaa is A or G
  MOD_RES (18)..(19)..(20)..(21): Xaa is A or G or is absent
KXSRVIMSMEGIXXXXXXXXXMIQITINSLAQPVXXPA

SEQ ID NO: 46602 - protein, 39 aa, Artificial Sequence; identical to SEQ ID NO: 10002
  GFR-binding peptide
  MOD_RES (2)..(4)..(38)..(39): Xaa is C or S
  MOD_RES (16)..(17)..(18)..(19)..(20): Xaa is A or G
  MOD_RES (21)..(22)..(23)..(24): Xaa is A or G or is absent

SEQ ID NO: 46603 - protein, 35 aa, Artificial Sequence
  GFR-binding peptide
  MOD_RES (32)..(33): Xaa is C or S
GEVVMDSMEGIVVKENEDMIQMTINSLETPVXXAK

SEQ ID NO: 46604 - protein, 38 aa, Artificial Sequence; identical to SEQ ID NO: 10004
  GFR-binding peptide
  MOD_RES (1)..(32)..(33): Xaa is C or S

SEQ ID NO: 46605 - protein, 34 aa, Artificial Sequence; identical to SEQ ID NO: 10005
  GFR-binding peptide
  MOD_RES (1)..(33)..(34): Xaa is C or S

SEQ ID NO: 46606 - protein, 37 aa, Artificial Sequence; identical to SEQ ID NO: 17228
  GFR-binding peptide
  MOD_RES (35)..(35): Xaa is C or S
  MOD_RES (11)..(12)..(13)..(14)..(15): Xaa is A or G
  MOD_RES (16)..(17)..(18)..(19): Xaa is A or G or is absent

SEQ ID NO: 46607 - protein, 39 aa, Artificial Sequence
  GFR-binding peptide
  MOD_RES (2)..(36)..(37): Xaa is C or S
  MOD_RES (14)..(15)..(16)..(17)..(18): Xaa is A or G
  MOD_RES (19)..(20)..(21)..(22): Xaa is A or G or is absent
GXARVVMNSMEGIXXXXXXXXXMIQVTINSLQTPAXXPK

SEQ ID NO: 46608 - protein, 30 aa, Artificial Sequence; identical to SEQ ID NO: 10007
  GFR-binding peptide

SEQ ID NO: 46609 - protein, 35 aa, Artificial Sequence
  GFR-binding peptide
  MOD_RES (2)..(33)..(34): Xaa is C or S
KXSKVVMVQVEKVKPTRGVVKAIKVSRLDQPVXXP

SEQ ID NO: 46610 - protein, 37 aa, Artificial Sequence; identical to SEQ ID NO: 17230
  GFR-binding peptide
  MOD_RES (35)..(35): Xaa is C or S
  MOD_RES (11)..(12)..(13)..(14)..(15): Xaa is A or G
  MOD_RES (16)..(17)..(18)..(19): Xaa is A or G or is absent

SEQ ID NO: 46611 - protein, 34 aa, Artificial Sequence
  GFR-binding peptide
  MOD_RES (34)..(34): Xaa is C or S
  MOD_RES (12)..(13)..(14)..(15)..(16): Xaa is A or G
  MOD_RES (17)..(18)..(19)..(20): Xaa is A or G or is absent
GEVVMESMEGIXXXXXXXXXMIQMTINSLETPVX

SEQ ID NO: 46612 - protein, 36 aa, Artificial Sequence
  GFR-binding peptide
  MOD_RES (33)..(33): Xaa is C or S
NHQLFNSLQEHQGQHPKIRYYLMTLPEEETPVXELG

SEQ ID NO: 46613 - protein, 33 aa, Artificial Sequence; identical to SEQ ID NO: 17232
  GFR-binding peptide
  MOD_RES (33)..(33): Xaa is C or S
  MOD_RES (11)..(12)..(13)..(14)..(15): Xaa is A or G
  MOD_RES (16)..(17)..(18)..(19): Xaa is A or G or is absent

SEQ ID NO: 46614 - protein, 35 aa, Artificial Sequence
  GFR-binding peptide
  MOD_RES (2)..(33)..(34): Xaa is C or S
KXSKVIMVQVEKIKPTKGIVKAIKVSRLDQSVXXP

SEQ ID NO: 46615 - protein, 41 aa, Artificial Sequence; identical to SEQ ID NO: 17233
  GFR-binding peptide
  MOD_RES (2)..(39): Xaa is C or S

SEQ ID NO: 46616 - protein, 30 aa, Artificial Sequence
  GFR-binding peptide
SKVIMVQVEKIKPTKGIVKAIKVSRLDQSV

SEQ ID NO: 46617 - protein, 36 aa, Artificial Sequence; identical to SEQ ID NO: 17236
  GFR-binding peptide
  MOD_RES (13)..(14)..(15)..(16)..(17): Xaa is A or G
  MOD_RES (18)..(19)..(20)..(21): Xaa is A or G or is absent

SEQ ID NO: 46618 - protein, 42 aa, Artificial Sequence; identical to SEQ ID NO: 17239
  GFR-binding peptide
  MOD_RES (1)..(3)..(40): Xaa is C or S

SEQ ID NO: 46619 - protein, 40 aa, Artificial Sequence
  GFR-binding peptide
  MOD_RES (1)..(3)..(37)..(38): Xaa is C or S
  MOD_RES (15)..(16)..(17)..(18)..(19): Xaa is A or G
  MOD_RES (20)..(21)..(22)..(23): Xaa is A or G or is absent
XGXGEVVMEVTAKKXXXXXXXXXIKRMQVPRLETPVXXAK

SEQ ID NO: 46620 - protein, 39 aa, Artificial Sequence; identical to SEQ ID NO: 10012
  GFR-binding peptide
  MOD_RES (2)..(34)..(35): Xaa is C or S

SEQ ID NO: 46621 - protein, 35 aa, Artificial Sequence
  GFR-binding peptide
  MOD_RES (2)..(2): Xaa is C or S
  MOD_RES (14)..(15)..(16)..(17)..(18): Xaa is A or G
  MOD_RES (19)..(20)..(21)..(22): Xaa is A or G or is absent
GXSRVVMNVTAKKXXXXXXXXXIKRVQVPRLKTPA

SEQ ID NO: 46622 - protein, 39 aa, Artificial Sequence; identical to SEQ ID NO: 17241
  GFR-binding peptide
  MOD_RES (34)..(34): Xaa is C or S
  MOD_RES (12)..(13)..(14)..(15)..(16): Xaa is A or G
  MOD_RES (17)..(18)..(19)..(20): Xaa is A or G or is absent

SEQ ID NO: 46623 - protein, 43 aa, Artificial Sequence
  GFR-binding peptide
  MOD_RES (1)..(3)..(37)..(38): Xaa is C or S
  MOD_RES (15)..(16)..(17)..(18)..(19): Xaa is A or G
  MOD_RES (20)..(21)..(22)..(23): Xaa is A or G or is absent
XGXGEVVMDVTAKKXXXXXXXXXIKRMQVPRLETPVXXAKPIK

SEQ ID NO: 46624 - protein, 35 aa, Artificial Sequence; identical to SEQ ID NO: 10014
  GFR-binding peptide
  MOD_RES (34)..(35): Xaa is C or S
  MOD_RES (12)..(13)..(14)..(15)..(16): Xaa is A or G
  MOD_RES (17)..(18)..(19)..(20): Xaa is A or G or is absent

SEQ ID NO: 46625 - protein, 35 aa, Artificial Sequence; identical to SEQ ID NO: 10015
  GFR-binding peptide
  MOD_RES (31)..(32): Xaa is C or S

SEQ ID NO: 46626 - protein, 37 aa, Artificial Sequence
  GFR-binding peptide
  MOD_RES (31)..(32): Xaa is C or S
RVVMNVQVEKIVNSSDDVKAVKVSRLKTPAXXPKPVY

SEQ ID NO: 46627 - protein, 35 aa, Artificial Sequence; identical to SEQ ID NO: 10016
  GFR-binding peptide
  MOD_RES (1)..(33)..(34): Xaa is C or S

SEQ ID NO: 46628 - protein, 36 aa, Artificial Sequence; identical to SEQ ID NO: 10017
  GFR-binding peptide
  MOD_RES (2)..(34)..(35): Xaa is C or S

SEQ ID NO: 46629 - protein, 34 aa, Artificial Sequence
  GFR-binding peptide
  MOD_RES (1)..(3)..(34): Xaa is C or S
XKXSKVVMSMEGIVKPTRGVMIQITINSLDQPVX

SEQ ID NO: 46630 - protein, 36 aa, Artificial Sequence; identical to SEQ ID NO: 10018
  GFR-binding peptide
  MOD_RES (2)..(34)..(35): Xaa is C or S

SEQ ID NO: 46631 - protein, 33 aa, Artificial Sequence
  GFR-binding peptide
  MOD_RES (1)..(32)..(33): Xaa is C or S
XSKVIMSMEGIIKPTKGIMIQITINSLDQSVXX

SEQ ID NO: 46632 - protein, 39 aa, Artificial Sequence
  GFR-binding peptide
  MOD_RES (35)..(35): Xaa is C or S
  MOD_RES (11)..(12)..(13)..(14)..(15): Xaa is A or G
  MOD_RES (16)..(17)..(18)..(19): Xaa is A or G or is absent
HDELTNSLQEXXXXXXXXXYYVVPLPELQVQTPRXQVNR

SEQ ID NO: 46633 - protein, 37 aa, Artificial Sequence
  GFR-binding peptide
  MOD_RES (1)..(35): Xaa is C or S
  MOD_RES (13)..(14)..(15)..(16)..(17): Xaa is A or G
  MOD_RES (18)..(19)..(20)..(21): Xaa is A or G or is absent
XSRVVMNVQVEKXXXXXXXXXVKAVKVSRLKTPAXTP

SEQ ID NO: 46634 - protein, 35 aa, Artificial Sequence
  GFR-binding peptide
  MOD_RES (1)..(34)..(35): Xaa is C or S
  MOD_RES (12)..(13)..(14)..(15)..(16): Xaa is A or G
  MOD_RES (17)..(18)..(19)..(20): Xaa is A or G or is absent
XSKVIMVQVEKXXXXXXXXXVKAIKVSRLDQSVXX

SEQ ID NO: 46635 - protein, 40 aa, Artificial Sequence
  GFR-binding peptide
  MOD_RES (1)..(38): Xaa is C or S
XALHDELTNSLQEFIPKKRVIEYYVVPLPELQVQTPRXQV

SEQ ID NO: 46636 - protein, 36 aa, Artificial Sequence
  GFR-binding peptide
  MOD_RES (33)..(34): Xaa is C or S
  MOD_RES (11)..(12)..(13)..(14)..(15): Xaa is A or G
  MOD_RES (16)..(17)..(18)..(19): Xaa is A or G or is absent
SRVIMSMEGIXXXXXXXXXMIQITINSLAQPVXXPA

SEQ ID NO: 46637 - protein, 39 aa, Artificial Sequence; identical to SEQ ID NO: 10024
  GFR-binding peptide
  MOD_RES (1)..(3)..(35)..(36): Xaa is C or S

SEQ ID NO: 46638 - protein, 35 aa, Artificial Sequence; identical to SEQ ID NO: 35903
  GFR-binding peptide
  MOD_RES (1)..(32)..(33): Xaa is C or S

SEQ ID NO: 46639 - protein, 38 aa, Artificial Sequence
  GFR-binding peptide
  MOD_RES (2)..(35)..(36): Xaa is C or S
  MOD_RES (13)..(14)..(15)..(16)..(17): Xaa is A or G
  MOD_RES (18)..(19)..(20)..(21): Xaa is A or G or is absent
KXSKVVMVTAKKXXXXXXXXXIKRIQVPRLDQPVXXPS

SEQ ID NO: 46640 - protein, 32 aa, Artificial Sequence; identical to SEQ ID NO: 10029
  GFR-binding peptide
  MOD_RES (1)..(1): Xaa is C or S

SEQ ID NO: 46641 - protein, 37 aa, Artificial Sequence
  GFR-binding peptide
  MOD_RES (2)..(33)..(34): Xaa is C or S
KXSKVVMSMEGIVKPTRGVMIQITINSLDQPVXXPSA

SEQ ID NO: 46642 - protein, 38 aa, Artificial Sequence
  GFR-binding peptide
  MOD_RES (1)..(3)..(37)..(38): Xaa is C or S
  MOD_RES (15)..(16)..(17)..(18)..(19): Xaa is A or G
  MOD_RES (20)..(21)..(22)..(23): Xaa is A or G or is absent
XGXARVVMNSMEGIXXXXXXXXXMIQVTINSLQTPAXX

SEQ ID NO: 46643 - protein, 39 aa, Artificial Sequence
  GFR-binding peptide
  MOD_RES (1)..(35)..(36): Xaa is C or S
  MOD_RES (13)..(14)..(15)..(16)..(17): Xaa is A or G
  MOD_RES (18)..(19)..(20)..(21): Xaa is A or G or is absent
XARVVMNVQVEKXXXXXXXXXVKAVKVSRLQTPAXXPKP

SEQ ID NO: 46644 - protein, 41 aa, Artificial Sequence
  GFR-binding peptide
  MOD_RES (2)..(39): Xaa is C or S
KXALHDELTNSLQEFIPKKRVIEYYVVPLPELQVQTPRXQV

SEQ ID NO: 46645 - protein, 42 aa, Artificial Sequence; identical to SEQ ID NO: 10034
  GFR-binding peptide
  MOD_RES (2)..(36)..(37): Xaa is C or S
  MOD_RES (14)..(15)..(16)..(17)..(18): Xaa is A or G
  MOD_RES (19)..(20)..(21)..(22): Xaa is A or G or is absent

SEQ ID NO: 46646 - protein, 40 aa, Artificial Sequence; identical to SEQ ID NO: 17256
  GFR-binding peptide
  MOD_RES (34)..(34): Xaa is C or S
  MOD_RES (12)..(13)..(14)..(15)..(16): Xaa is A or G
  MOD_RES (17)..(18)..(19)..(20): Xaa is A or G or is absent

SEQ ID NO: 46647 - protein, 36 aa, Artificial Sequence
  GFR-binding peptide
  MOD_RES (33)..(34): Xaa is C or S
  MOD_RES (11)..(12)..(13)..(14)..(15): Xaa is A or G
  MOD_RES (16)..(17)..(18)..(19): Xaa is A or G or is absent
EVVMDSMEGIXXXXXXXXXMIQMTINSLETPVXXAK

SEQ ID NO: 46648 - protein, 39 aa, Artificial Sequence
  GFR-binding peptide
  MOD_RES (33)..(34): Xaa is C or S
  MOD_RES (11)..(12)..(13)..(14)..(15): Xaa is A or G
  MOD_RES (16)..(17)..(18)..(19): Xaa is A or G or is absent
RVVMNVQVEKXXXXXXXXXVKAVKVSRLKTPAXXPKPVY

SEQ ID NO: 46649 - protein, 35 aa, Artificial Sequence
  GFR-binding peptide
  MOD_RES (1)..(1): Xaa is C or S
XALHDELTNSLQEFIPKKRVIEYYVVPLPELQVQT

SEQ ID NO: 46650 - protein, 39 aa, Artificial Sequence; identical to SEQ ID NO: 17259
  GFR-binding peptide
  MOD_RES (37)..(37): Xaa is C or S

SEQ ID NO: 46651 - protein, 39 aa, Artificial Sequence
  GFR-binding peptide
  MOD_RES (2)..(34)..(35): Xaa is C or S
GXGEVVMDSMEGIVVKENEDMIQMTINSLETPVXXAKPI

SEQ ID NO: 46652 - protein, 37 aa, Artificial Sequence
  GFR-binding peptide
  MOD_RES (2)..(35)..(36): Xaa is C or S
  MOD_RES (13)..(14)..(15)..(16)..(17): Xaa is A or G
  MOD_RES (18)..(19)..(20)..(21): Xaa is A or G or is absent
KXSKVVMVQVEKXXXXXXXXXVKAIKVSRLDQPVXXP

SEQ ID NO: 46653 - protein, 40 aa, Artificial Sequence; identical to SEQ ID NO: 10035
  GFR-binding peptide
  MOD_RES (1)..(3)..(37): Xaa is C or S
  MOD_RES (15)..(16)..(17)..(18)..(19): Xaa is A or G
  MOD_RES (20)..(21)..(22)..(23): Xaa is A or G or is absent

SEQ ID NO: 46654 - protein, 43 aa, Artificial Sequence; identical to SEQ ID NO: 10036
  GFR-binding peptide
  MOD_RES (2)..(4)..(37)..(38): Xaa is C or S
  MOD_RES (15)..(16)..(17)..(18)..(19): Xaa is A or G
  MOD_RES (20)..(21)..(22)..(23): Xaa is A or G or is absent

SEQ ID NO: 46655 - protein, 40 aa, Artificial Sequence
  GFR-binding peptide
  MOD_RES (2)..(4): Xaa is C or S
EXKXALHDELTNSLQEFIPKKRVIEYYVVPLPELQVQTPR

SEQ ID NO: 46656 - protein, 36 aa, Artificial Sequence; identical to SEQ ID NO: 10042
  GFR-binding peptide
  MOD_RES (2)..(4): Xaa is C or S
  MOD_RES (15)..(16)..(17)..(18)..(19): Xaa is A or G
  MOD_RES (20)..(21)..(22)..(23): Xaa is A or G or is absent

SEQ ID NO: 46657 - protein, 39 aa, Artificial Sequence; identical to SEQ ID NO: 35934
  GFR-binding peptide
  MOD_RES (2)..(33)..(34): Xaa is C or S

SEQ ID NO: 46658 - protein, 31 aa, Artificial Sequence; identical to SEQ ID NO: 10044
  GFR-binding peptide
  MOD_RES (31)..(31): Xaa is C or S

SEQ ID NO: 46659 - protein, 33 aa, Artificial Sequence
  GFR-binding peptide
  MOD_RES (32)..(33): Xaa is C or S
GEVVMDSMEGIVVKENEDMIQMTINSLETPVXX

SEQ ID NO: 46660 - protein, 39 aa, Artificial Sequence
  GFR-binding peptide
  MOD_RES (2)..(35)..(36): Xaa is C or S
  MOD_RES (13)..(14)..(15)..(16)..(17): Xaa is A or G
  MOD_RES (18)..(19)..(20)..(21): Xaa is A or G or is absent
KXSRVIMVTAKKXXXXXXXXXIKRIQVPRLAQPVXXPAA

SEQ ID NO: 46661 - protein, 34 aa, Artificial Sequence
  GFR-binding peptide
  MOD_RES (1)..(32)..(33): Xaa is C or S
XSKVVMVQVEKVKPTRGVVKAIKVSRLDQPVXXP

SEQ ID NO: 46662 - protein, 36 aa, Artificial Sequence
  GFR-binding peptide
  MOD_RES (1)..(35)..(36): Xaa is C or S
  MOD_RES (13)..(14)..(15)..(16)..(17): Xaa is A or G
  MOD_RES (18)..(19)..(20)..(21): Xaa is A or G or is absent
XARVVMNSMEGIXXXXXXXXXMIQVTINSLQTPAXX

SEQ ID NO: 46663 - protein, 41 aa, Artificial Sequence; identical to SEQ ID NO: 10049
  GFR-binding peptide
  MOD_RES (2)..(4)..(36): Xaa is C or S

SEQ ID NO: 46664 - protein, 39 aa, Artificial Sequence
  GFR-binding peptide
  MOD_RES (36)..(36): Xaa is C or S
  MOD_RES (12)..(13)..(14)..(15)..(16): Xaa is A or G
  MOD_RES (17)..(18)..(19)..(20): Xaa is A or G or is absent
LHDELTNSLQEXXXXXXXXXYYLVTLPELQVQTPRXQVN

SEQ ID NO: 46665 - protein, 34 aa, Artificial Sequence; identical to SEQ ID NO: 17267
  GFR-binding peptide
  MOD_RES (13)..(14)..(15)..(16)..(17): Xaa is A or G
  MOD_RES (18)..(19)..(20)..(21): Xaa is A or G or is absent

SEQ ID NO: 46666 - protein, 39 aa, Artificial Sequence; identical to SEQ ID NO: 17268
  GFR-binding peptide
  MOD_RES (1)..(3)..(37): Xaa is C or S
  MOD_RES (15)..(16)..(17)..(18)..(19): Xaa is A or G
  MOD_RES (20)..(21)..(22)..(23): Xaa is A or G or is absent

SEQ ID NO: 46667 - protein, 39 aa, Artificial Sequence
  GFR-binding peptide
  MOD_RES (34)..(35): Xaa is C or S
  MOD_RES (12)..(13)..(14)..(15)..(16): Xaa is A or G
  MOD_RES (17)..(18)..(19)..(20): Xaa is A or G or is absent
GEVVMDVQVEKXXXXXXXXXVKAMKVSRLETPVXXAKPI

SEQ ID NO: 46668 - protein, 31 aa, Artificial Sequence
  GFR-binding peptide
  MOD_RES (31)..(31): Xaa is C or S
RVVMNSMEGIIVNSSDDMIQVTINSLKTPAX

SEQ ID NO: 46669 - protein, 35 aa, Artificial Sequence; identical to SEQ ID NO: 17272
  GFR-binding peptide
  MOD_RES (35)..(35): Xaa is C or S
  MOD_RES (11)..(12)..(13)..(14)..(15): Xaa is A or G
  MOD_RES (16)..(17)..(18)..(19): Xaa is A or G or is absent

SEQ ID NO: 46670 - protein, 37 aa, Artificial Sequence; identical to SEQ ID NO: 10053
  GFR-binding peptide
  MOD_RES (1)..(3)..(37): Xaa is C or S
  MOD_RES (15)..(16)..(17)..(18)..(19): Xaa is A or G
  MOD_RES (20)..(21)..(22)..(23): Xaa is A or G or is absent

SEQ ID NO: 46671 - protein, 35 aa, Artificial Sequence
  GFR-binding peptide
  MOD_RES (1)..(35): Xaa is C or S
  MOD_RES (13)..(14)..(15)..(16)..(17): Xaa is A or G
  MOD_RES (18)..(19)..(20)..(21): Xaa is A or G or is absent
XARVVMNSMEGIXXXXXXXXXMIQVTINSLQTPAX

SEQ ID NO: 46672 - protein, 37 aa, Artificial Sequence
  GFR-binding peptide
  MOD_RES (1)..(1): Xaa is C or S
  MOD_RES (14)..(15)..(16)..(17)..(18): Xaa is A or G
  MOD_RES (19)..(20)..(21)..(22): Xaa is A or G or is absent
XELHEELRNSLQEXXXXXXXXXYYLVTLPEHHVRSPQ

SEQ ID NO: 46673 - protein, 39 aa, Artificial Sequence
  GFR-binding peptide
  MOD_RES (1)..(3)..(37)..(38): Xaa is C or S
  MOD_RES (15)..(16)..(17)..(18)..(19): Xaa is A or G
  MOD_RES (20)..(21)..(22)..(23): Xaa is A or G or is absent
XGXARVVMNVTAKKXXXXXXXXXIKRVQVPRLQTPAXXP

SEQ ID NO: 46674 - protein, 40 aa, Artificial Sequence
  GFR-binding peptide
  MOD_RES (2)..(36)..(37): Xaa is C or S
  MOD_RES (14)..(15)..(16)..(17)..(18): Xaa is A or G
  MOD_RES (19)..(20)..(21)..(22): Xaa is A or G or is absent
GXGEVVMDVTAKKXXXXXXXXXIKRMQVPRLETPVXXAKP

SEQ ID NO: 46675 - protein, 39 aa, Artificial Sequence
  GFR-binding peptide
  MOD_RES (2)..(4)..(38)..(39): Xaa is C or S
  MOD_RES (16)..(17)..(18)..(19)..(20): Xaa is A or G
  MOD_RES (21)..(22)..(23)..(24): Xaa is A or G or is absent
HXGXARVVMNVQVEKXXXXXXXXXVKAVKVSRLQTPAXX

SEQ ID NO: 46676 - protein, 36 aa, Artificial Sequence; identical to SEQ ID NO: 17280
  GFR-binding peptide
  MOD_RES (35)..(35): Xaa is C or S
  MOD_RES (11)..(12)..(13)..(14)..(15): Xaa is A or G
  MOD_RES (16)..(17)..(18)..(19): Xaa is A or G or is absent

SEQ ID NO: 46677 - protein, 33 aa, Artificial Sequence
  GFR-binding peptide
  MOD_RES (33)..(33): Xaa is C or S
  MOD_RES (11)..(12)..(13)..(14)..(15): Xaa is A or G
  MOD_RES (16)..(17)..(18)..(19): Xaa is A or G or is absent
SKVVMVQVEKXXXXXXXXXVKAIKVSRLDQPVX

SEQ ID NO: 46678 - protein, 40 aa, Artificial Sequence
  GFR-binding peptide
  MOD_RES (34)..(35): Xaa is C or S
  MOD_RES (12)..(13)..(14)..(15)..(16): Xaa is A or G
  MOD_RES (17)..(18)..(19)..(20): Xaa is A or G or is absent
ARVVMNVQVEKXXXXXXXXXVKAVKVSRLQTPAXXPKPVT

SEQ ID NO: 46679 - protein, 39 aa, Artificial Sequence; identical to SEQ ID NO: 17283
  GFR-binding peptide
  MOD_RES (1)..(38): Xaa is C or S
  MOD_RES (14)..(15)..(16)..(17)..(18): Xaa is A or G
  MOD_RES (19)..(20)..(21)..(22): Xaa is A or G or is absent

SEQ ID NO: 46680 - protein, 33 aa, Artificial Sequence
  GFR-binding peptide
  MOD_RES (33)..(33): Xaa is C or S
  MOD_RES (11)..(12)..(13)..(14)..(15): Xaa is A or G
  MOD_RES (16)..(17)..(18)..(19): Xaa is A or G or is absent
SRVIMVTAKKXXXXXXXXXIKRIQVPRLAQPVX

SEQ ID NO: 46681 - protein, 39 aa, Artificial Sequence
  GFR-binding peptide
  MOD_RES (2)..(36)..(37): Xaa is C or S
  MOD_RES (14)..(15)..(16)..(17)..(18): Xaa is A or G
  MOD_RES (19)..(20)..(21)..(22): Xaa is A or G or is absent
GXSRVVMNVQVEKXXXXXXXXXVKAVKVSRLKTPAXXPK

SEQ ID NO: 46682 - protein, 37 aa, Artificial Sequence; identical to SEQ ID NO: 10058
  GFR-binding peptide
  MOD_RES (34)..(35): Xaa is C or S
  MOD_RES (12)..(13)..(14)..(15)..(16): Xaa is A or G
  MOD_RES (17)..(18)..(19)..(20): Xaa is A or G or is absent

SEQ ID NO: 46683 - protein, 36 aa, Artificial Sequence; identical to SEQ ID NO: 10059
  GFR-binding peptide
  MOD_RES (1)..(3): Xaa is C or S
  MOD_RES (15)..(16)..(17)..(18)..(19): Xaa is A or G
  MOD_RES (20)..(21)..(22)..(23): Xaa is A or G or is absent

SEQ ID NO: 46684 - protein, 39 aa, Artificial Sequence; identical to SEQ ID NO: 17289
  GFR-binding peptide
  MOD_RES (1)..(38): Xaa is C or S

SEQ ID NO: 46685 - protein, 40 aa, Artificial Sequence; identical to SEQ ID NO: 10063
  GFR-binding peptide
  MOD_RES (1)..(3)..(35): Xaa is C or S

SEQ ID NO: 46686 - protein, 35 aa, Artificial Sequence; identical to SEQ ID NO: 10064
  GFR-binding peptide
  MOD_RES (2)..(33)..(34): Xaa is C or S

SEQ ID NO: 46687 - protein, 39 aa, Artificial Sequence; identical to SEQ ID NO: 17292
  GFR-binding peptide
  MOD_RES (36)..(36): Xaa is C or S

SEQ ID NO: 46688 - protein, 38 aa, Artificial Sequence; identical to SEQ ID NO: 17293
  GFR-binding peptide
  MOD_RES (1)..(3): Xaa is C or S
  MOD_RES (16)..(17)..(18)..(19)..(20): Xaa is A or G
  MOD_RES (21)..(22)..(23)..(24): Xaa is A or G or is absent

SEQ ID NO: 46689 - protein, 42 aa, Artificial Sequence; identical to SEQ ID NO: 10066
  GFR-binding peptide
  MOD_RES (2)..(4)..(36)..(37): Xaa is C or S

SEQ ID NO: 46690 - protein, 37 aa, Artificial Sequence; identical to SEQ ID NO: 10067
  GFR-binding peptide
  MOD_RES (2)..(36)..(37): Xaa is C or S
  MOD_RES (14)..(15)..(16)..(17)..(18): Xaa is A or G
  MOD_RES (19)..(20)..(21)..(22): Xaa is A or G or is absent

SEQ ID NO: 46691 - protein, 36 aa, Artificial Sequence; identical to SEQ ID NO: 10069
  GFR-binding peptide
  MOD_RES (2)..(4)..(35)..(36): Xaa is C or S

SEQ ID NO: 46692 - protein, 35 aa, Artificial Sequence
  GFR-binding peptide
  MOD_RES (35)..(35): Xaa is C or S
HDELTNSLQEFIPKKRVIEYYLVTLPELQVQTPRX

SEQ ID NO: 46693 - protein, 39 aa, Artificial Sequence; identical to SEQ ID NO: 35981
  GFR-binding peptide
  MOD_RES (1)..(34)..(35): Xaa is C or S
  MOD_RES (12)..(13)..(14)..(15)..(16): Xaa is A or G
  MOD_RES (17)..(18)..(19)..(20): Xaa is A or G or is absent

SEQ ID NO: 46694 - protein, 42 aa, Artificial Sequence
  GFR-binding peptide
  MOD_RES (2)..(36)..(37): Xaa is C or S
  MOD_RES (14)..(15)..(16)..(17)..(18): Xaa is A or G
  MOD_RES (19)..(20)..(21)..(22): Xaa is A or G or is absent
GXSRVVMNVQVEKXXXXXXXXXVKAVKVSRLKTPAXXPKPVY

SEQ ID NO: 46695 - protein, 41 aa, Artificial Sequence; identical to SEQ ID NO: 17297
  GFR-binding peptide
  MOD_RES (1)..(3)..(37): Xaa is C or S
  MOD_RES (15)..(16)..(17)..(18)..(19): Xaa is A or G
  MOD_RES (20)..(21)..(22)..(23): Xaa is A or G or is absent

SEQ ID NO: 46696 - protein, 42 aa, Artificial Sequence; identical to SEQ ID NO: 17298
  GFR-binding peptide
  MOD_RES (2)..(39): Xaa is C or S

SEQ ID NO: 46697 - protein, 40 aa, Artificial Sequence
  GFR-binding peptide
  MOD_RES (2)..(4)..(37)..(38): Xaa is C or S
  MOD_RES (15)..(16)..(17)..(18)..(19): Xaa is A or G
  MOD_RES (20)..(21)..(22)..(23): Xaa is A or G or is absent
SXKXSKVVMVQVEKXXXXXXXXXVKAIKVSRLDQPVXXPS

SEQ ID NO: 46698 - protein, 43 aa, Artificial Sequence; identical to SEQ ID NO: 17299
  GFR-binding peptide
  MOD_RES (1)..(3)..(37): Xaa is C or S

SEQ ID NO: 46699 - protein, 33 aa, Artificial Sequence; identical to SEQ ID NO: 10072
  GFR-binding peptide
  MOD_RES (1)..(3): Xaa is C or S

SEQ ID NO: 46700 - protein, 38 aa, Artificial Sequence; identical to SEQ ID NO: 10073
  GFR-binding peptide
  MOD_RES (34)..(35): Xaa is C or S
  MOD_RES (12)..(13)..(14)..(15)..(16): Xaa is A or G
  MOD_RES (17)..(18)..(19)..(20): Xaa is A or G or is absent

SEQ ID NO: 46701 - protein, 40 aa, Artificial Sequence
  GFR-binding peptide
  MOD_RES (37)..(37): Xaa is C or S
ALHDELTNSLQEFIPKKRVIEYYVVPLPELQVQTPRXQVN

SEQ ID NO: 46702 - protein, 39 aa, Artificial Sequence; identical to SEQ ID NO: 10074
  GFR-binding peptide
  MOD_RES (2)..(4)..(38)..(39): Xaa is C or S
  MOD_RES (16)..(17)..(18)..(19)..(20): Xaa is A or G
  MOD_RES (21)..(22)..(23)..(24): Xaa is A or G or is absent

SEQ ID NO: 46703 - protein, 34 aa, Artificial Sequence; identical to SEQ ID NO: 17302
  GFR-binding peptide

SEQ ID NO: 46704 - protein, 33 aa, Artificial Sequence
  GFR-binding peptide
  MOD_RES (1)..(32)..(33): Xaa is C or S
XSRVIMVQVEKVKPKRGVVKAIKVSRLAQPVXX

SEQ ID NO: 46705 - protein, 38 aa, Artificial Sequence
  GFR-binding peptide
  MOD_RES (2)..(4)..(35)..(36): Xaa is C or S
SXKXSKVVMSMEGIVKPTRGVMIQITINSLDQPVXXPS

SEQ ID NO: 46706 - protein, 34 aa, Artificial Sequence
  GFR-binding peptide
  MOD_RES (1)..(1): Xaa is C or S
  MOD_RES (13)..(14)..(15)..(16)..(17): Xaa is A or G
  MOD_RES (18)..(19)..(20)..(21): Xaa is A or G or is absent
XARVVMNSMEGIXXXXXXXXXMIQVTINSLQTPA

SEQ ID NO: 46707 - protein, 34 aa, Artificial Sequence; identical to SEQ ID NO: 17305
  GFR-binding peptide
  MOD_RES (34)..(34): Xaa is C or S

SEQ ID NO: 46708 - protein, 39 aa, Artificial Sequence
  GFR-binding peptide
  MOD_RES (1)..(3)..(37): Xaa is C or S
  MOD_RES (15)..(16)..(17)..(18)..(19): Xaa is A or G
  MOD_RES (20)..(21)..(22)..(23): Xaa is A or G or is absent
XGXSRVVMNSMEGIXXXXXXXXXMIQVTINSLKTPAXTP

SEQ ID NO: 46709 - protein, 38 aa, Artificial Sequence
  GFR-binding peptide
  MOD_RES (33)..(34): Xaa is C or S
  MOD_RES (11)..(12)..(13)..(14)..(15): Xaa is A or G
  MOD_RES (16)..(17)..(18)..(19): Xaa is A or G or is absent
EVVMESMEGIXXXXXXXXXMIQMTINSLETPVXXAKPI

SEQ ID NO: 46710 - protein, 39 aa, Artificial Sequence
  GFR-binding peptide
  MOD_RES (1)..(3)..(37): Xaa is C or S
XEXKNHQLFNSLQEHQGQHPKIRYYLMTLPEEETPVXEL

SEQ ID NO: 46711 - protein, 38 aa, Artificial Sequence; identical to SEQ ID NO: 17309
  GFR-binding peptide
  MOD_RES (34)..(34): Xaa is C or S
  MOD_RES (12)..(13)..(14)..(15)..(16): Xaa is A or G
  MOD_RES (17)..(18)..(19)..(20): Xaa is A or G or is absent

SEQ ID NO: 46712 - protein, 32 aa, Artificial Sequence
  GFR-binding peptide
  MOD_RES (2)..(2): Xaa is C or S
KXSRVIMSMEGIVKPKRGVMIQITINSLAQPV

SEQ ID NO: 46713 - protein, 40 aa, Artificial Sequence
  GFR-binding peptide
  MOD_RES (1)..(3)..(40): Xaa is C or S
XAXELHEELRNSLQELKPKKRVYEYYLVTLPEHHVRSPQX

SEQ ID NO: 46714 - protein, 37 aa, Artificial Sequence; identical to SEQ ID NO: 10087
  GFR-binding peptide
  MOD_RES (31)..(32): Xaa is C or S

SEQ ID NO: 46715 - protein, 35 aa, Artificial Sequence; identical to SEQ ID NO: 17315
  GFR-binding peptide
  MOD_RES (1)..(35): Xaa is C or S

SEQ ID NO: 46716 - protein, 38 aa, Artificial Sequence
  GFR-binding peptide
  MOD_RES (1)..(33): Xaa is C or S
XSRVVMNSMEGIIVNSSDDMIQVTINSLKTPAXTPKTV

SEQ ID NO: 46717 - protein, 43 aa, Artificial Sequence
  GFR-binding peptide
  MOD_RES (2)..(4)..(38)..(39): Xaa is C or S
  MOD_RES (16)..(17)..(18)..(19)..(20): Xaa is A or G
  MOD_RES (21)..(22)..(23)..(24): Xaa is A or G or is absent
HXGXARVVMNSMEGIXXXXXXXXXMIQVTINSLQTPAXXPKPV

SEQ ID NO: 46718 - protein, 37 aa, Artificial Sequence
  GFR-binding peptide
  MOD_RES (34)..(34): Xaa is C or S
KNHQLFNSLQEHQGQHPKIRYYVMPLPEEETPVXELG

SEQ ID NO: 46719 - protein, 37 aa, Artificial Sequence; identical to SEQ ID NO: 10090
  GFR-binding peptide
  MOD_RES (2)..(4)..(36)..(37): Xaa is C or S

SEQ ID NO: 46720 - protein, 40 aa, Artificial Sequence
  GFR-binding peptide
  MOD_RES (1)..(3)..(35)..(36): Xaa is C or S
XGXGEVVMDSMEGIVVKENEDMIQMTINSLETPVXXAKPI

SEQ ID NO: 46721 - protein, 43 aa, Artificial Sequence
  GFR-binding peptide
  MOD_RES (1)..(3)..(37)..(38): Xaa is C or S
  MOD_RES (15)..(16)..(17)..(18)..(19): Xaa is A or G
  MOD_RES (20)..(21)..(22)..(23): Xaa is A or G or is absent
XGXARVVMNVTAKKXXXXXXXXXIKRVQVPRLQTPAXXPKPVT

SEQ ID NO: 46722 - protein, 32 aa, Artificial Sequence
  GFR-binding peptide
  MOD_RES (1)..(1): Xaa is C or S
XARVVMNVQVEKIVNSSDDVKAVKVSRLQTPA

SEQ ID NO: 46723 - protein, 38 aa, Artificial Sequence
  GFR-binding peptide
  MOD_RES (32)..(33): Xaa is C or S
GEVVMDVQVEKVVKENEDVKAMKVSRLETPVXXAKPIK

SEQ ID NO: 46724 - protein, 42 aa, Artificial Sequence; identical to SEQ ID NO: 17323
  GFR-binding peptide
  MOD_RES (1)..(3)..(37): Xaa is C or S

SEQ ID NO: 46725 - protein, 38 aa, Artificial Sequence; identical to SEQ ID NO: 10092
  GFR-binding peptide
  MOD_RES (1)..(33)..(34): Xaa is C or S

SEQ ID NO: 46726 - protein, 33 aa, Artificial Sequence; identical to SEQ ID NO: 10095
  GFR-binding peptide
  MOD_RES (31)..(32): Xaa is C or S

SEQ ID NO: 46727 - protein, 41 aa, Artificial Sequence
  GFR-binding peptide
  MOD_RES (1)..(35): Xaa is C or S
  MOD_RES (13)..(14)..(15)..(16)..(17): Xaa is A or G
  MOD_RES (18)..(19)..(20)..(21): Xaa is A or G or is absent
XKNHQLFNSLQEXXXXXXXXXYYVMPLPEEETPVXELGEDN

SEQ ID NO: 46728 - protein, 34 aa, Artificial Sequence
  GFR-binding peptide
  MOD_RES (33)..(34): Xaa is C or S
  MOD_RES (11)..(12)..(13)..(14)..(15): Xaa is A or G
  MOD_RES (16)..(17)..(18)..(19): Xaa is A or G or is absent
RVVMNVTAKKXXXXXXXXXIKRVQVPRLQTPAXX

SEQ ID NO: 46729 - protein, 40 aa, Artificial Sequence
  GFR-binding peptide
  MOD_RES (2)..(34): Xaa is C or S
GXSRVVMNVQVEKIVNSSDDVKAVKVSRLKTPAXTPKTVH

SEQ ID NO: 46730 - protein, 33 aa, Artificial Sequence; identical to SEQ ID NO: 17325
  GFR-binding peptide
  MOD_RES (12)..(13)..(14)..(15)..(16): Xaa is A or G
  MOD_RES (17)..(18)..(19)..(20): Xaa is A or G or is absent

SEQ ID NO: 46731 - protein, 38 aa, Artificial Sequence; identical to SEQ ID NO: 10096
  GFR-binding peptide
  MOD_RES (1)..(34)..(35): Xaa is C or S
  MOD_RES (12)..(13)..(14)..(15)..(16): Xaa is A or G
  MOD_RES (17)..(18)..(19)..(20): Xaa is A or G or is absent

SEQ ID NO: 46732 - protein, 36 aa, Artificial Sequence
  GFR-binding peptide
  MOD_RES (1)..(3)..(35)..(36): Xaa is C or S
XGXGEVVMEVQVEKVVKDYEDVKAMKVSRLETPVXX

SEQ ID NO: 46733 - protein, 39 aa, Artificial Sequence; identical to SEQ ID NO: 17328
  GFR-binding peptide
  MOD_RES (33)..(33): Xaa is C or S

SEQ ID NO: 46734 - protein, 38 aa, Artificial Sequence; identical to SEQ ID NO: 10097
  GFR-binding peptide
  MOD_RES (1)..(3)..(34)..(35): Xaa is C or S

SEQ ID NO: 46735 - protein, 36 aa, Artificial Sequence; identical to SEQ ID NO: 10098
  GFR-binding peptide
  MOD_RES (33)..(34): Xaa is C or S
  MOD_RES (11)..(12)..(13)..(14)..(15): Xaa is A or G
  MOD_RES (16)..(17)..(18)..(19): Xaa is A or G or is absent

SEQ ID NO: 46736 - protein, 38 aa, Artificial Sequence
  GFR-binding peptide
  MOD_RES (32)..(33): Xaa is C or S
SRVVMNVTAKKIVNSSDDIKRVQVPRLKTPAXXPKPVY

SEQ ID NO: 46737 - protein, 38 aa, Artificial Sequence
  GFR-binding peptide
  MOD_RES (2)..(4)..(36): Xaa is C or S
HXGXSRVVMNVQVEKIVNSSDDVKAVKVSRLKTPAXTP

SEQ ID NO: 46738 - protein, 34 aa, Artificial Sequence; identical to SEQ ID NO: 10101
  GFR-binding peptide
  MOD_RES (1)..(3): Xaa is C or S

SEQ ID NO: 46739 - protein, 33 aa, Artificial Sequence
  GFR-binding peptide
  MOD_RES (12)..(13)..(14)..(15)..(16): Xaa is A or G
  MOD_RES (17)..(18)..(19)..(20): Xaa is A or G or is absent
SRVVMNVQVEKXXXXXXXXXVKAVKVSRLKTPA

SEQ ID NO: 46740 - protein, 36 aa, Artificial Sequence
  GFR-binding peptide
  MOD_RES (2)..(34)..(35): Xaa is C or S
GXSRVVMNVQVEKIVNSSDDVKAVKVSRLKTPAXXP

SEQ ID NO: 46741 - protein, 35 aa, Artificial Sequence; identical to SEQ ID NO: 17330
  GFR-binding peptide
  MOD_RES (33)..(33): Xaa is C or S

SEQ ID NO: 46742 - protein, 38 aa, Artificial Sequence
  GFR-binding peptide
  MOD_RES (35)..(35): Xaa is C or S
  MOD_RES (11)..(12)..(13)..(14)..(15): Xaa is A or G
  MOD_RES (16)..(17)..(18)..(19): Xaa is A or G or is absent
HEELRNSLQEXXXXXXXXXYYLVTLPEHHVRSPQXKVS

SEQ ID NO: 46743 - protein, 39 aa, Artificial Sequence; identical to SEQ ID NO: 10104
  GFR-binding peptide
  MOD_RES (2)..(4)..(37)..(38): Xaa is C or S
  MOD_RES (15)..(16)..(17)..(18)..(19): Xaa is A or G
  MOD_RES (20)..(21)..(22)..(23): Xaa is A or G or is absent

SEQ ID NO: 46744 - protein, 39 aa, Artificial Sequence
  GFR-binding peptide
  MOD_RES (2)..(4)..(35)..(36): Xaa is C or S
SXKXSRVIMSMEGIVKPKRGVMIQITINSLAQPVXXPAA

SEQ ID NO: 46745 - protein, 36 aa, Artificial Sequence
  GFR-binding peptide
  MOD_RES (2)..(34)..(35): Xaa is C or S
GXGEVVMEVQVEKVVKDYEDVKAMKVSRLETPVXXA

SEQ ID NO: 46746 - protein, 40 aa, Artificial Sequence; identical to SEQ ID NO: 10105
  GFR-binding peptide
  MOD_RES (1)..(3)..(36)..(37): Xaa is C or S
  MOD_RES (14)..(15)..(16)..(17)..(18): Xaa is A or G
  MOD_RES (19)..(20)..(21)..(22): Xaa is A or G or is absent

SEQ ID NO: 46747 - protein, 36 aa, Artificial Sequence; identical to SEQ ID NO: 10106
  GFR-binding peptide
  MOD_RES (1)..(32)..(33): Xaa is C or S

SEQ ID NO: 46748 - protein, 38 aa, Artificial Sequence
  GFR-binding peptide
  MOD_RES (1)..(3)..(36)..(37): Xaa is C or S
  MOD_RES (14)..(15)..(16)..(17)..(18): Xaa is A or G
  MOD_RES (19)..(20)..(21)..(22): Xaa is A or G or is absent
XKXSKVVMVQVEKXXXXXXXXXVKAIKVSRLDQPVXXP

SEQ ID NO: 46749 - protein, 37 aa, Artificial Sequence; identical to SEQ ID NO: 17335
  GFR-binding peptide
  MOD_RES (2)..(2): Xaa is C or S
  MOD_RES (15)..(16)..(17)..(18)..(19): Xaa is A or G
  MOD_RES (20)..(21)..(22)..(23): Xaa is A or G or is absent

SEQ ID NO: 46750 - protein, 40 aa, Artificial Sequence; identical to SEQ ID NO: 10109
  GFR-binding peptide
  MOD_RES (1)..(3)..(35)..(36): Xaa is C or S

SEQ ID NO: 46751 - protein, 36 aa, Artificial Sequence
  GFR-binding peptide
  MOD_RES (13)..(14)..(15)..(16)..(17): Xaa is A or G
  MOD_RES (18)..(19)..(20)..(21): Xaa is A or G or is absent
ALHDELTNSLQEXXXXXXXXXYYLVTLPELQVQTPR

SEQ ID NO: 46752 - protein, 33 aa, Artificial Sequence; identical to SEQ ID NO: 17336
  GFR-binding peptide
  MOD_RES (11)..(12)..(13)..(14)..(15): Xaa is A or G
  MOD_RES (16)..(17)..(18)..(19): Xaa is A or G or is absent

SEQ ID NO: 46753 - protein, 40 aa, Artificial Sequence; identical to SEQ ID NO: 10112
  GFR-binding peptide
  MOD_RES (2)..(4)..(36)..(37): Xaa is C or S

SEQ ID NO: 46754 - protein, 36 aa, Artificial Sequence; identical to SEQ ID NO: 10113
  GFR-binding peptide
  MOD_RES (34)..(35): Xaa is C or S
  MOD_RES (12)..(13)..(14)..(15)..(16): Xaa is A or G
  MOD_RES (17)..(18)..(19)..(20): Xaa is A or G or is absent

SEQ ID NO: 46755 - protein, 39 aa, Artificial Sequence
  GFR-binding peptide
  MOD_RES (2)..(34)..(35): Xaa is C or S
GXSRVVMNVTAKKIVNSSDDIKRVQVPRLKTPAXXPKPV

SEQ ID NO: 46756 - protein, 39 aa, Artificial Sequence
  GFR-binding peptide
  MOD_RES (33)..(34): Xaa is C or S
  MOD_RES (11)..(12)..(13)..(14)..(15): Xaa is A or G
  MOD_RES (16)..(17)..(18)..(19): Xaa is A or G or is absent
EVVMDVTAKKXXXXXXXXXIKRMQVPRLETPVXXAKPIK

SEQ ID NO: 46757 - protein, 36 aa, Artificial Sequence
  GFR-binding peptide
  MOD_RES (2)..(36): Xaa is C or S
  MOD_RES (14)..(15)..(16)..(17)..(18): Xaa is A or G
  MOD_RES (19)..(20)..(21)..(22): Xaa is A or G or is absent
GXGEVVMDSMEGIXXXXXXXXXMIQMTINSLETPVX

SEQ ID NO: 46758 - protein, 35 aa, Artificial Sequence; identical to SEQ ID NO: 10118
  GFR-binding peptide
  MOD_RES (33)..(34): Xaa is C or S
  MOD_RES (11)..(12)..(13)..(14)..(15): Xaa is A or G
  MOD_RES (16)..(17)..(18)..(19): Xaa is A or G or is absent

SEQ ID NO: 46759 - protein, 43 aa, Artificial Sequence
  GFR-binding peptide
  MOD_RES (2)..(39): Xaa is C or S
KXALHDELTNSLQEFIPKKRVIEYYLVTLPELQVQTPRXQVNR

SEQ ID NO: 46760 - protein, 36 aa, Artificial Sequence
  GFR-binding peptide
  MOD_RES (1)..(32)..(33): Xaa is C or S
XSRVIMSMEGIVKPKRGVMIQITINSLAQPVXXPAA

SEQ ID NO: 46761 - protein, 40 aa, Artificial Sequence; identical to SEQ ID NO: 10120
  GFR-binding peptide
  MOD_RES (1)..(3)..(34)..(35): Xaa is C or S

SEQ ID NO: 46762 - protein, 37 aa, Artificial Sequence
  GFR-binding peptide
  MOD_RES (2)..(4)..(36)..(37): Xaa is C or S
RXGXGEVVMDVQVEKVVKENEDVKAMKVSRLETPVXX

SEQ ID NO: 46763 - protein, 34 aa, Artificial Sequence
  GFR-binding peptide
  MOD_RES (31)..(32): Xaa is C or S
SRVIMVQVEKVKPKRGVVKAIKVSRLAQPVXXPA

SEQ ID NO: 46764 - protein, 35 aa, Artificial Sequence; identical to SEQ ID NO: 10124
  GFR-binding peptide
  MOD_RES (1)..(3)..(35): Xaa is C or S

SEQ ID NO: 46765 - protein, 33 aa, Artificial Sequence
  GFR-binding peptide
  MOD_RES (1)..(32)..(33): Xaa is C or S
XSRVIMSMEGIVKPKRGVMIQITINSLAQPVXX

SEQ ID NO: 46766 - protein, 39 aa, Artificial Sequence
  GFR-binding peptide
  MOD_RES (33)..(34): Xaa is C or S
  MOD_RES (11)..(12)..(13)..(14)..(15): Xaa is A or G
  MOD_RES (16)..(17)..(18)..(19): Xaa is A or G or is absent
SRVIMVTAKKXXXXXXXXXIKRIQVPRLAQPVXXPAASA

SEQ ID NO: 46767 - protein, 38 aa, Artificial Sequence; identical to SEQ ID NO: 10125
  GFR-binding peptide
  MOD_RES (2)..(4)..(38): Xaa is C or S
  MOD_RES (16)..(17)..(18)..(19)..(20): Xaa is A or G
  MOD_RES (21)..(22)..(23)..(24): Xaa is A or G or is absent

SEQ ID NO: 46768 - protein, 37 aa, Artificial Sequence; identical to SEQ ID NO: 10126
  GFR-binding peptide
  MOD_RES (2)..(4): Xaa is C or S
  MOD_RES (16)..(17)..(18)..(19)..(20): Xaa is A or G
  MOD_RES (21)..(22)..(23)..(24): Xaa is A or G or is absent

SEQ ID NO: 46769 - protein, 36 aa, Artificial Sequence; identical to SEQ ID NO: 10128
  GFR-binding peptide
  MOD_RES (1)..(3)..(35): Xaa is C or S

SEQ ID NO: 46770 - protein, 39 aa, Artificial Sequence; identical to SEQ ID NO: 10131
  GFR-binding peptide
  MOD_RES (33)..(34): Xaa is C or S
  MOD_RES (11)..(12)..(13)..(14)..(15): Xaa is A or G
  MOD_RES (16)..(17)..(18)..(19): Xaa is A or G or is absent

SEQ ID NO: 46771 - protein, 33 aa, Artificial Sequence
  GFR-binding peptide
  MOD_RES (31)..(32): Xaa is C or S
EVVMDVTAKKVVKENEDIKRMQVPRLETPVXXA

SEQ ID NO: 46772 - protein, 40 aa, Artificial Sequence
  GFR-binding peptide
  MOD_RES (1)..(3)..(37)..(38): Xaa is C or S
  MOD_RES (15)..(16)..(17)..(18)..(19): Xaa is A or G
  MOD_RES (20)..(21)..(22)..(23): Xaa is A or G or is absent
XGXARVVMNSMEGIXXXXXXXXXMIQVTINSLQTPAXXPK

SEQ ID NO: 46773 - protein, 37 aa, Artificial Sequence; identical to SEQ ID NO: 17354
  GFR-binding peptide
  MOD_RES (33)..(33): Xaa is C or S
  MOD_RES (11)..(12)..(13)..(14)..(15): Xaa is A or G
  MOD_RES (16)..(17)..(18)..(19): Xaa is A or G or is absent

SEQ ID NO: 46774 - protein, 38 aa, Artificial Sequence; identical to SEQ ID NO: 10133
  GFR-binding peptide
  MOD_RES (33)..(34): Xaa is C or S
  MOD_RES (11)..(12)..(13)..(14)..(15): Xaa is A or G
  MOD_RES (16)..(17)..(18)..(19): Xaa is A or G or is absent

SEQ ID NO: 46775 - protein, 41 aa, Artificial Sequence; identical to SEQ ID NO: 36077
  GFR-binding peptide
  MOD_RES (2)..(4)..(37)..(38): Xaa is C or S
  MOD_RES (15)..(16)..(17)..(18)..(19): Xaa is A or G
  MOD_RES (20)..(21)..(22)..(23): Xaa is A or G or is absent

SEQ ID NO: 46776 - protein, 41 aa, Artificial Sequence
  GFR-binding peptide
  MOD_RES (1)..(3)..(35)..(36): Xaa is C or S
XGXARVVMNSMEGIIVNSSDDMIQVTINSLQTPAXXPKPVT

SEQ ID NO: 46777 - protein, 37 aa, Artificial Sequence
  GFR-binding peptide
  MOD_RES (1)..(35)..(36): Xaa is C or S
  MOD_RES (13)..(14)..(15)..(16)..(17): Xaa is A or G
  MOD_RES (18)..(19)..(20)..(21): Xaa is A or G or is absent
XSRVVMNVQVEKXXXXXXXXXVKAVKVSRLKTPAXXP

SEQ ID NO: 46778 - protein, 45 aa, Artificial Sequence
  GFR-binding peptide
  MOD_RES (2)..(4)..(41): Xaa is C or S
EXKXALHDELTNSLQEFIPKKRVIEYYVVPLPELQVQTPRXQVNR

SEQ ID NO: 46779 - protein, 36 aa, Artificial Sequence
  GFR-binding peptide
  MOD_RES (1)..(32)..(33): Xaa is C or S
XSRVIMVQVEKVKPKRGVVKAIKVSRLAQPVXXPAA

SEQ ID NO: 46780 - protein, 39 aa, Artificial Sequence; identical to SEQ ID NO: 17359
  GFR-binding peptide
  MOD_RES (37)..(37): Xaa is C or S
  MOD_RES (13)..(14)..(15)..(16)..(17): Xaa is A or G
  MOD_RES (18)..(19)..(20)..(21): Xaa is A or G or is absent

SEQ ID NO: 46781 - protein, 34 aa, Artificial Sequence
  GFR-binding peptide
  MOD_RES (2)..(4): Xaa is C or S
SXKXSKVVMSMEGIVKPTRGVMIQITINSLDQPV

SEQ ID NO: 46782 - protein, 37 aa, Artificial Sequence; identical to SEQ ID NO: 10136
  GFR-binding peptide
  MOD_RES (2)..(4): Xaa is C or S
  MOD_RES (16)..(17)..(18)..(19)..(20): Xaa is A or G
  MOD_RES (21)..(22)..(23)..(24): Xaa is A or G or is absent

SEQ ID NO: 46783 - protein, 33 aa, Artificial Sequence
  GFR-binding peptide
  MOD_RES (2)..(2): Xaa is C or S
GXSRVVMNVQVEKIVNSSDDVKAVKVSRLKTPA

SEQ ID NO: 46784 - protein, 40 aa, Artificial Sequence; identical to SEQ ID NO: 10140
  GFR-binding peptide
  MOD_RES (1)..(3)..(36)..(37): Xaa is C or S
  MOD_RES (14)..(15)..(16)..(17)..(18): Xaa is A or G
  MOD_RES (19)..(20)..(21)..(22): Xaa is A or G or is absent

SEQ ID NO: 46785 - protein, 39 aa, Artificial Sequence
  GFR-binding peptide
  MOD_RES (2)..(4)..(36)..(37): Xaa is C or S
RXGXGEVVMEVTAKKVVKDYEDIKRMQVPRLETPVXXAK

SEQ ID NO: 46786 - protein, 40 aa, Artificial Sequence
  GFR-binding peptide
  MOD_RES (34)..(35): Xaa is C or S
  MOD_RES (12)..(13)..(14)..(15)..(16): Xaa is A or G
  MOD_RES (17)..(18)..(19)..(20): Xaa is A or G or is absent
ARVVMNVTAKKXXXXXXXXXIKRVQVPRLQTPAXXPKPVT

SEQ ID NO: 46787 - protein, 33 aa, Artificial Sequence
  GFR-binding peptide
  MOD_RES (33)..(33): Xaa is C or S
  MOD_RES (11)..(12)..(13)..(14)..(15): Xaa is A or G
  MOD_RES (16)..(17)..(18)..(19): Xaa is A or G or is absent
NHQLFNSLQEXXXXXXXXXYYVMPLPEEETPVX

SEQ ID NO: 46788 - protein, 37 aa, Artificial Sequence
  GFR-binding peptide
  MOD_RES (1)..(3)..(37): Xaa is C or S
  MOD_RES (15)..(16)..(17)..(18)..(19): Xaa is A or G
  MOD_RES (20)..(21)..(22)..(23): Xaa is A or G or is absent
XGXARVVMNVQVEKXXXXXXXXXVKAVKVSRLQTPAX

SEQ ID NO: 46789 - protein, 40 aa, Artificial Sequence
  GFR-binding peptide
  MOD_RES (1)..(35): Xaa is C or S
XKNHQLFNSLQEHQGQHPKIRYYVMPLPEEETPVXELGED

SEQ ID NO: 46790 - protein, 37 aa, Artificial Sequence
  GFR-binding peptide
  MOD_RES (1)..(35)..(36): Xaa is C or S
  MOD_RES (13)..(14)..(15)..(16)..(17): Xaa is A or G
  MOD_RES (18)..(19)..(20)..(21): Xaa is A or G or is absent
XGEVVMDVTAKKXXXXXXXXXIKRMQVPRLETPVXXA

SEQ ID NO: 46791 - protein, 42 aa, Artificial Sequence
  GFR-binding peptide
  MOD_RES (2)..(4)..(38)..(39): Xaa is C or S
  MOD_RES (16)..(17)..(18)..(19)..(20): Xaa is A or G
  MOD_RES (21)..(22)..(23)..(24): Xaa is A or G or is absent
HXGXARVVMNVQVEKXXXXXXXXXVKAVKVSRLQTPAXXPKP

SEQ ID NO: 46792 - protein, 35 aa, Artificial Sequence; identical to SEQ ID NO: 10147
  GFR-binding peptide
  MOD_RES (2)..(4)..(35): Xaa is C or S

SEQ ID NO: 46793 - protein, 38 aa, Artificial Sequence; identical to SEQ ID NO: 17361
  GFR-binding peptide
  MOD_RES (1)..(38): Xaa is C or S

SEQ ID NO: 46794 - protein, 40 aa, Artificial Sequence; identical to SEQ ID NO: 10149
  GFR-binding peptide
  MOD_RES (2)..(36)..(37): Xaa is C or S
  MOD_RES (14)..(15)..(16)..(17)..(18): Xaa is A or G
  MOD_RES (19)..(20)..(21)..(22): Xaa is A or G or is absent

SEQ ID NO: 46795 - protein, 42 aa, Artificial Sequence; identical to SEQ ID NO: 10152
  GFR-binding peptide
  MOD_RES (2)..(4)..(38)..(39): Xaa is C or S
  MOD_RES (16)..(17)..(18)..(19)..(20): Xaa is A or G
  MOD_RES (21)..(22)..(23)..(24): Xaa is A or G or is absent

SEQ ID NO: 46796 - protein, 41 aa, Artificial Sequence; identical to SEQ ID NO: 17365
  GFR-binding peptide
  MOD_RES (37)..(37): Xaa is C or S
  MOD_RES (13)..(14)..(15)..(16)..(17): Xaa is A or G
  MOD_RES (18)..(19)..(20)..(21): Xaa is A or G or is absent

SEQ ID NO: 46797 - protein, 41 aa, Artificial Sequence
  GFR-binding peptide
  MOD_RES (2)..(4)..(36)..(37): Xaa is C or S
HXGXARVVMNSMEGIIVNSSDDMIQVTINSLQTPAXXPKPV

SEQ ID NO: 46798 - protein, 38 aa, Artificial Sequence; identical to SEQ ID NO: 10158
  GFR-binding peptide
  MOD_RES (1)..(3)..(34)..(35): Xaa is C or S

SEQ ID NO: 46799 - protein, 36 aa, Artificial Sequence; identical to SEQ ID NO: 17369
  GFR-binding peptide

SEQ ID NO: 46800 - protein, 33 aa, Artificial Sequence; identical to SEQ ID NO: 10160
  GFR-binding peptide
  MOD_RES (31)..(32): Xaa is C or S

SEQ ID NO: 46801 - protein, 31 aa, Artificial Sequence
  GFR-binding peptide
  MOD_RES (1)..(1): Xaa is C or S
XSRVIMSMEGIVKPKRGVMIQITINSLAQPV

SEQ ID NO: 46802 - protein, 38 aa, Artificial Sequence; identical to SEQ ID NO: 10161
  GFR-binding peptide
  MOD_RES (34)..(35): Xaa is C or S
  MOD_RES (12)..(13)..(14)..(15)..(16): Xaa is A or G
  MOD_RES (17)..(18)..(19)..(20): Xaa is A or G or is absent

SEQ ID NO: 46803 - protein, 36 aa, Artificial Sequence
  GFR-binding peptide
  MOD_RES (2)..(35)..(36): Xaa is C or S
  MOD_RES (13)..(14)..(15)..(16)..(17): Xaa is A or G
  MOD_RES (18)..(19)..(20)..(21): Xaa is A or G or is absent
KXSRVIMSMEGIXXXXXXXXXMIQITINSLAQPVXX

SEQ ID NO: 46804 - protein, 39 aa, Artificial Sequence
  GFR-binding peptide
  MOD_RES (2)..(4)..(35)..(36): Xaa is C or S
SXKXSKVVMVQVEKVKPTRGVVKAIKVSRLDQPVXXPSA

SEQ ID NO: 46805 - protein, 35 aa, Artificial Sequence
  GFR-binding peptide
  MOD_RES (1)..(3)..(35): Xaa is C or S
XGXGEVVMDSMEGIVVKENEDMIQMTINSLETPVX

SEQ ID NO: 46806 - protein, 38 aa, Artificial Sequence
  GFR-binding peptide
  MOD_RES (2)..(36)..(37): Xaa is C or S
  MOD_RES (14)..(15)..(16)..(17)..(18): Xaa is A or G
  MOD_RES (19)..(20)..(21)..(22): Xaa is A or G or is absent
GXARVVMNVQVEKXXXXXXXXXVKAVKVSRLQTPAXXP

SEQ ID NO: 46807 - protein, 41 aa, Artificial Sequence; identical to SEQ ID NO: 17370
  GFR-binding peptide
  MOD_RES (2)..(4)..(41): Xaa is C or S
  MOD_RES (17)..(18)..(19)..(20)..(21): Xaa is A or G
  MOD_RES (22)..(23)..(24)..(25): Xaa is A or G or is absent

SEQ ID NO: 46808 - protein, 36 aa, Artificial Sequence
  GFR-binding peptide
  MOD_RES (2)..(33)..(34): Xaa is C or S
KXSKVVMVQVEKVKPTRGVVKAIKVSRLDQPVXXPS

SEQ ID NO: 46809 - protein, 34 aa, Artificial Sequence; identical to SEQ ID NO: 10163
  GFR-binding peptide
  MOD_RES (1)..(3)..(34): Xaa is C or S

SEQ ID NO: 46810 - protein, 35 aa, Artificial Sequence; identical to SEQ ID NO: 17371
  GFR-binding peptide
  MOD_RES (1)..(1): Xaa is C or S

SEQ ID NO: 46811 - protein, 37 aa, Artificial Sequence
  GFR-binding peptide
  MOD_RES (2)..(2): Xaa is C or S
  MOD_RES (15)..(16)..(17)..(18)..(19): Xaa is A or G
  MOD_RES (20)..(21)..(22)..(23): Xaa is A or G or is absent
AXELHEELRNSLQEXXXXXXXXXYYVVPLPEHHVRSP

SEQ ID NO: 46812 - protein, 39 aa, Artificial Sequence; identical to SEQ ID NO: 10166
  GFR-binding peptide
  MOD_RES (2)..(36)..(37): Xaa is C or S
  MOD_RES (14)..(15)..(16)..(17)..(18): Xaa is A or G
  MOD_RES (19)..(20)..(21)..(22): Xaa is A or G or is absent

SEQ ID NO: 46813 - protein, 44 aa, Artificial Sequence; identical to SEQ ID NO: 17374
  GFR-binding peptide
  MOD_RES (2)..(4)..(38): Xaa is C or S
  MOD_RES (16)..(17)..(18)..(19)..(20): Xaa is A or G
  MOD_RES (21)..(22)..(23)..(24): Xaa is A or G or is absent

SEQ ID NO: 46814 - protein, 40 aa, Artificial Sequence; identical to SEQ ID NO: 17375
  GFR-binding peptide
  MOD_RES (2)..(4)..(38): Xaa is C or S
  MOD_RES (16)..(17)..(18)..(19)..(20): Xaa is A or G
  MOD_RES (21)..(22)..(23)..(24): Xaa is A or G or is absent

SEQ ID NO: 46815 - protein, 37 aa, Artificial Sequence
  GFR-binding peptide
  MOD_RES (1)..(34)..(35): Xaa is C or S
  MOD_RES (12)..(13)..(14)..(15)..(16): Xaa is A or G
  MOD_RES (17)..(18)..(19)..(20): Xaa is A or G or is absent
XSKVVMVTAKKXXXXXXXXXIKRIQVPRLDQPVXXPS

SEQ ID NO: 46816 - protein, 37 aa, Artificial Sequence
  GFR-binding peptide
  MOD_RES (1)..(3)..(35)..(36): Xaa is C or S
XGXSRVVMNVTAKKIVNSSDDIKRVQVPRLKTPAXXP

SEQ ID NO: 46817 - protein, 41 aa, Artificial Sequence; identical to SEQ ID NO: 10170
  GFR-binding peptide
  MOD_RES (2)..(4)..(36)..(37): Xaa is C or S

SEQ ID NO: 46818 - protein, 41 aa, Artificial Sequence
  GFR-binding peptide
  MOD_RES (2)..(4)..(41): Xaa is C or S
AXAXELHEELRNSLQELKPKKRVYEYYVVPLPEHHVRSPQX

SEQ ID NO: 46819 - protein, 31 aa, Artificial Sequence; identical to SEQ ID NO: 10173
  GFR-binding peptide
  MOD_RES (31)..(31): Xaa is C or S

SEQ ID NO: 46820 - protein, 38 aa, Artificial Sequence
  GFR-binding peptide
  MOD_RES (1)..(3)..(36)..(37): Xaa is C or S
  MOD_RES (14)..(15)..(16)..(17)..(18): Xaa is A or G
  MOD_RES (19)..(20)..(21)..(22): Xaa is A or G or is absent
XKXSRVIMSMEGIXXXXXXXXXMIQITINSLAQPVXXP

SEQ ID NO: 46821 - protein, 36 aa, Artificial Sequence
  GFR-binding peptide
  MOD_RES (33)..(34): Xaa is C or S
  MOD_RES (11)..(12)..(13)..(14)..(15): Xaa is A or G
  MOD_RES (16)..(17)..(18)..(19): Xaa is A or G or is absent
RVVMNSMEGIXXXXXXXXXMIQVTINSLQTPAXXPK

SEQ ID NO: 46822 - protein, 34 aa, Artificial Sequence
  GFR-binding peptide
  MOD_RES (32)..(33): Xaa is C or S
GEVVMDVTAKKVVKENEDIKRMQVPRLETPVXXA

SEQ ID NO: 46823 - protein, 34 aa, Artificial Sequence; identical to SEQ ID NO: 17377
  GFR-binding peptide

SEQ ID NO: 46824 - protein, 40 aa, Artificial Sequence
  GFR-binding peptide
  MOD_RES (36)..(36): Xaa is C or S
  MOD_RES (12)..(13)..(14)..(15)..(16): Xaa is A or G
  MOD_RES (17)..(18)..(19)..(20): Xaa is A or G or is absent
LHDELTNSLQEXXXXXXXXXYYLVTLPELQVQTPRXQVNR

SEQ ID NO: 46825 - protein, 38 aa, Artificial Sequence; identical to SEQ ID NO: 10175
  GFR-binding peptide
  MOD_RES (33)..(34): Xaa is C or S
  MOD_RES (11)..(12)..(13)..(14)..(15): Xaa is A or G
  MOD_RES (16)..(17)..(18)..(19): Xaa is A or G or is absent

SEQ ID NO: 46826 - protein, 42 aa, Artificial Sequence; identical to SEQ ID NO: 10177
  GFR-binding peptide
  MOD_RES (1)..(3)..(37)..(38): Xaa is C or S
  MOD_RES (15)..(16)..(17)..(18)..(19): Xaa is A or G
  MOD_RES (20)..(21)..(22)..(23): Xaa is A or G or is absent

SEQ ID NO: 46827 - protein, 34 aa, Artificial Sequence; identical to SEQ ID NO: 17379
  GFR-binding peptide
  MOD_RES (1)..(1): Xaa is C or S

SEQ ID NO: 46828 - protein, 34 aa, Artificial Sequence; identical to SEQ ID NO: 10178
  GFR-binding peptide
  MOD_RES (1)..(3)..(34): Xaa is C or S

SEQ ID NO: 46829 - protein, 36 aa, Artificial Sequence; identical to SEQ ID NO: 10179
  GFR-binding peptide
  MOD_RES (33)..(34): Xaa is C or S
  MOD_RES (11)..(12)..(13)..(14)..(15): Xaa is A or G
  MOD_RES (16)..(17)..(18)..(19): Xaa is A or G or is absent

SEQ ID NO: 46830 - protein, 32 aa, Artificial Sequence
  GFR-binding peptide
  MOD_RES (32)..(32): Xaa is C or S
SRVVMNSMEGIIVNSSDDMIQVTINSLKTPAX

SEQ ID NO: 46831 - protein, 40 aa, Artificial Sequence; identical to SEQ ID NO: 10181
  GFR-binding peptide
  MOD_RES (2)..(4)..(38)..(39): Xaa is C or S
  MOD_RES (16)..(17)..(18)..(19)..(20): Xaa is A or G
  MOD_RES (21)..(22)..(23)..(24): Xaa is A or G or is absent

SEQ ID NO: 46832 - protein, 39 aa, Artificial Sequence
  GFR-binding peptide
  MOD_RES (2)..(35)..(36): Xaa is C or S
  MOD_RES (13)..(14)..(15)..(16)..(17): Xaa is A or G
  MOD_RES (18)..(19)..(20)..(21): Xaa is A or G or is absent
KXSRVIMVQVEKXXXXXXXXXVKAIKVSRLAQPVXXPAA

SEQ ID NO: 46833 - protein, 39 aa, Artificial Sequence; identical to SEQ ID NO: 10184
  GFR-binding peptide
  MOD_RES (1)..(35)..(36): Xaa is C or S
  MOD_RES (13)..(14)..(15)..(16)..(17): Xaa is A or G
  MOD_RES (18)..(19)..(20)..(21): Xaa is A or G or is absent

SEQ ID NO: 46834 - protein, 34 aa, Artificial Sequence; identical to SEQ ID NO: 17383
  GFR-binding peptide

SEQ ID NO: 46835 - protein, 36 aa, Artificial Sequence
  GFR-binding peptide
  MOD_RES (2)..(4)..(36): Xaa is C or S
RXGXGEVVMEVTAKKVVKDYEDIKRMQVPRLETPVX

SEQ ID NO: 46836 - protein, 39 aa, Artificial Sequence; identical to SEQ ID NO: 10189
  GFR-binding peptide
  MOD_RES (34)..(35): Xaa is C or S
  MOD_RES (12)..(13)..(14)..(15)..(16): Xaa is A or G
  MOD_RES (17)..(18)..(19)..(20): Xaa is A or G or is absent

SEQ ID NO: 46837 - protein, 34 aa, Artificial Sequence
  GFR-binding peptide
  MOD_RES (2)..(34): Xaa is C or S
GXGEVVMEVTAKKVVKDYEDIKRMQVPRLETPVX

SEQ ID NO: 46838 - protein, 35 aa, Artificial Sequence
  GFR-binding peptide
  MOD_RES (1)..(33)..(34): Xaa is C or S
XARVVMNSMEGIIVNSSDDMIQVTINSLQTPAXXP

SEQ ID NO: 46839 - protein, 40 aa, Artificial Sequence
  GFR-binding peptide
  MOD_RES (36)..(36): Xaa is C or S
LHDELTNSLQEFIPKKRVIEYYVVPLPELQVQTPRXQVNR

SEQ ID NO: 46840 - protein, 35 aa, Artificial Sequence
  GFR-binding peptide
  MOD_RES (31)..(32): Xaa is C or S
RVVMNSMEGIIVNSSDDMIQVTINSLKTPAXXPKP

SEQ ID NO: 46841 - protein, 40 aa, Artificial Sequence
  GFR-binding peptide
  MOD_RES (1)..(3)..(36)..(37): Xaa is C or S
  MOD_RES (14)..(15)..(16)..(17)..(18): Xaa is A or G
  MOD_RES (19)..(20)..(21)..(22): Xaa is A or G or is absent
XKXSKVVMSMEGIXXXXXXXXXMIQITINSLDQPVXXPSA

SEQ ID NO: 46842 - protein, 41 aa, Artificial Sequence; identical to SEQ ID NO: 10194
  GFR-binding peptide
  MOD_RES (2)..(4)..(35)..(36): Xaa is C or S

SEQ ID NO: 46843 - protein, 35 aa, Artificial Sequence
  GFR-binding peptide
  MOD_RES (1)..(3)..(34)..(35): Xaa is C or S
XKXSKVIMSMEGIIKPTKGIMIQITINSLDQSVXX

SEQ ID NO: 46844 - protein, 33 aa, Artificial Sequence; identical to SEQ ID NO: 17393
  GFR-binding peptide

SEQ ID NO: 46845 - protein, 39 aa, Artificial Sequence; identical to SEQ ID NO: 17394
  GFR-binding peptide
  MOD_RES (36)..(36): Xaa is C or S
  MOD_RES (12)..(13)..(14)..(15)..(16): Xaa is A or G
  MOD_RES (17)..(18)..(19)..(20): Xaa is A or G or is absent

SEQ ID NO: 46846 - protein, 34 aa, Artificial Sequence; identical to SEQ ID NO: 10198
  GFR-binding peptide
  MOD_RES (31)..(31): Xaa is C or S

SEQ ID NO: 46847 - protein, 35 aa, Artificial Sequence; identical to SEQ ID NO: 10199
  GFR-binding peptide
  MOD_RES (34)..(35): Xaa is C or S
  MOD_RES (12)..(13)..(14)..(15)..(16): Xaa is A or G
  MOD_RES (17)..(18)..(19)..(20): Xaa is A or G or is absent

SEQ ID NO: 46848 - protein, 36 aa, Artificial Sequence
  GFR-binding peptide
  MOD_RES (2)..(36): Xaa is C or S
  MOD_RES (14)..(15)..(16)..(17)..(18): Xaa is A or G
  MOD_RES (19)..(20)..(21)..(22): Xaa is A or G or is absent
GXARVVMNVTAKKXXXXXXXXXIKRVQVPRLQTPAX

SEQ ID NO: 46849 - protein, 43 aa, Artificial Sequence
  GFR-binding peptide
  MOD_RES (2)..(4)..(38)..(39): Xaa is C or S
  MOD_RES (16)..(17)..(18)..(19)..(20): Xaa is A or G
  MOD_RES (21)..(22)..(23)..(24): Xaa is A or G or is absent
HXGXSRVVMNVQVEKXXXXXXXXXVKAVKVSRLKTPAXXPKPV

SEQ ID NO: 46850 - protein, 36 aa, Artificial Sequence
  GFR-binding peptide
  MOD_RES (35)..(35): Xaa is C or S
  MOD_RES (11)..(12)..(13)..(14)..(15): Xaa is A or G
  MOD_RES (16)..(17)..(18)..(19): Xaa is A or G or is absent
HDELTNSLQEXXXXXXXXXYYVVPLPELQVQTPRXQ

SEQ ID NO: 46851 - protein, 40 aa, Artificial Sequence
  GFR-binding peptide
  MOD_RES (2)..(4)..(35)..(36): Xaa is C or S
SXKXSKVVMSMEGIVKPTRGVMIQITINSLDQPVXXPSAS

SEQ ID NO: 46852 - protein, 38 aa, Artificial Sequence
  GFR-binding peptide
  MOD_RES (1)..(35)..(36): Xaa is C or S
  MOD_RES (13)..(14)..(15)..(16)..(17): Xaa is A or G
  MOD_RES (18)..(19)..(20)..(21): Xaa is A or G or is absent
XGEVVMDSMEGIXXXXXXXXXMIQMTINSLETPVXXAK

SEQ ID NO: 46853 - protein, 37 aa, Artificial Sequence; identical to SEQ ID NO: 10201
  GFR-binding peptide
  MOD_RES (31)..(31): Xaa is C or S

SEQ ID NO: 46854 - protein, 36 aa, Artificial Sequence; identical to SEQ ID NO: 17395
  GFR-binding peptide
  MOD_RES (2)..(2): Xaa is C or S

SEQ ID NO: 46855 - protein, 38 aa, Artificial Sequence; identical to SEQ ID NO: 17396
  GFR-binding peptide
  MOD_RES (36)..(36): Xaa is C or S
  MOD_RES (12)..(13)..(14)..(15)..(16): Xaa is A or G
  MOD_RES (17)..(18)..(19)..(20): Xaa is A or G or is absent

SEQ ID NO: 46856 - protein, 41 aa, Artificial Sequence
  GFR-binding peptide
  MOD_RES (1)..(35)..(36): Xaa is C or S
  MOD_RES (13)..(14)..(15)..(16)..(17): Xaa is A or G
  MOD_RES (18)..(19)..(20)..(21): Xaa is A or G or is absent
XGEVVMDSMEGIXXXXXXXXXMIQMTINSLETPVXXAKPIK

SEQ ID NO: 46857 - protein, 35 aa, Artificial Sequence
  GFR-binding peptide
  MOD_RES (1)..(1): Xaa is C or S
  MOD_RES (14)..(15)..(16)..(17)..(18): Xaa is A or G
  MOD_RES (19)..(20)..(21)..(22): Xaa is A or G or is absent
XALHDELTNSLQEXXXXXXXXXYYVVPLPELQVQT

SEQ ID NO: 46858 - protein, 36 aa, Artificial Sequence
  GFR-binding peptide
  MOD_RES (1)..(33)..(34): Xaa is C or S
XGEVVMDVQVEKVVKENEDVKAMKVSRLETPVXXAK

SEQ ID NO: 46859 - protein, 32 aa, Artificial Sequence
  GFR-binding peptide
  MOD_RES (1)..(1): Xaa is C or S
XGEVVMEVQVEKVVKDYEDVKAMKVSRLETPV

SEQ ID NO: 46860 - protein, 41 aa, Artificial Sequence; identical to SEQ ID NO: 10204
  GFR-binding peptide
  MOD_RES (2)..(35)..(36): Xaa is C or S
  MOD_RES (13)..(14)..(15)..(16)..(17): Xaa is A or G
  MOD_RES (18)..(19)..(20)..(21): Xaa is A or G or is absent

SEQ ID NO: 46861 - protein, 35 aa, Artificial Sequence
  GFR-binding peptide
  MOD_RES (1)..(3)..(34)..(35): Xaa is C or S
XKXSKVVMSMEGIVKPTRGVMIQITINSLDQPVXX

SEQ ID NO: 46862 - protein, 39 aa, Artificial Sequence
  GFR-binding peptide
  MOD_RES (2)..(35)..(36): Xaa is C or S
  MOD_RES (13)..(14)..(15)..(16)..(17): Xaa is A or G
  MOD_RES (18)..(19)..(20)..(21): Xaa is A or G or is absent
KXSKVIMVTAKKXXXXXXXXXIKRIQVPRLDQSVXXPSA

SEQ ID NO: 46863 - protein, 37 aa, Artificial Sequence
  GFR-binding peptide
  MOD_RES (1)..(33)..(34): Xaa is C or S
XGEVVMESMEGIVVKDYEDMIQMTINSLETPVXXAKP

SEQ ID NO: 46864 - protein, 34 aa, Artificial Sequence; identical to SEQ ID NO: 10208
  GFR-binding peptide
  MOD_RES (1)..(33): Xaa is C or S

SEQ ID NO: 46865 - protein, 35 aa, Artificial Sequence
  GFR-binding peptide
  MOD_RES (1)..(32)..(33): Xaa is C or S
XSRVIMSMEGIVKPKRGVMIQITINSLAQPVXXPA

SEQ ID NO: 46866 - protein, 36 aa, Artificial Sequence; identical to SEQ ID NO: 10211
  GFR-binding peptide
  MOD_RES (1)..(33)..(34): Xaa is C or S

SEQ ID NO: 46867 - protein, 36 aa, Artificial Sequence
  GFR-binding peptide
  MOD_RES (2)..(4)..(36): Xaa is C or S
RXGXGEVVMDVQVEKVVKENEDVKAMKVSRLETPVX

SEQ ID NO: 46868 - protein, 38 aa, Artificial Sequence
  GFR-binding peptide
  MOD_RES (2)..(33)..(34): Xaa is C or S
KXSKVVMVQVEKVKPTRGVVKAIKVSRLDQPVXXPSAS

SEQ ID NO: 46869 - protein, 41 aa, Artificial Sequence
  GFR-binding peptide
  MOD_RES (2)..(4)..(37)..(38): Xaa is C or S
  MOD_RES (15)..(16)..(17)..(18)..(19): Xaa is A or G
  MOD_RES (20)..(21)..(22)..(23): Xaa is A or G or is absent
SXKXSKVVMVTAKKXXXXXXXXXIKRIQVPRLDQPVXXPSA

SEQ ID NO: 46870 - protein, 35 aa, Artificial Sequence
  GFR-binding peptide
  MOD_RES (33)..(34): Xaa is C or S
  MOD_RES (11)..(12)..(13)..(14)..(15): Xaa is A or G
  MOD_RES (16)..(17)..(18)..(19): Xaa is A or G or is absent
EVVMDSMEGIXXXXXXXXXMIQMTINSLETPVXXA

SEQ ID NO: 46871 - protein, 38 aa, Artificial Sequence; identical to SEQ ID NO: 17403
  GFR-binding peptide
  MOD_RES (1)..(38): Xaa is C or S

SEQ ID NO: 46872 - protein, 38 aa, Artificial Sequence
  GFR-binding peptide
  MOD_RES (2)..(36): Xaa is C or S
  MOD_RES (14)..(15)..(16)..(17)..(18): Xaa is A or G
  MOD_RES (19)..(20)..(21)..(22): Xaa is A or G or is absent
EXKNHQLFNSLQEXXXXXXXXXYYLMTLPEEETPVXEL

SEQ ID NO: 46873 - protein, 34 aa, Artificial Sequence
  GFR-binding peptide
  MOD_RES (33)..(34): Xaa is C or S
  MOD_RES (11)..(12)..(13)..(14)..(15): Xaa is A or G
  MOD_RES (16)..(17)..(18)..(19): Xaa is A or G or is absent
SKVIMVTAKKXXXXXXXXXIKRIQVPRLDQSVXX

SEQ ID NO: 46874 - protein, 36 aa, Artificial Sequence
  GFR-binding peptide
  MOD_RES (36)..(36): Xaa is C or S
LHDELTNSLQEFIPKKRVIEYYVVPLPELQVQTPRX

SEQ ID NO: 46875 - protein, 33 aa, Artificial Sequence
  GFR-binding peptide
  MOD_RES (33)..(33): Xaa is C or S
  MOD_RES (11)..(12)..(13)..(14)..(15): Xaa is A or G
  MOD_RES (16)..(17)..(18)..(19): Xaa is A or G or is absent
NHQLFNSLQEXXXXXXXXXYYLMTLPEEETPVX

SEQ ID NO: 46876 - protein, 38 aa, Artificial Sequence; identical to SEQ ID NO: 10221
  GFR-binding peptide
  MOD_RES (1)..(3)..(37)..(38): Xaa is C or S
  MOD_RES (15)..(16)..(17)..(18)..(19): Xaa is A or G
  MOD_RES (20)..(21)..(22)..(23): Xaa is A or G or is absent

SEQ ID NO: 46877 - protein, 37 aa, Artificial Sequence
  GFR-binding peptide
  MOD_RES (1)..(35): Xaa is C or S
  MOD_RES (13)..(14)..(15)..(16)..(17): Xaa is A or G
  MOD_RES (18)..(19)..(20)..(21): Xaa is A or G or is absent
XKNHQLFNSLQEXXXXXXXXXYYVMPLPEEETPVXEL

SEQ ID NO: 46878 - protein, 35 aa, Artificial Sequence
  GFR-binding peptide
  MOD_RES (32)..(33): Xaa is C or S
SRVVMNVQVEKIVNSSDDVKAVKVSRLKTPAXXPK

SEQ ID NO: 46879 - protein, 37 aa, Artificial Sequence; identical to SEQ ID NO: 17415
  GFR-binding peptide
  MOD_RES (2)..(2): Xaa is C or S

SEQ ID NO: 46880 - protein, 34 aa, Artificial Sequence; identical to SEQ ID NO: 10225
  GFR-binding peptide
  MOD_RES (34)..(34): Xaa is C or S
  MOD_RES (12)..(13)..(14)..(15)..(16): Xaa is A or G
  MOD_RES (17)..(18)..(19)..(20): Xaa is A or G or is absent

SEQ ID NO: 46881 - protein, 41 aa, Artificial Sequence
  GFR-binding peptide
  MOD_RES (2)..(36)..(37): Xaa is C or S
  MOD_RES (14)..(15)..(16)..(17)..(18): Xaa is A or G
  MOD_RES (19)..(20)..(21)..(22): Xaa is A or G or is absent
GXSRVVMNSMEGIXXXXXXXXXMIQVTINSLKTPAXXPKPV

SEQ ID NO: 46882 - protein, 35 aa, Artificial Sequence
  GFR-binding peptide
  MOD_RES (31)..(32): Xaa is C or S
RVVMNVQVEKIVNSSDDVKAVKVSRLKTPAXXPKP

SEQ ID NO: 46883 - protein, 40 aa, Artificial Sequence; identical to SEQ ID NO: 10227
  GFR-binding peptide
  MOD_RES (2)..(34): Xaa is C or S

SEQ ID NO: 46884 - protein, 35 aa, Artificial Sequence
  GFR-binding peptide
  MOD_RES (31)..(32): Xaa is C or S
SRVIMVTAKKVKPKRGVIKRIQVPRLAQPVXXPAA

SEQ ID NO: 46885 - protein, 34 aa, Artificial Sequence
  GFR-binding peptide
  MOD_RES (33)..(34): Xaa is C or S
  MOD_RES (11)..(12)..(13)..(14)..(15): Xaa is A or G
  MOD_RES (16)..(17)..(18)..(19): Xaa is A or G or is absent
EVVMDVQVEKXXXXXXXXXVKAMKVSRLETPVXX

SEQ ID NO: 46886 - protein, 37 aa, Artificial Sequence
  GFR-binding peptide
  MOD_RES (1)..(33)..(34): Xaa is C or S
XGEVVMDSMEGIVVKENEDMIQMTINSLETPVXXAKP

SEQ ID NO: 46887 - protein, 43 aa, Artificial Sequence; identical to SEQ ID NO: 17420
  GFR-binding peptide
  MOD_RES (2)..(4)..(41): Xaa is C or S

SEQ ID NO: 46888 - protein, 39 aa, Artificial Sequence
  GFR-binding peptide
  MOD_RES (1)..(3)..(35)..(36): Xaa is C or S
XGXGEVVMESMEGIVVKDYEDMIQMTINSLETPVXXAKP

SEQ ID NO: 46889 - protein, 40 aa, Artificial Sequence; identical to SEQ ID NO: 10229
  GFR-binding peptide
  MOD_RES (1)..(35)..(36): Xaa is C or S
  MOD_RES (13)..(14)..(15)..(16)..(17): Xaa is A or G
  MOD_RES (18)..(19)..(20)..(21): Xaa is A or G or is absent

SEQ ID NO: 46890 - protein, 31 aa, Artificial Sequence; identical to SEQ ID NO: 10230
  GFR-binding peptide

SEQ ID NO: 46891 - protein, 38 aa, Artificial Sequence
  GFR-binding peptide
  MOD_RES (2)..(4)..(36)..(37): Xaa is C or S
HXGXSRVVMNVTAKKIVNSSDDIKRVQVPRLKTPAXXP

SEQ ID NO: 46892 - protein, 37 aa, Artificial Sequence; identical to SEQ ID NO: 10233
  GFR-binding peptide
  MOD_RES (34)..(35): Xaa is C or S
  MOD_RES (12)..(13)..(14)..(15)..(16): Xaa is A or G
  MOD_RES (17)..(18)..(19)..(20): Xaa is A or G or is absent

SEQ ID NO: 46893 - protein, 38 aa, Artificial Sequence; identical to SEQ ID NO: 10234
  GFR-binding peptide
  MOD_RES (2)..(4)..(38): Xaa is C or S
  MOD_RES (16)..(17)..(18)..(19)..(20): Xaa is A or G
  MOD_RES (21)..(22)..(23)..(24): Xaa is A or G or is absent

SEQ ID NO: 46894 - protein, 43 aa, Artificial Sequence
  GFR-binding peptide
  MOD_RES (2)..(4)..(38)..(39): Xaa is C or S
  MOD_RES (16)..(17)..(18)..(19)..(20): Xaa is A or G
  MOD_RES (21)..(22)..(23)..(24): Xaa is A or G or is absent
RXGXGEVVMDVQVEKXXXXXXXXXVKAMKVSRLETPVXXAKPI

SEQ ID NO: 46895 - protein, 34 aa, Artificial Sequence
  GFR-binding peptide
  MOD_RES (33)..(34): Xaa is C or S
  MOD_RES (11)..(12)..(13)..(14)..(15): Xaa is A or G
  MOD_RES (16)..(17)..(18)..(19): Xaa is A or G or is absent
SKVIMVQVEKXXXXXXXXXVKAIKVSRLDQSVXX

SEQ ID NO: 46896 - protein, 37 aa, Artificial Sequence
  GFR-binding peptide
  MOD_RES (1)..(3): Xaa is C or S
  MOD_RES (16)..(17)..(18)..(19)..(20): Xaa is A or G
  MOD_RES (21)..(22)..(23)..(24): Xaa is A or G or is absent
XAXELHEELRNSLQEXXXXXXXXXYYVVPLPEHHVRS

SEQ ID NO: 46897 - protein, 43 aa, Artificial Sequence
  GFR-binding peptide
  MOD_RES (2)..(39): Xaa is C or S
  MOD_RES (15)..(16)..(17)..(18)..(19): Xaa is A or G
  MOD_RES (20)..(21)..(22)..(23): Xaa is A or G or is absent
AXELHEELRNSLQEXXXXXXXXXYYLVTLPEHHVRSPQXKVSS

SEQ ID NO: 46898 - protein, 40 aa, Artificial Sequence; identical to SEQ ID NO: 17423
  GFR-binding peptide
  MOD_RES (1)..(38): Xaa is C or S

SEQ ID NO: 46899 - protein, 36 aa, Artificial Sequence; identical to SEQ ID NO: 10237
  GFR-binding peptide
  MOD_RES (1)..(3)..(35)..(36): Xaa is C or S

SEQ ID NO: 46900 - protein, 40 aa, Artificial Sequence; identical to SEQ ID NO: 17426
  GFR-binding peptide
  MOD_RES (1)..(3)..(37): Xaa is C or S
  MOD_RES (15)..(16)..(17)..(18)..(19): Xaa is A or G
  MOD_RES (20)..(21)..(22)..(23): Xaa is A or G or is absent

SEQ ID NO: 46901 - protein, 35 aa, Artificial Sequence
  GFR-binding peptide
  MOD_RES (34)..(35): Xaa is C or S
  MOD_RES (12)..(13)..(14)..(15)..(16): Xaa is A or G
  MOD_RES (17)..(18)..(19)..(20): Xaa is A or G or is absent
GEVVMEVQVEKXXXXXXXXXVKAMKVSRLETPVXX

SEQ ID NO: 46902 - protein, 36 aa, Artificial Sequence
  GFR-binding peptide
  MOD_RES (2)..(2): Xaa is C or S
AXELHEELRNSLQELKPKKRVYEYYLVTLPEHHVRS

SEQ ID NO: 46903 - protein, 43 aa, Artificial Sequence; identical to SEQ ID NO: 17427
  GFR-binding peptide
  MOD_RES (2)..(4)..(38): Xaa is C or S
  MOD_RES (16)..(17)..(18)..(19)..(20): Xaa is A or G
  MOD_RES (21)..(22)..(23)..(24): Xaa is A or G or is absent

SEQ ID NO: 46904 - protein, 42 aa, Artificial Sequence; identical to SEQ ID NO: 10243
  GFR-binding peptide
  MOD_RES (1)..(3)..(37)..(38): Xaa is C or S
  MOD_RES (15)..(16)..(17)..(18)..(19): Xaa is A or G
  MOD_RES (20)..(21)..(22)..(23): Xaa is A or G or is absent

SEQ ID NO: 46905 - protein, 30 aa, Artificial Sequence; identical to SEQ ID NO: 10244
  GFR-binding peptide

SEQ ID NO: 46906 - protein, 41 aa, Artificial Sequence
  GFR-binding peptide
  MOD_RES (2)..(39): Xaa is C or S
AXELHEELRNSLQELKPKKRVYEYYVVPLPEHHVRSPQXKV

SEQ ID NO: 46907 - protein, 35 aa, Artificial Sequence
  GFR-binding peptide
  MOD_RES (31)..(31): Xaa is C or S
RVVMNVTAKKIVNSSDDIKRVQVPRLKTPAXTPKT

SEQ ID NO: 46908 - protein, 40 aa, Artificial Sequence; identical to SEQ ID NO: 17432
  GFR-binding peptide
  MOD_RES (36)..(36): Xaa is C or S
  MOD_RES (12)..(13)..(14)..(15)..(16): Xaa is A or G
  MOD_RES (17)..(18)..(19)..(20): Xaa is A or G or is absent

SEQ ID NO: 46909 - protein, 40 aa, Artificial Sequence; identical to SEQ ID NO: 17433
  GFR-binding peptide
  MOD_RES (1)..(3)..(40): Xaa is C or S
  MOD_RES (16)..(17)..(18)..(19)..(20): Xaa is A or G
  MOD_RES (21)..(22)..(23)..(24): Xaa is A or G or is absent

SEQ ID NO: 46910 - protein, 36 aa, Artificial Sequence
  GFR-binding peptide
  MOD_RES (36)..(36): Xaa is C or S
  MOD_RES (12)..(13)..(14)..(15)..(16): Xaa is A or G
  MOD_RES (17)..(18)..(19)..(20): Xaa is A or G or is absent
LHDELTNSLQEXXXXXXXXXYYLVTLPELQVQTPRX

SEQ ID NO: 46911 - protein, 37 aa, Artificial Sequence; identical to SEQ ID NO: 10245
  GFR-binding peptide
  MOD_RES (31)..(32): Xaa is C or S

SEQ ID NO: 46912 - protein, 34 aa, Artificial Sequence
  GFR-binding peptide
  MOD_RES (2)..(2): Xaa is C or S
  MOD_RES (13)..(14)..(15)..(16)..(17): Xaa is A or G
  MOD_RES (18)..(19)..(20)..(21): Xaa is A or G or is absent
KXSKVIMVTAKKXXXXXXXXXIKRIQVPRLDQSV

SEQ ID NO: 46913 - protein, 36 aa, Artificial Sequence; identical to SEQ ID NO: 10247
  GFR-binding peptide
  MOD_RES (2)..(4)..(36): Xaa is C or S

SEQ ID NO: 46914 - protein, 35 aa, Artificial Sequence
  GFR-binding peptide
  MOD_RES (33)..(34): Xaa is C or S
  MOD_RES (11)..(12)..(13)..(14)..(15): Xaa is A or G
  MOD_RES (16)..(17)..(18)..(19): Xaa is A or G or is absent
RVVMNSMEGIXXXXXXXXXMIQVTINSLKTPAXXP

SEQ ID NO: 46915 - protein, 43 aa, Artificial Sequence; identical to SEQ ID NO: 10249
  GFR-binding peptide
  MOD_RES (2)..(4)..(37)..(38): Xaa is C or S
  MOD_RES (15)..(16)..(17)..(18)..(19): Xaa is A or G
  MOD_RES (20)..(21)..(22)..(23): Xaa is A or G or is absent

SEQ ID NO: 46916 - protein, 41 aa, Artificial Sequence
  GFR-binding peptide
  MOD_RES (1)..(35)..(36): Xaa is C or S
  MOD_RES (13)..(14)..(15)..(16)..(17): Xaa is A or G
  MOD_RES (18)..(19)..(20)..(21): Xaa is A or G or is absent
XSRVVMNSMEGIXXXXXXXXXMIQVTINSLKTPAXXPKPVY

SEQ ID NO: 46917 - protein, 38 aa, Artificial Sequence
  GFR-binding peptide
  MOD_RES (32)..(32): Xaa is C or S
SRVVMNVTAKKIVNSSDDIKRVQVPRLKTPAXTPKTVH

SEQ ID NO: 46918 - protein, 37 aa, Artificial Sequence; identical to SEQ ID NO: 17437
  GFR-binding peptide
  MOD_RES (37)..(37): Xaa is C or S

SEQ ID NO: 46919 - protein, 39 aa, Artificial Sequence
  GFR-binding peptide
  MOD_RES (2)..(4)..(37)..(38): Xaa is C or S
  MOD_RES (15)..(16)..(17)..(18)..(19): Xaa is A or G
  MOD_RES (20)..(21)..(22)..(23): Xaa is A or G or is absent
SXKXSKVVMSMEGIXXXXXXXXXMIQITINSLDQPVXXP

SEQ ID NO: 46920 - protein, 40 aa, Artificial Sequence
  GFR-binding peptide
  MOD_RES (2)..(4)..(36)..(37): Xaa is C or S
HXGXSRVVMNSMEGIIVNSSDDMIQVTINSLKTPAXXPKP

SEQ ID NO: 46921 - protein, 39 aa, Artificial Sequence; identical to SEQ ID NO: 17441
  GFR-binding peptide
  MOD_RES (33)..(33): Xaa is C or S
  MOD_RES (11)..(12)..(13)..(14)..(15): Xaa is A or G
  MOD_RES (16)..(17)..(18)..(19): Xaa is A or G or is absent

SEQ ID NO: 46922 - protein, 34 aa, Artificial Sequence
  GFR-binding peptide
  MOD_RES (13)..(14)..(15)..(16)..(17): Xaa is A or G
  MOD_RES (18)..(19)..(20)..(21): Xaa is A or G or is absent
ALHDELTNSLQEXXXXXXXXXYYLVTLPELQVQT

SEQ ID NO: 46923 - protein, 40 aa, Artificial Sequence; identical to SEQ ID NO: 17444
  GFR-binding peptide
  MOD_RES (2)..(4): Xaa is C or S

SEQ ID NO: 46924 - protein, 36 aa, Artificial Sequence; identical to SEQ ID NO: 10255
  GFR-binding peptide
  MOD_RES (32)..(32): Xaa is C or S

SEQ ID NO: 46925 - protein, 36 aa, Artificial Sequence
  GFR-binding peptide
  MOD_RES (36)..(36): Xaa is C or S
  MOD_RES (12)..(13)..(14)..(15)..(16): Xaa is A or G
  MOD_RES (17)..(18)..(19)..(20): Xaa is A or G or is absent
LHEELRNSLQEXXXXXXXXXYYLVTLPEHHVRSPQX

SEQ ID NO: 46926 - protein, 39 aa, Artificial Sequence; identical to SEQ ID NO: 17447
  GFR-binding peptide
  MOD_RES (37)..(37): Xaa is C or S
  MOD_RES (13)..(14)..(15)..(16)..(17): Xaa is A or G
  MOD_RES (18)..(19)..(20)..(21): Xaa is A or G or is absent

SEQ ID NO: 46927 - protein, 37 aa, Artificial Sequence
  GFR-binding peptide
  MOD_RES (1)..(34)..(35): Xaa is C or S
  MOD_RES (12)..(13)..(14)..(15)..(16): Xaa is A or G
  MOD_RES (17)..(18)..(19)..(20): Xaa is A or G or is absent
XSRVIMVTAKKXXXXXXXXXIKRIQVPRLAQPVXXPA

SEQ ID NO: 46928 - protein, 40 aa, Artificial Sequence
  GFR-binding peptide
  MOD_RES (2)..(39): Xaa is C or S
  MOD_RES (15)..(16)..(17)..(18)..(19): Xaa is A or G
  MOD_RES (20)..(21)..(22)..(23): Xaa is A or G or is absent
KXALHDELTNSLQEXXXXXXXXXYYVVPLPELQVQTPRXQ

SEQ ID NO: 46929 - protein, 38 aa, Artificial Sequence
  GFR-binding peptide
  MOD_RES (33)..(34): Xaa is C or S
  MOD_RES (11)..(12)..(13)..(14)..(15): Xaa is A or G
  MOD_RES (16)..(17)..(18)..(19): Xaa is A or G or is absent
EVVMDVTAKKXXXXXXXXXIKRMQVPRLETPVXXAKPI

SEQ ID NO: 46930 - protein, 37 aa, Artificial Sequence
  GFR-binding peptide
  MOD_RES (34)..(35): Xaa is C or S
  MOD_RES (12)..(13)..(14)..(15)..(16): Xaa is A or G
  MOD_RES (17)..(18)..(19)..(20): Xaa is A or G or is absent
ARVVMNVQVEKXXXXXXXXXVKAVKVSRLQTPAXXPK

SEQ ID NO: 46931 - protein, 38 aa, Artificial Sequence
  GFR-binding peptide
  MOD_RES (36)..(36): Xaa is C or S
LHDELTNSLQEFIPKKRVIEYYLVTLPELQVQTPRXQV

SEQ ID NO: 46932 - protein, 39 aa, Artificial Sequence; identical to SEQ ID NO: 10262
  GFR-binding peptide
  MOD_RES (2)..(4)..(38)..(39): Xaa is C or S
  MOD_RES (16)..(17)..(18)..(19)..(20): Xaa is A or G
  MOD_RES (21)..(22)..(23)..(24): Xaa is A or G or is absent

SEQ ID NO: 46933 - protein, 37 aa, Artificial Sequence; identical to SEQ ID NO: 10264
  GFR-binding peptide
  MOD_RES (1)..(3)..(34)..(35): Xaa is C or S

SEQ ID NO: 46934 - protein, 39 aa, Artificial Sequence
  GFR-binding peptide
  MOD_RES (35)..(35): Xaa is C or S
  MOD_RES (11)..(12)..(13)..(14)..(15): Xaa is A or G
  MOD_RES (16)..(17)..(18)..(19): Xaa is A or G or is absent
HEELRNSLQEXXXXXXXXXYYLVTLPEHHVRSPQXKVSS

SEQ ID NO: 46935 - protein, 42 aa, Artificial Sequence; identical to SEQ ID NO: 17452
  GFR-binding peptide
  MOD_RES (1)..(3)..(40): Xaa is C or S

SEQ ID NO: 46936 - protein, 33 aa, Artificial Sequence
  GFR-binding peptide
  MOD_RES (12)..(13)..(14)..(15)..(16): Xaa is A or G
  MOD_RES (17)..(18)..(19)..(20): Xaa is A or G or is absent
ARVVMNVQVEKXXXXXXXXXVKAVKVSRLQTPA

SEQ ID NO: 46937 - protein, 40 aa, Artificial Sequence
  GFR-binding peptide
  MOD_RES (1)..(3)..(34)..(35): Xaa is C or S
XKXSKVVMVQVEKVKPTRGVVKAIKVSRLDQPVXXPSASA

SEQ ID NO: 46938 - protein, 36 aa, Artificial Sequence
  GFR-binding peptide
  MOD_RES (2)..(36): Xaa is C or S
  MOD_RES (14)..(15)..(16)..(17)..(18): Xaa is A or G
  MOD_RES (19)..(20)..(21)..(22): Xaa is A or G or is absent
GXGEVVMESMEGIXXXXXXXXXMIQMTINSLETPVX

SEQ ID NO: 46939 - protein, 40 aa, Artificial Sequence
  GFR-binding peptide
  MOD_RES (2)..(36): Xaa is C or S
  MOD_RES (14)..(15)..(16)..(17)..(18): Xaa is A or G
  MOD_RES (19)..(20)..(21)..(22): Xaa is A or G or is absent
GXSRVVMNVTAKKXXXXXXXXXIKRVQVPRLKTPAXTPKT

SEQ ID NO: 46940 - protein, 38 aa, Artificial Sequence
  GFR-binding peptide
  MOD_RES (33)..(33): Xaa is C or S
NHQLFNSLQEHQGQHPKIRYYLMTLPEEETPVXELGED

SEQ ID NO: 46941 - protein, 35 aa, Artificial Sequence
  GFR-binding peptide
  MOD_RES (2)..(4)..(35): Xaa is C or S
SXKXSKVVMSMEGIVKPTRGVMIQITINSLDQPVX

SEQ ID NO: 46942 - protein, 34 aa, Artificial Sequence
  GFR-binding peptide
  MOD_RES (2)..(2): Xaa is C or S
  MOD_RES (13)..(14)..(15)..(16)..(17): Xaa is A or G
  MOD_RES (18)..(19)..(20)..(21): Xaa is A or G or is absent
KXSKVVMVTAKKXXXXXXXXXIKRIQVPRLDQPV

SEQ ID NO: 46943 - protein, 37 aa, Artificial Sequence
  GFR-binding peptide
  MOD_RES (34)..(34): Xaa is C or S
  MOD_RES (12)..(13)..(14)..(15)..(16): Xaa is A or G
  MOD_RES (17)..(18)..(19)..(20): Xaa is A or G or is absent
SRVVMNVTAKKXXXXXXXXXIKRVQVPRLKTPAXTPK

SEQ ID NO: 46944 - protein, 41 aa, Artificial Sequence
  GFR-binding peptide
  MOD_RES (1)..(35)..(36): Xaa is C or S
  MOD_RES (13)..(14)..(15)..(16)..(17): Xaa is A or G
  MOD_RES (18)..(19)..(20)..(21): Xaa is A or G or is absent
XGEVVMDVQVEKXXXXXXXXXVKAMKVSRLETPVXXAKPIK

SEQ ID NO: 46945 - protein, 36 aa, Artificial Sequence
  GFR-binding peptide
  MOD_RES (1)..(35)..(36): Xaa is C or S
  MOD_RES (13)..(14)..(15)..(16)..(17): Xaa is A or G
  MOD_RES (18)..(19)..(20)..(21): Xaa is A or G or is absent
XARVVMNVTAKKXXXXXXXXXIKRVQVPRLQTPAXX

SEQ ID NO: 46946 - protein, 41 aa, Artificial Sequence; identical to SEQ ID NO: 10273
  GFR-binding peptide
  MOD_RES (2)..(4)..(38): Xaa is C or S
  MOD_RES (16)..(17)..(18)..(19)..(20): Xaa is A or G
  MOD_RES (21)..(22)..(23)..(24): Xaa is A or G or is absent

SEQ ID NO: 46947 - protein, 35 aa, Artificial Sequence; identical to SEQ ID NO: 10274
  GFR-binding peptide
  MOD_RES (1)..(3)..(34)..(35): Xaa is C or S

SEQ ID NO: 46948 - protein, 38 aa, Artificial Sequence
  GFR-binding peptide
  MOD_RES (1)..(32)..(33): Xaa is C or S
XSKVIMVQVEKIKPTKGIVKAIKVSRLDQSVXXPSASA

SEQ ID NO: 46949 - protein, 39 aa, Artificial Sequence
  GFR-binding peptide
  MOD_RES (34)..(34): Xaa is C or S
  MOD_RES (12)..(13)..(14)..(15)..(16): Xaa is A or G
  MOD_RES (17)..(18)..(19)..(20): Xaa is A or G or is absent
KNHQLFNSLQEXXXXXXXXXYYLMTLPEEETPVXELGED

SEQ ID NO: 46950 - protein, 41 aa, Artificial Sequence
  GFR-binding peptide
  MOD_RES (2)..(4)..(37)..(38): Xaa is C or S
  MOD_RES (15)..(16)..(17)..(18)..(19): Xaa is A or G
  MOD_RES (20)..(21)..(22)..(23): Xaa is A or G or is absent
SXKXSKVIMSMEGIXXXXXXXXXMIQITINSLDQSVXXPSA

SEQ ID NO: 46951 - protein, 38 aa, Artificial Sequence; identical to SEQ ID NO: 10277
  GFR-binding peptide
  MOD_RES (1)..(3)..(37)..(38): Xaa is C or S
  MOD_RES (15)..(16)..(17)..(18)..(19): Xaa is A or G
  MOD_RES (20)..(21)..(22)..(23): Xaa is A or G or is absent

SEQ ID NO: 46952 - protein, 33 aa, Artificial Sequence
  GFR-binding peptide
  MOD_RES (32)..(33): Xaa is C or S
GEVVMESMEGIVVKDYEDMIQMTINSLETPVXX

SEQ ID NO: 46953 - protein, 37 aa, Artificial Sequence
  GFR-binding peptide
  MOD_RES (37)..(37): Xaa is C or S
ALHDELTNSLQEFIPKKRVIEYYLVTLPELQVQTPRX

SEQ ID NO: 46954 - protein, 38 aa, Artificial Sequence; identical to SEQ ID NO: 10280
  GFR-binding peptide
  MOD_RES (2)..(36): Xaa is C or S
  MOD_RES (14)..(15)..(16)..(17)..(18): Xaa is A or G
  MOD_RES (19)..(20)..(21)..(22): Xaa is A or G or is absent

SEQ ID NO: 46955 - protein, 31 aa, Artificial Sequence; identical to SEQ ID NO: 10281
  GFR-binding peptide

SEQ ID NO: 46956 - protein, 39 aa, Artificial Sequence; identical to SEQ ID NO: 10282
  GFR-binding peptide
  MOD_RES (1)..(3)..(35): Xaa is C or S

SEQ ID NO: 46957 - protein, 43 aa, Artificial Sequence
  GFR-binding peptide
  MOD_RES (1)..(3)..(37)..(38): Xaa is C or S
  MOD_RES (15)..(16)..(17)..(18)..(19): Xaa is A or G
  MOD_RES (20)..(21)..(22)..(23): Xaa is A or G or is absent
XGXSRVVMNVQVEKXXXXXXXXXVKAVKVSRLKTPAXXPKPVY

SEQ ID NO: 46958 - protein, 33 aa, Artificial Sequence; identical to SEQ ID NO: 17469
  GFR-binding peptide
  MOD_RES (33)..(33): Xaa is C or S

SEQ ID NO: 46959 - protein, 35 aa, Artificial Sequence
  GFR-binding peptide
  MOD_RES (31)..(32): Xaa is C or S
RVVMNVTAKKIVNSSDDIKRVQVPRLKTPAXXPKP

SEQ ID NO: 46960 - protein, 35 aa, Artificial Sequence
  GFR-binding peptide
  MOD_RES (2)..(4): Xaa is C or S
HXGXARVVMNVQVEKIVNSSDDVKAVKVSRLQTPA

SEQ ID NO: 46961 - protein, 45 aa, Artificial Sequence
  GFR-binding peptide
  MOD_RES (2)..(4)..(41): Xaa is C or S
  MOD_RES (17)..(18)..(19)..(20)..(21): Xaa is A or G
  MOD_RES (22)..(23)..(24)..(25): Xaa is A or G or is absent
EXKXALHDELTNSLQEXXXXXXXXXYYVVPLPELQVQTPRXQVNR

SEQ ID NO: 46962 - protein, 39 aa, Artificial Sequence
  GFR-binding peptide
  MOD_RES (1)..(3)..(36)..(37): Xaa is C or S
  MOD_RES (14)..(15)..(16)..(17)..(18): Xaa is A or G
  MOD_RES (19)..(20)..(21)..(22): Xaa is A or G or is absent
XKXSKVVMSMEGIXXXXXXXXXMIQITINSLDQPVXXPS

SEQ ID NO: 46963 - protein, 37 aa, Artificial Sequence; identical to SEQ ID NO: 10283
  GFR-binding peptide
  MOD_RES (1)..(33): Xaa is C or S

SEQ ID NO: 46964 - protein, 34 aa, Artificial Sequence
  GFR-binding peptide
  MOD_RES (1)..(3): Xaa is C or S
XGXGEVVMDVTAKKVVKENEDIKRMQVPRLETPV

SEQ ID NO: 46965 - protein, 39 aa, Artificial Sequence; identical to SEQ ID NO: 17472
  GFR-binding peptide
  MOD_RES (1)..(38): Xaa is C or S
  MOD_RES (14)..(15)..(16)..(17)..(18): Xaa is A or G
  MOD_RES (19)..(20)..(21)..(22): Xaa is A or G or is absent

SEQ ID NO: 46966 - protein, 35 aa, Artificial Sequence
  GFR-binding peptide
  MOD_RES (1)..(35): Xaa is C or S
  MOD_RES (13)..(14)..(15)..(16)..(17): Xaa is A or G
  MOD_RES (18)..(19)..(20)..(21): Xaa is A or G or is absent
XARVVMNVTAKKXXXXXXXXXIKRVQVPRLQTPAX

SEQ ID NO: 46967 - protein, 40 aa, Artificial Sequence
  GFR-binding peptide
  MOD_RES (2)..(4)..(37)..(38): Xaa is C or S
  MOD_RES (15)..(16)..(17)..(18)..(19): Xaa is A or G
  MOD_RES (20)..(21)..(22)..(23): Xaa is A or G or is absent
SXKXSKVIMSMEGIXXXXXXXXXMIQITINSLDQSVXXPS

SEQ ID NO: 46968 - protein, 39 aa, Artificial Sequence; identical to SEQ ID NO: 17474
  GFR-binding peptide
  MOD_RES (1)..(35): Xaa is C or S
  MOD_RES (13)..(14)..(15)..(16)..(17): Xaa is A or G
  MOD_RES (18)..(19)..(20)..(21): Xaa is A or G or is absent

SEQ ID NO: 46969 - protein, 43 aa, Artificial Sequence
  GFR-binding peptide
  MOD_RES (1)..(3)..(40): Xaa is C or S
  MOD_RES (16)..(17)..(18)..(19)..(20): Xaa is A or G
  MOD_RES (21)..(22)..(23)..(24): Xaa is A or G or is absent
XKXALHDELTNSLQEXXXXXXXXXYYLVTLPELQVQTPRXQVN

SEQ ID NO: 46970 - protein, 32 aa, Artificial Sequence; identical to SEQ ID NO: 10291
  GFR-binding peptide
  MOD_RES (1)..(32): Xaa is C or S

SEQ ID NO: 46971 - protein, 40 aa, Artificial Sequence
  GFR-binding peptide
  MOD_RES (2)..(36): Xaa is C or S
  MOD_RES (14)..(15)..(16)..(17)..(18): Xaa is A or G
  MOD_RES (19)..(20)..(21)..(22): Xaa is A or G or is absent
GXSRVVMNSMEGIXXXXXXXXXMIQVTINSLKTPAXTPKT

SEQ ID NO: 46972 - protein, 37 aa, Artificial Sequence; identical to SEQ ID NO: 10293
  GFR-binding peptide
  MOD_RES (1)..(32)..(33): Xaa is C or S

SEQ ID NO: 46973 - protein, 32 aa, Artificial Sequence; identical to SEQ ID NO: 10294
  GFR-binding peptide
  MOD_RES (31)..(31): Xaa is C or S

SEQ ID NO: 46974 - protein, 42 aa, Artificial Sequence
  GFR-binding peptide
  MOD_RES (2)..(4)..(37)..(38): Xaa is C or S
  MOD_RES (15)..(16)..(17)..(18)..(19): Xaa is A or G
  MOD_RES (20)..(21)..(22)..(23): Xaa is A or G or is absent
SXKXSKVVMSMEGIXXXXXXXXXMIQITINSLDQPVXXPSAS

SEQ ID NO: 46975 - protein, 35 aa, Artificial Sequence; identical to SEQ ID NO: 10298
  GFR-binding peptide
  MOD_RES (1)..(34)..(35): Xaa is C or S
  MOD_RES (12)..(13)..(14)..(15)..(16): Xaa is A or G
  MOD_RES (17)..(18)..(19)..(20): Xaa is A or G or is absent

SEQ ID NO: 46976 - protein, 43 aa, Artificial Sequence
  GFR-binding peptide
  MOD_RES (1)..(3)..(37): Xaa is C or S
  MOD_RES (15)..(16)..(17)..(18)..(19): Xaa is A or G
  MOD_RES (20)..(21)..(22)..(23): Xaa is A or G or is absent
XEXKNHQLFNSLQEXXXXXXXXXYYVMPLPEEETPVXELGEDN

SEQ ID NO: 46977 - protein, 35 aa, Artificial Sequence; identical to SEQ ID NO: 10301
  GFR-binding peptide
  MOD_RES (2)..(2): Xaa is C or S
  MOD_RES (14)..(15)..(16)..(17)..(18): Xaa is A or G
  MOD_RES (19)..(20)..(21)..(22): Xaa is A or G or is absent

SEQ ID NO: 46978 - protein, 39 aa, Artificial Sequence
  GFR-binding peptide
  MOD_RES (2)..(4)..(35)..(36): Xaa is C or S
SXKXSKVIMVTAKKIKPTKGIIKRIQVPRLDQSVXXPSA

SEQ ID NO: 46979 - protein, 33 aa, Artificial Sequence
  GFR-binding peptide
  MOD_RES (32)..(32): Xaa is C or S
SRVVMNVTAKKIVNSSDDIKRVQVPRLKTPAXT

SEQ ID NO: 46980 - protein, 31 aa, Artificial Sequence
  GFR-binding peptide
  MOD_RES (31)..(31): Xaa is C or S
EVVMEVQVEKVVKDYEDVKAMKVSRLETPVX

SEQ ID NO: 46981 - protein, 38 aa, Artificial Sequence
  GFR-binding peptide
  MOD_RES (2)..(4)..(37)..(38): Xaa is C or S
  MOD_RES (15)..(16)..(17)..(18)..(19): Xaa is A or G
  MOD_RES (20)..(21)..(22)..(23): Xaa is A or G or is absent
SXKXSKVIMVQVEKXXXXXXXXXVKAIKVSRLDQSVXX

SEQ ID NO: 46982 - protein, 34 aa, Artificial Sequence; identical to SEQ ID NO: 10302
  GFR-binding peptide
  MOD_RES (33)..(34): Xaa is C or S
  MOD_RES (11)..(12)..(13)..(14)..(15): Xaa is A or G
  MOD_RES (16)..(17)..(18)..(19): Xaa is A or G or is absent

SEQ ID NO: 46983 - protein, 38 aa, Artificial Sequence; identical to SEQ ID NO: 17485
  GFR-binding peptide
  MOD_RES (2)..(4)..(38): Xaa is C or S

SEQ ID NO: 46984 - protein, 39 aa, Artificial Sequence
  GFR-binding peptide
  MOD_RES (33)..(34): Xaa is C or S
  MOD_RES (11)..(12)..(13)..(14)..(15): Xaa is A or G
  MOD_RES (16)..(17)..(18)..(19): Xaa is A or G or is absent
RVVMNVTAKKXXXXXXXXXIKRVQVPRLKTPAXXPKPVY

SEQ ID NO: 46985 - protein, 44 aa, Artificial Sequence; identical to SEQ ID NO: 10304
  GFR-binding peptide
  MOD_RES (2)..(4)..(38)..(39): Xaa is C or S
  MOD_RES (16)..(17)..(18)..(19)..(20): Xaa is A or G
  MOD_RES (21)..(22)..(23)..(24): Xaa is A or G or is absent

SEQ ID NO: 46986 - protein, 38 aa, Artificial Sequence; identical to SEQ ID NO: 10305
  GFR-binding peptide
  MOD_RES (32)..(33): Xaa is C or S

SEQ ID NO: 46987 - protein, 39 aa, Artificial Sequence; identical to SEQ ID NO: 17487
  GFR-binding peptide
  MOD_RES (1)..(38): Xaa is C or S
  MOD_RES (14)..(15)..(16)..(17)..(18): Xaa is A or G
  MOD_RES (19)..(20)..(21)..(22): Xaa is A or G or is absent

SEQ ID NO: 46988 - protein, 37 aa, Artificial Sequence; identical to SEQ ID NO: 10306
  GFR-binding peptide
  MOD_RES (1)..(33)..(34): Xaa is C or S

SEQ ID NO: 46989 - protein, 35 aa, Artificial Sequence
  GFR-binding peptide
  MOD_RES (35)..(35): Xaa is C or S
HDELTNSLQEFIPKKRVIEYYVVPLPELQVQTPRX

SEQ ID NO: 46990 - protein, 37 aa, Artificial Sequence; identical to SEQ ID NO: 10307
  GFR-binding peptide
  MOD_RES (1)..(3)..(35)..(36): Xaa is C or S

SEQ ID NO: 46991 - protein, 35 aa, Artificial Sequence; identical to SEQ ID NO: 10308
  GFR-binding peptide
  MOD_RES (1)..(3)..(35): Xaa is C or S

SEQ ID NO: 46992 - protein, 34 aa, Artificial Sequence
  GFR-binding peptide
  MOD_RES (31)..(32): Xaa is C or S
SKVIMVQVEKIKPTKGIVKAIKVSRLDQSVXXPS

SEQ ID NO: 46993 - protein, 39 aa, Artificial Sequence; identical to SEQ ID NO: 17492
  GFR-binding peptide
  MOD_RES (2)..(36): Xaa is C or S

SEQ ID NO: 46994 - protein, 44 aa, Artificial Sequence
  GFR-binding peptide
  MOD_RES (1)..(3)..(40): Xaa is C or S
  MOD_RES (16)..(17)..(18)..(19)..(20): Xaa is A or G
  MOD_RES (21)..(22)..(23)..(24): Xaa is A or G or is absent
XKXALHDELTNSLQEXXXXXXXXXYYLVTLPELQVQTPRXQVNR

SEQ ID NO: 46995 - protein, 40 aa, Artificial Sequence
  GFR-binding peptide
  MOD_RES (1)..(3)..(37)..(38): Xaa is C or S
  MOD_RES (15)..(16)..(17)..(18)..(19): Xaa is A or G
  MOD_RES (20)..(21)..(22)..(23): Xaa is A or G or is absent
XGXSRVVMNSMEGIXXXXXXXXXMIQVTINSLKTPAXXPK

SEQ ID NO: 46996 - protein, 41 aa, Artificial Sequence
  GFR-binding peptide
  MOD_RES (2)..(36): Xaa is C or S
  MOD_RES (14)..(15)..(16)..(17)..(18): Xaa is A or G
  MOD_RES (19)..(20)..(21)..(22): Xaa is A or G or is absent
GXSRVVMNVQVEKXXXXXXXXXVKAVKVSRLKTPAXTPKTV

SEQ ID NO: 46997 - protein, 38 aa, Artificial Sequence
  GFR-binding peptide
  MOD_RES (1)..(3): Xaa is C or S
XAXELHEELRNSLQELKPKKRVYEYYLVTLPEHHVRSP

SEQ ID NO: 46998 - protein, 37 aa, Artificial Sequence; identical to SEQ ID NO: 10310
  GFR-binding peptide
  MOD_RES (1)..(3)..(35)..(36): Xaa is C or S

SEQ ID NO: 46999 - protein, 34 aa, Artificial Sequence; identical to SEQ ID NO: 10311
  GFR-binding peptide
  MOD_RES (32)..(32): Xaa is C or S

SEQ ID NO: 47000 - protein, 35 aa, Artificial Sequence
  GFR-binding peptide
  MOD_RES (34)..(34): Xaa is C or S
  MOD_RES (12)..(13)..(14)..(15)..(16): Xaa is A or G
  MOD_RES (17)..(18)..(19)..(20): Xaa is A or G or is absent
SRVVMNSMEGIXXXXXXXXXMIQVTINSLKTPAXT

SEQ ID NO: 47001 - protein, 33 aa, Artificial Sequence; identical to SEQ ID NO: 10312
  GFR-binding peptide
  MOD_RES (31)..(32): Xaa is C or S

SEQ ID NO: 47002 - protein, 41 aa, Artificial Sequence
  GFR-binding peptide
  MOD_RES (1)..(3)..(36)..(37): Xaa is C or S
  MOD_RES (14)..(15)..(16)..(17)..(18): Xaa is A or G
  MOD_RES (19)..(20)..(21)..(22): Xaa is A or G or is absent
XKXSKVVMVQVEKXXXXXXXXXVKAIKVSRLDQPVXXPSAS

SEQ ID NO: 47003 - protein, 38 aa, Artificial Sequence
  GFR-binding peptide
  MOD_RES (2)..(4)..(38): Xaa is C or S
  MOD_RES (16)..(17)..(18)..(19)..(20): Xaa is A or G
  MOD_RES (21)..(22)..(23)..(24): Xaa is A or G or is absent
HXGXARVVMNSMEGIXXXXXXXXXMIQVTINSLQTPAX

SEQ ID NO: 47004 - protein, 33 aa, Artificial Sequence; identical to SEQ ID NO: 10314
  GFR-binding peptide
  MOD_RES (2)..(2): Xaa is C or S

SEQ ID NO: 47005 - protein, 38 aa, Artificial Sequence; identical to SEQ ID NO: 36366
  GFR-binding peptide
  MOD_RES (2)..(4)..(35)..(36): Xaa is C or S

SEQ ID NO: 47006 - protein, 36 aa, Artificial Sequence
  GFR-binding peptide
  MOD_RES (2)..(4)..(36): Xaa is C or S
HXGXARVVMNVQVEKIVNSSDDVKAVKVSRLQTPAX

SEQ ID NO: 47007 - protein, 39 aa, Artificial Sequence; identical to SEQ ID NO: 17498
  GFR-binding peptide
  MOD_RES (34)..(34): Xaa is C or S

SEQ ID NO: 47008 - protein, 39 aa, Artificial Sequence
  GFR-binding peptide
  MOD_RES (36)..(36): Xaa is C or S
LHEELRNSLQELKPKKRVYEYYLVTLPEHHVRSPQXKVS

SEQ ID NO: 47009 - protein, 35 aa, Artificial Sequence; identical to SEQ ID NO: 10317
  GFR-binding peptide
  MOD_RES (31)..(32): Xaa is C or S

SEQ ID NO: 47010 - protein, 36 aa, Artificial Sequence; identical to SEQ ID NO: 10318
  GFR-binding peptide
  MOD_RES (2)..(4): Xaa is C or S
  MOD_RES (15)..(16)..(17)..(18)..(19): Xaa is A or G
  MOD_RES (20)..(21)..(22)..(23): Xaa is A or G or is absent

SEQ ID NO: 47011 - protein, 39 aa, Artificial Sequence
  GFR-binding peptide
  MOD_RES (33)..(33): Xaa is C or S
  MOD_RES (11)..(12)..(13)..(14)..(15): Xaa is A or G
  MOD_RES (16)..(17)..(18)..(19): Xaa is A or G or is absent
RVVMNSMEGIXXXXXXXXXMIQVTINSLKTPAXTPKTVH

SEQ ID NO: 47012 - protein, 34 aa, Artificial Sequence; identical to SEQ ID NO: 10320
  GFR-binding peptide
  MOD_RES (33)..(34): Xaa is C or S
  MOD_RES (11)..(12)..(13)..(14)..(15): Xaa is A or G
  MOD_RES (16)..(17)..(18)..(19): Xaa is A or G or is absent

SEQ ID NO: 47013 - protein, 36 aa, Artificial Sequence; identical to SEQ ID NO: 10321
  GFR-binding peptide
  MOD_RES (1)..(35): Xaa is C or S
  MOD_RES (13)..(14)..(15)..(16)..(17): Xaa is A or G
  MOD_RES (18)..(19)..(20)..(21): Xaa is A or G or is absent

SEQ ID NO: 47014 - protein, 35 aa, Artificial Sequence
  GFR-binding peptide
  MOD_RES (1)..(33)..(34): Xaa is C or S
XSRVVMNSMEGIIVNSSDDMIQVTINSLKTPAXXP

SEQ ID NO: 47015 - protein, 39 aa, Artificial Sequence
  GFR-binding peptide
  MOD_RES (37)..(37): Xaa is C or S
ALHDELTNSLQEFIPKKRVIEYYVVPLPELQVQTPRXQV

SEQ ID NO: 47016 - protein, 40 aa, Artificial Sequence
  GFR-binding peptide
  MOD_RES (2)..(4)..(36)..(37): Xaa is C or S
HXGXARVVMNSMEGIIVNSSDDMIQVTINSLQTPAXXPKP

SEQ ID NO: 47017 - protein, 37 aa, Artificial Sequence
  GFR-binding peptide
  MOD_RES (2)..(35)..(36): Xaa is C or S
  MOD_RES (13)..(14)..(15)..(16)..(17): Xaa is A or G
  MOD_RES (18)..(19)..(20)..(21): Xaa is A or G or is absent
KXSKVIMVQVEKXXXXXXXXXVKAIKVSRLDQSVXXP

SEQ ID NO: 47018 - protein, 42 aa, Artificial Sequence
  GFR-binding peptide
  MOD_RES (2)..(4)..(41): Xaa is C or S
  MOD_RES (17)..(18)..(19)..(20)..(21): Xaa is A or G
  MOD_RES (22)..(23)..(24)..(25): Xaa is A or G or is absent
EXKXALHDELTNSLQEXXXXXXXXXYYVVPLPELQVQTPRXQ

SEQ ID NO: 47019 - protein, 43 aa, Artificial Sequence; identical to SEQ ID NO: 17504
  GFR-binding peptide
  MOD_RES (1)..(3)..(40): Xaa is C or S

SEQ ID NO: 47020 - protein, 35 aa, Artificial Sequence
  GFR-binding peptide
  MOD_RES (1)..(3)..(34)..(35): Xaa is C or S
XKXSKVIMVTAKKIKPTKGIIKRIQVPRLDQSVXX

SEQ ID NO: 47021 - protein, 44 aa, Artificial Sequence; identical to SEQ ID NO: 17507
  GFR-binding peptide
  MOD_RES (1)..(3)..(40): Xaa is C or S

SEQ ID NO: 47022 - protein, 35 aa, Artificial Sequence
  GFR-binding peptide
  MOD_RES (32)..(33): Xaa is C or S
ARVVMNVTAKKIVNSSDDIKRVQVPRLQTPAXXPK

SEQ ID NO: 47023 - protein, 38 aa, Artificial Sequence; identical to SEQ ID NO: 10324
  GFR-binding peptide
  MOD_RES (1)..(33)..(34): Xaa is C or S

SEQ ID NO: 47024 - protein, 36 aa, Artificial Sequence
  GFR-binding peptide
ELHEELRNSLQELKPKKRVYEYYVVPLPEHHVRSPQ

SEQ ID NO: 47025 - protein, 35 aa, Artificial Sequence; identical to SEQ ID NO: 17511
  GFR-binding peptide
  MOD_RES (34)..(34): Xaa is C or S
  MOD_RES (12)..(13)..(14)..(15)..(16): Xaa is A or G
  MOD_RES (17)..(18)..(19)..(20): Xaa is A or G or is absent

SEQ ID NO: 47026 - protein, 37 aa, Artificial Sequence
  GFR-binding peptide
  MOD_RES (2)..(36)..(37): Xaa is C or S
  MOD_RES (14)..(15)..(16)..(17)..(18): Xaa is A or G
  MOD_RES (19)..(20)..(21)..(22): Xaa is A or G or is absent
GXGEVVMDVQVEKXXXXXXXXXVKAMKVSRLETPVXX

SEQ ID NO: 47027 - protein, 41 aa, Artificial Sequence
  GFR-binding peptide
  MOD_RES (1)..(38): Xaa is C or S
  MOD_RES (14)..(15)..(16)..(17)..(18): Xaa is A or G
  MOD_RES (19)..(20)..(21)..(22): Xaa is A or G or is absent
XELHEELRNSLQEXXXXXXXXXYYVVPLPEHHVRSPQXKVS

SEQ ID NO: 47028 - protein, 37 aa, Artificial Sequence
  GFR-binding peptide
  MOD_RES (33)..(34): Xaa is C or S
  MOD_RES (11)..(12)..(13)..(14)..(15): Xaa is A or G
  MOD_RES (16)..(17)..(18)..(19): Xaa is A or G or is absent
EVVMEVTAKKXXXXXXXXXIKRMQVPRLETPVXXAKP

SEQ ID NO: 47029 - protein, 39 aa, Artificial Sequence
  GFR-binding peptide
  MOD_RES (1)..(3): Xaa is C or S
XAXELHEELRNSLQELKPKKRVYEYYVVPLPEHHVRSPQ

SEQ ID NO: 47030 - protein, 36 aa, Artificial Sequence; identical to SEQ ID NO: 36384
  GFR-binding peptide
  MOD_RES (1)..(3)..(36): Xaa is C or S
  MOD_RES (14)..(15)..(16)..(17)..(18): Xaa is A or G
  MOD_RES (19)..(20)..(21)..(22): Xaa is A or G or is absent

SEQ ID NO: 47031 - protein, 35 aa, Artificial Sequence
  GFR-binding peptide
  MOD_RES (1)..(3)..(34)..(35): Xaa is C or S
XKXSRVIMVTAKKVKPKRGVIKRIQVPRLAQPVXX

SEQ ID NO: 47032 - protein, 40 aa, Artificial Sequence
  GFR-binding peptide
  MOD_RES (1)..(35): Xaa is C or S
  MOD_RES (13)..(14)..(15)..(16)..(17): Xaa is A or G
  MOD_RES (18)..(19)..(20)..(21): Xaa is A or G or is absent
XSRVVMNSMEGIXXXXXXXXXMIQVTINSLKTPAXTPKTV

SEQ ID NO: 47033 - protein, 35 aa, Artificial Sequence; identical to SEQ ID NO: 17515
  GFR-binding peptide
  MOD_RES (1)..(35): Xaa is C or S

SEQ ID NO: 47034 - protein, 35 aa, Artificial Sequence
  GFR-binding peptide
  MOD_RES (1)..(33)..(34): Xaa is C or S
XGEVVMESMEGIVVKDYEDMIQMTINSLETPVXXA

SEQ ID NO: 47035 - protein, 38 aa, Artificial Sequence
  GFR-binding peptide
  MOD_RES (1)..(3)..(34)..(35): Xaa is C or S
XKXSRVIMVTAKKVKPKRGVIKRIQVPRLAQPVXXPAA

SEQ ID NO: 47036 - protein, 39 aa, Artificial Sequence
  GFR-binding peptide
  MOD_RES (2)..(4)..(36)..(37): Xaa is C or S
RXGXGEVVMDVQVEKVVKENEDVKAMKVSRLETPVXXAK

SEQ ID NO: 47037 - protein, 42 aa, Artificial Sequence
  GFR-binding peptide
  MOD_RES (2)..(4)..(41): Xaa is C or S
AXAXELHEELRNSLQELKPKKRVYEYYLVTLPEHHVRSPQXK

SEQ ID NO: 47038 - protein, 34 aa, Artificial Sequence
  GFR-binding peptide
  MOD_RES (34)..(34): Xaa is C or S
  MOD_RES (12)..(13)..(14)..(15)..(16): Xaa is A or G
  MOD_RES (17)..(18)..(19)..(20): Xaa is A or G or is absent
ARVVMNSMEGIXXXXXXXXXMIQVTINSLQTPAX

SEQ ID NO: 47039 - protein, 34 aa, Artificial Sequence
  GFR-binding peptide
  MOD_RES (1)..(3)..(34): Xaa is C or S
XKXSRVIMVTAKKVKPKRGVIKRIQVPRLAQPVX

SEQ ID NO: 47040 - protein, 39 aa, Artificial Sequence
  GFR-binding peptide
  MOD_RES (34)..(35): Xaa is C or S
  MOD_RES (12)..(13)..(14)..(15)..(16): Xaa is A or G
  MOD_RES (17)..(18)..(19)..(20): Xaa is A or G or is absent
ARVVMNVQVEKXXXXXXXXXVKAVKVSRLQTPAXXPKPV

SEQ ID NO: 47041 - protein, 37 aa, Artificial Sequence
  GFR-binding peptide
  MOD_RES (32)..(32): Xaa is C or S
SRVVMNVQVEKIVNSSDDVKAVKVSRLKTPAXTPKTV

SEQ ID NO: 47042 - protein, 34 aa, Artificial Sequence; identical to SEQ ID NO: 10336
  GFR-binding peptide
  MOD_RES (1)..(3)..(34): Xaa is C or S

SEQ ID NO: 47043 - protein, 38 aa, Artificial Sequence; identical to SEQ ID NO: 10337
  GFR-binding peptide
  MOD_RES (2)..(4)..(36)..(37): Xaa is C or S

SEQ ID NO: 47044 - protein, 40 aa, Artificial Sequence; identical to SEQ ID NO: 10338
  GFR-binding peptide
  MOD_RES (2)..(4)..(38)..(39): Xaa is C or S
  MOD_RES (16)..(17)..(18)..(19)..(20): Xaa is A or G
  MOD_RES (21)..(22)..(23)..(24): Xaa is A or G or is absent

SEQ ID NO: 47045 - protein, 40 aa, Artificial Sequence; identical to SEQ ID NO: 17526
  GFR-binding peptide
  MOD_RES (2)..(4)..(38): Xaa is C or S
  MOD_RES (16)..(17)..(18)..(19)..(20): Xaa is A or G
  MOD_RES (21)..(22)..(23)..(24): Xaa is A or G or is absent

SEQ ID NO: 47046 - protein, 38 aa, Artificial Sequence; identical to SEQ ID NO: 10339
  GFR-binding peptide
  MOD_RES (1)..(35): Xaa is C or S
  MOD_RES (13)..(14)..(15)..(16)..(17): Xaa is A or G
  MOD_RES (18)..(19)..(20)..(21): Xaa is A or G or is absent

SEQ ID NO: 47047 - protein, 38 aa, Artificial Sequence; identical to SEQ ID NO: 17527
  GFR-binding peptide
  MOD_RES (2)..(4): Xaa is C or S

SEQ ID NO: 47048 - protein, 37 aa, Artificial Sequence; identical to SEQ ID NO: 17528
  GFR-binding peptide
  MOD_RES (37)..(37): Xaa is C or S

SEQ ID NO: 47049 - protein, 38 aa, Artificial Sequence
  GFR-binding peptide
  MOD_RES (2)..(2): Xaa is C or S
  MOD_RES (15)..(16)..(17)..(18)..(19): Xaa is A or G
  MOD_RES (20)..(21)..(22)..(23): Xaa is A or G or is absent
AXELHEELRNSLQEXXXXXXXXXYYLVTLPEHHVRSPQ

SEQ ID NO: 47050 - protein, 39 aa, Artificial Sequence
  GFR-binding peptide
  MOD_RES (1)..(33)..(34): Xaa is C or S
XARVVMNVQVEKIVNSSDDVKAVKVSRLQTPAXXPKPVT

SEQ ID NO: 47051 - protein, 40 aa, Artificial Sequence
  GFR-binding peptide
  MOD_RES (1)..(34)..(35): Xaa is C or S
  MOD_RES (12)..(13)..(14)..(15)..(16): Xaa is A or G
  MOD_RES (17)..(18)..(19)..(20): Xaa is A or G or is absent
XSKVVMSMEGIXXXXXXXXXMIQITINSLDQPVXXPSASA

SEQ ID NO: 47052 - protein, 32 aa, Artificial Sequence
  GFR-binding peptide
  MOD_RES (1)..(1): Xaa is C or S
XSRVVMNVQVEKIVNSSDDVKAVKVSRLKTPA

SEQ ID NO: 47053 - protein, 45 aa, Artificial Sequence; identical to SEQ ID NO: 17530
  GFR-binding peptide
  MOD_RES (2)..(4)..(41): Xaa is C or S
  MOD_RES (17)..(18)..(19)..(20)..(21): Xaa is A or G
  MOD_RES (22)..(23)..(24)..(25): Xaa is A or G or is absent

SEQ ID NO: 47054 - protein, 43 aa, Artificial Sequence
  GFR-binding peptide
  MOD_RES (2)..(4)..(38)..(39): Xaa is C or S
  MOD_RES (16)..(17)..(18)..(19)..(20): Xaa is A or G
  MOD_RES (21)..(22)..(23)..(24): Xaa is A or G or is absent
HXGXARVVMNVTAKKXXXXXXXXXIKRVQVPRLQTPAXXPKPV

SEQ ID NO: 47055 - protein, 39 aa, Artificial Sequence
  GFR-binding peptide
  MOD_RES (1)..(33)..(34): Xaa is C or S
XGEVVMEVQVEKVVKDYEDVKAMKVSRLETPVXXAKPIS

SEQ ID NO: 47056 - protein, 39 aa, Artificial Sequence
  GFR-binding peptide
  MOD_RES (33)..(33): Xaa is C or S
NHQLFNSLQEHQGQHPKIRYYLMTLPEEETPVXELGEDN

SEQ ID NO: 47057 - protein, 39 aa, Artificial Sequence
  GFR-binding peptide
  MOD_RES (33)..(34): Xaa is C or S
  MOD_RES (11)..(12)..(13)..(14)..(15): Xaa is A or G
  MOD_RES (16)..(17)..(18)..(19): Xaa is A or G or is absent
SRVIMVQVEKXXXXXXXXXVKAIKVSRLAQPVXXPAASA

SEQ ID NO: 47058 - protein, 33 aa, Artificial Sequence; identical to SEQ ID NO: 10343
  GFR-binding peptide
  MOD_RES (12)..(13)..(14)..(15)..(16): Xaa is A or G
  MOD_RES (17)..(18)..(19)..(20): Xaa is A or G or is absent

SEQ ID NO: 47059 - protein, 34 aa, Artificial Sequence
  GFR-binding peptide
  MOD_RES (1)..(1): Xaa is C or S
  MOD_RES (13)..(14)..(15)..(16)..(17): Xaa is A or G
  MOD_RES (18)..(19)..(20)..(21): Xaa is A or G or is absent
XGEVVMEVTAKKXXXXXXXXXIKRMQVPRLETPV

SEQ ID NO: 47060 - protein, 39 aa, Artificial Sequence; identical to SEQ ID NO: 17532
  GFR-binding peptide
  MOD_RES (37)..(37): Xaa is C or S

SEQ ID NO: 47061 - protein, 31 aa, Artificial Sequence
  GFR-binding peptide
ARVVMNVQVEKIVNSSDDVKAVKVSRLQTPA

SEQ ID NO: 47062 - protein, 34 aa, Artificial Sequence
  GFR-binding peptide
  MOD_RES (33)..(34): Xaa is C or S
  MOD_RES (11)..(12)..(13)..(14)..(15): Xaa is A or G
  MOD_RES (16)..(17)..(18)..(19): Xaa is A or G or is absent
RVVMNVQVEKXXXXXXXXXVKAVKVSRLQTPAXX

SEQ ID NO: 47063 - protein, 36 aa, Artificial Sequence
  GFR-binding peptide
  MOD_RES (2)..(34)..(35): Xaa is C or S
GXGEVVMDVQVEKVVKENEDVKAMKVSRLETPVXXA

SEQ ID NO: 47064 - protein, 42 aa, Artificial Sequence; identical to SEQ ID NO: 17533
  GFR-binding peptide
  MOD_RES (2)..(39): Xaa is C or S
  MOD_RES (15)..(16)..(17)..(18)..(19): Xaa is A or G
  MOD_RES (20)..(21)..(22)..(23): Xaa is A or G or is absent

SEQ ID NO: 47065 - protein, 38 aa, Artificial Sequence
  GFR-binding peptide
  MOD_RES (34)..(34): Xaa is C or S
  MOD_RES (12)..(13)..(14)..(15)..(16): Xaa is A or G
  MOD_RES (17)..(18)..(19)..(20): Xaa is A or G or is absent
SRVVMNVQVEKXXXXXXXXXVKAVKVSRLKTPAXTPKT

SEQ ID NO: 47066 - protein, 43 aa, Artificial Sequence
  GFR-binding peptide
  MOD_RES (2)..(4)..(38)..(39): Xaa is C or S
  MOD_RES (16)..(17)..(18)..(19)..(20): Xaa is A or G
  MOD_RES (21)..(22)..(23)..(24): Xaa is A or G or is absent
HXGXARVVMNVQVEKXXXXXXXXXVKAVKVSRLQTPAXXPKPV

SEQ ID NO: 47067 - protein, 43 aa, Artificial Sequence
  GFR-binding peptide
  MOD_RES (1)..(3)..(37)..(38): Xaa is C or S
  MOD_RES (15)..(16)..(17)..(18)..(19): Xaa is A or G
  MOD_RES (20)..(21)..(22)..(23): Xaa is A or G or is absent
XGXGEVVMESMEGIXXXXXXXXXMIQMTINSLETPVXXAKPIS

SEQ ID NO: 47068 - protein, 37 aa, Artificial Sequence; identical to SEQ ID NO: 10347
  GFR-binding peptide
  MOD_RES (2)..(4)..(35)..(36): Xaa is C or S

SEQ ID NO: 47069 - protein, 37 aa, Artificial Sequence; identical to SEQ ID NO: 17538
  GFR-binding peptide
  MOD_RES (1)..(1): Xaa is C or S

SEQ ID NO: 47070 - protein, 43 aa, Artificial Sequence
  GFR-binding peptide
  MOD_RES (1)..(3)..(37)..(38): Xaa is C or S
  MOD_RES (15)..(16)..(17)..(18)..(19): Xaa is A or G
  MOD_RES (20)..(21)..(22)..(23): Xaa is A or G or is absent
XGXGEVVMEVQVEKXXXXXXXXXVKAMKVSRLETPVXXAKPIS

SEQ ID NO: 47071 - protein, 37 aa, Artificial Sequence
  GFR-binding peptide
  MOD_RES (2)..(4): Xaa is C or S
  MOD_RES (16)..(17)..(18)..(19)..(20): Xaa is A or G
  MOD_RES (21)..(22)..(23)..(24): Xaa is A or G or is absent
RXEXKNHQLFNSLQEXXXXXXXXXYYVMPLPEEETPV

SEQ ID NO: 47072 - protein, 35 aa, Artificial Sequence
  GFR-binding peptide
  MOD_RES (33)..(34): Xaa is C or S
  MOD_RES (11)..(12)..(13)..(14)..(15): Xaa is A or G
  MOD_RES (16)..(17)..(18)..(19): Xaa is A or G or is absent
RVVMNSMEGIXXXXXXXXXMIQVTINSLQTPAXXP

SEQ ID NO: 47073 - protein, 34 aa, Artificial Sequence
  GFR-binding peptide
  MOD_RES (33)..(33): Xaa is C or S
  MOD_RES (11)..(12)..(13)..(14)..(15): Xaa is A or G
  MOD_RES (16)..(17)..(18)..(19): Xaa is A or G or is absent
RVVMNVTAKKXXXXXXXXXIKRVQVPRLKTPAXT

SEQ ID NO: 47074 - protein, 40 aa, Artificial Sequence
  GFR-binding peptide
  MOD_RES (2)..(4)..(35)..(36): Xaa is C or S
SXKXSKVIMVQVEKIKPTKGIVKAIKVSRLDQSVXXPSAS

SEQ ID NO: 47075 - protein, 41 aa, Artificial Sequence
  GFR-binding peptide
  MOD_RES (2)..(4)..(37)..(38): Xaa is C or S
  MOD_RES (15)..(16)..(17)..(18)..(19): Xaa is A or G
  MOD_RES (20)..(21)..(22)..(23): Xaa is A or G or is absent
SXKXSKVVMSMEGIXXXXXXXXXMIQITINSLDQPVXXPSA

SEQ ID NO: 47076 - protein, 36 aa, Artificial Sequence
  GFR-binding peptide
  MOD_RES (31)..(32): Xaa is C or S
RVVMNVTAKKIVNSSDDIKRVQVPRLQTPAXXPKPV

SEQ ID NO: 47077 - protein, 32 aa, Artificial Sequence
  GFR-binding peptide
  MOD_RES (31)..(32): Xaa is C or S
EVVMDSMEGIVVKENEDMIQMTINSLETPVXX

SEQ ID NO: 47078 - protein, 37 aa, Artificial Sequence; identical to SEQ ID NO: 17540
  GFR-binding peptide
  MOD_RES (1)..(3)..(37): Xaa is C or S

SEQ ID NO: 47079 - protein, 41 aa, Artificial Sequence; identical to SEQ ID NO: 10351
  GFR-binding peptide
  MOD_RES (2)..(4)..(38)..(39): Xaa is C or S
  MOD_RES (16)..(17)..(18)..(19)..(20): Xaa is A or G
  MOD_RES (21)..(22)..(23)..(24): Xaa is A or G or is absent

SEQ ID NO: 47080 - protein, 36 aa, Artificial Sequence
  GFR-binding peptide
  MOD_RES (33)..(33): Xaa is C or S
  MOD_RES (11)..(12)..(13)..(14)..(15): Xaa is A or G
  MOD_RES (16)..(17)..(18)..(19): Xaa is A or G or is absent
NHQLFNSLQEXXXXXXXXXYYLMTLPEEETPVXELG

SEQ ID NO: 47081 - protein, 34 aa, Artificial Sequence; identical to SEQ ID NO: 17541
  GFR-binding peptide
  MOD_RES (12)..(13)..(14)..(15)..(16): Xaa is A or G
  MOD_RES (17)..(18)..(19)..(20): Xaa is A or G or is absent

SEQ ID NO: 47082 - protein, 43 aa, Artificial Sequence
  GFR-binding peptide
  MOD_RES (2)..(39): Xaa is C or S
AXELHEELRNSLQELKPKKRVYEYYLVTLPEHHVRSPQXKVSS

SEQ ID NO: 47083 - protein, 32 aa, Artificial Sequence; identical to SEQ ID NO: 10354
  GFR-binding peptide
  MOD_RES (31)..(32): Xaa is C or S

SEQ ID NO: 47084 - protein, 37 aa, Artificial Sequence
  GFR-binding peptide
  MOD_RES (2)..(4)..(37): Xaa is C or S
  MOD_RES (15)..(16)..(17)..(18)..(19): Xaa is A or G
  MOD_RES (20)..(21)..(22)..(23): Xaa is A or G or is absent
SXKXSKVVMSMEGIXXXXXXXXXMIQITINSLDQPVX

SEQ ID NO: 47085 - protein, 41 aa, Artificial Sequence
  GFR-binding peptide
  MOD_RES (1)..(3)..(40): Xaa is C or S
XAXELHEELRNSLQELKPKKRVYEYYVVPLPEHHVRSPQXK

SEQ ID NO: 47086 - protein, 36 aa, Artificial Sequence
  GFR-binding peptide
  MOD_RES (32)..(33): Xaa is C or S
SRVVMNVTAKKIVNSSDDIKRVQVPRLKTPAXXPKP

SEQ ID NO: 47087 - protein, 33 aa, Artificial Sequence
  GFR-binding peptide
  MOD_RES (12)..(13)..(14)..(15)..(16): Xaa is A or G
  MOD_RES (17)..(18)..(19)..(20): Xaa is A or G or is absent
ARVVMNSMEGIXXXXXXXXXMIQVTINSLQTPA

SEQ ID NO: 47088 - protein, 36 aa, Artificial Sequence
  GFR-binding peptide
  MOD_RES (1)..(32)..(33): Xaa is C or S
XSKVIMVTAKKIKPTKGIIKRIQVPRLDQSVXXPSA

SEQ ID NO: 47089 - protein, 37 aa, Artificial Sequence; identical to SEQ ID NO: 10358
  GFR-binding peptide
  MOD_RES (1)..(35)..(36): Xaa is C or S
  MOD_RES (13)..(14)..(15)..(16)..(17): Xaa is A or G
  MOD_RES (18)..(19)..(20)..(21): Xaa is A or G or is absent

SEQ ID NO: 47090 - protein, 41 aa, Artificial Sequence
  GFR-binding peptide
  MOD_RES (1)..(35): Xaa is C or S
  MOD_RES (13)..(14)..(15)..(16)..(17): Xaa is A or G
  MOD_RES (18)..(19)..(20)..(21): Xaa is A or G or is absent
XKNHQLFNSLQEXXXXXXXXXYYLMTLPEEETPVXELGEDN

SEQ ID NO: 47091 - protein, 34 aa, Artificial Sequence; identical to SEQ ID NO: 10359
  GFR-binding peptide
  MOD_RES (33)..(33): Xaa is C or S
  MOD_RES (11)..(12)..(13)..(14)..(15): Xaa is A or G
  MOD_RES (16)..(17)..(18)..(19): Xaa is A or G or is absent

SEQ ID NO: 47092 - protein, 36 aa, Artificial Sequence
  GFR-binding peptide
  MOD_RES (2)..(36): Xaa is C or S
  MOD_RES (14)..(15)..(16)..(17)..(18): Xaa is A or G
  MOD_RES (19)..(20)..(21)..(22): Xaa is A or G or is absent
GXSRVVMNSMEGIXXXXXXXXXMIQVTINSLKTPAX

SEQ ID NO: 47093 - protein, 42 aa, Artificial Sequence
  GFR-binding peptide
  MOD_RES (1)..(38): Xaa is C or S
XELHEELRNSLQELKPKKRVYEYYLVTLPEHHVRSPQXKVSS

SEQ ID NO: 47094 - protein, 42 aa, Artificial Sequence; identical to SEQ ID NO: 17549
  GFR-binding peptide
  MOD_RES (2)..(39): Xaa is C or S
  MOD_RES (15)..(16)..(17)..(18)..(19): Xaa is A or G
  MOD_RES (20)..(21)..(22)..(23): Xaa is A or G or is absent

SEQ ID NO: 47095 - protein, 41 aa, Artificial Sequence; identical to SEQ ID NO: 17550
  GFR-binding peptide
  MOD_RES (37)..(37): Xaa is C or S
  MOD_RES (13)..(14)..(15)..(16)..(17): Xaa is A or G
  MOD_RES (18)..(19)..(20)..(21): Xaa is A or G or is absent

SEQ ID NO: 47096 - protein, 36 aa, Artificial Sequence; identical to SEQ ID NO: 10365
  GFR-binding peptide
  MOD_RES (1)..(35)..(36): Xaa is C or S
  MOD_RES (13)..(14)..(15)..(16)..(17): Xaa is A or G
  MOD_RES (18)..(19)..(20)..(21): Xaa is A or G or is absent

SEQ ID NO: 47097 - protein, 44 aa, Artificial Sequence; identical to SEQ ID NO: 10366
  GFR-binding peptide
  MOD_RES (2)..(4)..(38)..(39): Xaa is C or S
  MOD_RES (16)..(17)..(18)..(19)..(20): Xaa is A or G
  MOD_RES (21)..(22)..(23)..(24): Xaa is A or G or is absent

SEQ ID NO: 47098 - protein, 43 aa, Artificial Sequence; identical to SEQ ID NO: 17553
  GFR-binding peptide
  MOD_RES (2)..(39): Xaa is C or S

SEQ ID NO: 47099 - protein, 41 aa, Artificial Sequence; identical to SEQ ID NO: 10368
  GFR-binding peptide
  MOD_RES (2)..(36)..(37): Xaa is C or S
  MOD_RES (14)..(15)..(16)..(17)..(18): Xaa is A or G
  MOD_RES (19)..(20)..(21)..(22): Xaa is A or G or is absent

SEQ ID NO: 47100 - protein, 37 aa, Artificial Sequence
  GFR-binding peptide
  MOD_RES (2)..(36)..(37): Xaa is C or S
  MOD_RES (14)..(15)..(16)..(17)..(18): Xaa is A or G
  MOD_RES (19)..(20)..(21)..(22): Xaa is A or G or is absent
GXARVVMNVQVEKXXXXXXXXXVKAVKVSRLQTPAXX

SEQ ID NO: 47101 - protein, 32 aa, Artificial Sequence; identical to SEQ ID NO: 36456
  GFR-binding peptide
  MOD_RES (1)..(32): Xaa is C or S

SEQ ID NO: 47102 - protein, 34 aa, Artificial Sequence
  GFR-binding peptide
  MOD_RES (31)..(32): Xaa is C or S
RVVMNVTAKKIVNSSDDIKRVQVPRLQTPAXXPK

SEQ ID NO: 47103 - protein, 35 aa, Artificial Sequence
  GFR-binding peptide
  MOD_RES (33)..(33): Xaa is C or S
  MOD_RES (11)..(12)..(13)..(14)..(15): Xaa is A or G
  MOD_RES (16)..(17)..(18)..(19): Xaa is A or G or is absent
RVVMNVTAKKXXXXXXXXXIKRVQVPRLKTPAXTP

SEQ ID NO: 47104 - protein, 39 aa, Artificial Sequence
  GFR-binding peptide
  MOD_RES (33)..(34): Xaa is C or S
  MOD_RES (11)..(12)..(13)..(14)..(15): Xaa is A or G
  MOD_RES (16)..(17)..(18)..(19): Xaa is A or G or is absent
EVVMESMEGIXXXXXXXXXMIQMTINSLETPVXXAKPIS

SEQ ID NO: 47105 - protein, 35 aa, Artificial Sequence
  GFR-binding peptide
  MOD_RES (32)..(33): Xaa is C or S
SRVVMNVTAKKIVNSSDDIKRVQVPRLKTPAXXPK

SEQ ID NO: 47106 - protein, 33 aa, Artificial Sequence
  GFR-binding peptide
  MOD_RES (31)..(32): Xaa is C or S
RVVMNVTAKKIVNSSDDIKRVQVPRLKTPAXXP

SEQ ID NO: 47107 - protein, 38 aa, Artificial Sequence; identical to SEQ ID NO: 17556
  GFR-binding peptide
  MOD_RES (2)..(2): Xaa is C or S

SEQ ID NO: 47108 - protein, 41 aa, Artificial Sequence; identical to SEQ ID NO: 17558
  GFR-binding peptide
  MOD_RES (37)..(37): Xaa is C or S

SEQ ID NO: 47109 - protein, 35 aa, Artificial Sequence
  GFR-binding peptide
  MOD_RES (1)..(1): Xaa is C or S
XELHEELRNSLQELKPKKRVYEYYLVTLPEHHVRS

SEQ ID NO: 47110 - protein, 33 aa, Artificial Sequence
  GFR-binding peptide
  MOD_RES (1)..(1): Xaa is C or S
  MOD_RES (12)..(13)..(14)..(15)..(16): Xaa is A or G
  MOD_RES (17)..(18)..(19)..(20): Xaa is A or G or is absent
XSRVIMSMEGIXXXXXXXXXMIQITINSLAQPV

SEQ ID NO: 47111 - protein, 38 aa, Artificial Sequence; identical to SEQ ID NO: 10377
  GFR-binding peptide
  MOD_RES (1)..(3)..(35): Xaa is C or S

SEQ ID NO: 47112 - protein, 36 aa, Artificial Sequence; identical to SEQ ID NO: 17565
  GFR-binding peptide
  MOD_RES (2)..(2): Xaa is C or S
  MOD_RES (15)..(16)..(17)..(18)..(19): Xaa is A or G
  MOD_RES (20)..(21)..(22)..(23): Xaa is A or G or is absent

SEQ ID NO: 47113 - protein, 38 aa, Artificial Sequence
  GFR-binding peptide
  MOD_RES (1)..(38): Xaa is C or S
  MOD_RES (14)..(15)..(16)..(17)..(18): Xaa is A or G
  MOD_RES (19)..(20)..(21)..(22): Xaa is A or G or is absent
XELHEELRNSLQEXXXXXXXXXYYVVPLPEHHVRSPQX

SEQ ID NO: 47114 - protein, 38 aa, Artificial Sequence; identical to SEQ ID NO: 10381
  GFR-binding peptide
  MOD_RES (1)..(3)..(35)..(36): Xaa is C or S

SEQ ID NO: 47115 - protein, 34 aa, Artificial Sequence
  GFR-binding peptide
  MOD_RES (1)..(1): Xaa is C or S
  MOD_RES (13)..(14)..(15)..(16)..(17): Xaa is A or G
  MOD_RES (18)..(19)..(20)..(21): Xaa is A or G or is absent
XSRVVMNVTAKKXXXXXXXXXIKRVQVPRLKTPA

SEQ ID NO: 47116 - protein, 43 aa, Artificial Sequence
  GFR-binding peptide
  MOD_RES (2)..(4)..(37)..(38): Xaa is C or S
  MOD_RES (15)..(16)..(17)..(18)..(19): Xaa is A or G
  MOD_RES (20)..(21)..(22)..(23): Xaa is A or G or is absent
SXKXSRVIMVQVEKXXXXXXXXXVKAIKVSRLAQPVXXPAASA

SEQ ID NO: 47117 - protein, 35 aa, Artificial Sequence
  GFR-binding peptide
  MOD_RES (34)..(35): Xaa is C or S
  MOD_RES (12)..(13)..(14)..(15)..(16): Xaa is A or G
  MOD_RES (17)..(18)..(19)..(20): Xaa is A or G or is absent
GEVVMESMEGIXXXXXXXXXMIQMTINSLETPVXX

SEQ ID NO: 47118 - protein, 37 aa, Artificial Sequence; identical to SEQ ID NO: 17569
  GFR-binding peptide
  MOD_RES (1)..(1): Xaa is C or S

SEQ ID NO: 47119 - protein, 36 aa, Artificial Sequence
  GFR-binding peptide
  MOD_RES (1)..(3)..(35)..(36): Xaa is C or S
XGXARVVMNVQVEKIVNSSDDVKAVKVSRLQTPAXX

SEQ ID NO: 47120 - protein, 31 aa, Artificial Sequence
  GFR-binding peptide
  MOD_RES (31)..(31): Xaa is C or S
RVVMNVTAKKIVNSSDDIKRVQVPRLKTPAX

SEQ ID NO: 47121 - protein, 33 aa, Artificial Sequence
  GFR-binding peptide
  MOD_RES (1)..(3): Xaa is C or S
XKXSRVIMVQVEKVKPKRGVVKAIKVSRLAQPV

SEQ ID NO: 47122 - protein, 39 aa, Artificial Sequence
  GFR-binding peptide
  MOD_RES (34)..(35): Xaa is C or S
  MOD_RES (12)..(13)..(14)..(15)..(16): Xaa is A or G
  MOD_RES (17)..(18)..(19)..(20): Xaa is A or G or is absent
GEVVMDVTAKKXXXXXXXXXIKRMQVPRLETPVXXAKPI

SEQ ID NO: 47123 - protein, 37 aa, Artificial Sequence
  GFR-binding peptide
  MOD_RES (31)..(32): Xaa is C or S
EVVMDVTAKKVVKENEDIKRMQVPRLETPVXXAKPIK

SEQ ID NO: 47124 - protein, 37 aa, Artificial Sequence; identical to SEQ ID NO: 17574
  GFR-binding peptide
  MOD_RES (35)..(35): Xaa is C or S
  MOD_RES (11)..(12)..(13)..(14)..(15): Xaa is A or G
  MOD_RES (16)..(17)..(18)..(19): Xaa is A or G or is absent

SEQ ID NO: 47125 - protein, 39 aa, Artificial Sequence
  GFR-binding peptide
  MOD_RES (2)..(4)..(36)..(37): Xaa is C or S
HXGXARVVMNVTAKKIVNSSDDIKRVQVPRLQTPAXXPK

SEQ ID NO: 47126 - protein, 37 aa, Artificial Sequence
  GFR-binding peptide
  MOD_RES (31)..(32): Xaa is C or S
RVVMNSMEGIIVNSSDDMIQVTINSLKTPAXXPKPVY

SEQ ID NO: 47127 - protein, 31 aa, Artificial Sequence
  GFR-binding peptide
  MOD_RES (1)..(1): Xaa is C or S
XSKVIMVQVEKIKPTKGIVKAIKVSRLDQSV

SEQ ID NO: 47128 - protein, 36 aa, Artificial Sequence; identical to SEQ ID NO: 17575
  GFR-binding peptide
  MOD_RES (34)..(34): Xaa is C or S
  MOD_RES (12)..(13)..(14)..(15)..(16): Xaa is A or G
  MOD_RES (17)..(18)..(19)..(20): Xaa is A or G or is absent

SEQ ID NO: 47129 - protein, 37 aa, Artificial Sequence
  GFR-binding peptide
  MOD_RES (1)..(32)..(33): Xaa is C or S
XSKVIMVQVEKIKPTKGIVKAIKVSRLDQSVXXPSAS

SEQ ID NO: 47130 - protein, 38 aa, Artificial Sequence
  GFR-binding peptide
  MOD_RES (1)..(33): Xaa is C or S
XSRVVMNVTAKKIVNSSDDIKRVQVPRLKTPAXTPKTV

SEQ ID NO: 47131 - protein, 41 aa, Artificial Sequence
  GFR-binding peptide
  MOD_RES (2)..(4)..(35)..(36): Xaa is C or S
SXKXSKVIMVTAKKIKPTKGIIKRIQVPRLDQSVXXPSASA

SEQ ID NO: 47132 - protein, 37 aa, Artificial Sequence
  GFR-binding peptide
  MOD_RES (1)..(3)..(35)..(36): Xaa is C or S
XGXSRVVMNVQVEKIVNSSDDVKAVKVSRLKTPAXXP

SEQ ID NO: 47133 - protein, 38 aa, Artificial Sequence; identical to SEQ ID NO: 10390
  GFR-binding peptide
  MOD_RES (1)..(32)..(33): Xaa is C or S

SEQ ID NO: 47134 - protein, 44 aa, Artificial Sequence; identical to SEQ ID NO: 17578
  GFR-binding peptide
  MOD_RES (1)..(3)..(40): Xaa is C or S
  MOD_RES (16)..(17)..(18)..(19)..(20): Xaa is A or G
  MOD_RES (21)..(22)..(23)..(24): Xaa is A or G or is absent

SEQ ID NO: 47135 - protein, 33 aa, Artificial Sequence
  GFR-binding peptide
  MOD_RES (1)..(3): Xaa is C or S
XKXSKVVMSMEGIVKPTRGVMIQITINSLDQPV

SEQ ID NO: 47136 - protein, 33 aa, Artificial Sequence; identical to SEQ ID NO: 10393
  GFR-binding peptide
  MOD_RES (2)..(2): Xaa is C or S

SEQ ID NO: 47137 - protein, 35 aa, Artificial Sequence
  GFR-binding peptide
  MOD_RES (35)..(35): Xaa is C or S
HEELRNSLQELKPKKRVYEYYLVTLPEHHVRSPQX

SEQ ID NO: 47138 - protein, 43 aa, Artificial Sequence
  GFR-binding peptide
  MOD_RES (1)..(3)..(40): Xaa is C or S
  MOD_RES (16)..(17)..(18)..(19)..(20): Xaa is A or G
  MOD_RES (21)..(22)..(23)..(24): Xaa is A or G or is absent
XAXELHEELRNSLQEXXXXXXXXXYYLVTLPEHHVRSPQXKVS

SEQ ID NO: 47139 - protein, 38 aa, Artificial Sequence; identical to SEQ ID NO: 17581
  GFR-binding peptide
  MOD_RES (2)..(2): Xaa is C or S
  MOD_RES (15)..(16)..(17)..(18)..(19): Xaa is A or G
  MOD_RES (20)..(21)..(22)..(23): Xaa is A or G or is absent

SEQ ID NO: 47140 - protein, 37 aa, Artificial Sequence
  GFR-binding peptide
  MOD_RES (33)..(33): Xaa is C or S
  MOD_RES (11)..(12)..(13)..(14)..(15): Xaa is A or G
  MOD_RES (16)..(17)..(18)..(19): Xaa is A or G or is absent
RVVMNSMEGIXXXXXXXXXMIQVTINSLKTPAXTPKT

SEQ ID NO: 47141 - protein, 39 aa, Artificial Sequence; identical to SEQ ID NO: 36495
  GFR-binding peptide
  MOD_RES (1)..(3)..(34)..(35): Xaa is C or S

SEQ ID NO: 47142 - protein, 37 aa, Artificial Sequence
  GFR-binding peptide
  MOD_RES (36)..(36): Xaa is C or S
  MOD_RES (12)..(13)..(14)..(15)..(16): Xaa is A or G
  MOD_RES (17)..(18)..(19)..(20): Xaa is A or G or is absent
LHEELRNSLQEXXXXXXXXXYYLVTLPEHHVRSPQXK

SEQ ID NO: 47143 - protein, 39 aa, Artificial Sequence; identical to SEQ ID NO: 10395
  GFR-binding peptide
  MOD_RES (2)..(4)..(38): Xaa is C or S
  MOD_RES (16)..(17)..(18)..(19)..(20): Xaa is A or G
  MOD_RES (21)..(22)..(23)..(24): Xaa is A or G or is absent

SEQ ID NO: 47144 - protein, 38 aa, Artificial Sequence; identical to SEQ ID NO: 10396
  GFR-binding peptide
  MOD_RES (1)..(3)..(37)..(38): Xaa is C or S
  MOD_RES (15)..(16)..(17)..(18)..(19): Xaa is A or G
  MOD_RES (20)..(21)..(22)..(23): Xaa is A or G or is absent

SEQ ID NO: 47145 - protein, 35 aa, Artificial Sequence
  GFR-binding peptide
  MOD_RES (2)..(35): Xaa is C or S
  MOD_RES (13)..(14)..(15)..(16)..(17): Xaa is A or G
  MOD_RES (18)..(19)..(20)..(21): Xaa is A or G or is absent
KXSRVIMVTAKKXXXXXXXXXIKRIQVPRLAQPVX

SEQ ID NO: 47146 - protein, 37 aa, Artificial Sequence; identical to SEQ ID NO: 17582
  GFR-binding peptide
  MOD_RES (36)..(36): Xaa is C or S
  MOD_RES (12)..(13)..(14)..(15)..(16): Xaa is A or G
  MOD_RES (17)..(18)..(19)..(20): Xaa is A or G or is absent

SEQ ID NO: 47147 - protein, 36 aa, Artificial Sequence; identical to SEQ ID NO: 10397
  GFR-binding peptide
  MOD_RES (1)..(3)..(34)..(35): Xaa is C or S

SEQ ID NO: 47148 - protein, 38 aa, Artificial Sequence; identical to SEQ ID NO: 17584
  GFR-binding peptide
  MOD_RES (37)..(37): Xaa is C or S
  MOD_RES (13)..(14)..(15)..(16)..(17): Xaa is A or G
  MOD_RES (18)..(19)..(20)..(21): Xaa is A or G or is absent

SEQ ID NO: 47149 - protein, 35 aa, Artificial Sequence; identical to SEQ ID NO: 36500
  GFR-binding peptide
  MOD_RES (1)..(3): Xaa is C or S
  MOD_RES (14)..(15)..(16)..(17)..(18): Xaa is A or G
  MOD_RES (19)..(20)..(21)..(22): Xaa is A or G or is absent

SEQ ID NO: 47150 - protein, 38 aa, Artificial Sequence
  GFR-binding peptide
  MOD_RES (2)..(36): Xaa is C or S
  MOD_RES (14)..(15)..(16)..(17)..(18): Xaa is A or G
  MOD_RES (19)..(20)..(21)..(22): Xaa is A or G or is absent
GXSRVVMNVQVEKXXXXXXXXXVKAVKVSRLKTPAXTP

SEQ ID NO: 47151 - protein, 40 aa, Artificial Sequence
  GFR-binding peptide
  MOD_RES (2)..(4)..(38)..(39): Xaa is C or S
  MOD_RES (16)..(17)..(18)..(19)..(20): Xaa is A or G
  MOD_RES (21)..(22)..(23)..(24): Xaa is A or G or is absent
HXGXSRVVMNSMEGIXXXXXXXXXMIQVTINSLKTPAXXP

SEQ ID NO: 47152 - protein, 31 aa, Artificial Sequence
  GFR-binding peptide
  MOD_RES (31)..(31): Xaa is C or S
SRVIMSMEGIVKPKRGVMIQITINSLAQPVX

SEQ ID NO: 47153 - protein, 38 aa, Artificial Sequence; identical to SEQ ID NO: 10399
  GFR-binding peptide
  MOD_RES (1)..(3)..(35)..(36): Xaa is C or S

SEQ ID NO: 47154 - protein, 43 aa, Artificial Sequence
  GFR-binding peptide
  MOD_RES (2)..(4)..(38)..(39): Xaa is C or S
  MOD_RES (16)..(17)..(18)..(19)..(20): Xaa is A or G
  MOD_RES (21)..(22)..(23)..(24): Xaa is A or G or is absent
HXGXSRVVMNSMEGIXXXXXXXXXMIQVTINSLKTPAXXPKPV

SEQ ID NO: 47155 - protein, 40 aa, Artificial Sequence
  GFR-binding peptide
  MOD_RES (2)..(4)..(37)..(38): Xaa is C or S
  MOD_RES (15)..(16)..(17)..(18)..(19): Xaa is A or G
  MOD_RES (20)..(21)..(22)..(23): Xaa is A or G or is absent
SXKXSKVVMSMEGIXXXXXXXXXMIQITINSLDQPVXXPS

SEQ ID NO: 47156 - protein, 43 aa, Artificial Sequence; identical to SEQ ID NO: 17586
  GFR-binding peptide
  MOD_RES (1)..(3)..(37): Xaa is C or S

SEQ ID NO: 47157 - protein, 35 aa, Artificial Sequence; identical to SEQ ID NO: 10401
  GFR-binding peptide
  MOD_RES (31)..(32): Xaa is C or S

SEQ ID NO: 47158 - protein, 34 aa, Artificial Sequence; identical to SEQ ID NO: 10402
  GFR-binding peptide
  MOD_RES (2)..(34): Xaa is C or S

SEQ ID NO: 47159 - protein, 35 aa, Artificial Sequence; identical to SEQ ID NO: 17591
  GFR-binding peptide
  MOD_RES (1)..(1): Xaa is C or S
  MOD_RES (14)..(15)..(16)..(17)..(18): Xaa is A or G
  MOD_RES (19)..(20)..(21)..(22): Xaa is A or G or is absent

SEQ ID NO: 47160 - protein, 38 aa, Artificial Sequence
  GFR-binding peptide
  MOD_RES (1)..(34)..(35): Xaa is C or S
  MOD_RES (12)..(13)..(14)..(15)..(16): Xaa is A or G
  MOD_RES (17)..(18)..(19)..(20): Xaa is A or G or is absent
XSKVIMVQVEKXXXXXXXXXVKAIKVSRLDQSVXXPSA

SEQ ID NO: 47161 - protein, 41 aa, Artificial Sequence; identical to SEQ ID NO: 17592
  GFR-binding peptide
  MOD_RES (1)..(38): Xaa is C or S
  MOD_RES (14)..(15)..(16)..(17)..(18): Xaa is A or G
  MOD_RES (19)..(20)..(21)..(22): Xaa is A or G or is absent

SEQ ID NO: 47162 - protein, 38 aa, Artificial Sequence; identical to SEQ ID NO: 10406
  GFR-binding peptide
  MOD_RES (1)..(35)..(36): Xaa is C or S
  MOD_RES (13)..(14)..(15)..(16)..(17): Xaa is A or G
  MOD_RES (18)..(19)..(20)..(21): Xaa is A or G or is absent

SEQ ID NO: 47163 - protein, 33 aa, Artificial Sequence
  GFR-binding peptide
  MOD_RES (1)..(32)..(33): Xaa is C or S
XSKVVMVTAKKVKPTRGVIKRIQVPRLDQPVXX

SEQ ID NO: 47164 - protein, 40 aa, Artificial Sequence; identical to SEQ ID NO: 36514
  GFR-binding peptide
  MOD_RES (2)..(35)..(36): Xaa is C or S
  MOD_RES (13)..(14)..(15)..(16)..(17): Xaa is A or G
  MOD_RES (18)..(19)..(20)..(21): Xaa is A or G or is absent

SEQ ID NO: 47165 - protein, 32 aa, Artificial Sequence
  GFR-binding peptide
  MOD_RES (2)..(2): Xaa is C or S
KXSKVVMVTAKKVKPTRGVIKRIQVPRLDQPV

SEQ ID NO: 47166 - protein, 39 aa, Artificial Sequence
  GFR-binding peptide
  MOD_RES (1)..(3)..(37)..(38): Xaa is C or S
  MOD_RES (15)..(16)..(17)..(18)..(19): Xaa is A or G
  MOD_RES (20)..(21)..(22)..(23): Xaa is A or G or is absent
XGXGEVVMDVQVEKXXXXXXXXXVKAMKVSRLETPVXXA

SEQ ID NO: 47167 - protein, 39 aa, Artificial Sequence; identical to SEQ ID NO: 17599
  GFR-binding peptide
  MOD_RES (1)..(38): Xaa is C or S

SEQ ID NO: 47168 - protein, 39 aa, Artificial Sequence
  GFR-binding peptide
  MOD_RES (37)..(37): Xaa is C or S
ELHEELRNSLQELKPKKRVYEYYLVTLPEHHVRSPQXKV

SEQ ID NO: 47169 - protein, 40 aa, Artificial Sequence
  GFR-binding peptide
  MOD_RES (2)..(34)..(35): Xaa is C or S
GXARVVMNVTAKKIVNSSDDIKRVQVPRLQTPAXXPKPVT

SEQ ID NO: 47170 - protein, 37 aa, Artificial Sequence
  GFR-binding peptide
  MOD_RES (1)..(3)..(34)..(35): Xaa is C or S
XKXSRVIMVQVEKVKPKRGVVKAIKVSRLAQPVXXPA

SEQ ID NO: 47171 - protein, 43 aa, Artificial Sequence; identical to SEQ ID NO: 17605
  GFR-binding peptide
  MOD_RES (1)..(3)..(37): Xaa is C or S

SEQ ID NO: 47172 - protein, 38 aa, Artificial Sequence; identical to SEQ ID NO: 17606
  GFR-binding peptide
  MOD_RES (35)..(35): Xaa is C or S

SEQ ID NO: 47173 - protein, 37 aa, Artificial Sequence
  GFR-binding peptide
  MOD_RES (1)..(33): Xaa is C or S
XSRVVMNSMEGIIVNSSDDMIQVTINSLKTPAXTPKT

SEQ ID NO: 47174 - protein, 33 aa, Artificial Sequence; identical to SEQ ID NO: 10419
  GFR-binding peptide
  MOD_RES (1)..(33): Xaa is C or S

SEQ ID NO: 47175 - protein, 30 aa, Artificial Sequence
  GFR-binding peptide
EVVMDVTAKKVVKENEDIKRMQVPRLETPV

SEQ ID NO: 47176 - protein, 40 aa, Artificial Sequence; identical to SEQ ID NO: 10421
  GFR-binding peptide
  MOD_RES (2)..(4)..(37)..(38): Xaa is C or S
  MOD_RES (15)..(16)..(17)..(18)..(19): Xaa is A or G
  MOD_RES (20)..(21)..(22)..(23): Xaa is A or G or is absent

SEQ ID NO: 47177 - protein, 38 aa, Artificial Sequence; identical to SEQ ID NO: 10422
  GFR-binding peptide
  MOD_RES (33)..(33): Xaa is C or S
  MOD_RES (11)..(12)..(13)..(14)..(15): Xaa is A or G
  MOD_RES (16)..(17)..(18)..(19): Xaa is A or G or is absent

SEQ ID NO: 47178 - protein, 38 aa, Artificial Sequence
  GFR-binding peptide
  MOD_RES (2)..(4): Xaa is C or S
AXAXELHEELRNSLQELKPKKRVYEYYVVPLPEHHVRS

SEQ ID NO: 47179 - protein, 39 aa, Artificial Sequence; identical to SEQ ID NO: 10423
  GFR-binding peptide
  MOD_RES (1)..(33)..(34): Xaa is C or S

SEQ ID NO: 47180 - protein, 42 aa, Artificial Sequence
  GFR-binding peptide
  MOD_RES (1)..(38): Xaa is C or S
  MOD_RES (14)..(15)..(16)..(17)..(18): Xaa is A or G
  MOD_RES (19)..(20)..(21)..(22): Xaa is A or G or is absent
XALHDELTNSLQEXXXXXXXXXYYLVTLPELQVQTPRXQVNR

SEQ ID NO: 47181 - protein, 36 aa, Artificial Sequence; identical to SEQ ID NO: 10424
  GFR-binding peptide
  MOD_RES (32)..(33): Xaa is C or S

SEQ ID NO: 47182 - protein, 42 aa, Artificial Sequence; identical to SEQ ID NO: 10425
  GFR-binding peptide
  MOD_RES (2)..(4)..(38)..(39): Xaa is C or S
  MOD_RES (16)..(17)..(18)..(19)..(20): Xaa is A or G
  MOD_RES (21)..(22)..(23)..(24): Xaa is A or G or is absent

SEQ ID NO: 47183 - protein, 40 aa, Artificial Sequence
  GFR-binding peptide
  MOD_RES (2)..(4)..(37)..(38): Xaa is C or S
  MOD_RES (15)..(16)..(17)..(18)..(19): Xaa is A or G
  MOD_RES (20)..(21)..(22)..(23): Xaa is A or G or is absent
SXKXSKVVMVTAKKXXXXXXXXXIKRIQVPRLDQPVXXPS

SEQ ID NO: 47184 - protein, 34 aa, Artificial Sequence; identical to SEQ ID NO: 10426
  GFR-binding peptide
  MOD_RES (2)..(33)..(34): Xaa is C or S

SEQ ID NO: 47185 - protein, 34 aa, Artificial Sequence
  GFR-binding peptide
  MOD_RES (1)..(33)..(34): Xaa is C or S
XSRVVMNSMEGIIVNSSDDMIQVTINSLKTPAXX

SEQ ID NO: 47186 - protein, 42 aa, Artificial Sequence; identical to SEQ ID NO: 17611
  GFR-binding peptide
  MOD_RES (2)..(4)..(38): Xaa is C or S
  MOD_RES (16)..(17)..(18)..(19)..(20): Xaa is A or G
  MOD_RES (21)..(22)..(23)..(24): Xaa is A or G or is absent

SEQ ID NO: 47187 - protein, 39 aa, Artificial Sequence
  GFR-binding peptide
  MOD_RES (1)..(35)..(36): Xaa is C or S
  MOD_RES (13)..(14)..(15)..(16)..(17): Xaa is A or G
  MOD_RES (18)..(19)..(20)..(21): Xaa is A or G or is absent
XARVVMNSMEGIXXXXXXXXXMIQVTINSLQTPAXXPKP

SEQ ID NO: 47188 - protein, 37 aa, Artificial Sequence; identical to SEQ ID NO: 17613
  GFR-binding peptide
  MOD_RES (36)..(36): Xaa is C or S
  MOD_RES (12)..(13)..(14)..(15)..(16): Xaa is A or G
  MOD_RES (17)..(18)..(19)..(20): Xaa is A or G or is absent

SEQ ID NO: 47189 - protein, 36 aa, Artificial Sequence; identical to SEQ ID NO: 17614
  GFR-binding peptide
  MOD_RES (33)..(33): Xaa is C or S
  MOD_RES (11)..(12)..(13)..(14)..(15): Xaa is A or G
  MOD_RES (16)..(17)..(18)..(19): Xaa is A or G or is absent

SEQ ID NO: 47190 - protein, 39 aa, Artificial Sequence
  GFR-binding peptide
  MOD_RES (1)..(34)..(35): Xaa is C or S
  MOD_RES (12)..(13)..(14)..(15)..(16): Xaa is A or G
  MOD_RES (17)..(18)..(19)..(20): Xaa is A or G or is absent
XSKVIMVTAKKXXXXXXXXXIKRIQVPRLDQSVXXPSAS

SEQ ID NO: 47191 - protein, 40 aa, Artificial Sequence
  GFR-binding peptide
  MOD_RES (1)..(3)..(40): Xaa is C or S
XKXALHDELTNSLQEFIPKKRVIEYYLVTLPELQVQTPRX

SEQ ID NO: 47192 - protein, 40 aa, Artificial Sequence; identical to SEQ ID NO: 10428
  GFR-binding peptide
  MOD_RES (2)..(4)..(36)..(37): Xaa is C or S

SEQ ID NO: 47193 - protein, 37 aa, Artificial Sequence
  GFR-binding peptide
  MOD_RES (31)..(32): Xaa is C or S
RVVMNSMEGIIVNSSDDMIQVTINSLQTPAXXPKPVT

SEQ ID NO: 47194 - protein, 39 aa, Artificial Sequence; identical to SEQ ID NO: 10429
  GFR-binding peptide
  MOD_RES (2)..(4)..(37)..(38): Xaa is C or S
  MOD_RES (15)..(16)..(17)..(18)..(19): Xaa is A or G
  MOD_RES (20)..(21)..(22)..(23): Xaa is A or G or is absent

SEQ ID NO: 47195 - protein, 40 aa, Artificial Sequence; identical to SEQ ID NO: 17615
  GFR-binding peptide
  MOD_RES (36)..(36): Xaa is C or S
  MOD_RES (12)..(13)..(14)..(15)..(16): Xaa is A or G
  MOD_RES (17)..(18)..(19)..(20): Xaa is A or G or is absent

SEQ ID NO: 47196 - protein, 35 aa, Artificial Sequence; identical to SEQ ID NO: 10430
  GFR-binding peptide
  MOD_RES (2)..(4)..(35): Xaa is C or S

SEQ ID NO: 47197 - protein, 36 aa, Artificial Sequence
  GFR-binding peptide
  MOD_RES (1)..(1): Xaa is C or S
XALHDELTNSLQEFIPKKRVIEYYLVTLPELQVQTP

SEQ ID NO: 47198 - protein, 37 aa, Artificial Sequence; identical to SEQ ID NO: 17616
  GFR-binding peptide
  MOD_RES (33)..(33): Xaa is C or S

SEQ ID NO: 47199 - protein, 32 aa, Artificial Sequence
  GFR-binding peptide
  MOD_RES (1)..(32): Xaa is C or S
XSKVVMVQVEKVKPTRGVVKAIKVSRLDQPVX

SEQ ID NO: 47200 - protein, 33 aa, Artificial Sequence
  GFR-binding peptide
  MOD_RES (12)..(13)..(14)..(15)..(16): Xaa is A or G
  MOD_RES (17)..(18)..(19)..(20): Xaa is A or G or is absent
GEVVMDSMEGIXXXXXXXXXMIQMTINSLETPV

SEQ ID NO: 47201 - protein, 37 aa, Artificial Sequence
  GFR-binding peptide
  MOD_RES (2)..(34)..(35): Xaa is C or S
GXGEVVMEVTAKKVVKDYEDIKRMQVPRLETPVXXAK

SEQ ID NO: 47202 - protein, 40 aa, Artificial Sequence; identical to SEQ ID NO: 17617
  GFR-binding peptide
  MOD_RES (37)..(37): Xaa is C or S
  MOD_RES (13)..(14)..(15)..(16)..(17): Xaa is A or G
  MOD_RES (18)..(19)..(20)..(21): Xaa is A or G or is absent

SEQ ID NO: 47203 - protein, 36 aa, Artificial Sequence; identical to SEQ ID NO: 17618
  GFR-binding peptide
  MOD_RES (1)..(1): Xaa is C or S
  MOD_RES (14)..(15)..(16)..(17)..(18): Xaa is A or G
  MOD_RES (19)..(20)..(21)..(22): Xaa is A or G or is absent

SEQ ID NO: 47204 - protein, 41 aa, Artificial Sequence; identical to SEQ ID NO: 17619
  GFR-binding peptide
  MOD_RES (1)..(3)..(40): Xaa is C or S

SEQ ID NO: 47205 - protein, 34 aa, Artificial Sequence; identical to SEQ ID NO: 10434
  GFR-binding peptide
  MOD_RES (2)..(4): Xaa is C or S

SEQ ID NO: 47206 - protein, 36 aa, Artificial Sequence
  GFR-binding peptide
  MOD_RES (34)..(34): Xaa is C or S
  MOD_RES (12)..(13)..(14)..(15)..(16): Xaa is A or G
  MOD_RES (17)..(18)..(19)..(20): Xaa is A or G or is absent
KNHQLFNSLQEXXXXXXXXXYYLMTLPEEETPVXEL

SEQ ID NO: 47207 - protein, 38 aa, Artificial Sequence
  GFR-binding peptide
  MOD_RES (2)..(35)..(36): Xaa is C or S
  MOD_RES (13)..(14)..(15)..(16)..(17): Xaa is A or G
  MOD_RES (18)..(19)..(20)..(21): Xaa is A or G or is absent
KXSRVIMVTAKKXXXXXXXXXIKRIQVPRLAQPVXXPA

SEQ ID NO: 47208 - protein, 37 aa, Artificial Sequence; identical to SEQ ID NO: 10436
  GFR-binding peptide
  MOD_RES (2)..(4)..(37): Xaa is C or S
  MOD_RES (15)..(16)..(17)..(18)..(19): Xaa is A or G
  MOD_RES (20)..(21)..(22)..(23): Xaa is A or G or is absent

SEQ ID NO: 47209 - protein, 37 aa, Artificial Sequence; identical to SEQ ID NO: 10438
  GFR-binding peptide
  MOD_RES (2)..(4): Xaa is C or S
  MOD_RES (16)..(17)..(18)..(19)..(20): Xaa is A or G
  MOD_RES (21)..(22)..(23)..(24): Xaa is A or G or is absent

SEQ ID NO: 47210 - protein, 39 aa, Artificial Sequence
  GFR-binding peptide
  MOD_RES (2)..(36): Xaa is C or S
  MOD_RES (14)..(15)..(16)..(17)..(18): Xaa is A or G
  MOD_RES (19)..(20)..(21)..(22): Xaa is A or G or is absent
GXSRVVMNSMEGIXXXXXXXXXMIQVTINSLKTPAXTPK

SEQ ID NO: 47211 - protein, 37 aa, Artificial Sequence; identical to SEQ ID NO: 17628
  GFR-binding peptide
  MOD_RES (1)..(3): Xaa is C or S

SEQ ID NO: 47212 - protein, 38 aa, Artificial Sequence
  GFR-binding peptide
  MOD_RES (2)..(36): Xaa is C or S
EXKNHQLFNSLQEHQGQHPKIRYYLMTLPEEETPVXEL

SEQ ID NO: 47213 - protein, 35 aa, Artificial Sequence; identical to SEQ ID NO: 10442
  GFR-binding peptide
  MOD_RES (1)..(33)..(34): Xaa is C or S

SEQ ID NO: 47214 - protein, 36 aa, Artificial Sequence; identical to SEQ ID NO: 10445
  GFR-binding peptide
  MOD_RES (2)..(35)..(36): Xaa is C or S
  MOD_RES (13)..(14)..(15)..(16)..(17): Xaa is A or G
  MOD_RES (18)..(19)..(20)..(21): Xaa is A or G or is absent

SEQ ID NO: 47215 - protein, 39 aa, Artificial Sequence
  GFR-binding peptide
  MOD_RES (2)..(4)..(38)..(39): Xaa is C or S
  MOD_RES (16)..(17)..(18)..(19)..(20): Xaa is A or G
  MOD_RES (21)..(22)..(23)..(24): Xaa is A or G or is absent
HXGXSRVVMNVTAKKXXXXXXXXXIKRVQVPRLKTPAXX

SEQ ID NO: 47216 - protein, 35 aa, Artificial Sequence
  GFR-binding peptide
LHEELRNSLQELKPKKRVYEYYLVTLPEHHVRSPQ

SEQ ID NO: 47217 - protein, 34 aa, Artificial Sequence; identical to SEQ ID NO: 36585
  GFR-binding peptide
  MOD_RES (31)..(32): Xaa is C or S

SEQ ID NO: 47218 - protein, 38 aa, Artificial Sequence; identical to SEQ ID NO: 17633
  GFR-binding peptide
  MOD_RES (2)..(2): Xaa is C or S
  MOD_RES (15)..(16)..(17)..(18)..(19): Xaa is A or G
  MOD_RES (20)..(21)..(22)..(23): Xaa is A or G or is absent

SEQ ID NO: 47219 - protein, 43 aa, Artificial Sequence
  GFR-binding peptide
  MOD_RES (2)..(4)..(38)..(39): Xaa is C or S
  MOD_RES (16)..(17)..(18)..(19)..(20): Xaa is A or G
  MOD_RES (21)..(22)..(23)..(24): Xaa is A or G or is absent
RXGXGEVVMDVTAKKXXXXXXXXXIKRMQVPRLETPVXXAKPI

SEQ ID NO: 47220 - protein, 39 aa, Artificial Sequence
  GFR-binding peptide
  MOD_RES (1)..(3)..(34)..(35): Xaa is C or S
XKXSKVIMVQVEKIKPTKGIVKAIKVSRLDQSVXXPSAS

SEQ ID NO: 47221 - protein, 41 aa, Artificial Sequence
  GFR-binding peptide
  MOD_RES (1)..(3)..(37): Xaa is C or S
XEXKNHQLFNSLQEHQGQHPKIRYYLMTLPEEETPVXELGE

SEQ ID NO: 47222 - protein, 39 aa, Artificial Sequence; identical to SEQ ID NO: 10450
  GFR-binding peptide
  MOD_RES (1)..(34)..(35): Xaa is C or S
  MOD_RES (12)..(13)..(14)..(15)..(16): Xaa is A or G
  MOD_RES (17)..(18)..(19)..(20): Xaa is A or G or is absent

SEQ ID NO: 47223 - protein, 35 aa, Artificial Sequence
  GFR-binding peptide
  MOD_RES (32)..(33): Xaa is C or S
GEVVMDVQVEKVVKENEDVKAMKVSRLETPVXXAK

SEQ ID NO: 47224 - protein, 43 aa, Artificial Sequence
  GFR-binding peptide
  MOD_RES (2)..(4)..(41): Xaa is C or S
EXKXALHDELTNSLQEFIPKKRVIEYYLVTLPELQVQTPRXQV

SEQ ID NO: 47225 - protein, 39 aa, Artificial Sequence; identical to SEQ ID NO: 17642
  GFR-binding peptide
  MOD_RES (1)..(3): Xaa is C or S
  MOD_RES (16)..(17)..(18)..(19)..(20): Xaa is A or G
  MOD_RES (21)..(22)..(23)..(24): Xaa is A or G or is absent

SEQ ID NO: 47226 - protein, 35 aa, Artificial Sequence; identical to SEQ ID NO: 36593
  GFR-binding peptide
  MOD_RES (33)..(34): Xaa is C or S
  MOD_RES (11)..(12)..(13)..(14)..(15): Xaa is A or G
  MOD_RES (16)..(17)..(18)..(19): Xaa is A or G or is absent

SEQ ID NO: 47227 - protein, 40 aa, Artificial Sequence; identical to SEQ ID NO: 36594
  GFR-binding peptide
  MOD_RES (2)..(4)..(35)..(36): Xaa is C or S

SEQ ID NO: 47228 - protein, 32 aa, Artificial Sequence
  GFR-binding peptide
  MOD_RES (11)..(12)..(13)..(14)..(15): Xaa is A or G
  MOD_RES (16)..(17)..(18)..(19): Xaa is A or G or is absent
EVVMDVTAKKXXXXXXXXXIKRMQVPRLETPV

SEQ ID NO: 47229 - protein, 41 aa, Artificial Sequence; identical to SEQ ID NO: 17645
  GFR-binding peptide
  MOD_RES (1)..(3)..(40): Xaa is C or S
  MOD_RES (16)..(17)..(18)..(19)..(20): Xaa is A or G
  MOD_RES (21)..(22)..(23)..(24): Xaa is A or G or is absent

SEQ ID NO: 47230 - protein, 36 aa, Artificial Sequence
  GFR-binding peptide
  MOD_RES (2)..(36): Xaa is C or S
EXKNHQLFNSLQEHQGQHPKIRYYVMPLPEEETPVX

SEQ ID NO: 47231 - protein, 40 aa, Artificial Sequence
  GFR-binding peptide
  MOD_RES (1)..(35)..(36): Xaa is C or S
  MOD_RES (13)..(14)..(15)..(16)..(17): Xaa is A or G
  MOD_RES (18)..(19)..(20)..(21): Xaa is A or G or is absent
XGEVVMDVTAKKXXXXXXXXXIKRMQVPRLETPVXXAKPI

SEQ ID NO: 47232 - protein, 36 aa, Artificial Sequence
  GFR-binding peptide
  MOD_RES (33)..(33): Xaa is C or S
NHQLFNSLQEHQGQHPKIRYYVMPLPEEETPVXELG

SEQ ID NO: 47233 - protein, 43 aa, Artificial Sequence; identical to SEQ ID NO: 17654
  GFR-binding peptide
  MOD_RES (2)..(4)..(41): Xaa is C or S
  MOD_RES (17)..(18)..(19)..(20)..(21): Xaa is A or G
  MOD_RES (22)..(23)..(24)..(25): Xaa is A or G or is absent

SEQ ID NO: 47234 - protein, 39 aa, Artificial Sequence
  GFR-binding peptide
  MOD_RES (33)..(34): Xaa is C or S
  MOD_RES (11)..(12)..(13)..(14)..(15): Xaa is A or G
  MOD_RES (16)..(17)..(18)..(19): Xaa is A or G or is absent
SKVIMVQVEKXXXXXXXXXVKAIKVSRLDQSVXXPSASA

SEQ ID NO: 47235 - protein, 42 aa, Artificial Sequence; identical to SEQ ID NO: 17655
  GFR-binding peptide
  MOD_RES (2)..(4)..(38): Xaa is C or S
  MOD_RES (16)..(17)..(18)..(19)..(20): Xaa is A or G
  MOD_RES (21)..(22)..(23)..(24): Xaa is A or G or is absent

SEQ ID NO: 47236 - protein, 39 aa, Artificial Sequence; identical to SEQ ID NO: 17656
  GFR-binding peptide
  MOD_RES (35)..(35): Xaa is C or S
  MOD_RES (11)..(12)..(13)..(14)..(15): Xaa is A or G
  MOD_RES (16)..(17)..(18)..(19): Xaa is A or G or is absent

SEQ ID NO: 47237 - protein, 39 aa, Artificial Sequence
  GFR-binding peptide
  MOD_RES (2)..(34)..(35): Xaa is C or S
GXGEVVMESMEGIVVKDYEDMIQMTINSLETPVXXAKPI

SEQ ID NO: 47238 - protein, 38 aa, Artificial Sequence
  GFR-binding peptide
  MOD_RES (33)..(34): Xaa is C or S
  MOD_RES (11)..(12)..(13)..(14)..(15): Xaa is A or G
  MOD_RES (16)..(17)..(18)..(19): Xaa is A or G or is absent
SKVIMVQVEKXXXXXXXXXVKAIKVSRLDQSVXXPSAS

SEQ ID NO: 47239 - protein, 37 aa, Artificial Sequence
  GFR-binding peptide
  MOD_RES (2)..(2): Xaa is C or S
KXALHDELTNSLQEFIPKKRVIEYYVVPLPELQVQTP

SEQ ID NO: 47240 - protein, 36 aa, Artificial Sequence; identical to SEQ ID NO: 17659
  GFR-binding peptide
  MOD_RES (2)..(2): Xaa is C or S
  MOD_RES (15)..(16)..(17)..(18)..(19): Xaa is A or G
  MOD_RES (20)..(21)..(22)..(23): Xaa is A or G or is absent

SEQ ID NO: 47241 - protein, 38 aa, Artificial Sequence
  GFR-binding peptide
  MOD_RES (2)..(4)..(35)..(36): Xaa is C or S
SXKXSKVIMVQVEKIKPTKGIVKAIKVSRLDQSVXXPS

SEQ ID NO: 47242 - protein, 35 aa, Artificial Sequence; identical to SEQ ID NO: 10461
  GFR-binding peptide
  MOD_RES (33)..(34): Xaa is C or S
  MOD_RES (11)..(12)..(13)..(14)..(15): Xaa is A or G
  MOD_RES (16)..(17)..(18)..(19): Xaa is A or G or is absent

SEQ ID NO: 47243 - protein, 42 aa, Artificial Sequence; identical to SEQ ID NO: 10463
  GFR-binding peptide
  MOD_RES (2)..(4)..(36)..(37): Xaa is C or S

SEQ ID NO: 47244 - protein, 39 aa, Artificial Sequence
  GFR-binding peptide
  MOD_RES (2)..(39): Xaa is C or S
  MOD_RES (15)..(16)..(17)..(18)..(19): Xaa is A or G
  MOD_RES (20)..(21)..(22)..(23): Xaa is A or G or is absent
KXALHDELTNSLQEXXXXXXXXXYYVVPLPELQVQTPRX

SEQ ID NO: 47245 - protein, 42 aa, Artificial Sequence; identical to SEQ ID NO: 17661
  GFR-binding peptide
  MOD_RES (2)..(4)..(38): Xaa is C or S
  MOD_RES (16)..(17)..(18)..(19)..(20): Xaa is A or G
  MOD_RES (21)..(22)..(23)..(24): Xaa is A or G or is absent

SEQ ID NO: 47246 - protein, 32 aa, Artificial Sequence; identical to SEQ ID NO: 17663
  GFR-binding peptide

SEQ ID NO: 47247 - protein, 38 aa, Artificial Sequence
  GFR-binding peptide
  MOD_RES (1)..(3)..(35): Xaa is C or S
XGXSRVVMNSMEGIIVNSSDDMIQVTINSLKTPAXTPK

SEQ ID NO: 47248 - protein, 39 aa, Artificial Sequence; identical to SEQ ID NO: 10466
  GFR-binding peptide
  MOD_RES (2)..(34): Xaa is C or S

SEQ ID NO: 47249 - protein, 34 aa, Artificial Sequence; identical to SEQ ID NO: 10467
  GFR-binding peptide
  MOD_RES (33)..(34): Xaa is C or S
  MOD_RES (11)..(12)..(13)..(14)..(15): Xaa is A or G
  MOD_RES (16)..(17)..(18)..(19): Xaa is A or G or is absent

SEQ ID NO: 47250 - protein, 39 aa, Artificial Sequence; identical to SEQ ID NO: 36619
  GFR-binding peptide
  MOD_RES (2)..(4)..(35)..(36): Xaa is C or S

SEQ ID NO: 47251 - protein, 35 aa, Artificial Sequence; identical to SEQ ID NO: 10469
  GFR-binding peptide
  MOD_RES (2)..(4): Xaa is C or S

SEQ ID NO: 47252 - protein, 36 aa, Artificial Sequence; identical to SEQ ID NO: 10471
  GFR-binding peptide
  MOD_RES (2)..(4)..(36): Xaa is C or S

SEQ ID NO: 47253 - protein, 36 aa, Artificial Sequence
  GFR-binding peptide
  MOD_RES (2)..(2): Xaa is C or S
AXELHEELRNSLQELKPKKRVYEYYVVPLPEHHVRS

SEQ ID NO: 47254 - protein, 36 aa, Artificial Sequence; identical to SEQ ID NO: 10473
  GFR-binding peptide
  MOD_RES (34)..(35): Xaa is C or S
  MOD_RES (12)..(13)..(14)..(15)..(16): Xaa is A or G
  MOD_RES (17)..(18)..(19)..(20): Xaa is A or G or is absent

SEQ ID NO: 47255 - protein, 41 aa, Artificial Sequence; identical to SEQ ID NO: 17666
  GFR-binding peptide
  MOD_RES (2)..(4)..(41): Xaa is C or S

SEQ ID NO: 47256 - protein, 38 aa, Artificial Sequence
  GFR-binding peptide
  MOD_RES (1)..(33)..(34): Xaa is C or S
XGEVVMESMEGIVVKDYEDMIQMTINSLETPVXXAKPI

SEQ ID NO: 47257 - protein, 37 aa, Artificial Sequence; identical to SEQ ID NO: 10474
  GFR-binding peptide
  MOD_RES (31)..(32): Xaa is C or S

SEQ ID NO: 47258 - protein, 40 aa, Artificial Sequence
  GFR-binding peptide
  MOD_RES (34)..(35): Xaa is C or S
  MOD_RES (12)..(13)..(14)..(15)..(16): Xaa is A or G
  MOD_RES (17)..(18)..(19)..(20): Xaa is A or G or is absent
SRVVMNSMEGIXXXXXXXXXMIQVTINSLKTPAXXPKPVY

SEQ ID NO: 47259 - protein, 40 aa, Artificial Sequence
  GFR-binding peptide
  MOD_RES (2)..(4)..(38)..(39): Xaa is C or S
  MOD_RES (16)..(17)..(18)..(19)..(20): Xaa is A or G
  MOD_RES (21)..(22)..(23)..(24): Xaa is A or G or is absent
HXGXARVVMNVTAKKXXXXXXXXXIKRVQVPRLQTPAXXP

SEQ ID NO: 47260 - protein, 32 aa, Artificial Sequence
  GFR-binding peptide
HDELTNSLQEFIPKKRVIEYYVVPLPELQVQT

SEQ ID NO: 47261 - protein, 36 aa, Artificial Sequence
  GFR-binding peptide
  MOD_RES (1)..(3)..(36): Xaa is C or S
  MOD_RES (14)..(15)..(16)..(17)..(18): Xaa is A or G
  MOD_RES (19)..(20)..(21)..(22): Xaa is A or G or is absent
XKXSKVVMSMEGIXXXXXXXXXMIQITINSLDQPVX

SEQ ID NO: 47262 - protein, 32 aa, Artificial Sequence; identical to SEQ ID NO: 17668
  GFR-binding peptide
  MOD_RES (11)..(12)..(13)..(14)..(15): Xaa is A or G
  MOD_RES (16)..(17)..(18)..(19): Xaa is A or G or is absent

SEQ ID NO: 47263 - protein, 42 aa, Artificial Sequence; identical to SEQ ID NO: 17670
  GFR-binding peptide
  MOD_RES (2)..(4)..(41): Xaa is C or S

SEQ ID NO: 47264 - protein, 38 aa, Artificial Sequence
  GFR-binding peptide
  MOD_RES (33)..(34): Xaa is C or S
  MOD_RES (11)..(12)..(13)..(14)..(15): Xaa is A or G
  MOD_RES (16)..(17)..(18)..(19): Xaa is A or G or is absent
SKVIMVTAKKXXXXXXXXXIKRIQVPRLDQSVXXPSAS

SEQ ID NO: 47265 - protein, 32 aa, Artificial Sequence
  GFR-binding peptide
  MOD_RES (31)..(32): Xaa is C or S
RVVMNVQVEKIVNSSDDVKAVKVSRLQTPAXX

SEQ ID NO: 47266 - protein, 41 aa, Artificial Sequence
  GFR-binding peptide
  MOD_RES (1)..(38): Xaa is C or S
XELHEELRNSLQELKPKKRVYEYYLVTLPEHHVRSPQXKVS

SEQ ID NO: 47267 - protein, 35 aa, Artificial Sequence
  GFR-binding peptide
  MOD_RES (31)..(32): Xaa is C or S
SKVIMVQVEKIKPTKGIVKAIKVSRLDQSVXXPSA

SEQ ID NO: 47268 - protein, 33 aa, Artificial Sequence
  GFR-binding peptide
  MOD_RES (32)..(33): Xaa is C or S
SRVVMNVQVEKIVNSSDDVKAVKVSRLKTPAXX

SEQ ID NO: 47269 - protein, 41 aa, Artificial Sequence
  GFR-binding peptide
  MOD_RES (2)..(36): Xaa is C or S
EXKNHQLFNSLQEHQGQHPKIRYYVMPLPEEETPVXELGED

SEQ ID NO: 47270 - protein, 39 aa, Artificial Sequence; identical to SEQ ID NO: 17674
  GFR-binding peptide
  MOD_RES (37)..(37): Xaa is C or S
  MOD_RES (13)..(14)..(15)..(16)..(17): Xaa is A or G
  MOD_RES (18)..(19)..(20)..(21): Xaa is A or G or is absent

SEQ ID NO: 47271 - protein, 33 aa, Artificial Sequence; identical to SEQ ID NO: 10480
  GFR-binding peptide
  MOD_RES (2)..(2): Xaa is C or S

SEQ ID NO: 47272 - protein, 32 aa, Artificial Sequence; identical to SEQ ID NO: 17675
  GFR-binding peptide

SEQ ID NO: 47273 - protein, 34 aa, Artificial Sequence
  GFR-binding peptide
  MOD_RES (2)..(34): Xaa is C or S
GXARVVMNSMEGIIVNSSDDMIQVTINSLQTPAX

SEQ ID NO: 47274 - protein, 36 aa, Artificial Sequence
  GFR-binding peptide
  MOD_RES (1)..(34)..(35): Xaa is C or S
  MOD_RES (12)..(13)..(14)..(15)..(16): Xaa is A or G
  MOD_RES (17)..(18)..(19)..(20): Xaa is A or G or is absent
XSKVVMVQVEKXXXXXXXXXVKAIKVSRLDQPVXXP

SEQ ID NO: 47275 - protein, 37 aa, Artificial Sequence; identical to SEQ ID NO: 17676
  GFR-binding peptide
  MOD_RES (37)..(37): Xaa is C or S
  MOD_RES (13)..(14)..(15)..(16)..(17): Xaa is A or G
  MOD_RES (18)..(19)..(20)..(21): Xaa is A or G or is absent

SEQ ID NO: 47276 - protein, 38 aa, Artificial Sequence
  GFR-binding peptide
  MOD_RES (1)..(32)..(33): Xaa is C or S
XSKVVMVQVEKVKPTRGVVKAIKVSRLDQPVXXPSASA

SEQ ID NO: 47277 - protein, 36 aa, Artificial Sequence; identical to SEQ ID NO: 17678
  GFR-binding peptide

SEQ ID NO: 47278 - protein, 41 aa, Artificial Sequence
  GFR-binding peptide
  MOD_RES (1)..(35)..(36): Xaa is C or S
  MOD_RES (13)..(14)..(15)..(16)..(17): Xaa is A or G
  MOD_RES (18)..(19)..(20)..(21): Xaa is A or G or is absent
XSRVVMNVQVEKXXXXXXXXXVKAVKVSRLKTPAXXPKPVY

SEQ ID NO: 47279 - protein, 35 aa, Artificial Sequence
  GFR-binding peptide
  MOD_RES (2)..(34)..(35): Xaa is C or S
GXGEVVMDVQVEKVVKENEDVKAMKVSRLETPVXX

SEQ ID NO: 47280 - protein, 39 aa, Artificial Sequence
  GFR-binding peptide
  MOD_RES (34)..(35): Xaa is C or S
  MOD_RES (12)..(13)..(14)..(15)..(16): Xaa is A or G
  MOD_RES (17)..(18)..(19)..(20): Xaa is A or G or is absent
ARVVMNVTAKKXXXXXXXXXIKRVQVPRLQTPAXXPKPV

SEQ ID NO: 47281 - protein, 40 aa, Artificial Sequence
  GFR-binding peptide
  MOD_RES (1)..(35)..(36): Xaa is C or S
  MOD_RES (13)..(14)..(15)..(16)..(17): Xaa is A or G
  MOD_RES (18)..(19)..(20)..(21): Xaa is A or G or is absent
XGEVVMESMEGIXXXXXXXXXMIQMTINSLETPVXXAKPI

SEQ ID NO: 47282 - protein, 34 aa, Artificial Sequence; identical to SEQ ID NO: 10482
  GFR-binding peptide
  MOD_RES (1)..(33)..(34): Xaa is C or S

SEQ ID NO: 47283 - protein, 39 aa, Artificial Sequence; identical to SEQ ID NO: 36643
  GFR-binding peptide
  MOD_RES (1)..(3)..(36)..(37): Xaa is C or S
  MOD_RES (14)..(15)..(16)..(17)..(18): Xaa is A or G
  MOD_RES (19)..(20)..(21)..(22): Xaa is A or G or is absent

SEQ ID NO: 47284 - protein, 34 aa, Artificial Sequence
  GFR-binding peptide
  MOD_RES (2)..(4): Xaa is C or S
SXKXSRVIMVTAKKVKPKRGVIKRIQVPRLAQPV

SEQ ID NO: 47285 - protein, 37 aa, Artificial Sequence; identical to SEQ ID NO: 10485
  GFR-binding peptide
  MOD_RES (2)..(34): Xaa is C or S

SEQ ID NO: 47286 - protein, 43 aa, Artificial Sequence; identical to SEQ ID NO: 17683
  GFR-binding peptide
  MOD_RES (2)..(4)..(38): Xaa is C or S
  MOD_RES (16)..(17)..(18)..(19)..(20): Xaa is A or G
  MOD_RES (21)..(22)..(23)..(24): Xaa is A or G or is absent

SEQ ID NO: 47287 - protein, 40 aa, Artificial Sequence; identical to SEQ ID NO: 17684
  GFR-binding peptide
  MOD_RES (2)..(39): Xaa is C or S

SEQ ID NO: 47288 - protein, 38 aa, Artificial Sequence
  GFR-binding peptide
  MOD_RES (33)..(34): Xaa is C or S
  MOD_RES (11)..(12)..(13)..(14)..(15): Xaa is A or G
  MOD_RES (16)..(17)..(18)..(19): Xaa is A or G or is absent
EVVMDVQVEKXXXXXXXXXVKAMKVSRLETPVXXAKPI

SEQ ID NO: 47289 - protein, 42 aa, Artificial Sequence
  GFR-binding peptide
  MOD_RES (2)..(39): Xaa is C or S
  MOD_RES (15)..(16)..(17)..(18)..(19): Xaa is A or G
  MOD_RES (20)..(21)..(22)..(23): Xaa is A or G or is absent
KXALHDELTNSLQEXXXXXXXXXYYLVTLPELQVQTPRXQVN

SEQ ID NO: 47290 - protein, 34 aa, Artificial Sequence
  GFR-binding peptide
  MOD_RES (1)..(34): Xaa is C or S
  MOD_RES (12)..(13)..(14)..(15)..(16): Xaa is A or G
  MOD_RES (17)..(18)..(19)..(20): Xaa is A or G or is absent
XSRVIMVQVEKXXXXXXXXXVKAIKVSRLAQPVX

SEQ ID NO: 47291 - protein, 33 aa, Artificial Sequence
  GFR-binding peptide
  MOD_RES (31)..(32): Xaa is C or S
EVVMEVTAKKVVKDYEDIKRMQVPRLETPVXXA

SEQ ID NO: 47292 - protein, 35 aa, Artificial Sequence
  GFR-binding peptide
  MOD_RES (31)..(32): Xaa is C or S
EVVMEVQVEKVVKDYEDVKAMKVSRLETPVXXAKP

SEQ ID NO: 47293 - protein, 33 aa, Artificial Sequence
  GFR-binding peptide
  MOD_RES (32)..(33): Xaa is C or S
GEVVMDVQVEKVVKENEDVKAMKVSRLETPVXX

SEQ ID NO: 47294 - protein, 37 aa, Artificial Sequence; identical to SEQ ID NO: 10488
  GFR-binding peptide
  MOD_RES (32)..(33): Xaa is C or S

SEQ ID NO: 47295 - protein, 40 aa, Artificial Sequence
  GFR-binding peptide
  MOD_RES (1)..(3)..(37)..(38): Xaa is C or S
  MOD_RES (15)..(16)..(17)..(18)..(19): Xaa is A or G
  MOD_RES (20)..(21)..(22)..(23): Xaa is A or G or is absent
XGXGEVVMEVQVEKXXXXXXXXXVKAMKVSRLETPVXXAK

SEQ ID NO: 47296 - protein, 36 aa, Artificial Sequence; identical to SEQ ID NO: 10489
  GFR-binding peptide
  MOD_RES (1)..(3)..(36): Xaa is C or S
  MOD_RES (14)..(15)..(16)..(17)..(18): Xaa is A or G
  MOD_RES (19)..(20)..(21)..(22): Xaa is A or G or is absent

SEQ ID NO: 47297 - protein, 38 aa, Artificial Sequence; identical to SEQ ID NO: 10490
  GFR-binding peptide
  MOD_RES (33)..(33): Xaa is C or S
  MOD_RES (11)..(12)..(13)..(14)..(15): Xaa is A or G
  MOD_RES (16)..(17)..(18)..(19): Xaa is A or G or is absent

SEQ ID NO: 47298 - protein, 36 aa, Artificial Sequence; identical to SEQ ID NO: 10491
  GFR-binding peptide
  MOD_RES (1)..(35)..(36): Xaa is C or S
  MOD_RES (13)..(14)..(15)..(16)..(17): Xaa is A or G
  MOD_RES (18)..(19)..(20)..(21): Xaa is A or G or is absent

SEQ ID NO: 47299 - protein, 33 aa, Artificial Sequence
  GFR-binding peptide
  MOD_RES (1)..(3): Xaa is C or S
XKXSKVIMSMEGIIKPTKGIMIQITINSLDQSV

SEQ ID NO: 47300 - protein, 36 aa, Artificial Sequence
  GFR-binding peptide
  MOD_RES (1)..(3)..(36): Xaa is C or S
  MOD_RES (14)..(15)..(16)..(17)..(18): Xaa is A or G
  MOD_RES (19)..(20)..(21)..(22): Xaa is A or G or is absent
XKXSKVIMVQVEKXXXXXXXXXVKAIKVSRLDQSVX

SEQ ID NO: 47301 - protein, 33 aa, Artificial Sequence; identical to SEQ ID NO: 10495
  GFR-binding peptide
  MOD_RES (2)..(33): Xaa is C or S

SEQ ID NO: 47302 - protein, 40 aa, Artificial Sequence
  GFR-binding peptide
  MOD_RES (1)..(3)..(34)..(35): Xaa is C or S
XKXSKVIMVTAKKIKPTKGIIKRIQVPRLDQSVXXPSASA

SEQ ID NO: 47303 - protein, 34 aa, Artificial Sequence; identical to SEQ ID NO: 17692
  GFR-binding peptide
  MOD_RES (12)..(13)..(14)..(15)..(16): Xaa is A or G
  MOD_RES (17)..(18)..(19)..(20): Xaa is A or G or is absent

SEQ ID NO: 47304 - protein, 41 aa, Artificial Sequence
  GFR-binding peptide
  MOD_RES (2)..(4)..(36)..(37): Xaa is C or S
HXGXARVVMNVQVEKIVNSSDDVKAVKVSRLQTPAXXPKPV

SEQ ID NO: 47305 - protein, 39 aa, Artificial Sequence
  GFR-binding peptide
  MOD_RES (1)..(3): Xaa is C or S
XKXALHDELTNSLQEFIPKKRVIEYYVVPLPELQVQTPR

SEQ ID NO: 47306 - protein, 39 aa, Artificial Sequence; identical to SEQ ID NO: 10498
  GFR-binding peptide
  MOD_RES (1)..(3)..(36)..(37): Xaa is C or S
  MOD_RES (14)..(15)..(16)..(17)..(18): Xaa is A or G
  MOD_RES (19)..(20)..(21)..(22): Xaa is A or G or is absent

SEQ ID NO: 47307 - protein, 37 aa, Artificial Sequence
  GFR-binding peptide
  MOD_RES (1)..(3): Xaa is C or S
  MOD_RES (16)..(17)..(18)..(19)..(20): Xaa is A or G
  MOD_RES (21)..(22)..(23)..(24): Xaa is A or G or is absent
XAXELHEELRNSLQEXXXXXXXXXYYLVTLPEHHVRS

SEQ ID NO: 47308 - protein, 34 aa, Artificial Sequence
  GFR-binding peptide
  MOD_RES (33)..(34): Xaa is C or S
  MOD_RES (11)..(12)..(13)..(14)..(15): Xaa is A or G
  MOD_RES (16)..(17)..(18)..(19): Xaa is A or G or is absent
RVVMNVTAKKXXXXXXXXXIKRVQVPRLKTPAXX

SEQ ID NO: 47309 - protein, 35 aa, Artificial Sequence
  GFR-binding peptide
  MOD_RES (1)..(3)..(35): Xaa is C or S
XGXSRVVMNSMEGIIVNSSDDMIQVTINSLKTPAX

SEQ ID NO: 47310 - protein, 39 aa, Artificial Sequence
  GFR-binding peptide
  MOD_RES (33)..(33): Xaa is C or S
  MOD_RES (11)..(12)..(13)..(14)..(15): Xaa is A or G
  MOD_RES (16)..(17)..(18)..(19): Xaa is A or G or is absent
NHQLFNSLQEXXXXXXXXXYYLMTLPEEETPVXELGEDN

SEQ ID NO: 47311 - protein, 35 aa, Artificial Sequence
  GFR-binding peptide
  MOD_RES (35)..(35): Xaa is C or S
HEELRNSLQELKPKKRVYEYYVVPLPEHHVRSPQX

SEQ ID NO: 47312 - protein, 39 aa, Artificial Sequence; identical to SEQ ID NO: 10503
  GFR-binding peptide
  MOD_RES (1)..(3)..(37)..(38): Xaa is C or S
  MOD_RES (15)..(16)..(17)..(18)..(19): Xaa is A or G
  MOD_RES (20)..(21)..(22)..(23): Xaa is A or G or is absent

SEQ ID NO: 47313 - protein, 34 aa, Artificial Sequence; identical to SEQ ID NO: 10504
  GFR-binding peptide
  MOD_RES (31)..(32): Xaa is C or S

SEQ ID NO: 47314 - protein, 38 aa, Artificial Sequence
  GFR-binding peptide
  MOD_RES (2)..(4)..(36)..(37): Xaa is C or S
RXGXGEVVMDSMEGIVVKENEDMIQMTINSLETPVXXA

SEQ ID NO: 47315 - protein, 38 aa, Artificial Sequence; identical to SEQ ID NO: 10507
  GFR-binding peptide
  MOD_RES (2)..(36)..(37): Xaa is C or S
  MOD_RES (14)..(15)..(16)..(17)..(18): Xaa is A or G
  MOD_RES (19)..(20)..(21)..(22): Xaa is A or G or is absent

SEQ ID NO: 47316 - protein, 39 aa, Artificial Sequence
  GFR-binding peptide
  MOD_RES (37)..(37): Xaa is C or S
  MOD_RES (13)..(14)..(15)..(16)..(17): Xaa is A or G
  MOD_RES (18)..(19)..(20)..(21): Xaa is A or G or is absent
ALHDELTNSLQEXXXXXXXXXYYVVPLPELQVQTPRXQV

SEQ ID NO: 47317 - protein, 38 aa, Artificial Sequence
  GFR-binding peptide
  MOD_RES (2)..(34)..(35): Xaa is C or S
GXGEVVMEVTAKKVVKDYEDIKRMQVPRLETPVXXAKP

SEQ ID NO: 47318 - protein, 39 aa, Artificial Sequence; identical to SEQ ID NO: 10509
  GFR-binding peptide
  MOD_RES (2)..(36)..(37): Xaa is C or S
  MOD_RES (14)..(15)..(16)..(17)..(18): Xaa is A or G
  MOD_RES (19)..(20)..(21)..(22): Xaa is A or G or is absent

SEQ ID NO: 47319 - protein, 42 aa, Artificial Sequence
  GFR-binding peptide
  MOD_RES (2)..(4)..(36)..(37): Xaa is C or S
HXGXARVVMNSMEGIIVNSSDDMIQVTINSLQTPAXXPKPVT

SEQ ID NO: 47320 - protein, 38 aa, Artificial Sequence
  GFR-binding peptide
  MOD_RES (2)..(4)..(38): Xaa is C or S
  MOD_RES (16)..(17)..(18)..(19)..(20): Xaa is A or G
  MOD_RES (21)..(22)..(23)..(24): Xaa is A or G or is absent
HXGXARVVMNVTAKKXXXXXXXXXIKRVQVPRLQTPAX

SEQ ID NO: 47321 - protein, 39 aa, Artificial Sequence; identical to SEQ ID NO: 10511
  GFR-binding peptide
  MOD_RES (1)..(3)..(34)..(35): Xaa is C or S

SEQ ID NO: 47322 - protein, 34 aa, Artificial Sequence; identical to SEQ ID NO: 10513
  GFR-binding peptide
  MOD_RES (33)..(34): Xaa is C or S
  MOD_RES (11)..(12)..(13)..(14)..(15): Xaa is A or G
  MOD_RES (16)..(17)..(18)..(19): Xaa is A or G or is absent

SEQ ID NO: 47323 - protein, 33 aa, Artificial Sequence; identical to SEQ ID NO: 10515
  GFR-binding peptide
  MOD_RES (31)..(32): Xaa is C or S

SEQ ID NO: 47324 - protein, 36 aa, Artificial Sequence
  GFR-binding peptide
  MOD_RES (2)..(4)..(36): Xaa is C or S
HXGXARVVMNSMEGIIVNSSDDMIQVTINSLQTPAX

SEQ ID NO: 47325 - protein, 37 aa, Artificial Sequence
  GFR-binding peptide
  MOD_RES (1)..(3)..(35)..(36): Xaa is C or S
XGXARVVMNSMEGIIVNSSDDMIQVTINSLQTPAXXP

SEQ ID NO: 47326 - protein, 38 aa, Artificial Sequence; identical to SEQ ID NO: 17699
  GFR-binding peptide
  MOD_RES (2)..(4): Xaa is C or S
  MOD_RES (17)..(18)..(19)..(20)..(21): Xaa is A or G
  MOD_RES (22)..(23)..(24)..(25): Xaa is A or G or is absent

SEQ ID NO: 47327 - protein, 40 aa, Artificial Sequence
  GFR-binding peptide
  MOD_RES (34)..(35): Xaa is C or S
  MOD_RES (12)..(13)..(14)..(15)..(16): Xaa is A or G
  MOD_RES (17)..(18)..(19)..(20): Xaa is A or G or is absent
SRVVMNVTAKKXXXXXXXXXIKRVQVPRLKTPAXXPKPVY

SEQ ID NO: 47328 - protein, 34 aa, Artificial Sequence; identical to SEQ ID NO: 10522
  GFR-binding peptide
  MOD_RES (34)..(34): Xaa is C or S
  MOD_RES (12)..(13)..(14)..(15)..(16): Xaa is A or G
  MOD_RES (17)..(18)..(19)..(20): Xaa is A or G or is absent

SEQ ID NO: 47329 - protein, 38 aa, Artificial Sequence; identical to SEQ ID NO: 10524
  GFR-binding peptide
  MOD_RES (1)..(3)..(37)..(38): Xaa is C or S
  MOD_RES (15)..(16)..(17)..(18)..(19): Xaa is A or G
  MOD_RES (20)..(21)..(22)..(23): Xaa is A or G or is absent

SEQ ID NO: 47330 - protein, 34 aa, Artificial Sequence
  GFR-binding peptide
  MOD_RES (12)..(13)..(14)..(15)..(16): Xaa is A or G
  MOD_RES (17)..(18)..(19)..(20): Xaa is A or G or is absent
LHDELTNSLQEXXXXXXXXXYYLVTLPELQVQTP

SEQ ID NO: 47331 - protein, 38 aa, Artificial Sequence
  GFR-binding peptide
  MOD_RES (2)..(4)..(38): Xaa is C or S
  MOD_RES (16)..(17)..(18)..(19)..(20): Xaa is A or G
  MOD_RES (21)..(22)..(23)..(24): Xaa is A or G or is absent
HXGXARVVMNVQVEKXXXXXXXXXVKAVKVSRLQTPAX

SEQ ID NO: 47332 - protein, 36 aa, Artificial Sequence
  GFR-binding peptide
  MOD_RES (36)..(36): Xaa is C or S
LHEELRNSLQELKPKKRVYEYYLVTLPEHHVRSPQX

SEQ ID NO: 47333 - protein, 40 aa, Artificial Sequence; identical to SEQ ID NO: 10525
  GFR-binding peptide
  MOD_RES (2)..(4)..(37)..(38): Xaa is C or S
  MOD_RES (15)..(16)..(17)..(18)..(19): Xaa is A or G
  MOD_RES (20)..(21)..(22)..(23): Xaa is A or G or is absent

SEQ ID NO: 47334 - protein, 39 aa, Artificial Sequence; identical to SEQ ID NO: 17702
  GFR-binding peptide
  MOD_RES (2)..(4): Xaa is C or S

SEQ ID NO: 47335 - protein, 32 aa, Artificial Sequence; identical to SEQ ID NO: 10527
  GFR-binding peptide
  MOD_RES (31)..(32): Xaa is C or S

SEQ ID NO: 47336 - protein, 30 aa, Artificial Sequence; identical to SEQ ID NO: 36710
  GFR-binding peptide

SEQ ID NO: 47337 - protein, 40 aa, Artificial Sequence; identical to SEQ ID NO: 17704
  GFR-binding peptide
  MOD_RES (2)..(4): Xaa is C or S
  MOD_RES (17)..(18)..(19)..(20)..(21): Xaa is A or G
  MOD_RES (22)..(23)..(24)..(25): Xaa is A or G or is absent

SEQ ID NO: 47338 - protein, 35 aa, Artificial Sequence
  GFR-binding peptide
  MOD_RES (1)..(3): Xaa is C or S
  MOD_RES (14)..(15)..(16)..(17)..(18): Xaa is A or G
  MOD_RES (19)..(20)..(21)..(22): Xaa is A or G or is absent
XKXSKVVMSMEGIXXXXXXXXXMIQITINSLDQPV

SEQ ID NO: 47339 - protein, 34 aa, Artificial Sequence; identical to SEQ ID NO: 17705
  GFR-binding peptide
  MOD_RES (1)..(1): Xaa is C or S
  MOD_RES (13)..(14)..(15)..(16)..(17): Xaa is A or G
  MOD_RES (18)..(19)..(20)..(21): Xaa is A or G or is absent

SEQ ID NO: 47340 - protein, 35 aa, Artificial Sequence
  GFR-binding peptide
  MOD_RES (1)..(1): Xaa is C or S
  MOD_RES (14)..(15)..(16)..(17)..(18): Xaa is A or G
  MOD_RES (19)..(20)..(21)..(22): Xaa is A or G or is absent
XELHEELRNSLQEXXXXXXXXXYYVVPLPEHHVRS

SEQ ID NO: 47341 - protein, 37 aa, Artificial Sequence; identical to SEQ ID NO: 17706
  GFR-binding peptide
  MOD_RES (36)..(36): Xaa is C or S
  MOD_RES (12)..(13)..(14)..(15)..(16): Xaa is A or G
  MOD_RES (17)..(18)..(19)..(20): Xaa is A or G or is absent

SEQ ID NO: 47342 - protein, 37 aa, Artificial Sequence
  GFR-binding peptide
  MOD_RES (1)..(3)..(37): Xaa is C or S
  MOD_RES (15)..(16)..(17)..(18)..(19): Xaa is A or G
  MOD_RES (20)..(21)..(22)..(23): Xaa is A or G or is absent
XGXARVVMNVTAKKXXXXXXXXXIKRVQVPRLQTPAX

SEQ ID NO: 47343 - protein, 41 aa, Artificial Sequence
  GFR-binding peptide
  MOD_RES (2)..(36)..(37): Xaa is C or S
  MOD_RES (14)..(15)..(16)..(17)..(18): Xaa is A or G
  MOD_RES (19)..(20)..(21)..(22): Xaa is A or G or is absent
GXGEVVMEVQVEKXXXXXXXXXVKAMKVSRLETPVXXAKPI

SEQ ID NO: 47344 - protein, 38 aa, Artificial Sequence
  GFR-binding peptide
  MOD_RES (2)..(4): Xaa is C or S
EXKXALHDELTNSLQEFIPKKRVIEYYVVPLPELQVQT

SEQ ID NO: 47345 - protein, 38 aa, Artificial Sequence
  GFR-binding peptide
  MOD_RES (34)..(35): Xaa is C or S
  MOD_RES (12)..(13)..(14)..(15)..(16): Xaa is A or G
  MOD_RES (17)..(18)..(19)..(20): Xaa is A or G or is absent
GEVVMDVTAKKXXXXXXXXXIKRMQVPRLETPVXXAKP

SEQ ID NO: 47346 - protein, 38 aa, Artificial Sequence
  GFR-binding peptide
  MOD_RES (2)..(33)..(34): Xaa is C or S
KXSRVIMVQVEKVKPKRGVVKAIKVSRLAQPVXXPAAS

SEQ ID NO: 47347 - protein, 41 aa, Artificial Sequence; identical to SEQ ID NO: 10534
  GFR-binding peptide
  MOD_RES (1)..(35)..(36): Xaa is C or S
  MOD_RES (13)..(14)..(15)..(16)..(17): Xaa is A or G
  MOD_RES (18)..(19)..(20)..(21): Xaa is A or G or is absent

SEQ ID NO: 47348 - protein, 31 aa, Artificial Sequence
  GFR-binding peptide
  MOD_RES (31)..(31): Xaa is C or S
EVVMEVTAKKVVKDYEDIKRMQVPRLETPVX

SEQ ID NO: 47349 - protein, 35 aa, Artificial Sequence
  GFR-binding peptide
  MOD_RES (33)..(34): Xaa is C or S
  MOD_RES (11)..(12)..(13)..(14)..(15): Xaa is A or G
  MOD_RES (16)..(17)..(18)..(19): Xaa is A or G or is absent
SRVIMVTAKKXXXXXXXXXIKRIQVPRLAQPVXXP

SEQ ID NO: 47350 - protein, 37 aa, Artificial Sequence
  GFR-binding peptide
  MOD_RES (2)..(4)..(36)..(37): Xaa is C or S
RXGXGEVVMDSMEGIVVKENEDMIQMTINSLETPVXX

SEQ ID NO: 47351 - protein, 32 aa, Artificial Sequence
  GFR-binding peptide
  MOD_RES (32)..(32): Xaa is C or S
ARVVMNVQVEKIVNSSDDVKAVKVSRLQTPAX

SEQ ID NO: 47352 - protein, 32 aa, Artificial Sequence; identical to SEQ ID NO: 10538
  GFR-binding peptide
  MOD_RES (1)..(32): Xaa is C or S

SEQ ID NO: 47353 - protein, 37 aa, Artificial Sequence; identical to SEQ ID NO: 36728
  GFR-binding peptide
  MOD_RES (2)..(35)..(36): Xaa is C or S
  MOD_RES (13)..(14)..(15)..(16)..(17): Xaa is A or G
  MOD_RES (18)..(19)..(20)..(21): Xaa is A or G or is absent

SEQ ID NO: 47354 - protein, 42 aa, Artificial Sequence; identical to SEQ ID NO: 17710
  GFR-binding peptide
  MOD_RES (2)..(39): Xaa is C or S
  MOD_RES (15)..(16)..(17)..(18)..(19): Xaa is A or G
  MOD_RES (20)..(21)..(22)..(23): Xaa is A or G or is absent

SEQ ID NO: 47355 - protein, 39 aa, Artificial Sequence
  GFR-binding peptide
  MOD_RES (2)..(39): Xaa is C or S
  MOD_RES (15)..(16)..(17)..(18)..(19): Xaa is A or G
  MOD_RES (20)..(21)..(22)..(23): Xaa is A or G or is absent
KXALHDELTNSLQEXXXXXXXXXYYLVTLPELQVQTPRX

SEQ ID NO: 47356 - protein, 42 aa, Artificial Sequence; identical to SEQ ID NO: 10539
  GFR-binding peptide
  MOD_RES (2)..(4)..(38)..(39): Xaa is C or S
  MOD_RES (16)..(17)..(18)..(19)..(20): Xaa is A or G
  MOD_RES (21)..(22)..(23)..(24): Xaa is A or G or is absent

SEQ ID NO: 47357 - protein, 38 aa, Artificial Sequence
  GFR-binding peptide
  MOD_RES (2)..(2): Xaa is C or S
  MOD_RES (15)..(16)..(17)..(18)..(19): Xaa is A or G
  MOD_RES (20)..(21)..(22)..(23): Xaa is A or G or is absent
AXELHEELRNSLQEXXXXXXXXXYYVVPLPEHHVRSPQ

SEQ ID NO: 47358 - protein, 42 aa, Artificial Sequence
  GFR-binding peptide
  MOD_RES (2)..(36): Xaa is C or S
EXKNHQLFNSLQEHQGQHPKIRYYLMTLPEEETPVXELGEDN

SEQ ID NO: 47359 - protein, 32 aa, Artificial Sequence; identical to SEQ ID NO: 10543
  GFR-binding peptide
  MOD_RES (1)..(1): Xaa is C or S

SEQ ID NO: 47360 - protein, 41 aa, Artificial Sequence
  GFR-binding peptide
  MOD_RES (2)..(4)..(35)..(36): Xaa is C or S
SXKXSKVVMSMEGIVKPTRGVMIQITINSLDQPVXXPSASA

SEQ ID NO: 47361 - protein, 35 aa, Artificial Sequence; identical to SEQ ID NO: 10545
  GFR-binding peptide
  MOD_RES (2)..(34): Xaa is C or S

SEQ ID NO: 47362 - protein, 35 aa, Artificial Sequence
  GFR-binding peptide
  MOD_RES (32)..(32): Xaa is C or S
SRVVMNVTAKKIVNSSDDIKRVQVPRLKTPAXTPK

SEQ ID NO: 47363 - protein, 38 aa, Artificial Sequence
  GFR-binding peptide
  MOD_RES (2)..(4)..(36)..(37): Xaa is C or S
HXGXARVVMNVTAKKIVNSSDDIKRVQVPRLQTPAXXP

SEQ ID NO: 47364 - protein, 32 aa, Artificial Sequence; identical to SEQ ID NO: 17713
  GFR-binding peptide
  MOD_RES (11)..(12)..(13)..(14)..(15): Xaa is A or G
  MOD_RES (16)..(17)..(18)..(19): Xaa is A or G or is absent

SEQ ID NO: 47365 - protein, 36 aa, Artificial Sequence; identical to SEQ ID NO: 17715
  GFR-binding peptide
  MOD_RES (33)..(33): Xaa is C or S
  MOD_RES (11)..(12)..(13)..(14)..(15): Xaa is A or G
  MOD_RES (16)..(17)..(18)..(19): Xaa is A or G or is absent

SEQ ID NO: 47366 - protein, 35 aa, Artificial Sequence; identical to SEQ ID NO: 10548
  GFR-binding peptide
  MOD_RES (2)..(4): Xaa is C or S

SEQ ID NO: 47367 - protein, 37 aa, Artificial Sequence; identical to SEQ ID NO: 10549
  GFR-binding peptide
  MOD_RES (34)..(35): Xaa is C or S
  MOD_RES (12)..(13)..(14)..(15)..(16): Xaa is A or G
  MOD_RES (17)..(18)..(19)..(20): Xaa is A or G or is absent

SEQ ID NO: 47368 - protein, 35 aa, Artificial Sequence
  GFR-binding peptide
  MOD_RES (2)..(4)..(35): Xaa is C or S
SXKXSRVIMVQVEKVKPKRGVVKAIKVSRLAQPVX

SEQ ID NO: 47369 - protein, 41 aa, Artificial Sequence; identical to SEQ ID NO: 10550
  GFR-binding peptide
  MOD_RES (2)..(36)..(37): Xaa is C or S
  MOD_RES (14)..(15)..(16)..(17)..(18): Xaa is A or G
  MOD_RES (19)..(20)..(21)..(22): Xaa is A or G or is absent

SEQ ID NO: 47370 - protein, 40 aa, Artificial Sequence; identical to SEQ ID NO: 10551
  GFR-binding peptide
  MOD_RES (2)..(36)..(37): Xaa is C or S
  MOD_RES (14)..(15)..(16)..(17)..(18): Xaa is A or G
  MOD_RES (19)..(20)..(21)..(22): Xaa is A or G or is absent

SEQ ID NO: 47371 - protein, 40 aa, Artificial Sequence
  GFR-binding peptide
  MOD_RES (2)..(36): Xaa is C or S
EXKNHQLFNSLQEHQGQHPKIRYYLMTLPEEETPVXELGE

SEQ ID NO: 47372 - protein, 37 aa, Artificial Sequence; identical to SEQ ID NO: 10554
  GFR-binding peptide
  MOD_RES (1)..(34)..(35): Xaa is C or S
  MOD_RES (12)..(13)..(14)..(15)..(16): Xaa is A or G
  MOD_RES (17)..(18)..(19)..(20): Xaa is A or G or is absent

SEQ ID NO: 47373 - protein, 40 aa, Artificial Sequence; identical to SEQ ID NO: 10555
  GFR-binding peptide
  MOD_RES (1)..(3)..(36)..(37): Xaa is C or S
  MOD_RES (14)..(15)..(16)..(17)..(18): Xaa is A or G
  MOD_RES (19)..(20)..(21)..(22): Xaa is A or G or is absent

SEQ ID NO: 47374 - protein, 35 aa, Artificial Sequence
  GFR-binding peptide
  MOD_RES (1)..(3): Xaa is C or S
  MOD_RES (14)..(15)..(16)..(17)..(18): Xaa is A or G
  MOD_RES (19)..(20)..(21)..(22): Xaa is A or G or is absent
XKXSRVIMSMEGIXXXXXXXXXMIQITINSLAQPV

SEQ ID NO: 47375 - protein, 32 aa, Artificial Sequence
  GFR-binding peptide
  MOD_RES (1)..(32): Xaa is C or S
XSKVVMSMEGIVKPTRGVMIQITINSLDQPVX

SEQ ID NO: 47376 - protein, 41 aa, Artificial Sequence; identical to SEQ ID NO: 17723
  GFR-binding peptide
  MOD_RES (1)..(38): Xaa is C or S
  MOD_RES (14)..(15)..(16)..(17)..(18): Xaa is A or G
  MOD_RES (19)..(20)..(21)..(22): Xaa is A or G or is absent

SEQ ID NO: 47377 - protein, 38 aa, Artificial Sequence; identical to SEQ ID NO: 17724
  GFR-binding peptide
  MOD_RES (1)..(38): Xaa is C or S
  MOD_RES (14)..(15)..(16)..(17)..(18): Xaa is A or G
  MOD_RES (19)..(20)..(21)..(22): Xaa is A or G or is absent

SEQ ID NO: 47378 - protein, 35 aa, Artificial Sequence; identical to SEQ ID NO: 10556
  GFR-binding peptide
  MOD_RES (1)..(3): Xaa is C or S
  MOD_RES (14)..(15)..(16)..(17)..(18): Xaa is A or G
  MOD_RES (19)..(20)..(21)..(22): Xaa is A or G or is absent

SEQ ID NO: 47379 - protein, 37 aa, Artificial Sequence; identical to SEQ ID NO: 10557
  GFR-binding peptide
  MOD_RES (1)..(32)..(33): Xaa is C or S

SEQ ID NO: 47380 - protein, 35 aa, Artificial Sequence; identical to SEQ ID NO: 10558
  GFR-binding peptide
  MOD_RES (1)..(3)..(34)..(35): Xaa is C or S

SEQ ID NO: 47381 - protein, 37 aa, Artificial Sequence
  GFR-binding peptide
  MOD_RES (1)..(3)..(37): Xaa is C or S
  MOD_RES (15)..(16)..(17)..(18)..(19): Xaa is A or G
  MOD_RES (20)..(21)..(22)..(23): Xaa is A or G or is absent
XGXGEVVMESMEGIXXXXXXXXXMIQMTINSLETPVX

SEQ ID NO: 47382 - protein, 35 aa, Artificial Sequence; identical to SEQ ID NO: 10559
  GFR-binding peptide
  MOD_RES (34)..(35): Xaa is C or S
  MOD_RES (12)..(13)..(14)..(15)..(16): Xaa is A or G
  MOD_RES (17)..(18)..(19)..(20): Xaa is A or G or is absent

SEQ ID NO: 47383 - protein, 30 aa, Artificial Sequence; identical to SEQ ID NO: 10560
  GFR-binding peptide

SEQ ID NO: 47384 - protein, 38 aa, Artificial Sequence
  GFR-binding peptide
  MOD_RES (34)..(35): Xaa is C or S
  MOD_RES (12)..(13)..(14)..(15)..(16): Xaa is A or G
  MOD_RES (17)..(18)..(19)..(20): Xaa is A or G or is absent
ARVVMNSMEGIXXXXXXXXXMIQVTINSLQTPAXXPKP

SEQ ID NO: 47385 - protein, 38 aa, Artificial Sequence
  GFR-binding peptide
  MOD_RES (1)..(35)..(36): Xaa is C or S
  MOD_RES (13)..(14)..(15)..(16)..(17): Xaa is A or G
  MOD_RES (18)..(19)..(20)..(21): Xaa is A or G or is absent
XGEVVMESMEGIXXXXXXXXXMIQMTINSLETPVXXAK

SEQ ID NO: 47386 - protein, 36 aa, Artificial Sequence; identical to SEQ ID NO: 10561
  GFR-binding peptide
  MOD_RES (2)..(4)..(36): Xaa is C or S

SEQ ID NO: 47387 - protein, 38 aa, Artificial Sequence
  GFR-binding peptide
  MOD_RES (32)..(33): Xaa is C or S
GEVVMDSMEGIVVKENEDMIQMTINSLETPVXXAKPIK

SEQ ID NO: 47388 - protein, 42 aa, Artificial Sequence; identical to SEQ ID NO: 10562
  GFR-binding peptide
  MOD_RES (2)..(36)..(37): Xaa is C or S
  MOD_RES (14)..(15)..(16)..(17)..(18): Xaa is A or G
  MOD_RES (19)..(20)..(21)..(22): Xaa is A or G or is absent

SEQ ID NO: 47389 - protein, 42 aa, Artificial Sequence
  GFR-binding peptide
  MOD_RES (2)..(36): Xaa is C or S
  MOD_RES (14)..(15)..(16)..(17)..(18): Xaa is A or G
  MOD_RES (19)..(20)..(21)..(22): Xaa is A or G or is absent
EXKNHQLFNSLQEXXXXXXXXXYYLMTLPEEETPVXELGEDN

SEQ ID NO: 47390 - protein, 34 aa, Artificial Sequence; identical to SEQ ID NO: 10565
  GFR-binding peptide
  MOD_RES (33)..(34): Xaa is C or S
  MOD_RES (11)..(12)..(13)..(14)..(15): Xaa is A or G
  MOD_RES (16)..(17)..(18)..(19): Xaa is A or G or is absent

SEQ ID NO: 47391 - protein, 38 aa, Artificial Sequence
  GFR-binding peptide
  MOD_RES (1)..(34)..(35): Xaa is C or S
  MOD_RES (12)..(13)..(14)..(15)..(16): Xaa is A or G
  MOD_RES (17)..(18)..(19)..(20): Xaa is A or G or is absent
XSRVIMSMEGIXXXXXXXXXMIQITINSLAQPVXXPAA

SEQ ID NO: 47392 - protein, 37 aa, Artificial Sequence
  GFR-binding peptide
  MOD_RES (1)..(1): Xaa is C or S
  MOD_RES (14)..(15)..(16)..(17)..(18): Xaa is A or G
  MOD_RES (19)..(20)..(21)..(22): Xaa is A or G or is absent
XALHDELTNSLQEXXXXXXXXXYYLVTLPELQVQTPR

SEQ ID NO: 47393 - protein, 33 aa, Artificial Sequence; identical to SEQ ID NO: 17731
  GFR-binding peptide

SEQ ID NO: 47394 - protein, 37 aa, Artificial Sequence
  GFR-binding peptide
  MOD_RES (33)..(34): Xaa is C or S
  MOD_RES (11)..(12)..(13)..(14)..(15): Xaa is A or G
  MOD_RES (16)..(17)..(18)..(19): Xaa is A or G or is absent
EVVMEVQVEKXXXXXXXXXVKAMKVSRLETPVXXAKP

SEQ ID NO: 47395 - protein, 39 aa, Artificial Sequence
  GFR-binding peptide
  MOD_RES (33)..(33): Xaa is C or S
NHQLFNSLQEHQGQHPKIRYYVMPLPEEETPVXELGEDN

SEQ ID NO: 47396 - protein, 37 aa, Artificial Sequence
  GFR-binding peptide
  MOD_RES (1)..(3)..(37): Xaa is C or S
XEXKNHQLFNSLQEHQGQHPKIRYYLMTLPEEETPVX

SEQ ID NO: 47397 - protein, 41 aa, Artificial Sequence; identical to SEQ ID NO: 17734
  GFR-binding peptide
  MOD_RES (37)..(37): Xaa is C or S
  MOD_RES (13)..(14)..(15)..(16)..(17): Xaa is A or G
  MOD_RES (18)..(19)..(20)..(21): Xaa is A or G or is absent

SEQ ID NO: 47398 - protein, 36 aa, Artificial Sequence; identical to SEQ ID NO: 17736
  GFR-binding peptide
  MOD_RES (2)..(36): Xaa is C or S

SEQ ID NO: 47399 - protein, 35 aa, Artificial Sequence; identical to SEQ ID NO: 17737
  GFR-binding peptide

SEQ ID NO: 47400 - protein, 40 aa, Artificial Sequence
  GFR-binding peptide
  MOD_RES (2)..(4)..(35)..(36): Xaa is C or S
SXKXSKVIMSMEGIIKPTKGIMIQITINSLDQSVXXPSAS

SEQ ID NO: 47401 - protein, 33 aa, Artificial Sequence
  GFR-binding peptide
  MOD_RES (31)..(32): Xaa is C or S
RVVMNVQVEKIVNSSDDVKAVKVSRLQTPAXXP

SEQ ID NO: 47402 - protein, 36 aa, Artificial Sequence; identical to SEQ ID NO: 17741
  GFR-binding peptide
  MOD_RES (2)..(2): Xaa is C or S

SEQ ID NO: 47403 - protein, 36 aa, Artificial Sequence; identical to SEQ ID NO: 10576
  GFR-binding peptide
  MOD_RES (34)..(34): Xaa is C or S
  MOD_RES (12)..(13)..(14)..(15)..(16): Xaa is A or G
  MOD_RES (17)..(18)..(19)..(20): Xaa is A or G or is absent

SEQ ID NO: 47404 - protein, 39 aa, Artificial Sequence
  GFR-binding peptide
  MOD_RES (1)..(3)..(37)..(38): Xaa is C or S
  MOD_RES (15)..(16)..(17)..(18)..(19): Xaa is A or G
  MOD_RES (20)..(21)..(22)..(23): Xaa is A or G or is absent
XGXARVVMNVQVEKXXXXXXXXXVKAVKVSRLQTPAXXP

SEQ ID NO: 47405 - protein, 36 aa, Artificial Sequence
  GFR-binding peptide
  MOD_RES (33)..(33): Xaa is C or S
  MOD_RES (11)..(12)..(13)..(14)..(15): Xaa is A or G
  MOD_RES (16)..(17)..(18)..(19): Xaa is A or G or is absent
NHQLFNSLQEXXXXXXXXXYYVMPLPEEETPVXELG

SEQ ID NO: 47406 - protein, 37 aa, Artificial Sequence
  GFR-binding peptide
  MOD_RES (1)..(3)..(37): Xaa is C or S
  MOD_RES (15)..(16)..(17)..(18)..(19): Xaa is A or G
  MOD_RES (20)..(21)..(22)..(23): Xaa is A or G or is absent
XGXARVVMNSMEGIXXXXXXXXXMIQVTINSLQTPAX

SEQ ID NO: 47407 - protein, 42 aa, Artificial Sequence; identical to SEQ ID NO: 17742
  GFR-binding peptide
  MOD_RES (1)..(3)..(40): Xaa is C or S

SEQ ID NO: 47408 - protein, 36 aa, Artificial Sequence; identical to SEQ ID NO: 17744
  GFR-binding peptide
  MOD_RES (1)..(1): Xaa is C or S
  MOD_RES (14)..(15)..(16)..(17)..(18): Xaa is A or G
  MOD_RES (19)..(20)..(21)..(22): Xaa is A or G or is absent

SEQ ID NO: 47409 - protein, 41 aa, Artificial Sequence
  GFR-binding peptide
  MOD_RES (2)..(4)..(37)..(38): Xaa is C or S
  MOD_RES (15)..(16)..(17)..(18)..(19): Xaa is A or G
  MOD_RES (20)..(21)..(22)..(23): Xaa is A or G or is absent
SXKXSKVVMVQVEKXXXXXXXXXVKAIKVSRLDQPVXXPSA

SEQ ID NO: 47410 - protein, 39 aa, Artificial Sequence; identical to SEQ ID NO: 10579
  GFR-binding peptide
  MOD_RES (33)..(33): Xaa is C or S
  MOD_RES (11)..(12)..(13)..(14)..(15): Xaa is A or G
  MOD_RES (16)..(17)..(18)..(19): Xaa is A or G or is absent

SEQ ID NO: 47411 - protein, 34 aa, Artificial Sequence; identical to SEQ ID NO: 17746
  GFR-binding peptide

SEQ ID NO: 47412 - protein, 32 aa, Artificial Sequence; identical to SEQ ID NO: 10580
  GFR-binding peptide
  MOD_RES (32)..(32): Xaa is C or S

SEQ ID NO: 47413 - protein, 41 aa, Artificial Sequence; identical to SEQ ID NO: 10583
  GFR-binding peptide
  MOD_RES (2)..(4)..(36)..(37): Xaa is C or S

SEQ ID NO: 47414 - protein, 39 aa, Artificial Sequence; identical to SEQ ID NO: 10584
  GFR-binding peptide
  MOD_RES (2)..(4)..(38)..(39): Xaa is C or S
  MOD_RES (16)..(17)..(18)..(19)..(20): Xaa is A or G
  MOD_RES (21)..(22)..(23)..(24): Xaa is A or G or is absent

SEQ ID NO: 47415 - protein, 42 aa, Artificial Sequence; identical to SEQ ID NO: 10585
  GFR-binding peptide
  MOD_RES (2)..(4)..(38)..(39): Xaa is C or S
  MOD_RES (16)..(17)..(18)..(19)..(20): Xaa is A or G
  MOD_RES (21)..(22)..(23)..(24): Xaa is A or G or is absent

SEQ ID NO: 47416 - protein, 32 aa, Artificial Sequence
  GFR-binding peptide
  MOD_RES (31)..(32): Xaa is C or S
SKVVMSMEGIVKPTRGVMIQITINSLDQPVXX

SEQ ID NO: 47417 - protein, 43 aa, Artificial Sequence
  GFR-binding peptide
  MOD_RES (2)..(4)..(38): Xaa is C or S
RXEXKNHQLFNSLQEHQGQHPKIRYYVMPLPEEETPVXELGED

SEQ ID NO: 47418 - protein, 33 aa, Artificial Sequence
  GFR-binding peptide
  MOD_RES (31)..(31): Xaa is C or S
RVVMNVTAKKIVNSSDDIKRVQVPRLKTPAXTP

SEQ ID NO: 47419 - protein, 35 aa, Artificial Sequence
  GFR-binding peptide
  MOD_RES (31)..(31): Xaa is C or S
RVVMNSMEGIIVNSSDDMIQVTINSLKTPAXTPKT

SEQ ID NO: 47420 - protein, 37 aa, Artificial Sequence
  GFR-binding peptide
  MOD_RES (33)..(33): Xaa is C or S
  MOD_RES (11)..(12)..(13)..(14)..(15): Xaa is A or G
  MOD_RES (16)..(17)..(18)..(19): Xaa is A or G or is absent
NHQLFNSLQEXXXXXXXXXYYVMPLPEEETPVXELGE

SEQ ID NO: 47421 - protein, 43 aa, Artificial Sequence; identical to SEQ ID NO: 10588
  GFR-binding peptide
  MOD_RES (2)..(4)..(38)..(39): Xaa is C or S
  MOD_RES (16)..(17)..(18)..(19)..(20): Xaa is A or G
  MOD_RES (21)..(22)..(23)..(24): Xaa is A or G or is absent

SEQ ID NO: 47422 - protein, 37 aa, Artificial Sequence
  GFR-binding peptide
  MOD_RES (1)..(3)..(36)..(37): Xaa is C or S
  MOD_RES (14)..(15)..(16)..(17)..(18): Xaa is A or G
  MOD_RES (19)..(20)..(21)..(22): Xaa is A or G or is absent
XKXSKVIMVTAKKXXXXXXXXXIKRIQVPRLDQSVXX

SEQ ID NO: 47423 - protein, 42 aa, Artificial Sequence; identical to SEQ ID NO: 17751
  GFR-binding peptide
  MOD_RES (1)..(3)..(40): Xaa is C or S

SEQ ID NO: 47424 - protein, 44 aa, Artificial Sequence
  GFR-binding peptide
  MOD_RES (2)..(4)..(38)..(39): Xaa is C or S
  MOD_RES (16)..(17)..(18)..(19)..(20): Xaa is A or G
  MOD_RES (21)..(22)..(23)..(24): Xaa is A or G or is absent
RXGXGEVVMEVQVEKXXXXXXXXXVKAMKVSRLETPVXXAKPIS

SEQ ID NO: 47425 - protein, 36 aa, Artificial Sequence
  GFR-binding peptide
  MOD_RES (2)..(34)..(35): Xaa is C or S
GXGEVVMDVTAKKVVKENEDIKRMQVPRLETPVXXA

SEQ ID NO: 47426 - protein, 41 aa, Artificial Sequence; identical to SEQ ID NO: 17756
  GFR-binding peptide
  MOD_RES (37)..(37): Xaa is C or S

SEQ ID NO: 47427 - protein, 41 aa, Artificial Sequence; identical to SEQ ID NO: 10594
  GFR-binding peptide
  MOD_RES (1)..(3)..(37)..(38): Xaa is C or S
  MOD_RES (15)..(16)..(17)..(18)..(19): Xaa is A or G
  MOD_RES (20)..(21)..(22)..(23): Xaa is A or G or is absent

SEQ ID NO: 47428 - protein, 35 aa, Artificial Sequence
  GFR-binding peptide
  MOD_RES (1)..(34)..(35): Xaa is C or S
  MOD_RES (12)..(13)..(14)..(15)..(16): Xaa is A or G
  MOD_RES (17)..(18)..(19)..(20): Xaa is A or G or is absent
XSRVIMVTAKKXXXXXXXXXIKRIQVPRLAQPVXX

SEQ ID NO: 47429 - protein, 41 aa, Artificial Sequence
  GFR-binding peptide
  MOD_RES (1)..(35)..(36): Xaa is C or S
  MOD_RES (13)..(14)..(15)..(16)..(17): Xaa is A or G
  MOD_RES (18)..(19)..(20)..(21): Xaa is A or G or is absent
XGEVVMEVTAKKXXXXXXXXXIKRMQVPRLETPVXXAKPIS

SEQ ID NO: 47430 - protein, 41 aa, Artificial Sequence
  GFR-binding peptide
  MOD_RES (1)..(3)..(40): Xaa is C or S
  MOD_RES (16)..(17)..(18)..(19)..(20): Xaa is A or G
  MOD_RES (21)..(22)..(23)..(24): Xaa is A or G or is absent
XKXALHDELTNSLQEXXXXXXXXXYYVVPLPELQVQTPRXQ

SEQ ID NO: 47431 - protein, 34 aa, Artificial Sequence
  GFR-binding peptide
  MOD_RES (33)..(33): Xaa is C or S
  MOD_RES (11)..(12)..(13)..(14)..(15): Xaa is A or G
  MOD_RES (16)..(17)..(18)..(19): Xaa is A or G or is absent
RVVMNVQVEKXXXXXXXXXVKAVKVSRLKTPAXT

SEQ ID NO: 47432 - protein, 38 aa, Artificial Sequence
  GFR-binding peptide
  MOD_RES (2)..(4)..(36)..(37): Xaa is C or S
RXGXGEVVMDVQVEKVVKENEDVKAMKVSRLETPVXXA

SEQ ID NO: 47433 - protein, 36 aa, Artificial Sequence
  GFR-binding peptide
  MOD_RES (1)..(34)..(35): Xaa is C or S
  MOD_RES (12)..(13)..(14)..(15)..(16): Xaa is A or G
  MOD_RES (17)..(18)..(19)..(20): Xaa is A or G or is absent
XSKVIMSMEGIXXXXXXXXXMIQITINSLDQSVXXP

SEQ ID NO: 47434 - protein, 40 aa, Artificial Sequence
  GFR-binding peptide
  MOD_RES (1)..(3)..(35)..(36): Xaa is C or S
XGXARVVMNVQVEKIVNSSDDVKAVKVSRLQTPAXXPKPV

SEQ ID NO: 47435 - protein, 37 aa, Artificial Sequence
  GFR-binding peptide
  MOD_RES (35)..(35): Xaa is C or S
  MOD_RES (11)..(12)..(13)..(14)..(15): Xaa is A or G
  MOD_RES (16)..(17)..(18)..(19): Xaa is A or G or is absent
HEELRNSLQEXXXXXXXXXYYVVPLPEHHVRSPQXKV

SEQ ID NO: 47436 - protein, 39 aa, Artificial Sequence; identical to SEQ ID NO: 17761
  GFR-binding peptide
  MOD_RES (1)..(3): Xaa is C or S
  MOD_RES (16)..(17)..(18)..(19)..(20): Xaa is A or G
  MOD_RES (21)..(22)..(23)..(24): Xaa is A or G or is absent

SEQ ID NO: 47437 - protein, 35 aa, Artificial Sequence; identical to SEQ ID NO: 10597
  GFR-binding peptide
  MOD_RES (31)..(31): Xaa is C or S

SEQ ID NO: 47438 - protein, 36 aa, Artificial Sequence
  GFR-binding peptide
  MOD_RES (2)..(34)..(35): Xaa is C or S
GXSRVVMNVTAKKIVNSSDDIKRVQVPRLKTPAXXP

SEQ ID NO: 47439 - protein, 33 aa, Artificial Sequence
  GFR-binding peptide
  MOD_RES (31)..(32): Xaa is C or S
EVVMEVQVEKVVKDYEDVKAMKVSRLETPVXXA

SEQ ID NO: 47440 - protein, 32 aa, Artificial Sequence
  GFR-binding peptide
  MOD_RES (31)..(32): Xaa is C or S
SKVIMSMEGIIKPTKGIMIQITINSLDQSVXX

SEQ ID NO: 47441 - protein, 43 aa, Artificial Sequence; identical to SEQ ID NO: 17762
  GFR-binding peptide
  MOD_RES (1)..(3)..(40): Xaa is C or S

SEQ ID NO: 47442 - protein, 36 aa, Artificial Sequence; identical to SEQ ID NO: 17763
  GFR-binding peptide
  MOD_RES (33)..(33): Xaa is C or S

SEQ ID NO: 47443 - protein, 41 aa, Artificial Sequence; identical to SEQ ID NO: 17764
  GFR-binding peptide
  MOD_RES (1)..(3)..(40): Xaa is C or S
  MOD_RES (16)..(17)..(18)..(19)..(20): Xaa is A or G
  MOD_RES (21)..(22)..(23)..(24): Xaa is A or G or is absent

SEQ ID NO: 47444 - protein, 32 aa, Artificial Sequence; identical to SEQ ID NO: 10600
  GFR-binding peptide
  MOD_RES (2)..(2): Xaa is C or S

SEQ ID NO: 47445 - protein, 42 aa, Artificial Sequence; identical to SEQ ID NO: 10601
  GFR-binding peptide
  MOD_RES (2)..(4)..(36)..(37): Xaa is C or S

SEQ ID NO: 47446 - protein, 40 aa, Artificial Sequence; identical to SEQ ID NO: 10602
  GFR-binding peptide
  MOD_RES (2)..(35)..(36): Xaa is C or S
  MOD_RES (13)..(14)..(15)..(16)..(17): Xaa is A or G
  MOD_RES (18)..(19)..(20)..(21): Xaa is A or G or is absent

SEQ ID NO: 47447 - protein, 36 aa, Artificial Sequence; identical to SEQ ID NO: 10604
  GFR-binding peptide
  MOD_RES (1)..(3): Xaa is C or S
  MOD_RES (15)..(16)..(17)..(18)..(19): Xaa is A or G
  MOD_RES (20)..(21)..(22)..(23): Xaa is A or G or is absent

SEQ ID NO: 47448 - protein, 43 aa, Artificial Sequence
  GFR-binding peptide
  MOD_RES (1)..(3)..(37)..(38): Xaa is C or S
  MOD_RES (15)..(16)..(17)..(18)..(19): Xaa is A or G
  MOD_RES (20)..(21)..(22)..(23): Xaa is A or G or is absent
XGXGEVVMEVTAKKXXXXXXXXXIKRMQVPRLETPVXXAKPIS

SEQ ID NO: 47449 - protein, 39 aa, Artificial Sequence
  GFR-binding peptide
  MOD_RES (2)..(36): Xaa is C or S
EXKNHQLFNSLQEHQGQHPKIRYYVMPLPEEETPVXELG

SEQ ID NO: 47450 - protein, 37 aa, Artificial Sequence
  GFR-binding peptide
  MOD_RES (1)..(34)..(35): Xaa is C or S
  MOD_RES (12)..(13)..(14)..(15)..(16): Xaa is A or G
  MOD_RES (17)..(18)..(19)..(20): Xaa is A or G or is absent
XSRVIMSMEGIXXXXXXXXXMIQITINSLAQPVXXPA

SEQ ID NO: 47451 - protein, 36 aa, Artificial Sequence
  GFR-binding peptide
  MOD_RES (32)..(33): Xaa is C or S
GEVVMEVTAKKVVKDYEDIKRMQVPRLETPVXXAKP

SEQ ID NO: 47452 - protein, 40 aa, Artificial Sequence; identical to SEQ ID NO: 10606
  GFR-binding peptide
  MOD_RES (2)..(4)..(38): Xaa is C or S
  MOD_RES (16)..(17)..(18)..(19)..(20): Xaa is A or G
  MOD_RES (21)..(22)..(23)..(24): Xaa is A or G or is absent

SEQ ID NO: 47453 - protein, 39 aa, Artificial Sequence; identical to SEQ ID NO: 17768
  GFR-binding peptide
  MOD_RES (37)..(37): Xaa is C or S

SEQ ID NO: 47454 - protein, 41 aa, Artificial Sequence; identical to SEQ ID NO: 17769
  GFR-binding peptide
  MOD_RES (2)..(36): Xaa is C or S

SEQ ID NO: 47455 - protein, 41 aa, Artificial Sequence; identical to SEQ ID NO: 10607
  GFR-binding peptide
  MOD_RES (2)..(4)..(35)..(36): Xaa is C or S

SEQ ID NO: 47456 - protein, 39 aa, Artificial Sequence
  GFR-binding peptide
  MOD_RES (2)..(36): Xaa is C or S
  MOD_RES (14)..(15)..(16)..(17)..(18): Xaa is A or G
  MOD_RES (19)..(20)..(21)..(22): Xaa is A or G or is absent
GXSRVVMNVTAKKXXXXXXXXXIKRVQVPRLKTPAXTPK

SEQ ID NO: 47457 - protein, 35 aa, Artificial Sequence; identical to SEQ ID NO: 10610
  GFR-binding peptide
  MOD_RES (1)..(3)..(35): Xaa is C or S

SEQ ID NO: 47458 - protein, 35 aa, Artificial Sequence; identical to SEQ ID NO: 10611
  GFR-binding peptide
  MOD_RES (1)..(33)..(34): Xaa is C or S

SEQ ID NO: 47459 - protein, 38 aa, Artificial Sequence
  GFR-binding peptide
  MOD_RES (1)..(33)..(34): Xaa is C or S
XSRVVMNVQVEKIVNSSDDVKAVKVSRLKTPAXXPKPV

SEQ ID NO: 47460 - protein, 35 aa, Artificial Sequence; identical to SEQ ID NO: 17773
  GFR-binding peptide
  MOD_RES (1)..(35): Xaa is C or S
  MOD_RES (13)..(14)..(15)..(16)..(17): Xaa is A or G
  MOD_RES (18)..(19)..(20)..(21): Xaa is A or G or is absent

SEQ ID NO: 47461 - protein, 32 aa, Artificial Sequence
  GFR-binding peptide
  MOD_RES (1)..(1): Xaa is C or S
XSRVVMNSMEGIIVNSSDDMIQVTINSLKTPA

SEQ ID NO: 47462 - protein, 40 aa, Artificial Sequence; identical to SEQ ID NO: 10613
  GFR-binding peptide
  MOD_RES (2)..(34)..(35): Xaa is C or S

SEQ ID NO: 47463 - protein, 36 aa, Artificial Sequence; identical to SEQ ID NO: 10616
  GFR-binding peptide
  MOD_RES (1)..(34)..(35): Xaa is C or S
  MOD_RES (12)..(13)..(14)..(15)..(16): Xaa is A or G
  MOD_RES (17)..(18)..(19)..(20): Xaa is A or G or is absent

SEQ ID NO: 47464 - protein, 36 aa, Artificial Sequence
  GFR-binding peptide
  MOD_RES (2)..(35)..(36): Xaa is C or S
  MOD_RES (13)..(14)..(15)..(16)..(17): Xaa is A or G
  MOD_RES (18)..(19)..(20)..(21): Xaa is A or G or is absent
KXSRVIMVTAKKXXXXXXXXXIKRIQVPRLAQPVXX

SEQ ID NO: 47465 - protein, 40 aa, Artificial Sequence; identical to SEQ ID NO: 17774
  GFR-binding peptide
  MOD_RES (1)..(38): Xaa is C or S
  MOD_RES (14)..(15)..(16)..(17)..(18): Xaa is A or G
  MOD_RES (19)..(20)..(21)..(22): Xaa is A or G or is absent

SEQ ID NO: 47466 - protein, 37 aa, Artificial Sequence
  GFR-binding peptide
  MOD_RES (33)..(33): Xaa is C or S
NHQLFNSLQEHQGQHPKIRYYLMTLPEEETPVXELGE

SEQ ID NO: 47467 - protein, 37 aa, Artificial Sequence; identical to SEQ ID NO: 10617
  GFR-binding peptide
  MOD_RES (1)..(33)..(34): Xaa is C or S

SEQ ID NO: 47468 - protein, 35 aa, Artificial Sequence
  GFR-binding peptide
  MOD_RES (1)..(3)..(35): Xaa is C or S
XGXGEVVMDVQVEKVVKENEDVKAMKVSRLETPVX

SEQ ID NO: 47469 - protein, 40 aa, Artificial Sequence; identical to SEQ ID NO: 10618
  GFR-binding peptide
  MOD_RES (1)..(3)..(34)..(35): Xaa is C or S

SEQ ID NO: 47470 - protein, 34 aa, Artificial Sequence; identical to SEQ ID NO: 17778
  GFR-binding peptide
  MOD_RES (1)..(1): Xaa is C or S

SEQ ID NO: 47471 - protein, 37 aa, Artificial Sequence; identical to SEQ ID NO: 17779
  GFR-binding peptide
  MOD_RES (36)..(36): Xaa is C or S

SEQ ID NO: 47472 - protein, 39 aa, Artificial Sequence; identical to SEQ ID NO: 17780
  GFR-binding peptide
  MOD_RES (1)..(38): Xaa is C or S

SEQ ID NO: 47473 - protein, 35 aa, Artificial Sequence
  GFR-binding peptide
  MOD_RES (1)..(32)..(33): Xaa is C or S
XSKVIMVTAKKIKPTKGIIKRIQVPRLDQSVXXPS

SEQ ID NO: 47474 - protein, 38 aa, Artificial Sequence
  GFR-binding peptide
  MOD_RES (37)..(37): Xaa is C or S
  MOD_RES (13)..(14)..(15)..(16)..(17): Xaa is A or G
  MOD_RES (18)..(19)..(20)..(21): Xaa is A or G or is absent
ELHEELRNSLQEXXXXXXXXXYYLVTLPEHHVRSPQXK

SEQ ID NO: 47475 - protein, 39 aa, Artificial Sequence
  GFR-binding peptide
  MOD_RES (1)..(33)..(34): Xaa is C or S
XGEVVMESMEGIVVKDYEDMIQMTINSLETPVXXAKPIS

SEQ ID NO: 47476 - protein, 40 aa, Artificial Sequence
  GFR-binding peptide
  MOD_RES (34)..(35): Xaa is C or S
  MOD_RES (12)..(13)..(14)..(15)..(16): Xaa is A or G
  MOD_RES (17)..(18)..(19)..(20): Xaa is A or G or is absent
SRVVMNVQVEKXXXXXXXXXVKAVKVSRLKTPAXXPKPVY

SEQ ID NO: 47477 - protein, 38 aa, Artificial Sequence; identical to SEQ ID NO: 10625
  GFR-binding peptide
  MOD_RES (2)..(33)..(34): Xaa is C or S

SEQ ID NO: 47478 - protein, 40 aa, Artificial Sequence; identical to SEQ ID NO: 36862
  GFR-binding peptide
  MOD_RES (1)..(3)..(36)..(37): Xaa is C or S
  MOD_RES (14)..(15)..(16)..(17)..(18): Xaa is A or G
  MOD_RES (19)..(20)..(21)..(22): Xaa is A or G or is absent

SEQ ID NO: 47479 - protein, 34 aa, Artificial Sequence; identical to SEQ ID NO: 10627
  GFR-binding peptide
  MOD_RES (1)..(3)..(34): Xaa is C or S

SEQ ID NO: 47480 - protein, 43 aa, Artificial Sequence
  GFR-binding peptide
  MOD_RES (2)..(39): Xaa is C or S
KXALHDELTNSLQEFIPKKRVIEYYVVPLPELQVQTPRXQVNR

SEQ ID NO: 47481 - protein, 37 aa, Artificial Sequence; identical to SEQ ID NO: 10628
  GFR-binding peptide
  MOD_RES (2)..(4): Xaa is C or S
  MOD_RES (16)..(17)..(18)..(19)..(20): Xaa is A or G
  MOD_RES (21)..(22)..(23)..(24): Xaa is A or G or is absent

SEQ ID NO: 47482 - protein, 43 aa, Artificial Sequence; identical to SEQ ID NO: 17786
  GFR-binding peptide
  MOD_RES (1)..(3)..(37): Xaa is C or S
  MOD_RES (15)..(16)..(17)..(18)..(19): Xaa is A or G
  MOD_RES (20)..(21)..(22)..(23): Xaa is A or G or is absent

SEQ ID NO: 47483 - protein, 41 aa, Artificial Sequence
  GFR-binding peptide
  MOD_RES (2)..(4)..(38): Xaa is C or S
RXEXKNHQLFNSLQEHQGQHPKIRYYLMTLPEEETPVXELG

SEQ ID NO: 47484 - protein, 39 aa, Artificial Sequence
  GFR-binding peptide
  MOD_RES (33)..(34): Xaa is C or S
  MOD_RES (11)..(12)..(13)..(14)..(15): Xaa is A or G
  MOD_RES (16)..(17)..(18)..(19): Xaa is A or G or is absent
SKVVMVTAKKXXXXXXXXXIKRIQVPRLDQPVXXPSASA

SEQ ID NO: 47485 - protein, 39 aa, Artificial Sequence
  GFR-binding peptide
  MOD_RES (1)..(3)..(34)..(35): Xaa is C or S
XKXSKVIMVTAKKIKPTKGIIKRIQVPRLDQSVXXPSAS

SEQ ID NO: 47486 - protein, 33 aa, Artificial Sequence
  GFR-binding peptide
KNHQLFNSLQEHQGQHPKIRYYLMTLPEEETPV

SEQ ID NO: 47487 - protein, 41 aa, Artificial Sequence
  GFR-binding peptide
  MOD_RES (1)..(3)..(35)..(36): Xaa is C or S
XGXARVVMNVQVEKIVNSSDDVKAVKVSRLQTPAXXPKPVT

SEQ ID NO: 47488 - protein, 43 aa, Artificial Sequence
  GFR-binding peptide
  MOD_RES (1)..(3)..(37)..(38): Xaa is C or S
  MOD_RES (15)..(16)..(17)..(18)..(19): Xaa is A or G
  MOD_RES (20)..(21)..(22)..(23): Xaa is A or G or is absent
XGXARVVMNVQVEKXXXXXXXXXVKAVKVSRLQTPAXXPKPVT

SEQ ID NO: 47489 - protein, 38 aa, Artificial Sequence
  GFR-binding peptide
  MOD_RES (1)..(3)..(36)..(37): Xaa is C or S
  MOD_RES (14)..(15)..(16)..(17)..(18): Xaa is A or G
  MOD_RES (19)..(20)..(21)..(22): Xaa is A or G or is absent
XKXSKVVMSMEGIXXXXXXXXXMIQITINSLDQPVXXP

SEQ ID NO: 47490 - protein, 39 aa, Artificial Sequence; identical to SEQ ID NO: 17792
  GFR-binding peptide
  MOD_RES (1)..(3)..(37): Xaa is C or S
  MOD_RES (15)..(16)..(17)..(18)..(19): Xaa is A or G
  MOD_RES (20)..(21)..(22)..(23): Xaa is A or G or is absent

SEQ ID NO: 47491 - protein, 36 aa, Artificial Sequence; identical to SEQ ID NO: 10641
  GFR-binding peptide
  MOD_RES (1)..(35): Xaa is C or S
  MOD_RES (13)..(14)..(15)..(16)..(17): Xaa is A or G
  MOD_RES (18)..(19)..(20)..(21): Xaa is A or G or is absent

SEQ ID NO: 47492 - protein, 40 aa, Artificial Sequence; identical to SEQ ID NO: 17797
  GFR-binding peptide
  MOD_RES (34)..(34): Xaa is C or S
  MOD_RES (12)..(13)..(14)..(15)..(16): Xaa is A or G
  MOD_RES (17)..(18)..(19)..(20): Xaa is A or G or is absent

SEQ ID NO: 47493 - protein, 39 aa, Artificial Sequence
  GFR-binding peptide
  MOD_RES (2)..(4): Xaa is C or S
AXAXELHEELRNSLQELKPKKRVYEYYVVPLPEHHVRSP

SEQ ID NO: 47494 - protein, 37 aa, Artificial Sequence; identical to SEQ ID NO: 10643
  GFR-binding peptide
  MOD_RES (32)..(33): Xaa is C or S

SEQ ID NO: 47495 - protein, 35 aa, Artificial Sequence
  GFR-binding peptide
  MOD_RES (1)..(3)..(35): Xaa is C or S
XGXARVVMNVTAKKIVNSSDDIKRVQVPRLQTPAX

SEQ ID NO: 47496 - protein, 37 aa, Artificial Sequence
  GFR-binding peptide
  MOD_RES (2)..(35)..(36): Xaa is C or S
  MOD_RES (13)..(14)..(15)..(16)..(17): Xaa is A or G
  MOD_RES (18)..(19)..(20)..(21): Xaa is A or G or is absent
KXSKVVMSMEGIXXXXXXXXXMIQITINSLDQPVXXP

SEQ ID NO: 47497 - protein, 32 aa, Artificial Sequence
  GFR-binding peptide
  MOD_RES (32)..(32): Xaa is C or S
SRVVMNVQVEKIVNSSDDVKAVKVSRLKTPAX

SEQ ID NO: 47498 - protein, 37 aa, Artificial Sequence; identical to SEQ ID NO: 10644
  GFR-binding peptide
  MOD_RES (2)..(4): Xaa is C or S
  MOD_RES (16)..(17)..(18)..(19)..(20): Xaa is A or G
  MOD_RES (21)..(22)..(23)..(24): Xaa is A or G or is absent

SEQ ID NO: 47499 - protein, 37 aa, Artificial Sequence; identical to SEQ ID NO: 10646
  GFR-binding peptide
  MOD_RES (2)..(33)..(34): Xaa is C or S

SEQ ID NO: 47500 - protein, 37 aa, Artificial Sequence
  GFR-binding peptide
  MOD_RES (35)..(35): Xaa is C or S
  MOD_RES (11)..(12)..(13)..(14)..(15): Xaa is A or G
  MOD_RES (16)..(17)..(18)..(19): Xaa is A or G or is absent
HEELRNSLQEXXXXXXXXXYYLVTLPEHHVRSPQXKV

SEQ ID NO: 47501 - protein, 40 aa, Artificial Sequence
  GFR-binding peptide
  MOD_RES (2)..(36)..(37): Xaa is C or S
  MOD_RES (14)..(15)..(16)..(17)..(18): Xaa is A or G
  MOD_RES (19)..(20)..(21)..(22): Xaa is A or G or is absent
GXARVVMNVQVEKXXXXXXXXXVKAVKVSRLQTPAXXPKP

SEQ ID NO: 47502 - protein, 35 aa, Artificial Sequence; identical to SEQ ID NO: 10651
  GFR-binding peptide
  MOD_RES (1)..(35): Xaa is C or S
  MOD_RES (13)..(14)..(15)..(16)..(17): Xaa is A or G
  MOD_RES (18)..(19)..(20)..(21): Xaa is A or G or is absent

SEQ ID NO: 47503 - protein, 34 aa, Artificial Sequence; identical to SEQ ID NO: 10652
  GFR-binding peptide
  MOD_RES (1)..(34): Xaa is C or S
  MOD_RES (12)..(13)..(14)..(15)..(16): Xaa is A or G
  MOD_RES (17)..(18)..(19)..(20): Xaa is A or G or is absent

SEQ ID NO: 47504 - protein, 36 aa, Artificial Sequence
  GFR-binding peptide
  MOD_RES (1)..(3)..(35)..(36): Xaa is C or S
XGXSRVVMNVQVEKIVNSSDDVKAVKVSRLKTPAXX

SEQ ID NO: 47505 - protein, 34 aa, Artificial Sequence
  GFR-binding peptide
  MOD_RES (2)..(34): Xaa is C or S
GXSRVVMNSMEGIIVNSSDDMIQVTINSLKTPAX

SEQ ID NO: 47506 - protein, 34 aa, Artificial Sequence; identical to SEQ ID NO: 10654
  GFR-binding peptide
  MOD_RES (31)..(32): Xaa is C or S

SEQ ID NO: 47507 - protein, 41 aa, Artificial Sequence; identical to SEQ ID NO: 10655
  GFR-binding peptide
  MOD_RES (2)..(36): Xaa is C or S
  MOD_RES (14)..(15)..(16)..(17)..(18): Xaa is A or G
  MOD_RES (19)..(20)..(21)..(22): Xaa is A or G or is absent

SEQ ID NO: 47508 - protein, 42 aa, Artificial Sequence
  GFR-binding peptide
  MOD_RES (2)..(36)..(37): Xaa is C or S
  MOD_RES (14)..(15)..(16)..(17)..(18): Xaa is A or G
  MOD_RES (19)..(20)..(21)..(22): Xaa is A or G or is absent
GXARVVMNVQVEKXXXXXXXXXVKAVKVSRLQTPAXXPKPVT

SEQ ID NO: 47509 - protein, 41 aa, Artificial Sequence; identical to SEQ ID NO: 17801
  GFR-binding peptide
  MOD_RES (1)..(3)..(40): Xaa is C or S

SEQ ID NO: 47510 - protein, 39 aa, Artificial Sequence
  GFR-binding peptide
  MOD_RES (1)..(38): Xaa is C or S
XALHDELTNSLQEFIPKKRVIEYYVVPLPELQVQTPRXQ

SEQ ID NO: 47511 - protein, 37 aa, Artificial Sequence; identical to SEQ ID NO: 17803
  GFR-binding peptide
  MOD_RES (34)..(34): Xaa is C or S

SEQ ID NO: 47512 - protein, 36 aa, Artificial Sequence; identical to SEQ ID NO: 10659
  GFR-binding peptide
  MOD_RES (1)..(33)..(34): Xaa is C or S

SEQ ID NO: 47513 - protein, 31 aa, Artificial Sequence
  GFR-binding peptide
  MOD_RES (1)..(1): Xaa is C or S
XSKVIMSMEGIIKPTKGIMIQITINSLDQSV

SEQ ID NO: 47514 - protein, 37 aa, Artificial Sequence
  GFR-binding peptide
  MOD_RES (1)..(35)..(36): Xaa is C or S
  MOD_RES (13)..(14)..(15)..(16)..(17): Xaa is A or G
  MOD_RES (18)..(19)..(20)..(21): Xaa is A or G or is absent
XGEVVMEVQVEKXXXXXXXXXVKAMKVSRLETPVXXA

SEQ ID NO: 47515 - protein, 44 aa, Artificial Sequence
  GFR-binding peptide
  MOD_RES (2)..(4)..(41): Xaa is C or S
EXKXALHDELTNSLQEFIPKKRVIEYYVVPLPELQVQTPRXQVN

SEQ ID NO: 47516 - protein, 39 aa, Artificial Sequence; identical to SEQ ID NO: 10662
  GFR-binding peptide
  MOD_RES (1)..(33)..(34): Xaa is C or S

SEQ ID NO: 47517 - protein, 36 aa, Artificial Sequence
  GFR-binding peptide
  MOD_RES (1)..(3)..(36): Xaa is C or S
  MOD_RES (14)..(15)..(16)..(17)..(18): Xaa is A or G
  MOD_RES (19)..(20)..(21)..(22): Xaa is A or G or is absent
XKXSRVIMVTAKKXXXXXXXXXIKRIQVPRLAQPVX

SEQ ID NO: 47518 - protein, 35 aa, Artificial Sequence; identical to SEQ ID NO: 10663
  GFR-binding peptide
  MOD_RES (2)..(35): Xaa is C or S
  MOD_RES (13)..(14)..(15)..(16)..(17): Xaa is A or G
  MOD_RES (18)..(19)..(20)..(21): Xaa is A or G or is absent

SEQ ID NO: 47519 - protein, 40 aa, Artificial Sequence; identical to SEQ ID NO: 17806
  GFR-binding peptide
  MOD_RES (1)..(38): Xaa is C or S
  MOD_RES (14)..(15)..(16)..(17)..(18): Xaa is A or G
  MOD_RES (19)..(20)..(21)..(22): Xaa is A or G or is absent

SEQ ID NO: 47520 - protein, 36 aa, Artificial Sequence; identical to SEQ ID NO: 10664
  GFR-binding peptide
  MOD_RES (33)..(34): Xaa is C or S
  MOD_RES (11)..(12)..(13)..(14)..(15): Xaa is A or G
  MOD_RES (16)..(17)..(18)..(19): Xaa is A or G or is absent

SEQ ID NO: 47521 - protein, 32 aa, Artificial Sequence
  GFR-binding peptide
  MOD_RES (31)..(31): Xaa is C or S
RVVMNVQVEKIVNSSDDVKAVKVSRLKTPAXT

SEQ ID NO: 47522 - protein, 39 aa, Artificial Sequence
  GFR-binding peptide
  MOD_RES (1)..(3)..(34)..(35): Xaa is C or S
XKXSKVVMVTAKKVKPTRGVIKRIQVPRLDQPVXXPSAS

SEQ ID NO: 47523 - protein, 45 aa, Artificial Sequence
  GFR-binding peptide
  MOD_RES (2)..(4)..(41): Xaa is C or S
  MOD_RES (17)..(18)..(19)..(20)..(21): Xaa is A or G
  MOD_RES (22)..(23)..(24)..(25): Xaa is A or G or is absent
AXAXELHEELRNSLQEXXXXXXXXXYYVVPLPEHHVRSPQXKVSS

SEQ ID NO: 47524 - protein, 34 aa, Artificial Sequence; identical to SEQ ID NO: 17808
  GFR-binding peptide

SEQ ID NO: 47525 - protein, 38 aa, Artificial Sequence
  GFR-binding peptide
  MOD_RES (1)..(34)..(35): Xaa is C or S
  MOD_RES (12)..(13)..(14)..(15)..(16): Xaa is A or G
  MOD_RES (17)..(18)..(19)..(20): Xaa is A or G or is absent
XSKVVMSMEGIXXXXXXXXXMIQITINSLDQPVXXPSA

SEQ ID NO: 47526 - protein, 36 aa, Artificial Sequence
  GFR-binding peptide
  MOD_RES (1)..(35): Xaa is C or S
  MOD_RES (13)..(14)..(15)..(16)..(17): Xaa is A or G
  MOD_RES (18)..(19)..(20)..(21): Xaa is A or G or is absent
XKNHQLFNSLQEXXXXXXXXXYYVMPLPEEETPVXE

SEQ ID NO: 47527 - protein, 37 aa, Artificial Sequence
  GFR-binding peptide
  MOD_RES (1)..(3)..(34)..(35): Xaa is C or S
XKXSRVIMVTAKKVKPKRGVIKRIQVPRLAQPVXXPA

SEQ ID NO: 47528 - protein, 39 aa, Artificial Sequence; identical to SEQ ID NO: 10666
  GFR-binding peptide
  MOD_RES (2)..(34)..(35): Xaa is C or S

SEQ ID NO: 47529 - protein, 35 aa, Artificial Sequence; identical to SEQ ID NO: 17810
  GFR-binding peptide
  MOD_RES (35)..(35): Xaa is C or S

SEQ ID NO: 47530 - protein, 40 aa, Artificial Sequence
  GFR-binding peptide
  MOD_RES (2)..(4)..(36)..(37): Xaa is C or S
HXGXSRVVMNVQVEKIVNSSDDVKAVKVSRLKTPAXXPKP

SEQ ID NO: 47531 - protein, 39 aa, Artificial Sequence
  GFR-binding peptide
  MOD_RES (36)..(36): Xaa is C or S
  MOD_RES (12)..(13)..(14)..(15)..(16): Xaa is A or G
  MOD_RES (17)..(18)..(19)..(20): Xaa is A or G or is absent
LHEELRNSLQEXXXXXXXXXYYLVTLPEHHVRSPQXKVS

SEQ ID NO: 47532 - protein, 37 aa, Artificial Sequence
  GFR-binding peptide
  MOD_RES (33)..(33): Xaa is C or S
NHQLFNSLQEHQGQHPKIRYYVMPLPEEETPVXELGE

SEQ ID NO: 47533 - protein, 37 aa, Artificial Sequence
  GFR-binding peptide
  MOD_RES (1)..(3): Xaa is C or S
  MOD_RES (16)..(17)..(18)..(19)..(20): Xaa is A or G
  MOD_RES (21)..(22)..(23)..(24): Xaa is A or G or is absent
XKXALHDELTNSLQEXXXXXXXXXYYLVTLPELQVQT

SEQ ID NO: 47534 - protein, 35 aa, Artificial Sequence; identical to SEQ ID NO: 10669
  GFR-binding peptide
  MOD_RES (2)..(2): Xaa is C or S
  MOD_RES (14)..(15)..(16)..(17)..(18): Xaa is A or G
  MOD_RES (19)..(20)..(21)..(22): Xaa is A or G or is absent

SEQ ID NO: 47535 - protein, 38 aa, Artificial Sequence; identical to SEQ ID NO: 17813
  GFR-binding peptide
  MOD_RES (2)..(4)..(38): Xaa is C or S

SEQ ID NO: 47536 - protein, 37 aa, Artificial Sequence; identical to SEQ ID NO: 10670
  GFR-binding peptide
  MOD_RES (2)..(36): Xaa is C or S
  MOD_RES (14)..(15)..(16)..(17)..(18): Xaa is A or G
  MOD_RES (19)..(20)..(21)..(22): Xaa is A or G or is absent

SEQ ID NO: 47537 - protein, 43 aa, Artificial Sequence; identical to SEQ ID NO: 17815
  GFR-binding peptide
  MOD_RES (2)..(4)..(41): Xaa is C or S

SEQ ID NO: 47538 - protein, 37 aa, Artificial Sequence
  GFR-binding peptide
  MOD_RES (1)..(33)..(34): Xaa is C or S
XSRVVMNSMEGIIVNSSDDMIQVTINSLKTPAXXPKP

SEQ ID NO: 47539 - protein, 35 aa, Artificial Sequence
  GFR-binding peptide
  MOD_RES (2)..(34)..(35): Xaa is C or S
GXGEVVMDVTAKKVVKENEDIKRMQVPRLETPVXX

SEQ ID NO: 47540 - protein, 38 aa, Artificial Sequence
  GFR-binding peptide
  MOD_RES (1)..(3)..(37): Xaa is C or S
  MOD_RES (15)..(16)..(17)..(18)..(19): Xaa is A or G
  MOD_RES (20)..(21)..(22)..(23): Xaa is A or G or is absent
XGXSRVVMNVQVEKXXXXXXXXXVKAVKVSRLKTPAXT

SEQ ID NO: 47541 - protein, 37 aa, Artificial Sequence; identical to SEQ ID NO: 10673
  GFR-binding peptide
  MOD_RES (2)..(4)..(36)..(37): Xaa is C or S

SEQ ID NO: 47542 - protein, 42 aa, Artificial Sequence; identical to SEQ ID NO: 17821
  GFR-binding peptide
  MOD_RES (1)..(38): Xaa is C or S
  MOD_RES (14)..(15)..(16)..(17)..(18): Xaa is A or G
  MOD_RES (19)..(20)..(21)..(22): Xaa is A or G or is absent

SEQ ID NO: 47543 - protein, 39 aa, Artificial Sequence; identical to SEQ ID NO: 17822
  GFR-binding peptide
  MOD_RES (2)..(39): Xaa is C or S

SEQ ID NO: 47544 - protein, 38 aa, Artificial Sequence; identical to SEQ ID NO: 17823
  GFR-binding peptide
  MOD_RES (1)..(38): Xaa is C or S
  MOD_RES (14)..(15)..(16)..(17)..(18): Xaa is A or G
  MOD_RES (19)..(20)..(21)..(22): Xaa is A or G or is absent

SEQ ID NO: 47545 - protein, 34 aa, Artificial Sequence
  GFR-binding peptide
  MOD_RES (31)..(31): Xaa is C or S
RVVMNVTAKKIVNSSDDIKRVQVPRLKTPAXTPK

SEQ ID NO: 47546 - protein, 35 aa, Artificial Sequence
  GFR-binding peptide
  MOD_RES (34)..(34): Xaa is C or S
  MOD_RES (12)..(13)..(14)..(15)..(16): Xaa is A or G
  MOD_RES (17)..(18)..(19)..(20): Xaa is A or G or is absent
KNHQLFNSLQEXXXXXXXXXYYVMPLPEEETPVXE

SEQ ID NO: 47547 - protein, 37 aa, Artificial Sequence
  GFR-binding peptide
  MOD_RES (2)..(4)..(35)..(36): Xaa is C or S
SXKXSKVVMVQVEKVKPTRGVVKAIKVSRLDQPVXXP

SEQ ID NO: 47548 - protein, 36 aa, Artificial Sequence
  GFR-binding peptide
  MOD_RES (32)..(33): Xaa is C or S
GEVVMDVTAKKVVKENEDIKRMQVPRLETPVXXAKP

SEQ ID NO: 47549 - protein, 38 aa, Artificial Sequence
  GFR-binding peptide
  MOD_RES (1)..(3): Xaa is C or S
XKXALHDELTNSLQEFIPKKRVIEYYVVPLPELQVQTP

SEQ ID NO: 47550 - protein, 36 aa, Artificial Sequence
  GFR-binding peptide
  MOD_RES (32)..(32): Xaa is C or S
SRVVMNSMEGIIVNSSDDMIQVTINSLKTPAXTPKT

SEQ ID NO: 47551 - protein, 41 aa, Artificial Sequence; identical to SEQ ID NO: 10675
  GFR-binding peptide
  MOD_RES (2)..(4)..(35)..(36): Xaa is C or S

SEQ ID NO: 47552 - protein, 36 aa, Artificial Sequence; identical to SEQ ID NO: 10676
  GFR-binding peptide
  MOD_RES (33)..(34): Xaa is C or S
  MOD_RES (11)..(12)..(13)..(14)..(15): Xaa is A or G
  MOD_RES (16)..(17)..(18)..(19): Xaa is A or G or is absent

SEQ ID NO: 47553 - protein, 39 aa, Artificial Sequence
  GFR-binding peptide
  MOD_RES (1)..(3)..(37)..(38): Xaa is C or S
  MOD_RES (15)..(16)..(17)..(18)..(19): Xaa is A or G
  MOD_RES (20)..(21)..(22)..(23): Xaa is A or G or is absent
XGXGEVVMDVTAKKXXXXXXXXXIKRMQVPRLETPVXXA

SEQ ID NO: 47554 - protein, 38 aa, Artificial Sequence; identical to SEQ ID NO: 17829
  GFR-binding peptide
  MOD_RES (1)..(38): Xaa is C or S
  MOD_RES (14)..(15)..(16)..(17)..(18): Xaa is A or G
  MOD_RES (19)..(20)..(21)..(22): Xaa is A or G or is absent

SEQ ID NO: 47555 - protein, 43 aa, Artificial Sequence
  GFR-binding peptide
  MOD_RES (2)..(4)..(41): Xaa is C or S
  MOD_RES (17)..(18)..(19)..(20)..(21): Xaa is A or G
  MOD_RES (22)..(23)..(24)..(25): Xaa is A or G or is absent
AXAXELHEELRNSLQEXXXXXXXXXYYLVTLPEHHVRSPQXKV

SEQ ID NO: 47556 - protein, 35 aa, Artificial Sequence; identical to SEQ ID NO: 10680
  GFR-binding peptide
  MOD_RES (34)..(34): Xaa is C or S
  MOD_RES (12)..(13)..(14)..(15)..(16): Xaa is A or G
  MOD_RES (17)..(18)..(19)..(20): Xaa is A or G or is absent

SEQ ID NO: 47557 - protein, 40 aa, Artificial Sequence; identical to SEQ ID NO: 10682
  GFR-binding peptide
  MOD_RES (2)..(36)..(37): Xaa is C or S
  MOD_RES (14)..(15)..(16)..(17)..(18): Xaa is A or G
  MOD_RES (19)..(20)..(21)..(22): Xaa is A or G or is absent

SEQ ID NO: 47558 - protein, 36 aa, Artificial Sequence
  GFR-binding peptide
  MOD_RES (1)..(33)..(34): Xaa is C or S
XSRVVMNVQVEKIVNSSDDVKAVKVSRLKTPAXXPK

SEQ ID NO: 47559 - protein, 42 aa, Artificial Sequence; identical to SEQ ID NO: 10687
  GFR-binding peptide
  MOD_RES (1)..(3)..(36)..(37): Xaa is C or S
  MOD_RES (14)..(15)..(16)..(17)..(18): Xaa is A or G
  MOD_RES (19)..(20)..(21)..(22): Xaa is A or G or is absent

SEQ ID NO: 47560 - protein, 43 aa, Artificial Sequence
  GFR-binding peptide
  MOD_RES (1)..(3)..(37)..(38): Xaa is C or S
  MOD_RES (15)..(16)..(17)..(18)..(19): Xaa is A or G
  MOD_RES (20)..(21)..(22)..(23): Xaa is A or G or is absent
XGXSRVVMNVTAKKXXXXXXXXXIKRVQVPRLKTPAXXPKPVY

SEQ ID NO: 47561 - protein, 37 aa, Artificial Sequence; identical to SEQ ID NO: 17834
  GFR-binding peptide
  MOD_RES (1)..(1): Xaa is C or S

SEQ ID NO: 47562 - protein, 40 aa, Artificial Sequence; identical to SEQ ID NO: 10690
  GFR-binding peptide
  MOD_RES (1)..(3)..(34)..(35): Xaa is C or S

SEQ ID NO: 47563 - protein, 33 aa, Artificial Sequence
  GFR-binding peptide
  MOD_RES (11)..(12)..(13)..(14)..(15): Xaa is A or G
  MOD_RES (16)..(17)..(18)..(19): Xaa is A or G or is absent
HDELTNSLQEXXXXXXXXXYYVVPLPELQVQTP

SEQ ID NO: 47564 - protein, 37 aa, Artificial Sequence
  GFR-binding peptide
  MOD_RES (1)..(35): Xaa is C or S
  MOD_RES (13)..(14)..(15)..(16)..(17): Xaa is A or G
  MOD_RES (18)..(19)..(20)..(21): Xaa is A or G or is absent
XKNHQLFNSLQEXXXXXXXXXYYLMTLPEEETPVXEL

SEQ ID NO: 47565 - protein, 34 aa, Artificial Sequence; identical to SEQ ID NO: 10691
  GFR-binding peptide
  MOD_RES (1)..(34): Xaa is C or S
  MOD_RES (12)..(13)..(14)..(15)..(16): Xaa is A or G
  MOD_RES (17)..(18)..(19)..(20): Xaa is A or G or is absent

SEQ ID NO: 47566 - protein, 36 aa, Artificial Sequence; identical to SEQ ID NO: 10692
  GFR-binding peptide
  MOD_RES (33)..(34): Xaa is C or S
  MOD_RES (11)..(12)..(13)..(14)..(15): Xaa is A or G
  MOD_RES (16)..(17)..(18)..(19): Xaa is A or G or is absent

SEQ ID NO: 47567 - protein, 34 aa, Artificial Sequence
  GFR-binding peptide
  MOD_RES (2)..(2): Xaa is C or S
  MOD_RES (13)..(14)..(15)..(16)..(17): Xaa is A or G
  MOD_RES (18)..(19)..(20)..(21): Xaa is A or G or is absent
KXSKVIMSMEGIXXXXXXXXXMIQITINSLDQSV

SEQ ID NO: 47568 - protein, 38 aa, Artificial Sequence; identical to SEQ ID NO: 10696
  GFR-binding peptide
  MOD_RES (33)..(34): Xaa is C or S
  MOD_RES (11)..(12)..(13)..(14)..(15): Xaa is A or G
  MOD_RES (16)..(17)..(18)..(19): Xaa is A or G or is absent

SEQ ID NO: 47569 - protein, 35 aa, Artificial Sequence
  GFR-binding peptide
  MOD_RES (33)..(34): Xaa is C or S
  MOD_RES (11)..(12)..(13)..(14)..(15): Xaa is A or G
  MOD_RES (16)..(17)..(18)..(19): Xaa is A or G or is absent
SKVIMSMEGIXXXXXXXXXMIQITINSLDQSVXXP

SEQ ID NO: 47570 - protein, 35 aa, Artificial Sequence; identical to SEQ ID NO: 10697
  GFR-binding peptide
  MOD_RES (32)..(33): Xaa is C or S

SEQ ID NO: 47571 - protein, 34 aa, Artificial Sequence
  GFR-binding peptide
  MOD_RES (34)..(34): Xaa is C or S
KNHQLFNSLQEHQGQHPKIRYYVMPLPEEETPVX

SEQ ID NO: 47572 - protein, 32 aa, Artificial Sequence
  GFR-binding peptide
HDELTNSLQEFIPKKRVIEYYLVTLPELQVQT

SEQ ID NO: 47573 - protein, 38 aa, Artificial Sequence
  GFR-binding peptide
  MOD_RES (2)..(4)..(37)..(38): Xaa is C or S
  MOD_RES (15)..(16)..(17)..(18)..(19): Xaa is A or G
  MOD_RES (20)..(21)..(22)..(23): Xaa is A or G or is absent
SXKXSKVIMVTAKKXXXXXXXXXIKRIQVPRLDQSVXX

SEQ ID NO: 47574 - protein, 33 aa, Artificial Sequence; identical to SEQ ID NO: 10699
  GFR-binding peptide
  MOD_RES (1)..(3): Xaa is C or S

SEQ ID NO: 47575 - protein, 36 aa, Artificial Sequence; identical to SEQ ID NO: 10700
  GFR-binding peptide
  MOD_RES (33)..(34): Xaa is C or S
  MOD_RES (11)..(12)..(13)..(14)..(15): Xaa is A or G
  MOD_RES (16)..(17)..(18)..(19): Xaa is A or G or is absent

SEQ ID NO: 47576 - protein, 30 aa, Artificial Sequence
  GFR-binding peptide
EVVMDVQVEKVVKENEDVKAMKVSRLETPV

SEQ ID NO: 47577 - protein, 39 aa, Artificial Sequence; identical to SEQ ID NO: 17837
  GFR-binding peptide
  MOD_RES (2)..(4)..(38): Xaa is C or S

SEQ ID NO: 47578 - protein, 41 aa, Artificial Sequence; identical to SEQ ID NO: 10701
  GFR-binding peptide
  MOD_RES (2)..(35)..(36): Xaa is C or S
  MOD_RES (13)..(14)..(15)..(16)..(17): Xaa is A or G
  MOD_RES (18)..(19)..(20)..(21): Xaa is A or G or is absent

SEQ ID NO: 47579 - protein, 38 aa, Artificial Sequence
  GFR-binding peptide
  MOD_RES (1)..(35)..(36): Xaa is C or S
  MOD_RES (13)..(14)..(15)..(16)..(17): Xaa is A or G
  MOD_RES (18)..(19)..(20)..(21): Xaa is A or G or is absent
XGEVVMDVTAKKXXXXXXXXXIKRMQVPRLETPVXXAK

SEQ ID NO: 47580 - protein, 33 aa, Artificial Sequence
  GFR-binding peptide
  MOD_RES (11)..(12)..(13)..(14)..(15): Xaa is A or G
  MOD_RES (16)..(17)..(18)..(19): Xaa is A or G or is absent
HDELTNSLQEXXXXXXXXXYYLVTLPELQVQTP

SEQ ID NO: 47581 - protein, 36 aa, Artificial Sequence
  GFR-binding peptide
  MOD_RES (2)..(36): Xaa is C or S
  MOD_RES (14)..(15)..(16)..(17)..(18): Xaa is A or G
  MOD_RES (19)..(20)..(21)..(22): Xaa is A or G or is absent
GXSRVVMNVTAKKXXXXXXXXXIKRVQVPRLKTPAX

SEQ ID NO: 47582 - protein, 35 aa, Artificial Sequence
  GFR-binding peptide
  MOD_RES (2)..(33)..(34): Xaa is C or S
KXSRVIMVQVEKVKPKRGVVKAIKVSRLAQPVXXP

SEQ ID NO: 47583 - protein, 38 aa, Artificial Sequence
  GFR-binding peptide
  MOD_RES (1)..(3)..(34)..(35): Xaa is C or S
XKXSRVIMVQVEKVKPKRGVVKAIKVSRLAQPVXXPAA

SEQ ID NO: 47584 - protein, 41 aa, Artificial Sequence
  GFR-binding peptide
  MOD_RES (1)..(3)..(35)..(36): Xaa is C or S
XGXSRVVMNVQVEKIVNSSDDVKAVKVSRLKTPAXXPKPVY

SEQ ID NO: 47585 - protein, 40 aa, Artificial Sequence; identical to SEQ ID NO: 17843
  GFR-binding peptide
  MOD_RES (37)..(37): Xaa is C or S

SEQ ID NO: 47586 - protein, 35 aa, Artificial Sequence; identical to SEQ ID NO: 10713
  GFR-binding peptide
  MOD_RES (2)..(4): Xaa is C or S

SEQ ID NO: 47587 - protein, 37 aa, Artificial Sequence
  GFR-binding peptide
  MOD_RES (34)..(35): Xaa is C or S
  MOD_RES (12)..(13)..(14)..(15)..(16): Xaa is A or G
  MOD_RES (17)..(18)..(19)..(20): Xaa is A or G or is absent
GEVVMDVQVEKXXXXXXXXXVKAMKVSRLETPVXXAK

SEQ ID NO: 47588 - protein, 37 aa, Artificial Sequence
  GFR-binding peptide
  MOD_RES (2)..(2): Xaa is C or S
KXALHDELTNSLQEFIPKKRVIEYYLVTLPELQVQTP

SEQ ID NO: 47589 - protein, 38 aa, Artificial Sequence; identical to SEQ ID NO: 17850
  GFR-binding peptide
  MOD_RES (34)..(34): Xaa is C or S

SEQ ID NO: 47590 - protein, 35 aa, Artificial Sequence
  GFR-binding peptide
  MOD_RES (1)..(35): Xaa is C or S
  MOD_RES (13)..(14)..(15)..(16)..(17): Xaa is A or G
  MOD_RES (18)..(19)..(20)..(21): Xaa is A or G or is absent
XKNHQLFNSLQEXXXXXXXXXYYVMPLPEEETPVX

SEQ ID NO: 47591 - protein, 34 aa, Artificial Sequence
  GFR-binding peptide
  MOD_RES (1)..(33)..(34): Xaa is C or S
XSRVVMNVTAKKIVNSSDDIKRVQVPRLKTPAXX

SEQ ID NO: 47592 - protein, 38 aa, Artificial Sequence; identical to SEQ ID NO: 10719
  GFR-binding peptide
  MOD_RES (1)..(3)..(34)..(35): Xaa is C or S

SEQ ID NO: 47593 - protein, 40 aa, Artificial Sequence
  GFR-binding peptide
  MOD_RES (34)..(35): Xaa is C or S
  MOD_RES (12)..(13)..(14)..(15)..(16): Xaa is A or G
  MOD_RES (17)..(18)..(19)..(20): Xaa is A or G or is absent
GEVVMEVQVEKXXXXXXXXXVKAMKVSRLETPVXXAKPIS

SEQ ID NO: 47594 - protein, 42 aa, Artificial Sequence
  GFR-binding peptide
  MOD_RES (1)..(38): Xaa is C or S
  MOD_RES (14)..(15)..(16)..(17)..(18): Xaa is A or G
  MOD_RES (19)..(20)..(21)..(22): Xaa is A or G or is absent
XALHDELTNSLQEXXXXXXXXXYYVVPLPELQVQTPRXQVNR

SEQ ID NO: 47595 - protein, 32 aa, Artificial Sequence; identical to SEQ ID NO: 17854
  GFR-binding peptide

SEQ ID NO: 47596 - protein, 36 aa, Artificial Sequence; identical to SEQ ID NO: 10721
  GFR-binding peptide
  MOD_RES (1)..(3): Xaa is C or S
  MOD_RES (15)..(16)..(17)..(18)..(19): Xaa is A or G
  MOD_RES (20)..(21)..(22)..(23): Xaa is A or G or is absent

SEQ ID NO: 47597 - protein, 35 aa, Artificial Sequence
  GFR-binding peptide
  MOD_RES (2)..(2): Xaa is C or S
  MOD_RES (14)..(15)..(16)..(17)..(18): Xaa is A or G
  MOD_RES (19)..(20)..(21)..(22): Xaa is A or G or is absent
GXGEVVMEVQVEKXXXXXXXXXVKAMKVSRLETPV

SEQ ID NO: 47598 - protein, 37 aa, Artificial Sequence
  GFR-binding peptide
  MOD_RES (1)..(3)..(37): Xaa is C or S
  MOD_RES (15)..(16)..(17)..(18)..(19): Xaa is A or G
  MOD_RES (20)..(21)..(22)..(23): Xaa is A or G or is absent
XGXSRVVMNVQVEKXXXXXXXXXVKAVKVSRLKTPAX

SEQ ID NO: 47599 - protein, 40 aa, Artificial Sequence
  GFR-binding peptide
  MOD_RES (1)..(38): Xaa is C or S
  MOD_RES (14)..(15)..(16)..(17)..(18): Xaa is A or G
  MOD_RES (19)..(20)..(21)..(22): Xaa is A or G or is absent
XELHEELRNSLQEXXXXXXXXXYYVVPLPEHHVRSPQXKV

SEQ ID NO: 47600 - protein, 36 aa, Artificial Sequence
  GFR-binding peptide
  MOD_RES (32)..(32): Xaa is C or S
SRVVMNVQVEKIVNSSDDVKAVKVSRLKTPAXTPKT

SEQ ID NO: 47601 - protein, 40 aa, Artificial Sequence
  GFR-binding peptide
  MOD_RES (1)..(3)..(35)..(36): Xaa is C or S
XGXGEVVMDVQVEKVVKENEDVKAMKVSRLETPVXXAKPI

SEQ ID NO: 47602 - protein, 39 aa, Artificial Sequence; identical to SEQ ID NO: 17858
  GFR-binding peptide
  MOD_RES (36)..(36): Xaa is C or S
  MOD_RES (12)..(13)..(14)..(15)..(16): Xaa is A or G
  MOD_RES (17)..(18)..(19)..(20): Xaa is A or G or is absent

SEQ ID NO: 47603 - protein, 36 aa, Artificial Sequence
  GFR-binding peptide
  MOD_RES (33)..(34): Xaa is C or S
  MOD_RES (11)..(12)..(13)..(14)..(15): Xaa is A or G
  MOD_RES (16)..(17)..(18)..(19): Xaa is A or G or is absent
SKVIMSMEGIXXXXXXXXXMIQITINSLDQSVXXPS

SEQ ID NO: 47604 - protein, 41 aa, Artificial Sequence; identical to SEQ ID NO: 17859
  GFR-binding peptide
  MOD_RES (1)..(3)..(37): Xaa is C or S

SEQ ID NO: 47605 - protein, 41 aa, Artificial Sequence; identical to SEQ ID NO: 10728
  GFR-binding peptide
  MOD_RES (2)..(36)..(37): Xaa is C or S
  MOD_RES (14)..(15)..(16)..(17)..(18): Xaa is A or G
  MOD_RES (19)..(20)..(21)..(22): Xaa is A or G or is absent

SEQ ID NO: 47606 - protein, 42 aa, Artificial Sequence; identical to SEQ ID NO: 17863
  GFR-binding peptide
  MOD_RES (1)..(38): Xaa is C or S

SEQ ID NO: 47607 - protein, 38 aa, Artificial Sequence
  GFR-binding peptide
  MOD_RES (1)..(3)..(35)..(36): Xaa is C or S
XGXSRVVMNVQVEKIVNSSDDVKAVKVSRLKTPAXXPK

SEQ ID NO: 47608 - protein, 38 aa, Artificial Sequence
  GFR-binding peptide
  MOD_RES (2)..(2): Xaa is C or S
AXELHEELRNSLQELKPKKRVYEYYVVPLPEHHVRSPQ

SEQ ID NO: 47609 - protein, 38 aa, Artificial Sequence
  GFR-binding peptide
  MOD_RES (2)..(34)..(35): Xaa is C or S
GXGEVVMEVQVEKVVKDYEDVKAMKVSRLETPVXXAKP

SEQ ID NO: 47610 - protein, 40 aa, Artificial Sequence
  GFR-binding peptide
  MOD_RES (1)..(35)..(36): Xaa is C or S
  MOD_RES (13)..(14)..(15)..(16)..(17): Xaa is A or G
  MOD_RES (18)..(19)..(20)..(21): Xaa is A or G or is absent
XGEVVMEVTAKKXXXXXXXXXIKRMQVPRLETPVXXAKPI

SEQ ID NO: 47611 - protein, 39 aa, Artificial Sequence
  GFR-binding peptide
  MOD_RES (2)..(34)..(35): Xaa is C or S
GXGEVVMDVQVEKVVKENEDVKAMKVSRLETPVXXAKPI

SEQ ID NO: 47612 - protein, 40 aa, Artificial Sequence
  GFR-binding peptide
  MOD_RES (2)..(4)..(35)..(36): Xaa is C or S
SXKXSKVVMVQVEKVKPTRGVVKAIKVSRLDQPVXXPSAS

SEQ ID NO: 47613 - protein, 36 aa, Artificial Sequence; identical to SEQ ID NO: 10734
  GFR-binding peptide
  MOD_RES (2)..(4)..(36): Xaa is C or S

SEQ ID NO: 47614 - protein, 38 aa, Artificial Sequence; identical to SEQ ID NO: 10738
  GFR-binding peptide
  MOD_RES (2)..(4)..(37)..(38): Xaa is C or S
  MOD_RES (15)..(16)..(17)..(18)..(19): Xaa is A or G
  MOD_RES (20)..(21)..(22)..(23): Xaa is A or G or is absent

SEQ ID NO: 47615 - protein, 44 aa, Artificial Sequence
  GFR-binding peptide
  MOD_RES (2)..(4)..(38): Xaa is C or S
  MOD_RES (16)..(17)..(18)..(19)..(20): Xaa is A or G
  MOD_RES (21)..(22)..(23)..(24): Xaa is A or G or is absent
RXEXKNHQLFNSLQEXXXXXXXXXYYVMPLPEEETPVXELGEDN

SEQ ID NO: 47616 - protein, 33 aa, Artificial Sequence; identical to SEQ ID NO: 17866
  GFR-binding peptide
  MOD_RES (12)..(13)..(14)..(15)..(16): Xaa is A or G
  MOD_RES (17)..(18)..(19)..(20): Xaa is A or G or is absent

SEQ ID NO: 47617 - protein, 36 aa, Artificial Sequence
  GFR-binding peptide
  MOD_RES (1)..(3)..(35)..(36): Xaa is C or S
XGXGEVVMDSMEGIVVKENEDMIQMTINSLETPVXX

SEQ ID NO: 47618 - protein, 38 aa, Artificial Sequence
  GFR-binding peptide
  MOD_RES (2)..(35)..(36): Xaa is C or S
  MOD_RES (13)..(14)..(15)..(16)..(17): Xaa is A or G
  MOD_RES (18)..(19)..(20)..(21): Xaa is A or G or is absent
KXSKVVMSMEGIXXXXXXXXXMIQITINSLDQPVXXPS

SEQ ID NO: 47619 - protein, 33 aa, Artificial Sequence; identical to SEQ ID NO: 10739
  GFR-binding peptide
  MOD_RES (1)..(1): Xaa is C or S
  MOD_RES (12)..(13)..(14)..(15)..(16): Xaa is A or G
  MOD_RES (17)..(18)..(19)..(20): Xaa is A or G or is absent

SEQ ID NO: 47620 - protein, 40 aa, Artificial Sequence
  GFR-binding peptide
  MOD_RES (2)..(34): Xaa is C or S
GXSRVVMNVTAKKIVNSSDDIKRVQVPRLKTPAXTPKTVH

SEQ ID NO: 47621 - protein, 32 aa, Artificial Sequence
  GFR-binding peptide
  MOD_RES (31)..(32): Xaa is C or S
RVVMNSMEGIIVNSSDDMIQVTINSLQTPAXX

SEQ ID NO: 47622 - protein, 37 aa, Artificial Sequence; identical to SEQ ID NO: 17869
  GFR-binding peptide
  MOD_RES (1)..(3): Xaa is C or S

SEQ ID NO: 47623 - protein, 38 aa, Artificial Sequence; identical to SEQ ID NO: 10741
  GFR-binding peptide
  MOD_RES (2)..(4)..(35)..(36): Xaa is C or S

SEQ ID NO: 47624 - protein, 37 aa, Artificial Sequence; identical to SEQ ID NO: 10743
  GFR-binding peptide
  MOD_RES (1)..(34)..(35): Xaa is C or S
  MOD_RES (12)..(13)..(14)..(15)..(16): Xaa is A or G
  MOD_RES (17)..(18)..(19)..(20): Xaa is A or G or is absent

SEQ ID NO: 47625 - protein, 33 aa, Artificial Sequence; identical to SEQ ID NO: 10746
  GFR-binding peptide
  MOD_RES (32)..(33): Xaa is C or S

SEQ ID NO: 47626 - protein, 39 aa, Artificial Sequence
  GFR-binding peptide
  MOD_RES (2)..(39): Xaa is C or S
KXALHDELTNSLQEFIPKKRVIEYYLVTLPELQVQTPRX

SEQ ID NO: 47627 - protein, 37 aa, Artificial Sequence; identical to SEQ ID NO: 10747
  GFR-binding peptide
  MOD_RES (1)..(3)..(35)..(36): Xaa is C or S

SEQ ID NO: 47628 - protein, 40 aa, Artificial Sequence; identical to SEQ ID NO: 17875
  GFR-binding peptide
  MOD_RES (36)..(36): Xaa is C or S

SEQ ID NO: 47629 - protein, 37 aa, Artificial Sequence; identical to SEQ ID NO: 10749
  GFR-binding peptide
  MOD_RES (32)..(33): Xaa is C or S

SEQ ID NO: 47630 - protein, 39 aa, Artificial Sequence
  GFR-binding peptide
  MOD_RES (2)..(4)..(36)..(37): Xaa is C or S
HXGXARVVMNSMEGIIVNSSDDMIQVTINSLQTPAXXPK

SEQ ID NO: 47631 - protein, 37 aa, Artificial Sequence; identical to SEQ ID NO: 10750
  GFR-binding peptide
  MOD_RES (2)..(4): Xaa is C or S
  MOD_RES (16)..(17)..(18)..(19)..(20): Xaa is A or G
  MOD_RES (21)..(22)..(23)..(24): Xaa is A or G or is absent

SEQ ID NO: 47632 - protein, 37 aa, Artificial Sequence
  GFR-binding peptide
  MOD_RES (1)..(33)..(34): Xaa is C or S
XGEVVMEVTAKKVVKDYEDIKRMQVPRLETPVXXAKP

SEQ ID NO: 47633 - protein, 36 aa, Artificial Sequence
  GFR-binding peptide
  MOD_RES (33)..(33): Xaa is C or S
  MOD_RES (11)..(12)..(13)..(14)..(15): Xaa is A or G
  MOD_RES (16)..(17)..(18)..(19): Xaa is A or G or is absent
RVVMNSMEGIXXXXXXXXXMIQVTINSLKTPAXTPK

SEQ ID NO: 47634 - protein, 35 aa, Artificial Sequence; identical to SEQ ID NO: 10752
  GFR-binding peptide
  MOD_RES (2)..(34)..(35): Xaa is C or S

SEQ ID NO: 47635 - protein, 37 aa, Artificial Sequence; identical to SEQ ID NO: 10753
  GFR-binding peptide
  MOD_RES (1)..(33)..(34): Xaa is C or S

SEQ ID NO: 47636 - protein, 37 aa, Artificial Sequence
  GFR-binding peptide
  MOD_RES (2)..(36): Xaa is C or S
  MOD_RES (14)..(15)..(16)..(17)..(18): Xaa is A or G
  MOD_RES (19)..(20)..(21)..(22): Xaa is A or G or is absent
GXSRVVMNVTAKKXXXXXXXXXIKRVQVPRLKTPAXT

SEQ ID NO: 47637 - protein, 35 aa, Artificial Sequence; identical to SEQ ID NO: 17877
  GFR-binding peptide

SEQ ID NO: 47638 - protein, 38 aa, Artificial Sequence
  GFR-binding peptide
  MOD_RES (2)..(34): Xaa is C or S
GXSRVVMNSMEGIIVNSSDDMIQVTINSLKTPAXTPKT

SEQ ID NO: 47639 - protein, 38 aa, Artificial Sequence
  GFR-binding peptide
  MOD_RES (2)..(4)..(35)..(36): Xaa is C or S
SXKXSRVIMSMEGIVKPKRGVMIQITINSLAQPVXXPA

SEQ ID NO: 47640 - protein, 38 aa, Artificial Sequence; identical to SEQ ID NO: 17879
  GFR-binding peptide
  MOD_RES (2)..(4)..(38): Xaa is C or S
  MOD_RES (16)..(17)..(18)..(19)..(20): Xaa is A or G
  MOD_RES (21)..(22)..(23)..(24): Xaa is A or G or is absent

SEQ ID NO: 47641 - protein, 37 aa, Artificial Sequence
  GFR-binding peptide
  MOD_RES (2)..(36)..(37): Xaa is C or S
  MOD_RES (14)..(15)..(16)..(17)..(18): Xaa is A or G
  MOD_RES (19)..(20)..(21)..(22): Xaa is A or G or is absent
GXSRVVMNSMEGIXXXXXXXXXMIQVTINSLKTPAXX

SEQ ID NO: 47642 - protein, 30 aa, Artificial Sequence; identical to SEQ ID NO: 10756
  GFR-binding peptide

SEQ ID NO: 47643 - protein, 39 aa, Artificial Sequence
  GFR-binding peptide
  MOD_RES (1)..(3)..(36)..(37): Xaa is C or S
  MOD_RES (14)..(15)..(16)..(17)..(18): Xaa is A or G
  MOD_RES (19)..(20)..(21)..(22): Xaa is A or G or is absent
XKXSRVIMVTAKKXXXXXXXXXIKRIQVPRLAQPVXXPA

SEQ ID NO: 47644 - protein, 37 aa, Artificial Sequence; identical to SEQ ID NO: 10758
  GFR-binding peptide
  MOD_RES (33)..(34): Xaa is C or S
  MOD_RES (11)..(12)..(13)..(14)..(15): Xaa is A or G
  MOD_RES (16)..(17)..(18)..(19): Xaa is A or G or is absent

SEQ ID NO: 47645 - protein, 33 aa, Artificial Sequence; identical to SEQ ID NO: 17885
  GFR-binding peptide

SEQ ID NO: 47646 - protein, 34 aa, Artificial Sequence; identical to SEQ ID NO: 17887
  GFR-binding peptide
  MOD_RES (33)..(33): Xaa is C or S
  MOD_RES (11)..(12)..(13)..(14)..(15): Xaa is A or G
  MOD_RES (16)..(17)..(18)..(19): Xaa is A or G or is absent

SEQ ID NO: 47647 - protein, 38 aa, Artificial Sequence; identical to SEQ ID NO: 10760
  GFR-binding peptide
  MOD_RES (2)..(34)..(35): Xaa is C or S

SEQ ID NO: 47648 - protein, 38 aa, Artificial Sequence
  GFR-binding peptide
  MOD_RES (2)..(34)..(35): Xaa is C or S
GXGEVVMDVTAKKVVKENEDIKRMQVPRLETPVXXAKP

SEQ ID NO: 47649 - protein, 39 aa, Artificial Sequence
  GFR-binding peptide
  MOD_RES (2)..(4): Xaa is C or S
  MOD_RES (17)..(18)..(19)..(20)..(21): Xaa is A or G
  MOD_RES (22)..(23)..(24)..(25): Xaa is A or G or is absent
EXKXALHDELTNSLQEXXXXXXXXXYYLVTLPELQVQTP

SEQ ID NO: 47650 - protein, 43 aa, Artificial Sequence
  GFR-binding peptide
  MOD_RES (2)..(4)..(38)..(39): Xaa is C or S
  MOD_RES (16)..(17)..(18)..(19)..(20): Xaa is A or G
  MOD_RES (21)..(22)..(23)..(24): Xaa is A or G or is absent
RXGXGEVVMESMEGIXXXXXXXXXMIQMTINSLETPVXXAKPI

SEQ ID NO: 47651 - protein, 36 aa, Artificial Sequence; identical to SEQ ID NO: 17892
  GFR-binding peptide
  MOD_RES (1)..(3): Xaa is C or S

SEQ ID NO: 47652 - protein, 36 aa, Artificial Sequence; identical to SEQ ID NO: 10763
  GFR-binding peptide
  MOD_RES (2)..(35)..(36): Xaa is C or S
  MOD_RES (13)..(14)..(15)..(16)..(17): Xaa is A or G
  MOD_RES (18)..(19)..(20)..(21): Xaa is A or G or is absent

SEQ ID NO: 47653 - protein, 37 aa, Artificial Sequence; identical to SEQ ID NO: 17895
  GFR-binding peptide
  MOD_RES (37)..(37): Xaa is C or S

SEQ ID NO: 47654 - protein, 33 aa, Artificial Sequence; identical to SEQ ID NO: 17896
  GFR-binding peptide
  MOD_RES (12)..(13)..(14)..(15)..(16): Xaa is A or G
  MOD_RES (17)..(18)..(19)..(20): Xaa is A or G or is absent

SEQ ID NO: 47655 - protein, 39 aa, Artificial Sequence; identical to SEQ ID NO: 17900
  GFR-binding peptide
  MOD_RES (33)..(33): Xaa is C or S
  MOD_RES (11)..(12)..(13)..(14)..(15): Xaa is A or G
  MOD_RES (16)..(17)..(18)..(19): Xaa is A or G or is absent

SEQ ID NO: 47656 - protein, 38 aa, Artificial Sequence; identical to SEQ ID NO: 17901
  GFR-binding peptide
  MOD_RES (1)..(38): Xaa is C or S

SEQ ID NO: 47657 - protein, 35 aa, Artificial Sequence
  GFR-binding peptide
  MOD_RES (31)..(32): Xaa is C or S
SKVIMSMEGIIKPTKGIMIQITINSLDQSVXXPSA

SEQ ID NO: 47658 - protein, 43 aa, Artificial Sequence
  GFR-binding peptide
  MOD_RES (2)..(4)..(41): Xaa is C or S
AXAXELHEELRNSLQELKPKKRVYEYYLVTLPEHHVRSPQXKV

SEQ ID NO: 47659 - protein, 35 aa, Artificial Sequence; identical to SEQ ID NO: 37084
  GFR-binding peptide
  MOD_RES (31)..(32): Xaa is C or S

SEQ ID NO: 47660 - protein, 34 aa, Artificial Sequence
  GFR-binding peptide
  MOD_RES (31)..(32): Xaa is C or S
RVVMNVQVEKIVNSSDDVKAVKVSRLQTPAXXPK

SEQ ID NO: 47661 - protein, 43 aa, Artificial Sequence; identical to SEQ ID NO: 10769
  GFR-binding peptide
  MOD_RES (2)..(4)..(38)..(39): Xaa is C or S
  MOD_RES (16)..(17)..(18)..(19)..(20): Xaa is A or G
  MOD_RES (21)..(22)..(23)..(24): Xaa is A or G or is absent

SEQ ID NO: 47662 - protein, 35 aa, Artificial Sequence; identical to SEQ ID NO: 17902
  GFR-binding peptide

SEQ ID NO: 47663 - protein, 35 aa, Artificial Sequence
  GFR-binding peptide
  MOD_RES (1)..(3)..(34)..(35): Xaa is C or S
XKXSKVIMVQVEKIKPTKGIVKAIKVSRLDQSVXX

SEQ ID NO: 47664 - protein, 40 aa, Artificial Sequence
  GFR-binding peptide
  MOD_RES (2)..(39): Xaa is C or S
  MOD_RES (15)..(16)..(17)..(18)..(19): Xaa is A or G
  MOD_RES (20)..(21)..(22)..(23): Xaa is A or G or is absent
AXELHEELRNSLQEXXXXXXXXXYYLVTLPEHHVRSPQXK

SEQ ID NO: 47665 - protein, 33 aa, Artificial Sequence; identical to SEQ ID NO: 10773
  GFR-binding peptide
  MOD_RES (1)..(1): Xaa is C or S
  MOD_RES (12)..(13)..(14)..(15)..(16): Xaa is A or G
  MOD_RES (17)..(18)..(19)..(20): Xaa is A or G or is absent

SEQ ID NO: 47666 - protein, 32 aa, Artificial Sequence; identical to SEQ ID NO: 17904
  GFR-binding peptide
  MOD_RES (11)..(12)..(13)..(14)..(15): Xaa is A or G
  MOD_RES (16)..(17)..(18)..(19): Xaa is A or G or is absent

SEQ ID NO: 47667 - protein, 42 aa, Artificial Sequence
  GFR-binding peptide
  MOD_RES (2)..(4)..(37)..(38): Xaa is C or S
  MOD_RES (15)..(16)..(17)..(18)..(19): Xaa is A or G
  MOD_RES (20)..(21)..(22)..(23): Xaa is A or G or is absent
SXKXSRVIMVQVEKXXXXXXXXXVKAIKVSRLAQPVXXPAAS

SEQ ID NO: 47668 - protein, 37 aa, Artificial Sequence
  GFR-binding peptide
  MOD_RES (1)..(33)..(34): Xaa is C or S
XGEVVMEVQVEKVVKDYEDVKAMKVSRLETPVXXAKP

SEQ ID NO: 47669 - protein, 34 aa, Artificial Sequence
  GFR-binding peptide
  MOD_RES (32)..(33): Xaa is C or S
SRVVMNVTAKKIVNSSDDIKRVQVPRLKTPAXXP

SEQ ID NO: 47670 - protein, 38 aa, Artificial Sequence; identical to SEQ ID NO: 17909
  GFR-binding peptide
  MOD_RES (37)..(37): Xaa is C or S
  MOD_RES (13)..(14)..(15)..(16)..(17): Xaa is A or G
  MOD_RES (18)..(19)..(20)..(21): Xaa is A or G or is absent

SEQ ID NO: 47671 - protein, 43 aa, Artificial Sequence
  GFR-binding peptide
  MOD_RES (1)..(3)..(37)..(38): Xaa is C or S
  MOD_RES (15)..(16)..(17)..(18)..(19): Xaa is A or G
  MOD_RES (20)..(21)..(22)..(23): Xaa is A or G or is absent
XGXGEVVMDSMEGIXXXXXXXXXMIQMTINSLETPVXXAKPIK

SEQ ID NO: 47672 - protein, 41 aa, Artificial Sequence
  GFR-binding peptide
  MOD_RES (1)..(3)..(37): Xaa is C or S
  MOD_RES (15)..(16)..(17)..(18)..(19): Xaa is A or G
  MOD_RES (20)..(21)..(22)..(23): Xaa is A or G or is absent
XGXSRVVMNSMEGIXXXXXXXXXMIQVTINSLKTPAXTPKT

SEQ ID NO: 47673 - protein, 36 aa, Artificial Sequence
  GFR-binding peptide
  MOD_RES (31)..(32): Xaa is C or S
RVVMNVQVEKIVNSSDDVKAVKVSRLQTPAXXPKPV

SEQ ID NO: 47674 - protein, 42 aa, Artificial Sequence
  GFR-binding peptide
  MOD_RES (1)..(38): Xaa is C or S
XALHDELTNSLQEFIPKKRVIEYYVVPLPELQVQTPRXQVNR

SEQ ID NO: 47675 - protein, 39 aa, Artificial Sequence; identical to SEQ ID NO: 17912
  GFR-binding peptide
  MOD_RES (35)..(35): Xaa is C or S
  MOD_RES (11)..(12)..(13)..(14)..(15): Xaa is A or G
  MOD_RES (16)..(17)..(18)..(19): Xaa is A or G or is absent

SEQ ID NO: 47676 - protein, 33 aa, Artificial Sequence
  GFR-binding peptide
  MOD_RES (33)..(33): Xaa is C or S
NHQLFNSLQEHQGQHPKIRYYVMPLPEEETPVX

SEQ ID NO: 47677 - protein, 37 aa, Artificial Sequence
  GFR-binding peptide
  MOD_RES (2)..(36)..(37): Xaa is C or S
  MOD_RES (14)..(15)..(16)..(17)..(18): Xaa is A or G
  MOD_RES (19)..(20)..(21)..(22): Xaa is A or G or is absent
GXGEVVMEVQVEKXXXXXXXXXVKAMKVSRLETPVXX

SEQ ID NO: 47678 - protein, 33 aa, Artificial Sequence
  GFR-binding peptide
LHDELTNSLQEFIPKKRVIEYYLVTLPELQVQT

SEQ ID NO: 47679 - protein, 35 aa, Artificial Sequence
  GFR-binding peptide
  MOD_RES (33)..(34): Xaa is C or S
  MOD_RES (11)..(12)..(13)..(14)..(15): Xaa is A or G
  MOD_RES (16)..(17)..(18)..(19): Xaa is A or G or is absent
SRVIMVQVEKXXXXXXXXXVKAIKVSRLAQPVXXP

SEQ ID NO: 47680 - protein, 44 aa, Artificial Sequence; identical to SEQ ID NO: 17918
  GFR-binding peptide
  MOD_RES (1)..(3)..(40): Xaa is C or S

SEQ ID NO: 47681 - protein, 32 aa, Artificial Sequence; identical to SEQ ID NO: 10782
  GFR-binding peptide
  MOD_RES (2)..(2): Xaa is C or S

SEQ ID NO: 47682 - protein, 40 aa, Artificial Sequence
  GFR-binding peptide
  MOD_RES (37)..(37): Xaa is C or S
  MOD_RES (13)..(14)..(15)..(16)..(17): Xaa is A or G
  MOD_RES (18)..(19)..(20)..(21): Xaa is A or G or is absent
ELHEELRNSLQEXXXXXXXXXYYLVTLPEHHVRSPQXKVS

SEQ ID NO: 47683 - protein, 39 aa, Artificial Sequence
  GFR-binding peptide
  MOD_RES (2)..(4)..(38): Xaa is C or S
  MOD_RES (16)..(17)..(18)..(19)..(20): Xaa is A or G
  MOD_RES (21)..(22)..(23)..(24): Xaa is A or G or is absent
HXGXSRVVMNVQVEKXXXXXXXXXVKAVKVSRLKTPAXT

SEQ ID NO: 47684 - protein, 40 aa, Artificial Sequence; identical to SEQ ID NO: 17920
  GFR-binding peptide
  MOD_RES (2)..(36): Xaa is C or S

SEQ ID NO: 47685 - protein, 39 aa, Artificial Sequence; identical to SEQ ID NO: 17921
  GFR-binding peptide
  MOD_RES (1)..(3)..(37): Xaa is C or S

SEQ ID NO: 47686 - protein, 39 aa, Artificial Sequence
  GFR-binding peptide
  MOD_RES (1)..(3)..(35)..(36): Xaa is C or S
XGXARVVMNVQVEKIVNSSDDVKAVKVSRLQTPAXXPKP

SEQ ID NO: 47687 - protein, 37 aa, Artificial Sequence; identical to SEQ ID NO: 17922
  GFR-binding peptide
  MOD_RES (2)..(2): Xaa is C or S
  MOD_RES (15)..(16)..(17)..(18)..(19): Xaa is A or G
  MOD_RES (20)..(21)..(22)..(23): Xaa is A or G or is absent

SEQ ID NO: 47688 - protein, 39 aa, Artificial Sequence
  GFR-binding peptide
  MOD_RES (2)..(4): Xaa is C or S
EXKXALHDELTNSLQEFIPKKRVIEYYVVPLPELQVQTP

SEQ ID NO: 47689 - protein, 38 aa, Artificial Sequence; identical to SEQ ID NO: 10784
  GFR-binding peptide
  MOD_RES (32)..(33): Xaa is C or S

SEQ ID NO: 47690 - protein, 34 aa, Artificial Sequence
  GFR-binding peptide
  MOD_RES (2)..(33)..(34): Xaa is C or S
KXSKVVMVTAKKVKPTRGVIKRIQVPRLDQPVXX

SEQ ID NO: 47691 - protein, 41 aa, Artificial Sequence; identical to SEQ ID NO: 17925
  GFR-binding peptide
  MOD_RES (2)..(4)..(41): Xaa is C or S
  MOD_RES (17)..(18)..(19)..(20)..(21): Xaa is A or G
  MOD_RES (22)..(23)..(24)..(25): Xaa is A or G or is absent

SEQ ID NO: 47692 - protein, 35 aa, Artificial Sequence
  GFR-binding peptide
  MOD_RES (1)..(32)..(33): Xaa is C or S
XSKVVMSMEGIVKPTRGVMIQITINSLDQPVXXPS

SEQ ID NO: 47693 - protein, 41 aa, Artificial Sequence
  GFR-binding peptide
  MOD_RES (1)..(3)..(37)..(38): Xaa is C or S
  MOD_RES (15)..(16)..(17)..(18)..(19): Xaa is A or G
  MOD_RES (20)..(21)..(22)..(23): Xaa is A or G or is absent
XGXGEVVMDVTAKKXXXXXXXXXIKRMQVPRLETPVXXAKP

SEQ ID NO: 47694 - protein, 33 aa, Artificial Sequence; identical to SEQ ID NO: 17928
  GFR-binding peptide

SEQ ID NO: 47695 - protein, 41 aa, Artificial Sequence
  GFR-binding peptide
  MOD_RES (2)..(4)..(38)..(39): Xaa is C or S
  MOD_RES (16)..(17)..(18)..(19)..(20): Xaa is A or G
  MOD_RES (21)..(22)..(23)..(24): Xaa is A or G or is absent
RXGXGEVVMDVTAKKXXXXXXXXXIKRMQVPRLETPVXXAK

SEQ ID NO: 47696 - protein, 37 aa, Artificial Sequence
  GFR-binding peptide
  MOD_RES (1)..(33)..(34): Xaa is C or S
XSRVVMNVQVEKIVNSSDDVKAVKVSRLKTPAXXPKP

SEQ ID NO: 47697 - protein, 41 aa, Artificial Sequence; identical to SEQ ID NO: 17929
  GFR-binding peptide
  MOD_RES (1)..(38): Xaa is C or S
  MOD_RES (14)..(15)..(16)..(17)..(18): Xaa is A or G
  MOD_RES (19)..(20)..(21)..(22): Xaa is A or G or is absent

SEQ ID NO: 47698 - protein, 34 aa, Artificial Sequence
  GFR-binding peptide
  MOD_RES (1)..(33)..(34): Xaa is C or S
XSRVVMNVQVEKIVNSSDDVKAVKVSRLKTPAXX

SEQ ID NO: 47699 - protein, 32 aa, Artificial Sequence
  GFR-binding peptide
  MOD_RES (32)..(32): Xaa is C or S
GEVVMDSMEGIVVKENEDMIQMTINSLETPVX

SEQ ID NO: 47700 - protein, 38 aa, Artificial Sequence
  GFR-binding peptide
  MOD_RES (1)..(35)..(36): Xaa is C or S
  MOD_RES (13)..(14)..(15)..(16)..(17): Xaa is A or G
  MOD_RES (18)..(19)..(20)..(21): Xaa is A or G or is absent
XGEVVMEVTAKKXXXXXXXXXIKRMQVPRLETPVXXAK

SEQ ID NO: 47701 - protein, 36 aa, Artificial Sequence
  GFR-binding peptide
  MOD_RES (32)..(33): Xaa is C or S
SRVVMNVQVEKIVNSSDDVKAVKVSRLKTPAXXPKP

SEQ ID NO: 47702 - protein, 40 aa, Artificial Sequence; identical to SEQ ID NO: 17933
  GFR-binding peptide
  MOD_RES (37)..(37): Xaa is C or S
  MOD_RES (13)..(14)..(15)..(16)..(17): Xaa is A or G
  MOD_RES (18)..(19)..(20)..(21): Xaa is A or G or is absent

SEQ ID NO: 47703 - protein, 39 aa, Artificial Sequence; identical to SEQ ID NO: 17934
  GFR-binding peptide
  MOD_RES (1)..(3)..(37): Xaa is C or S

SEQ ID NO: 47704 - protein, 39 aa, Artificial Sequence
  GFR-binding peptide
  MOD_RES (1)..(35)..(36): Xaa is C or S
  MOD_RES (13)..(14)..(15)..(16)..(17): Xaa is A or G
  MOD_RES (18)..(19)..(20)..(21): Xaa is A or G or is absent
XGEVVMDSMEGIXXXXXXXXXMIQMTINSLETPVXXAKP

SEQ ID NO: 47705 - protein, 33 aa, Artificial Sequence; identical to SEQ ID NO: 10793
  GFR-binding peptide
  MOD_RES (33)..(33): Xaa is C or S
  MOD_RES (11)..(12)..(13)..(14)..(15): Xaa is A or G
  MOD_RES (16)..(17)..(18)..(19): Xaa is A or G or is absent

SEQ ID NO: 47706 - protein, 31 aa, Artificial Sequence; identical to SEQ ID NO: 10794
  GFR-binding peptide

SEQ ID NO: 47707 - protein, 39 aa, Artificial Sequence; identical to SEQ ID NO: 10796
  GFR-binding peptide
  MOD_RES (34)..(35): Xaa is C or S
  MOD_RES (12)..(13)..(14)..(15)..(16): Xaa is A or G
  MOD_RES (17)..(18)..(19)..(20): Xaa is A or G or is absent

SEQ ID NO: 47708 - protein, 40 aa, Artificial Sequence; identical to SEQ ID NO: 10797
  GFR-binding peptide
  MOD_RES (2)..(34)..(35): Xaa is C or S

SEQ ID NO: 47709 - protein, 34 aa, Artificial Sequence; identical to SEQ ID NO: 17940
  GFR-binding peptide
  MOD_RES (11)..(12)..(13)..(14)..(15): Xaa is A or G
  MOD_RES (16)..(17)..(18)..(19): Xaa is A or G or is absent

SEQ ID NO: 47710 - protein, 44 aa, Artificial Sequence
  GFR-binding peptide
  MOD_RES (2)..(4)..(41): Xaa is C or S
EXKXALHDELTNSLQEFIPKKRVIEYYLVTLPELQVQTPRXQVN

SEQ ID NO: 47711 - protein, 32 aa, Artificial Sequence; identical to SEQ ID NO: 10803
  GFR-binding peptide
  MOD_RES (11)..(12)..(13)..(14)..(15): Xaa is A or G
  MOD_RES (16)..(17)..(18)..(19): Xaa is A or G or is absent

SEQ ID NO: 47712 - protein, 33 aa, Artificial Sequence
  GFR-binding peptide
  MOD_RES (31)..(32): Xaa is C or S
RVVMNVTAKKIVNSSDDIKRVQVPRLQTPAXXP

SEQ ID NO: 47713 - protein, 38 aa, Artificial Sequence
  GFR-binding peptide
  MOD_RES (33)..(33): Xaa is C or S
  MOD_RES (11)..(12)..(13)..(14)..(15): Xaa is A or G
  MOD_RES (16)..(17)..(18)..(19): Xaa is A or G or is absent
RVVMNVTAKKXXXXXXXXXIKRVQVPRLKTPAXTPKTV

SEQ ID NO: 47714 - protein, 40 aa, Artificial Sequence; identical to SEQ ID NO: 17943
  GFR-binding peptide
  MOD_RES (2)..(39): Xaa is C or S
  MOD_RES (15)..(16)..(17)..(18)..(19): Xaa is A or G
  MOD_RES (20)..(21)..(22)..(23): Xaa is A or G or is absent

SEQ ID NO: 47715 - protein, 34 aa, Artificial Sequence
  GFR-binding peptide
  MOD_RES (1)..(33)..(34): Xaa is C or S
XGEVVMDSMEGIVVKENEDMIQMTINSLETPVXX

SEQ ID NO: 47716 - protein, 38 aa, Artificial Sequence
  GFR-binding peptide
  MOD_RES (34)..(35): Xaa is C or S
  MOD_RES (12)..(13)..(14)..(15)..(16): Xaa is A or G
  MOD_RES (17)..(18)..(19)..(20): Xaa is A or G or is absent
ARVVMNVQVEKXXXXXXXXXVKAVKVSRLQTPAXXPKP

SEQ ID NO: 47717 - protein, 39 aa, Artificial Sequence
  GFR-binding peptide
  MOD_RES (2)..(4): Xaa is C or S
  MOD_RES (17)..(18)..(19)..(20)..(21): Xaa is A or G
  MOD_RES (22)..(23)..(24)..(25): Xaa is A or G or is absent
AXAXELHEELRNSLQEXXXXXXXXXYYLVTLPEHHVRSP

SEQ ID NO: 47718 - protein, 35 aa, Artificial Sequence
  GFR-binding peptide
  MOD_RES (1)..(3)..(35): Xaa is C or S
XGXGEVVMEVTAKKVVKDYEDIKRMQVPRLETPVX

SEQ ID NO: 47719 - protein, 39 aa, Artificial Sequence; identical to SEQ ID NO: 10804
  GFR-binding peptide
  MOD_RES (2)..(34)..(35): Xaa is C or S

SEQ ID NO: 47720 - protein, 35 aa, Artificial Sequence; identical to SEQ ID NO: 10807
  GFR-binding peptide
  MOD_RES (34)..(35): Xaa is C or S
  MOD_RES (12)..(13)..(14)..(15)..(16): Xaa is A or G
  MOD_RES (17)..(18)..(19)..(20): Xaa is A or G or is absent

SEQ ID NO: 47721 - protein, 39 aa, Artificial Sequence
  GFR-binding peptide
  MOD_RES (1)..(3)..(37)..(38): Xaa is C or S
  MOD_RES (15)..(16)..(17)..(18)..(19): Xaa is A or G
  MOD_RES (20)..(21)..(22)..(23): Xaa is A or G or is absent
XGXSRVVMNVQVEKXXXXXXXXXVKAVKVSRLKTPAXXP

SEQ ID NO: 47722 - protein, 38 aa, Artificial Sequence; identical to SEQ ID NO: 10808
  GFR-binding peptide
  MOD_RES (2)..(34)..(35): Xaa is C or S

SEQ ID NO: 47723 - protein, 42 aa, Artificial Sequence
  GFR-binding peptide
  MOD_RES (1)..(3)..(37)..(38): Xaa is C or S
  MOD_RES (15)..(16)..(17)..(18)..(19): Xaa is A or G
  MOD_RES (20)..(21)..(22)..(23): Xaa is A or G or is absent
XGXARVVMNSMEGIXXXXXXXXXMIQVTINSLQTPAXXPKPV

SEQ ID NO: 47724 - protein, 39 aa, Artificial Sequence
  GFR-binding peptide
  MOD_RES (36)..(36): Xaa is C or S
LHDELTNSLQEFIPKKRVIEYYVVPLPELQVQTPRXQVN

SEQ ID NO: 47725 - protein, 36 aa, Artificial Sequence
  GFR-binding peptide
  MOD_RES (2)..(34)..(35): Xaa is C or S
GXGEVVMESMEGIVVKDYEDMIQMTINSLETPVXXA

SEQ ID NO: 47726 - protein, 37 aa, Artificial Sequence
  GFR-binding peptide
  MOD_RES (33)..(34): Xaa is C or S
  MOD_RES (11)..(12)..(13)..(14)..(15): Xaa is A or G
  MOD_RES (16)..(17)..(18)..(19): Xaa is A or G or is absent
SKVIMVTAKKXXXXXXXXXIKRIQVPRLDQSVXXPSA

SEQ ID NO: 47727 - protein, 36 aa, Artificial Sequence
  GFR-binding peptide
  MOD_RES (34)..(35): Xaa is C or S
  MOD_RES (12)..(13)..(14)..(15)..(16): Xaa is A or G
  MOD_RES (17)..(18)..(19)..(20): Xaa is A or G or is absent
ARVVMNSMEGIXXXXXXXXXMIQVTINSLQTPAXXP

SEQ ID NO: 47728 - protein, 40 aa, Artificial Sequence; identical to SEQ ID NO: 17948
  GFR-binding peptide
  MOD_RES (37)..(37): Xaa is C or S
  MOD_RES (13)..(14)..(15)..(16)..(17): Xaa is A or G
  MOD_RES (18)..(19)..(20)..(21): Xaa is A or G or is absent

SEQ ID NO: 47729 - protein, 35 aa, Artificial Sequence
  GFR-binding peptide
  MOD_RES (1)..(3)..(34)..(35): Xaa is C or S
XKXSKVVMVTAKKVKPTRGVIKRIQVPRLDQPVXX

SEQ ID NO: 47730 - protein, 34 aa, Artificial Sequence
  GFR-binding peptide
  MOD_RES (31)..(32): Xaa is C or S
SKVIMVTAKKIKPTKGIIKRIQVPRLDQSVXXPS

SEQ ID NO: 47731 - protein, 39 aa, Artificial Sequence
  GFR-binding peptide
  MOD_RES (1)..(3)..(36)..(37): Xaa is C or S
  MOD_RES (14)..(15)..(16)..(17)..(18): Xaa is A or G
  MOD_RES (19)..(20)..(21)..(22): Xaa is A or G or is absent
XKXSKVIMVTAKKXXXXXXXXXIKRIQVPRLDQSVXXPS

SEQ ID NO: 47732 - protein, 40 aa, Artificial Sequence
  GFR-binding peptide
  MOD_RES (2)..(35)..(36): Xaa is C or S
  MOD_RES (13)..(14)..(15)..(16)..(17): Xaa is A or G
  MOD_RES (18)..(19)..(20)..(21): Xaa is A or G or is absent
KXSKVVMSMEGIXXXXXXXXXMIQITINSLDQPVXXPSAS

SEQ ID NO: 47733 - protein, 38 aa, Artificial Sequence; identical to SEQ ID NO: 10814
  GFR-binding peptide
  MOD_RES (1)..(35)..(36): Xaa is C or S
  MOD_RES (13)..(14)..(15)..(16)..(17): Xaa is A or G
  MOD_RES (18)..(19)..(20)..(21): Xaa is A or G or is absent

SEQ ID NO: 47734 - protein, 38 aa, Artificial Sequence
  GFR-binding peptide
  MOD_RES (1)..(34)..(35): Xaa is C or S
  MOD_RES (12)..(13)..(14)..(15)..(16): Xaa is A or G
  MOD_RES (17)..(18)..(19)..(20): Xaa is A or G or is absent
XSKVIMVTAKKXXXXXXXXXIKRIQVPRLDQSVXXPSA

SEQ ID NO: 47735 - protein, 36 aa, Artificial Sequence
  GFR-binding peptide
  MOD_RES (1)..(3)..(35)..(36): Xaa is C or S
XGXARVVMNSMEGIIVNSSDDMIQVTINSLQTPAXX

SEQ ID NO: 47736 - protein, 42 aa, Artificial Sequence
  GFR-binding peptide
  MOD_RES (2)..(39): Xaa is C or S
AXELHEELRNSLQELKPKKRVYEYYLVTLPEHHVRSPQXKVS

SEQ ID NO: 47737 - protein, 39 aa, Artificial Sequence
  GFR-binding peptide
  MOD_RES (34)..(34): Xaa is C or S
  MOD_RES (12)..(13)..(14)..(15)..(16): Xaa is A or G
  MOD_RES (17)..(18)..(19)..(20): Xaa is A or G or is absent
KNHQLFNSLQEXXXXXXXXXYYVMPLPEEETPVXELGED

SEQ ID NO: 47738 - protein, 35 aa, Artificial Sequence; identical to SEQ ID NO: 10818
  GFR-binding peptide
  MOD_RES (2)..(4)..(35): Xaa is C or S

SEQ ID NO: 47739 - protein, 38 aa, Artificial Sequence; identical to SEQ ID NO: 17962
  GFR-binding peptide
  MOD_RES (2)..(4): Xaa is C or S
  MOD_RES (17)..(18)..(19)..(20)..(21): Xaa is A or G
  MOD_RES (22)..(23)..(24)..(25): Xaa is A or G or is absent

SEQ ID NO: 47740 - protein, 35 aa, Artificial Sequence
  GFR-binding peptide
  MOD_RES (34)..(35): Xaa is C or S
  MOD_RES (12)..(13)..(14)..(15)..(16): Xaa is A or G
  MOD_RES (17)..(18)..(19)..(20): Xaa is A or G or is absent
ARVVMNVQVEKXXXXXXXXXVKAVKVSRLQTPAXX

SEQ ID NO: 47741 - protein, 39 aa, Artificial Sequence; identical to SEQ ID NO: 10819
  GFR-binding peptide
  MOD_RES (1)..(3)..(37)..(38): Xaa is C or S
  MOD_RES (15)..(16)..(17)..(18)..(19): Xaa is A or G
  MOD_RES (20)..(21)..(22)..(23): Xaa is A or G or is absent

SEQ ID NO: 47742 - protein, 40 aa, Artificial Sequence
  GFR-binding peptide
  MOD_RES (2)..(4)..(36)..(37): Xaa is C or S
HXGXARVVMNVQVEKIVNSSDDVKAVKVSRLQTPAXXPKP

SEQ ID NO: 47743 - protein, 34 aa, Artificial Sequence
  GFR-binding peptide
  MOD_RES (2)..(34): Xaa is C or S
GXARVVMNVQVEKIVNSSDDVKAVKVSRLQTPAX

SEQ ID NO: 47744 - protein, 37 aa, Artificial Sequence
  GFR-binding peptide
  MOD_RES (1)..(3)..(35): Xaa is C or S
XGXSRVVMNVTAKKIVNSSDDIKRVQVPRLKTPAXTP

SEQ ID NO: 47745 - protein, 38 aa, Artificial Sequence; identical to SEQ ID NO: 17964
  GFR-binding peptide
  MOD_RES (1)..(3): Xaa is C or S
  MOD_RES (16)..(17)..(18)..(19)..(20): Xaa is A or G
  MOD_RES (21)..(22)..(23)..(24): Xaa is A or G or is absent

SEQ ID NO: 47746 - protein, 39 aa, Artificial Sequence; identical to SEQ ID NO: 10822
  GFR-binding peptide
  MOD_RES (2)..(36): Xaa is C or S
  MOD_RES (14)..(15)..(16)..(17)..(18): Xaa is A or G
  MOD_RES (19)..(20)..(21)..(22): Xaa is A or G or is absent

SEQ ID NO: 47747 - protein, 39 aa, Artificial Sequence; identical to SEQ ID NO: 17968
  GFR-binding peptide
  MOD_RES (35)..(35): Xaa is C or S

SEQ ID NO: 47748 - protein, 35 aa, Artificial Sequence
  GFR-binding peptide
  MOD_RES (1)..(1): Xaa is C or S
  MOD_RES (14)..(15)..(16)..(17)..(18): Xaa is A or G
  MOD_RES (19)..(20)..(21)..(22): Xaa is A or G or is absent
XELHEELRNSLQEXXXXXXXXXYYLVTLPEHHVRS

SEQ ID NO: 47749 - protein, 41 aa, Artificial Sequence
  GFR-binding peptide
  MOD_RES (1)..(3)..(35)..(36): Xaa is C or S
XGXARVVMNVTAKKIVNSSDDIKRVQVPRLQTPAXXPKPVT

SEQ ID NO: 47750 - protein, 36 aa, Artificial Sequence
  GFR-binding peptide
  MOD_RES (31)..(32): Xaa is C or S
EVVMDSMEGIVVKENEDMIQMTINSLETPVXXAKPI

SEQ ID NO: 47751 - protein, 40 aa, Artificial Sequence
  GFR-binding peptide
  MOD_RES (2)..(4)..(38)..(39): Xaa is C or S
  MOD_RES (16)..(17)..(18)..(19)..(20): Xaa is A or G
  MOD_RES (21)..(22)..(23)..(24): Xaa is A or G or is absent
RXGXGEVVMDVTAKKXXXXXXXXXIKRMQVPRLETPVXXA

SEQ ID NO: 47752 - protein, 41 aa, Artificial Sequence
  GFR-binding peptide
  MOD_RES (2)..(39): Xaa is C or S
  MOD_RES (15)..(16)..(17)..(18)..(19): Xaa is A or G
  MOD_RES (20)..(21)..(22)..(23): Xaa is A or G or is absent
AXELHEELRNSLQEXXXXXXXXXYYVVPLPEHHVRSPQXKV

SEQ ID NO: 47753 - protein, 37 aa, Artificial Sequence
  GFR-binding peptide
  MOD_RES (2)..(35)..(36): Xaa is C or S
  MOD_RES (13)..(14)..(15)..(16)..(17): Xaa is A or G
  MOD_RES (18)..(19)..(20)..(21): Xaa is A or G or is absent
KXSKVIMVTAKKXXXXXXXXXIKRIQVPRLDQSVXXP

SEQ ID NO: 47754 - protein, 34 aa, Artificial Sequence
  GFR-binding peptide
  MOD_RES (1)..(3)..(34): Xaa is C or S
XKXSRVIMSMEGIVKPKRGVMIQITINSLAQPVX

SEQ ID NO: 47755 - protein, 39 aa, Artificial Sequence
  GFR-binding peptide
  MOD_RES (2)..(34)..(35): Xaa is C or S
GXARVVMNSMEGIIVNSSDDMIQVTINSLQTPAXXPKPV

SEQ ID NO: 47756 - protein, 42 aa, Artificial Sequence
  GFR-binding peptide
  MOD_RES (1)..(3)..(36)..(37): Xaa is C or S
  MOD_RES (14)..(15)..(16)..(17)..(18): Xaa is A or G
  MOD_RES (19)..(20)..(21)..(22): Xaa is A or G or is absent
XKXSKVIMVTAKKXXXXXXXXXIKRIQVPRLDQSVXXPSASA

SEQ ID NO: 47757 - protein, 36 aa, Artificial Sequence
  GFR-binding peptide
  MOD_RES (1)..(34)..(35): Xaa is C or S
  MOD_RES (12)..(13)..(14)..(15)..(16): Xaa is A or G
  MOD_RES (17)..(18)..(19)..(20): Xaa is A or G or is absent
XSRVIMSMEGIXXXXXXXXXMIQITINSLAQPVXXP

SEQ ID NO: 47758 - protein, 44 aa, Artificial Sequence
  GFR-binding peptide
  MOD_RES (2)..(4)..(41): Xaa is C or S
AXAXELHEELRNSLQELKPKKRVYEYYLVTLPEHHVRSPQXKVS

SEQ ID NO: 47759 - protein, 40 aa, Artificial Sequence
  GFR-binding peptide
  MOD_RES (1)..(3)..(37)..(38): Xaa is C or S
  MOD_RES (15)..(16)..(17)..(18)..(19): Xaa is A or G
  MOD_RES (20)..(21)..(22)..(23): Xaa is A or G or is absent
XGXGEVVMDSMEGIXXXXXXXXXMIQMTINSLETPVXXAK

SEQ ID NO: 47760 - protein, 33 aa, Artificial Sequence
  GFR-binding peptide
  MOD_RES (33)..(33): Xaa is C or S
  MOD_RES (11)..(12)..(13)..(14)..(15): Xaa is A or G
  MOD_RES (16)..(17)..(18)..(19): Xaa is A or G or is absent
EVVMDSMEGIXXXXXXXXXMIQMTINSLETPVX

SEQ ID NO: 47761 - protein, 43 aa, Artificial Sequence; identical to SEQ ID NO: 17976
  GFR-binding peptide
  MOD_RES (1)..(3)..(40): Xaa is C or S

SEQ ID NO: 47762 - protein, 37 aa, Artificial Sequence; identical to SEQ ID NO: 10829
  GFR-binding peptide
  MOD_RES (1)..(33)..(34): Xaa is C or S

SEQ ID NO: 47763 - protein, 36 aa, Artificial Sequence; identical to SEQ ID NO: 10830
  GFR-binding peptide
  MOD_RES (2)..(36): Xaa is C or S
  MOD_RES (14)..(15)..(16)..(17)..(18): Xaa is A or G
  MOD_RES (19)..(20)..(21)..(22): Xaa is A or G or is absent

SEQ ID NO: 47764 - protein, 33 aa, Artificial Sequence; identical to SEQ ID NO: 10831
  GFR-binding peptide
  MOD_RES (32)..(33): Xaa is C or S

SEQ ID NO: 47765 - protein, 40 aa, Artificial Sequence
  GFR-binding peptide
  MOD_RES (1)..(3)..(35)..(36): Xaa is C or S
XGXGEVVMEVQVEKVVKDYEDVKAMKVSRLETPVXXAKPI

SEQ ID NO: 47766 - protein, 34 aa, Artificial Sequence
  GFR-binding peptide
  MOD_RES (13)..(14)..(15)..(16)..(17): Xaa is A or G
  MOD_RES (18)..(19)..(20)..(21): Xaa is A or G or is absent
ELHEELRNSLQEXXXXXXXXXYYLVTLPEHHVRS

SEQ ID NO: 47767 - protein, 42 aa, Artificial Sequence
  GFR-binding peptide
  MOD_RES (2)..(36)..(37): Xaa is C or S
  MOD_RES (14)..(15)..(16)..(17)..(18): Xaa is A or G
  MOD_RES (19)..(20)..(21)..(22): Xaa is A or G or is absent
GXGEVVMDVTAKKXXXXXXXXXIKRMQVPRLETPVXXAKPIK

SEQ ID NO: 47768 - protein, 40 aa, Artificial Sequence; identical to SEQ ID NO: 10832
  GFR-binding peptide
  MOD_RES (2)..(36): Xaa is C or S
  MOD_RES (14)..(15)..(16)..(17)..(18): Xaa is A or G
  MOD_RES (19)..(20)..(21)..(22): Xaa is A or G or is absent

SEQ ID NO: 47769 - protein, 35 aa, Artificial Sequence
  GFR-binding peptide
  MOD_RES (1)..(35): Xaa is C or S
  MOD_RES (13)..(14)..(15)..(16)..(17): Xaa is A or G
  MOD_RES (18)..(19)..(20)..(21): Xaa is A or G or is absent
XSRVVMNVQVEKXXXXXXXXXVKAVKVSRLKTPAX

SEQ ID NO: 47770 - protein, 34 aa, Artificial Sequence; identical to SEQ ID NO: 10833
  GFR-binding peptide
  MOD_RES (34)..(34): Xaa is C or S
  MOD_RES (12)..(13)..(14)..(15)..(16): Xaa is A or G
  MOD_RES (17)..(18)..(19)..(20): Xaa is A or G or is absent

SEQ ID NO: 47771 - protein, 37 aa, Artificial Sequence; identical to SEQ ID NO: 17981
  GFR-binding peptide
  MOD_RES (35)..(35): Xaa is C or S
  MOD_RES (11)..(12)..(13)..(14)..(15): Xaa is A or G
  MOD_RES (16)..(17)..(18)..(19): Xaa is A or G or is absent

SEQ ID NO: 47772 - protein, 35 aa, Artificial Sequence
  GFR-binding peptide
  MOD_RES (2)..(33)..(34): Xaa is C or S
KXSRVIMVTAKKVKPKRGVIKRIQVPRLAQPVXXP

SEQ ID NO: 47773 - protein, 36 aa, Artificial Sequence; identical to SEQ ID NO: 17982
  GFR-binding peptide
  MOD_RES (1)..(35): Xaa is C or S

SEQ ID NO: 47774 - protein, 35 aa, Artificial Sequence
  GFR-binding peptide
  MOD_RES (13)..(14)..(15)..(16)..(17): Xaa is A or G
  MOD_RES (18)..(19)..(20)..(21): Xaa is A or G or is absent
ELHEELRNSLQEXXXXXXXXXYYVVPLPEHHVRSP

SEQ ID NO: 47775 - protein, 37 aa, Artificial Sequence; identical to SEQ ID NO: 10835
  GFR-binding peptide
  MOD_RES (2)..(35)..(36): Xaa is C or S
  MOD_RES (13)..(14)..(15)..(16)..(17): Xaa is A or G
  MOD_RES (18)..(19)..(20)..(21): Xaa is A or G or is absent

SEQ ID NO: 47776 - protein, 39 aa, Artificial Sequence
  GFR-binding peptide
  MOD_RES (1)..(3): Xaa is C or S
XAXELHEELRNSLQELKPKKRVYEYYLVTLPEHHVRSPQ

SEQ ID NO: 47777 - protein, 37 aa, Artificial Sequence; identical to SEQ ID NO: 10836
  GFR-binding peptide
  MOD_RES (1)..(33): Xaa is C or S

SEQ ID NO: 47778 - protein, 41 aa, Artificial Sequence; identical to SEQ ID NO: 17985
  GFR-binding peptide
  MOD_RES (1)..(3)..(37): Xaa is C or S

SEQ ID NO: 47779 - protein, 36 aa, Artificial Sequence; identical to SEQ ID NO: 17986
  GFR-binding peptide
  MOD_RES (35)..(35): Xaa is C or S

SEQ ID NO: 47780 - protein, 42 aa, Artificial Sequence
  GFR-binding peptide
  MOD_RES (1)..(3)..(36)..(37): Xaa is C or S
  MOD_RES (14)..(15)..(16)..(17)..(18): Xaa is A or G
  MOD_RES (19)..(20)..(21)..(22): Xaa is A or G or is absent
XKXSRVIMVTAKKXXXXXXXXXIKRIQVPRLAQPVXXPAASA

SEQ ID NO: 47781 - protein, 36 aa, Artificial Sequence
  GFR-binding peptide
  MOD_RES (1)..(33): Xaa is C or S
XSRVVMNVTAKKIVNSSDDIKRVQVPRLKTPAXTPK

SEQ ID NO: 47782 - protein, 42 aa, Artificial Sequence; identical to SEQ ID NO: 10840
  GFR-binding peptide
  MOD_RES (2)..(4)..(37)..(38): Xaa is C or S
  MOD_RES (15)..(16)..(17)..(18)..(19): Xaa is A or G
  MOD_RES (20)..(21)..(22)..(23): Xaa is A or G or is absent

SEQ ID NO: 47783 - protein, 41 aa, Artificial Sequence
  GFR-binding peptide
  MOD_RES (2)..(4)..(36)..(37): Xaa is C or S
RXGXGEVVMDSMEGIVVKENEDMIQMTINSLETPVXXAKPI

SEQ ID NO: 47784 - protein, 37 aa, Artificial Sequence; identical to SEQ ID NO: 17989
  GFR-binding peptide
  MOD_RES (35)..(35): Xaa is C or S
  MOD_RES (11)..(12)..(13)..(14)..(15): Xaa is A or G
  MOD_RES (16)..(17)..(18)..(19): Xaa is A or G or is absent

SEQ ID NO: 47785 - protein, 39 aa, Artificial Sequence
  GFR-binding peptide
  MOD_RES (2)..(4): Xaa is C or S
  MOD_RES (17)..(18)..(19)..(20)..(21): Xaa is A or G
  MOD_RES (22)..(23)..(24)..(25): Xaa is A or G or is absent
EXKXALHDELTNSLQEXXXXXXXXXYYVVPLPELQVQTP

SEQ ID NO: 47786 - protein, 35 aa, Artificial Sequence
  GFR-binding peptide
  MOD_RES (1)..(3)..(35): Xaa is C or S
XGXGEVVMDVTAKKVVKENEDIKRMQVPRLETPVX

SEQ ID NO: 47787 - protein, 42 aa, Artificial Sequence
  GFR-binding peptide
  MOD_RES (2)..(4)..(38): Xaa is C or S
  MOD_RES (16)..(17)..(18)..(19)..(20): Xaa is A or G
  MOD_RES (21)..(22)..(23)..(24): Xaa is A or G or is absent
HXGXSRVVMNSMEGIXXXXXXXXXMIQVTINSLKTPAXTPKT

SEQ ID NO: 47788 - protein, 35 aa, Artificial Sequence; identical to SEQ ID NO: 10843
  GFR-binding peptide
  MOD_RES (31)..(32): Xaa is C or S

SEQ ID NO: 47789 - protein, 35 aa, Artificial Sequence
  GFR-binding peptide
  MOD_RES (33)..(33): Xaa is C or S
  MOD_RES (11)..(12)..(13)..(14)..(15): Xaa is A or G
  MOD_RES (16)..(17)..(18)..(19): Xaa is A or G or is absent
RVVMNVQVEKXXXXXXXXXVKAVKVSRLKTPAXTP

SEQ ID NO: 47790 - protein, 39 aa, Artificial Sequence
  GFR-binding peptide
  MOD_RES (1)..(35): Xaa is C or S
  MOD_RES (13)..(14)..(15)..(16)..(17): Xaa is A or G
  MOD_RES (18)..(19)..(20)..(21): Xaa is A or G or is absent
XKNHQLFNSLQEXXXXXXXXXYYLMTLPEEETPVXELGE

SEQ ID NO: 47791 - protein, 41 aa, Artificial Sequence; identical to SEQ ID NO: 10844
  GFR-binding peptide
  MOD_RES (1)..(35)..(36): Xaa is C or S
  MOD_RES (13)..(14)..(15)..(16)..(17): Xaa is A or G
  MOD_RES (18)..(19)..(20)..(21): Xaa is A or G or is absent

SEQ ID NO: 47792 - protein, 37 aa, Artificial Sequence
  GFR-binding peptide
  MOD_RES (1)..(3)..(37): Xaa is C or S
  MOD_RES (15)..(16)..(17)..(18)..(19): Xaa is A or G
  MOD_RES (20)..(21)..(22)..(23): Xaa is A or G or is absent
XGXGEVVMEVQVEKXXXXXXXXXVKAMKVSRLETPVX

SEQ ID NO: 47793 - protein, 35 aa, Artificial Sequence
  GFR-binding peptide
  MOD_RES (31)..(32): Xaa is C or S
SRVIMVQVEKVKPKRGVVKAIKVSRLAQPVXXPAA

SEQ ID NO: 47794 - protein, 42 aa, Artificial Sequence
  GFR-binding peptide
  MOD_RES (2)..(36)..(37): Xaa is C or S
  MOD_RES (14)..(15)..(16)..(17)..(18): Xaa is A or G
  MOD_RES (19)..(20)..(21)..(22): Xaa is A or G or is absent
GXGEVVMESMEGIXXXXXXXXXMIQMTINSLETPVXXAKPIS

SEQ ID NO: 47795 - protein, 35 aa, Artificial Sequence
  GFR-binding peptide
  MOD_RES (2)..(34)..(35): Xaa is C or S
GXSRVVMNSMEGIIVNSSDDMIQVTINSLKTPAXX

SEQ ID NO: 47796 - protein, 34 aa, Artificial Sequence; identical to SEQ ID NO: 37225
  GFR-binding peptide
  MOD_RES (33)..(34): Xaa is C or S
  MOD_RES (11)..(12)..(13)..(14)..(15): Xaa is A or G
  MOD_RES (16)..(17)..(18)..(19): Xaa is A or G or is absent

SEQ ID NO: 47797 - protein, 39 aa, Artificial Sequence
  GFR-binding peptide
  MOD_RES (2)..(4)..(35)..(36): Xaa is C or S
SXKXSRVIMVQVEKVKPKRGVVKAIKVSRLAQPVXXPAA

SEQ ID NO: 47798 - protein, 40 aa, Artificial Sequence
  GFR-binding peptide
  MOD_RES (1)..(3)..(36)..(37): Xaa is C or S
  MOD_RES (14)..(15)..(16)..(17)..(18): Xaa is A or G
  MOD_RES (19)..(20)..(21)..(22): Xaa is A or G or is absent
XKXSRVIMVQVEKXXXXXXXXXVKAIKVSRLAQPVXXPAA

SEQ ID NO: 47799 - protein, 37 aa, Artificial Sequence
  GFR-binding peptide
  MOD_RES (33)..(34): Xaa is C or S
  MOD_RES (11)..(12)..(13)..(14)..(15): Xaa is A or G
  MOD_RES (16)..(17)..(18)..(19): Xaa is A or G or is absent
RVVMNVTAKKXXXXXXXXXIKRVQVPRLQTPAXXPKP

SEQ ID NO: 47800 - protein, 40 aa, Artificial Sequence; identical to SEQ ID NO: 10847
  GFR-binding peptide
  MOD_RES (34)..(34): Xaa is C or S
  MOD_RES (12)..(13)..(14)..(15)..(16): Xaa is A or G
  MOD_RES (17)..(18)..(19)..(20): Xaa is A or G or is absent

SEQ ID NO: 47801 - protein, 35 aa, Artificial Sequence
  GFR-binding peptide
  MOD_RES (1)..(33): Xaa is C or S
XSRVVMNVQVEKIVNSSDDVKAVKVSRLKTPAXTP

SEQ ID NO: 47802 - protein, 32 aa, Artificial Sequence
  GFR-binding peptide
  MOD_RES (11)..(12)..(13)..(14)..(15): Xaa is A or G
  MOD_RES (16)..(17)..(18)..(19): Xaa is A or G or is absent
EVVMEVQVEKXXXXXXXXXVKAMKVSRLETPV

SEQ ID NO: 47803 - protein, 37 aa, Artificial Sequence; identical to SEQ ID NO: 10850
  GFR-binding peptide
  MOD_RES (2)..(4)..(36)..(37): Xaa is C or S

SEQ ID NO: 47804 - protein, 35 aa, Artificial Sequence
  GFR-binding peptide
  MOD_RES (2)..(35): Xaa is C or S
  MOD_RES (13)..(14)..(15)..(16)..(17): Xaa is A or G
  MOD_RES (18)..(19)..(20)..(21): Xaa is A or G or is absent
KXSKVVMVTAKKXXXXXXXXXIKRIQVPRLDQPVX

SEQ ID NO: 47805 - protein, 36 aa, Artificial Sequence
  GFR-binding peptide
  MOD_RES (2)..(34): Xaa is C or S
GXSRVVMNVTAKKIVNSSDDIKRVQVPRLKTPAXTP

SEQ ID NO: 47806 - protein, 41 aa, Artificial Sequence; identical to SEQ ID NO: 10857
  GFR-binding peptide
  MOD_RES (1)..(3)..(35)..(36): Xaa is C or S

SEQ ID NO: 47807 - protein, 34 aa, Artificial Sequence
  GFR-binding peptide
  MOD_RES (1)..(1): Xaa is C or S
  MOD_RES (13)..(14)..(15)..(16)..(17): Xaa is A or G
  MOD_RES (18)..(19)..(20)..(21): Xaa is A or G or is absent
XGEVVMDVTAKKXXXXXXXXXIKRMQVPRLETPV

SEQ ID NO: 47808 - protein, 36 aa, Artificial Sequence
  GFR-binding peptide
  MOD_RES (2)..(36): Xaa is C or S
  MOD_RES (14)..(15)..(16)..(17)..(18): Xaa is A or G
  MOD_RES (19)..(20)..(21)..(22): Xaa is A or G or is absent
GXARVVMNSMEGIXXXXXXXXXMIQVTINSLQTPAX

SEQ ID NO: 47809 - protein, 34 aa, Artificial Sequence
  GFR-binding peptide
  MOD_RES (1)..(34): Xaa is C or S
  MOD_RES (12)..(13)..(14)..(15)..(16): Xaa is A or G
  MOD_RES (17)..(18)..(19)..(20): Xaa is A or G or is absent
XSKVIMVTAKKXXXXXXXXXIKRIQVPRLDQSVX

SEQ ID NO: 47810 - protein, 37 aa, Artificial Sequence; identical to SEQ ID NO: 18004
  GFR-binding peptide
  MOD_RES (2)..(4): Xaa is C or S

SEQ ID NO: 47811 - protein, 37 aa, Artificial Sequence; identical to SEQ ID NO: 18005
  GFR-binding peptide
  MOD_RES (2)..(4): Xaa is C or S
  MOD_RES (16)..(17)..(18)..(19)..(20): Xaa is A or G
  MOD_RES (21)..(22)..(23)..(24): Xaa is A or G or is absent

SEQ ID NO: 47812 - protein, 43 aa, Artificial Sequence; identical to SEQ ID NO: 10862
  GFR-binding peptide
  MOD_RES (2)..(4)..(37)..(38): Xaa is C or S
  MOD_RES (15)..(16)..(17)..(18)..(19): Xaa is A or G
  MOD_RES (20)..(21)..(22)..(23): Xaa is A or G or is absent

SEQ ID NO: 47813 - protein, 37 aa, Artificial Sequence
  GFR-binding peptide
  MOD_RES (2)..(36)..(37): Xaa is C or S
  MOD_RES (14)..(15)..(16)..(17)..(18): Xaa is A or G
  MOD_RES (19)..(20)..(21)..(22): Xaa is A or G or is absent
GXGEVVMEVTAKKXXXXXXXXXIKRMQVPRLETPVXX

SEQ ID NO: 47814 - protein, 33 aa, Artificial Sequence
  GFR-binding peptide
  MOD_RES (1)..(33): Xaa is C or S
XARVVMNVTAKKIVNSSDDIKRVQVPRLQTPAX

SEQ ID NO: 47815 - protein, 37 aa, Artificial Sequence; identical to SEQ ID NO: 10865
  GFR-binding peptide
  MOD_RES (1)..(3)..(37): Xaa is C or S
  MOD_RES (15)..(16)..(17)..(18)..(19): Xaa is A or G
  MOD_RES (20)..(21)..(22)..(23): Xaa is A or G or is absent

SEQ ID NO: 47816 - protein, 35 aa, Artificial Sequence
  GFR-binding peptide
  MOD_RES (1)..(33)..(34): Xaa is C or S
XGEVVMDSMEGIVVKENEDMIQMTINSLETPVXXA

SEQ ID NO: 47817 - protein, 38 aa, Artificial Sequence; identical to SEQ ID NO: 18008
  GFR-binding peptide
  MOD_RES (36)..(36): Xaa is C or S
  MOD_RES (12)..(13)..(14)..(15)..(16): Xaa is A or G
  MOD_RES (17)..(18)..(19)..(20): Xaa is A or G or is absent

SEQ ID NO: 47818 - protein, 34 aa, Artificial Sequence; identical to SEQ ID NO: 10866
  GFR-binding peptide
  MOD_RES (1)..(33)..(34): Xaa is C or S

SEQ ID NO: 47819 - protein, 38 aa, Artificial Sequence; identical to SEQ ID NO: 10867
  GFR-binding peptide
  MOD_RES (2)..(4)..(36)..(37): Xaa is C or S

SEQ ID NO: 47820 - protein, 33 aa, Artificial Sequence; identical to SEQ ID NO: 10868
  GFR-binding peptide
  MOD_RES (31)..(31): Xaa is C or S

SEQ ID NO: 47821 - protein, 42 aa, Artificial Sequence
  GFR-binding peptide
  MOD_RES (1)..(3)..(40): Xaa is C or S
  MOD_RES (16)..(17)..(18)..(19)..(20): Xaa is A or G
  MOD_RES (21)..(22)..(23)..(24): Xaa is A or G or is absent
XAXELHEELRNSLQEXXXXXXXXXYYVVPLPEHHVRSPQXKV

SEQ ID NO: 47822 - protein, 37 aa, Artificial Sequence
  GFR-binding peptide
  MOD_RES (32)..(33): Xaa is C or S
ARVVMNVQVEKIVNSSDDVKAVKVSRLQTPAXXPKPV

SEQ ID NO: 47823 - protein, 38 aa, Artificial Sequence; identical to SEQ ID NO: 18012
  GFR-binding peptide
  MOD_RES (1)..(38): Xaa is C or S

SEQ ID NO: 47824 - protein, 36 aa, Artificial Sequence
  GFR-binding peptide
  MOD_RES (36)..(36): Xaa is C or S
  MOD_RES (12)..(13)..(14)..(15)..(16): Xaa is A or G
  MOD_RES (17)..(18)..(19)..(20): Xaa is A or G or is absent
LHEELRNSLQEXXXXXXXXXYYVVPLPEHHVRSPQX

SEQ ID NO: 47825 - protein, 36 aa, Artificial Sequence
  GFR-binding peptide
  MOD_RES (2)..(34)..(35): Xaa is C or S
GXARVVMNVQVEKIVNSSDDVKAVKVSRLQTPAXXP

SEQ ID NO: 47826 - protein, 38 aa, Artificial Sequence
  GFR-binding peptide
  MOD_RES (2)..(4)..(38): Xaa is C or S
  MOD_RES (16)..(17)..(18)..(19)..(20): Xaa is A or G
  MOD_RES (21)..(22)..(23)..(24): Xaa is A or G or is absent
HXGXSRVVMNVQVEKXXXXXXXXXVKAVKVSRLKTPAX

SEQ ID NO: 47827 - protein, 41 aa, Artificial Sequence; identical to SEQ ID NO: 18016
  GFR-binding peptide
  MOD_RES (2)..(4)..(41): Xaa is C or S

SEQ ID NO: 47828 - protein, 41 aa, Artificial Sequence; identical to SEQ ID NO: 18017
  GFR-binding peptide
  MOD_RES (1)..(38): Xaa is C or S

SEQ ID NO: 47829 - protein, 42 aa, Artificial Sequence
  GFR-binding peptide
  MOD_RES (2)..(4)..(37)..(38): Xaa is C or S
  MOD_RES (15)..(16)..(17)..(18)..(19): Xaa is A or G
  MOD_RES (20)..(21)..(22)..(23): Xaa is A or G or is absent
SXKXSRVIMVTAKKXXXXXXXXXIKRIQVPRLAQPVXXPAAS

SEQ ID NO: 47830 - protein, 34 aa, Artificial Sequence; identical to SEQ ID NO: 10876
  GFR-binding peptide
  MOD_RES (2)..(33)..(34): Xaa is C or S

SEQ ID NO: 47831 - protein, 36 aa, Artificial Sequence
  GFR-binding peptide
ALHDELTNSLQEFIPKKRVIEYYVVPLPELQVQTPR

SEQ ID NO: 47832 - protein, 42 aa, Artificial Sequence; identical to SEQ ID NO: 18019
  GFR-binding peptide
  MOD_RES (2)..(39): Xaa is C or S

SEQ ID NO: 47833 - protein, 40 aa, Artificial Sequence; identical to SEQ ID NO: 18021
  GFR-binding peptide
  MOD_RES (2)..(4): Xaa is C or S

SEQ ID NO: 47834 - protein, 41 aa, Artificial Sequence; identical to SEQ ID NO: 10878
  GFR-binding peptide
  MOD_RES (1)..(3)..(35)..(36): Xaa is C or S

SEQ ID NO: 47835 - protein, 41 aa, Artificial Sequence; identical to SEQ ID NO: 37275
  GFR-binding peptide
  MOD_RES (2)..(35)..(36): Xaa is C or S
  MOD_RES (13)..(14)..(15)..(16)..(17): Xaa is A or G
  MOD_RES (18)..(19)..(20)..(21): Xaa is A or G or is absent

SEQ ID NO: 47836 - protein, 33 aa, Artificial Sequence
  GFR-binding peptide
  MOD_RES (1)..(33): Xaa is C or S
XGEVVMDVQVEKVVKENEDVKAMKVSRLETPVX

SEQ ID NO: 47837 - protein, 40 aa, Artificial Sequence
  GFR-binding peptide
  MOD_RES (1)..(3)..(36)..(37): Xaa is C or S
  MOD_RES (14)..(15)..(16)..(17)..(18): Xaa is A or G
  MOD_RES (19)..(20)..(21)..(22): Xaa is A or G or is absent
XKXSKVIMVQVEKXXXXXXXXXVKAIKVSRLDQSVXXPSA

SEQ ID NO: 47838 - protein, 37 aa, Artificial Sequence
  GFR-binding peptide
  MOD_RES (2)..(34)..(35): Xaa is C or S
GXSRVVMNVTAKKIVNSSDDIKRVQVPRLKTPAXXPK

SEQ ID NO: 47839 - protein, 41 aa, Artificial Sequence; identical to SEQ ID NO: 10879
  GFR-binding peptide
  MOD_RES (1)..(3)..(37)..(38): Xaa is C or S
  MOD_RES (15)..(16)..(17)..(18)..(19): Xaa is A or G
  MOD_RES (20)..(21)..(22)..(23): Xaa is A or G or is absent

SEQ ID NO: 47840 - protein, 39 aa, Artificial Sequence; identical to SEQ ID NO: 10881
  GFR-binding peptide
  MOD_RES (2)..(4)..(35)..(36): Xaa is C or S

SEQ ID NO: 47841 - protein, 34 aa, Artificial Sequence; identical to SEQ ID NO: 10882
  GFR-binding peptide
  MOD_RES (31)..(32): Xaa is C or S

SEQ ID NO: 47842 - protein, 34 aa, Artificial Sequence; identical to SEQ ID NO: 10885
  GFR-binding peptide
  MOD_RES (31)..(32): Xaa is C or S

SEQ ID NO: 47843 - protein, 43 aa, Artificial Sequence; identical to SEQ ID NO: 10886
  GFR-binding peptide
  MOD_RES (2)..(4)..(38): Xaa is C or S
  MOD_RES (16)..(17)..(18)..(19)..(20): Xaa is A or G
  MOD_RES (21)..(22)..(23)..(24): Xaa is A or G or is absent

SEQ ID NO: 47844 - protein, 35 aa, Artificial Sequence; identical to SEQ ID NO: 18031
  GFR-binding peptide
  MOD_RES (1)..(1): Xaa is C or S
  MOD_RES (14)..(15)..(16)..(17)..(18): Xaa is A or G
  MOD_RES (19)..(20)..(21)..(22): Xaa is A or G or is absent

SEQ ID NO: 47845 - protein, 40 aa, Artificial Sequence; identical to SEQ ID NO: 10887
  GFR-binding peptide
  MOD_RES (2)..(4)..(38): Xaa is C or S
  MOD_RES (16)..(17)..(18)..(19)..(20): Xaa is A or G
  MOD_RES (21)..(22)..(23)..(24): Xaa is A or G or is absent

SEQ ID NO: 47846 - protein, 43 aa, Artificial Sequence
  GFR-binding peptide
  MOD_RES (2)..(4)..(37)..(38): Xaa is C or S
  MOD_RES (15)..(16)..(17)..(18)..(19): Xaa is A or G
  MOD_RES (20)..(21)..(22)..(23): Xaa is A or G or is absent
SXKXSKVIMVTAKKXXXXXXXXXIKRIQVPRLDQSVXXPSASA

SEQ ID NO: 47847 - protein, 39 aa, Artificial Sequence
  GFR-binding peptide
  MOD_RES (1)..(38): Xaa is C or S
XELHEELRNSLQELKPKKRVYEYYVVPLPEHHVRSPQXK

SEQ ID NO: 47848 - protein, 39 aa, Artificial Sequence; identical to SEQ ID NO: 10889
  GFR-binding peptide
  MOD_RES (1)..(3)..(37)..(38): Xaa is C or S
  MOD_RES (15)..(16)..(17)..(18)..(19): Xaa is A or G
  MOD_RES (20)..(21)..(22)..(23): Xaa is A or G or is absent

SEQ ID NO: 47849 - protein, 38 aa, Artificial Sequence
  GFR-binding peptide
  MOD_RES (1)..(3)..(37): Xaa is C or S
  MOD_RES (15)..(16)..(17)..(18)..(19): Xaa is A or G
  MOD_RES (20)..(21)..(22)..(23): Xaa is A or G or is absent
XEXKNHQLFNSLQEXXXXXXXXXYYVMPLPEEETPVXE

SEQ ID NO: 47850 - protein, 41 aa, Artificial Sequence
  GFR-binding peptide
  MOD_RES (2)..(4)..(36)..(37): Xaa is C or S
HXGXSRVVMNVQVEKIVNSSDDVKAVKVSRLKTPAXXPKPV

SEQ ID NO: 47851 - protein, 35 aa, Artificial Sequence
  GFR-binding peptide
  MOD_RES (1)..(3)..(35): Xaa is C or S
XGXARVVMNVQVEKIVNSSDDVKAVKVSRLQTPAX

SEQ ID NO: 47852 - protein, 36 aa, Artificial Sequence; identical to SEQ ID NO: 10898
  GFR-binding peptide
  MOD_RES (1)..(33)..(34): Xaa is C or S

SEQ ID NO: 47853 - protein, 32 aa, Artificial Sequence
  GFR-binding peptide
  MOD_RES (11)..(12)..(13)..(14)..(15): Xaa is A or G
  MOD_RES (16)..(17)..(18)..(19): Xaa is A or G or is absent
SRVIMVQVEKXXXXXXXXXVKAIKVSRLAQPV

SEQ ID NO: 47854 - protein, 38 aa, Artificial Sequence; identical to SEQ ID NO: 18035
  GFR-binding peptide
  MOD_RES (2)..(36): Xaa is C or S

SEQ ID NO: 47855 - protein, 43 aa, Artificial Sequence; identical to SEQ ID NO: 18037
  GFR-binding peptide
  MOD_RES (1)..(3)..(37): Xaa is C or S
  MOD_RES (15)..(16)..(17)..(18)..(19): Xaa is A or G
  MOD_RES (20)..(21)..(22)..(23): Xaa is A or G or is absent

SEQ ID NO: 47856 - protein, 37 aa, Artificial Sequence; identical to SEQ ID NO: 18038
  GFR-binding peptide
  MOD_RES (1)..(3): Xaa is C or S

SEQ ID NO: 47857 - protein, 42 aa, Artificial Sequence
  GFR-binding peptide
  MOD_RES (1)..(3)..(37)..(38): Xaa is C or S
  MOD_RES (15)..(16)..(17)..(18)..(19): Xaa is A or G
  MOD_RES (20)..(21)..(22)..(23): Xaa is A or G or is absent
XGXGEVVMDVTAKKXXXXXXXXXIKRMQVPRLETPVXXAKPI

SEQ ID NO: 47858 - protein, 36 aa, Artificial Sequence; identical to SEQ ID NO: 10901
  GFR-binding peptide
  MOD_RES (2)..(34)..(35): Xaa is C or S

SEQ ID NO: 47859 - protein, 40 aa, Artificial Sequence
  GFR-binding peptide
  MOD_RES (2)..(4)..(38): Xaa is C or S
  MOD_RES (16)..(17)..(18)..(19)..(20): Xaa is A or G
  MOD_RES (21)..(22)..(23)..(24): Xaa is A or G or is absent
RXEXKNHQLFNSLQEXXXXXXXXXYYVMPLPEEETPVXEL

SEQ ID NO: 47860 - protein, 39 aa, Artificial Sequence
  GFR-binding peptide
  MOD_RES (1)..(3)..(36)..(37): Xaa is C or S
  MOD_RES (14)..(15)..(16)..(17)..(18): Xaa is A or G
  MOD_RES (19)..(20)..(21)..(22): Xaa is A or G or is absent
XKXSKVVMVTAKKXXXXXXXXXIKRIQVPRLDQPVXXPS

SEQ ID NO: 47861 - protein, 39 aa, Artificial Sequence; identical to SEQ ID NO: 18043
  GFR-binding peptide
  MOD_RES (2)..(4)..(38): Xaa is C or S

SEQ ID NO: 47862 - protein, 33 aa, Artificial Sequence; identical to SEQ ID NO: 10903
  GFR-binding peptide
  MOD_RES (2)..(2): Xaa is C or S

SEQ ID NO: 47863 - protein, 38 aa, Artificial Sequence
  GFR-binding peptide
  MOD_RES (2)..(4)..(35)..(36): Xaa is C or S
SXKXSKVIMSMEGIIKPTKGIMIQITINSLDQSVXXPS

SEQ ID NO: 47864 - protein, 41 aa, Artificial Sequence
  GFR-binding peptide
  MOD_RES (37)..(37): Xaa is C or S
  MOD_RES (13)..(14)..(15)..(16)..(17): Xaa is A or G
  MOD_RES (18)..(19)..(20)..(21): Xaa is A or G or is absent
ALHDELTNSLQEXXXXXXXXXYYLVTLPELQVQTPRXQVNR

SEQ ID NO: 47865 - protein, 40 aa, Artificial Sequence; identical to SEQ ID NO: 10906
  GFR-binding peptide
  MOD_RES (2)..(35)..(36): Xaa is C or S
  MOD_RES (13)..(14)..(15)..(16)..(17): Xaa is A or G
  MOD_RES (18)..(19)..(20)..(21): Xaa is A or G or is absent

SEQ ID NO: 47866 - protein, 40 aa, Artificial Sequence; identical to SEQ ID NO: 10907
  GFR-binding peptide
  MOD_RES (2)..(34)..(35): Xaa is C or S

SEQ ID NO: 47867 - protein, 39 aa, Artificial Sequence
  GFR-binding peptide
  MOD_RES (1)..(3)..(37)..(38): Xaa is C or S
  MOD_RES (15)..(16)..(17)..(18)..(19): Xaa is A or G
  MOD_RES (20)..(21)..(22)..(23): Xaa is A or G or is absent
XGXSRVVMNVTAKKXXXXXXXXXIKRVQVPRLKTPAXXP

SEQ ID NO: 47868 - protein, 34 aa, Artificial Sequence
  GFR-binding peptide
  MOD_RES (1)..(1): Xaa is C or S
XKNHQLFNSLQEHQGQHPKIRYYLMTLPEEETPV

SEQ ID NO: 47869 - protein, 38 aa, Artificial Sequence; identical to SEQ ID NO: 18049
  GFR-binding peptide
  MOD_RES (37)..(37): Xaa is C or S

SEQ ID NO: 47870 - protein, 39 aa, Artificial Sequence; identical to SEQ ID NO: 18051
  GFR-binding peptide
  MOD_RES (37)..(37): Xaa is C or S
  MOD_RES (13)..(14)..(15)..(16)..(17): Xaa is A or G
  MOD_RES (18)..(19)..(20)..(21): Xaa is A or G or is absent

SEQ ID NO: 47871 - protein, 41 aa, Artificial Sequence
  GFR-binding peptide
  MOD_RES (1)..(3)..(37)..(38): Xaa is C or S
  MOD_RES (15)..(16)..(17)..(18)..(19): Xaa is A or G
  MOD_RES (20)..(21)..(22)..(23): Xaa is A or G or is absent
XGXGEVVMDVQVEKXXXXXXXXXVKAMKVSRLETPVXXAKP

SEQ ID NO: 47872 - protein, 32 aa, Artificial Sequence
  GFR-binding peptide
  MOD_RES (1)..(1): Xaa is C or S
XARVVMNSMEGIIVNSSDDMIQVTINSLQTPA

SEQ ID NO: 47873 - protein, 39 aa, Artificial Sequence
  GFR-binding peptide
  MOD_RES (1)..(33)..(34): Xaa is C or S
XSRVVMNSMEGIIVNSSDDMIQVTINSLKTPAXXPKPVY

SEQ ID NO: 47874 - protein, 32 aa, Artificial Sequence; identical to SEQ ID NO: 10914
  GFR-binding peptide
  MOD_RES (31)..(31): Xaa is C or S

SEQ ID NO: 47875 - protein, 34 aa, Artificial Sequence; identical to SEQ ID NO: 37334
  GFR-binding peptide
  MOD_RES (2)..(33)..(34): Xaa is C or S

SEQ ID NO: 47876 - protein, 38 aa, Artificial Sequence
  GFR-binding peptide
  MOD_RES (2)..(4)..(36)..(37): Xaa is C or S
HXGXSRVVMNSMEGIIVNSSDDMIQVTINSLKTPAXXP

SEQ ID NO: 47877 - protein, 35 aa, Artificial Sequence; identical to SEQ ID NO: 10916
  GFR-binding peptide
  MOD_RES (34)..(34): Xaa is C or S
  MOD_RES (12)..(13)..(14)..(15)..(16): Xaa is A or G
  MOD_RES (17)..(18)..(19)..(20): Xaa is A or G or is absent

SEQ ID NO: 47878 - protein, 33 aa, Artificial Sequence; identical to SEQ ID NO: 10918
  GFR-binding peptide
  MOD_RES (31)..(32): Xaa is C or S

SEQ ID NO: 47879 - protein, 39 aa, Artificial Sequence
  GFR-binding peptide
  MOD_RES (2)..(36)..(37): Xaa is C or S
  MOD_RES (14)..(15)..(16)..(17)..(18): Xaa is A or G
  MOD_RES (19)..(20)..(21)..(22): Xaa is A or G or is absent
GXGEVVMDVTAKKXXXXXXXXXIKRMQVPRLETPVXXAK

SEQ ID NO: 47880 - protein, 36 aa, Artificial Sequence; identical to SEQ ID NO: 10919
  GFR-binding peptide
  MOD_RES (2)..(36): Xaa is C or S
  MOD_RES (14)..(15)..(16)..(17)..(18): Xaa is A or G
  MOD_RES (19)..(20)..(21)..(22): Xaa is A or G or is absent

SEQ ID NO: 47881 - protein, 33 aa, Artificial Sequence; identical to SEQ ID NO: 10920
  GFR-binding peptide
  MOD_RES (12)..(13)..(14)..(15)..(16): Xaa is A or G
  MOD_RES (17)..(18)..(19)..(20): Xaa is A or G or is absent

SEQ ID NO: 47882 - protein, 34 aa, Artificial Sequence
  GFR-binding peptide
ALHDELTNSLQEFIPKKRVIEYYLVTLPELQVQT

SEQ ID NO: 47883 - protein, 34 aa, Artificial Sequence; identical to SEQ ID NO: 10921
  GFR-binding peptide
  MOD_RES (33)..(33): Xaa is C or S
  MOD_RES (11)..(12)..(13)..(14)..(15): Xaa is A or G
  MOD_RES (16)..(17)..(18)..(19): Xaa is A or G or is absent

SEQ ID NO: 47884 - protein, 40 aa, Artificial Sequence
  GFR-binding peptide
  MOD_RES (34)..(34): Xaa is C or S
  MOD_RES (12)..(13)..(14)..(15)..(16): Xaa is A or G
  MOD_RES (17)..(18)..(19)..(20): Xaa is A or G or is absent
KNHQLFNSLQEXXXXXXXXXYYVMPLPEEETPVXELGEDN

SEQ ID NO: 47885 - protein, 36 aa, Artificial Sequence
  GFR-binding peptide
  MOD_RES (2)..(4): Xaa is C or S
  MOD_RES (15)..(16)..(17)..(18)..(19): Xaa is A or G
  MOD_RES (20)..(21)..(22)..(23): Xaa is A or G or is absent
SXKXSKVVMVTAKKXXXXXXXXXIKRIQVPRLDQPV

SEQ ID NO: 47886 - protein, 37 aa, Artificial Sequence; identical to SEQ ID NO: 10930
  GFR-binding peptide
  MOD_RES (2)..(34)..(35): Xaa is C or S

SEQ ID NO: 47887 - protein, 37 aa, Artificial Sequence; identical to SEQ ID NO: 10931
  GFR-binding peptide
  MOD_RES (2)..(33)..(34): Xaa is C or S

SEQ ID NO: 47888 - protein, 37 aa, Artificial Sequence; identical to SEQ ID NO: 18070
  GFR-binding peptide
  MOD_RES (1)..(35): Xaa is C or S

SEQ ID NO: 47889 - protein, 41 aa, Artificial Sequence
  GFR-binding peptide
  MOD_RES (2)..(36): Xaa is C or S
  MOD_RES (14)..(15)..(16)..(17)..(18): Xaa is A or G
  MOD_RES (19)..(20)..(21)..(22): Xaa is A or G or is absent
EXKNHQLFNSLQEXXXXXXXXXYYVMPLPEEETPVXELGED

SEQ ID NO: 47890 - protein, 39 aa, Artificial Sequence; identical to SEQ ID NO: 10935
  GFR-binding peptide
  MOD_RES (2)..(4)..(36)..(37): Xaa is C or S

SEQ ID NO: 47891 - protein, 33 aa, Artificial Sequence
  GFR-binding peptide
  MOD_RES (32)..(33): Xaa is C or S
SRVVMNSMEGIIVNSSDDMIQVTINSLKTPAXX

SEQ ID NO: 47892 - protein, 39 aa, Artificial Sequence
  GFR-binding peptide
  MOD_RES (2)..(35)..(36): Xaa is C or S
  MOD_RES (13)..(14)..(15)..(16)..(17): Xaa is A or G
  MOD_RES (18)..(19)..(20)..(21): Xaa is A or G or is absent
KXSKVIMVQVEKXXXXXXXXXVKAIKVSRLDQSVXXPSA

SEQ ID NO: 47893 - protein, 37 aa, Artificial Sequence; identical to SEQ ID NO: 18072
  GFR-binding peptide
  MOD_RES (33)..(33): Xaa is C or S
  MOD_RES (11)..(12)..(13)..(14)..(15): Xaa is A or G
  MOD_RES (16)..(17)..(18)..(19): Xaa is A or G or is absent

SEQ ID NO: 47894 - protein, 40 aa, Artificial Sequence
  GFR-binding peptide
  MOD_RES (1)..(34)..(35): Xaa is C or S
  MOD_RES (12)..(13)..(14)..(15)..(16): Xaa is A or G
  MOD_RES (17)..(18)..(19)..(20): Xaa is A or G or is absent
XSRVIMVQVEKXXXXXXXXXVKAIKVSRLAQPVXXPAASA

SEQ ID NO: 47895 - protein, 35 aa, Artificial Sequence
  GFR-binding peptide
LHDELTNSLQEFIPKKRVIEYYVVPLPELQVQTPR

SEQ ID NO: 47896 - protein, 35 aa, Artificial Sequence; identical to SEQ ID NO: 18073
  GFR-binding peptide
  MOD_RES (34)..(34): Xaa is C or S

SEQ ID NO: 47897 - protein, 33 aa, Artificial Sequence
  GFR-binding peptide
  MOD_RES (33)..(33): Xaa is C or S
NHQLFNSLQEHQGQHPKIRYYLMTLPEEETPVX

SEQ ID NO: 47898 - protein, 41 aa, Artificial Sequence; identical to SEQ ID NO: 18074
  GFR-binding peptide
  MOD_RES (1)..(38): Xaa is C or S

SEQ ID NO: 47899 - protein, 39 aa, Artificial Sequence; identical to SEQ ID NO: 37372
  GFR-binding peptide
  MOD_RES (2)..(4)..(37)..(38): Xaa is C or S
  MOD_RES (15)..(16)..(17)..(18)..(19): Xaa is A or G
  MOD_RES (20)..(21)..(22)..(23): Xaa is A or G or is absent

SEQ ID NO: 47900 - protein, 36 aa, Artificial Sequence
  GFR-binding peptide
  MOD_RES (1)..(32)..(33): Xaa is C or S
XSKVVMVQVEKVKPTRGVVKAIKVSRLDQPVXXPSA

SEQ ID NO: 47901 - protein, 34 aa, Artificial Sequence
  GFR-binding peptide
  MOD_RES (31)..(32): Xaa is C or S
RVVMNSMEGIIVNSSDDMIQVTINSLQTPAXXPK

SEQ ID NO: 47902 - protein, 40 aa, Artificial Sequence
  GFR-binding peptide
  MOD_RES (36)..(36): Xaa is C or S
LHEELRNSLQELKPKKRVYEYYLVTLPEHHVRSPQXKVSS

SEQ ID NO: 47903 - protein, 43 aa, Artificial Sequence; identical to SEQ ID NO: 18075
  GFR-binding peptide
  MOD_RES (2)..(4)..(41): Xaa is C or S

SEQ ID NO: 47904 - protein, 37 aa, Artificial Sequence
  GFR-binding peptide
  MOD_RES (1)..(33): Xaa is C or S
XSRVVMNVTAKKIVNSSDDIKRVQVPRLKTPAXTPKT

SEQ ID NO: 47905 - protein, 39 aa, Artificial Sequence; identical to SEQ ID NO: 18076
  GFR-binding peptide
  MOD_RES (33)..(33): Xaa is C or S
  MOD_RES (11)..(12)..(13)..(14)..(15): Xaa is A or G
  MOD_RES (16)..(17)..(18)..(19): Xaa is A or G or is absent

SEQ ID NO: 47906 - protein, 35 aa, Artificial Sequence
  GFR-binding peptide
  MOD_RES (1)..(35): Xaa is C or S
XKNHQLFNSLQEHQGQHPKIRYYLMTLPEEETPVX

SEQ ID NO: 47907 - protein, 35 aa, Artificial Sequence
  GFR-binding peptide
  MOD_RES (33)..(34): Xaa is C or S
  MOD_RES (11)..(12)..(13)..(14)..(15): Xaa is A or G
  MOD_RES (16)..(17)..(18)..(19): Xaa is A or G or is absent
EVVMESMEGIXXXXXXXXXMIQMTINSLETPVXXA

SEQ ID NO: 47908 - protein, 38 aa, Artificial Sequence
  GFR-binding peptide
  MOD_RES (33)..(34): Xaa is C or S
  MOD_RES (11)..(12)..(13)..(14)..(15): Xaa is A or G
  MOD_RES (16)..(17)..(18)..(19): Xaa is A or G or is absent
EVVMDSMEGIXXXXXXXXXMIQMTINSLETPVXXAKPI

SEQ ID NO: 47909 - protein, 35 aa, Artificial Sequence
  GFR-binding peptide
  MOD_RES (1)..(3): Xaa is C or S
  MOD_RES (14)..(15)..(16)..(17)..(18): Xaa is A or G
  MOD_RES (19)..(20)..(21)..(22): Xaa is A or G or is absent
XKXSKVVMVTAKKXXXXXXXXXIKRIQVPRLDQPV

SEQ ID NO: 47910 - protein, 43 aa, Artificial Sequence
  GFR-binding peptide
  MOD_RES (2)..(4)..(41): Xaa is C or S
EXKXALHDELTNSLQEFIPKKRVIEYYVVPLPELQVQTPRXQV

SEQ ID NO: 47911 - protein, 38 aa, Artificial Sequence
  GFR-binding peptide
  MOD_RES (32)..(33): Xaa is C or S
SRVVMNVQVEKIVNSSDDVKAVKVSRLKTPAXXPKPVY

SEQ ID NO: 47912 - protein, 33 aa, Artificial Sequence
  GFR-binding peptide
  MOD_RES (33)..(33): Xaa is C or S
  MOD_RES (11)..(12)..(13)..(14)..(15): Xaa is A or G
  MOD_RES (16)..(17)..(18)..(19): Xaa is A or G or is absent
SKVVMSMEGIXXXXXXXXXMIQITINSLDQPVX

SEQ ID NO: 47913 - protein, 38 aa, Artificial Sequence
  GFR-binding peptide
  MOD_RES (33)..(33): Xaa is C or S
  MOD_RES (11)..(12)..(13)..(14)..(15): Xaa is A or G
  MOD_RES (16)..(17)..(18)..(19): Xaa is A or G or is absent
RVVMNVQVEKXXXXXXXXXVKAVKVSRLKTPAXTPKTV

SEQ ID NO: 47914 - protein, 42 aa, Artificial Sequence
  GFR-binding peptide
  MOD_RES (1)..(3)..(37): Xaa is C or S
  MOD_RES (15)..(16)..(17)..(18)..(19): Xaa is A or G
  MOD_RES (20)..(21)..(22)..(23): Xaa is A or G or is absent
XGXSRVVMNVTAKKXXXXXXXXXIKRVQVPRLKTPAXTPKTV

SEQ ID NO: 47915 - protein, 35 aa, Artificial Sequence
  GFR-binding peptide
  MOD_RES (1)..(3): Xaa is C or S
  MOD_RES (14)..(15)..(16)..(17)..(18): Xaa is A or G
  MOD_RES (19)..(20)..(21)..(22): Xaa is A or G or is absent
XKXSKVIMVQVEKXXXXXXXXXVKAIKVSRLDQSV

SEQ ID NO: 47916 - protein, 37 aa, Artificial Sequence
  GFR-binding peptide
  MOD_RES (2)..(34)..(35): Xaa is C or S
GXGEVVMEVQVEKVVKDYEDVKAMKVSRLETPVXXAK

SEQ ID NO: 47917 - protein, 37 aa, Artificial Sequence; identical to SEQ ID NO: 10946
  GFR-binding peptide
  MOD_RES (34)..(34): Xaa is C or S
  MOD_RES (12)..(13)..(14)..(15)..(16): Xaa is A or G
  MOD_RES (17)..(18)..(19)..(20): Xaa is A or G or is absent

SEQ ID NO: 47918 - protein, 37 aa, Artificial Sequence
  GFR-binding peptide
  MOD_RES (36)..(36): Xaa is C or S
LHDELTNSLQEFIPKKRVIEYYVVPLPELQVQTPRXQ

SEQ ID NO: 47919 - protein, 35 aa, Artificial Sequence; identical to SEQ ID NO: 10948
  GFR-binding peptide
  MOD_RES (1)..(35): Xaa is C or S
  MOD_RES (13)..(14)..(15)..(16)..(17): Xaa is A or G
  MOD_RES (18)..(19)..(20)..(21): Xaa is A or G or is absent

SEQ ID NO: 47920 - protein, 32 aa, Artificial Sequence
  GFR-binding peptide
NHQLFNSLQEHQGQHPKIRYYVMPLPEEETPV

SEQ ID NO: 47921 - protein, 34 aa, Artificial Sequence
  GFR-binding peptide
  MOD_RES (1)..(33)..(34): Xaa is C or S
XARVVMNVTAKKIVNSSDDIKRVQVPRLQTPAXX

SEQ ID NO: 47922 - protein, 40 aa, Artificial Sequence; identical to SEQ ID NO: 18085
  GFR-binding peptide
  MOD_RES (2)..(4): Xaa is C or S
  MOD_RES (17)..(18)..(19)..(20)..(21): Xaa is A or G
  MOD_RES (22)..(23)..(24)..(25): Xaa is A or G or is absent

SEQ ID NO: 47923 - protein, 41 aa, Artificial Sequence
  GFR-binding peptide
  MOD_RES (1)..(38): Xaa is C or S
  MOD_RES (14)..(15)..(16)..(17)..(18): Xaa is A or G
  MOD_RES (19)..(20)..(21)..(22): Xaa is A or G or is absent
XELHEELRNSLQEXXXXXXXXXYYLVTLPEHHVRSPQXKVS

SEQ ID NO: 47924 - protein, 35 aa, Artificial Sequence
  GFR-binding peptide
  MOD_RES (1)..(3): Xaa is C or S
  MOD_RES (14)..(15)..(16)..(17)..(18): Xaa is A or G
  MOD_RES (19)..(20)..(21)..(22): Xaa is A or G or is absent
XKXSRVIMVTAKKXXXXXXXXXIKRIQVPRLAQPV

SEQ ID NO: 47925 - protein, 39 aa, Artificial Sequence
  GFR-binding peptide
  MOD_RES (1)..(38): Xaa is C or S
  MOD_RES (14)..(15)..(16)..(17)..(18): Xaa is A or G
  MOD_RES (19)..(20)..(21)..(22): Xaa is A or G or is absent
XALHDELTNSLQEXXXXXXXXXYYVVPLPELQVQTPRXQ

SEQ ID NO: 47926 - protein, 39 aa, Artificial Sequence; identical to SEQ ID NO: 18087
  GFR-binding peptide
  MOD_RES (34)..(34): Xaa is C or S
  MOD_RES (12)..(13)..(14)..(15)..(16): Xaa is A or G
  MOD_RES (17)..(18)..(19)..(20): Xaa is A or G or is absent

SEQ ID NO: 47927 - protein, 32 aa, Artificial Sequence
  GFR-binding peptide
  MOD_RES (31)..(32): Xaa is C or S
SKVIMVTAKKIKPTKGIIKRIQVPRLDQSVXX

SEQ ID NO: 47928 - protein, 36 aa, Artificial Sequence; identical to SEQ ID NO: 10949
  GFR-binding peptide
  MOD_RES (2)..(4)..(36): Xaa is C or S

SEQ ID NO: 47929 - protein, 42 aa, Artificial Sequence; identical to SEQ ID NO: 10953
  GFR-binding peptide
  MOD_RES (1)..(3)..(37)..(38): Xaa is C or S
  MOD_RES (15)..(16)..(17)..(18)..(19): Xaa is A or G
  MOD_RES (20)..(21)..(22)..(23): Xaa is A or G or is absent

SEQ ID NO: 47930 - protein, 40 aa, Artificial Sequence; identical to SEQ ID NO: 10954
  GFR-binding peptide
  MOD_RES (1)..(3)..(37)..(38): Xaa is C or S
  MOD_RES (15)..(16)..(17)..(18)..(19): Xaa is A or G
  MOD_RES (20)..(21)..(22)..(23): Xaa is A or G or is absent

SEQ ID NO: 47931 - protein, 37 aa, Artificial Sequence; identical to SEQ ID NO: 10955
  GFR-binding peptide
  MOD_RES (2)..(36)..(37): Xaa is C or S
  MOD_RES (14)..(15)..(16)..(17)..(18): Xaa is A or G
  MOD_RES (19)..(20)..(21)..(22): Xaa is A or G or is absent

SEQ ID NO: 47932 - protein, 38 aa, Artificial Sequence; identical to SEQ ID NO: 10957
  GFR-binding peptide
  MOD_RES (33)..(34): Xaa is C or S
  MOD_RES (11)..(12)..(13)..(14)..(15): Xaa is A or G
  MOD_RES (16)..(17)..(18)..(19): Xaa is A or G or is absent

SEQ ID NO: 47933 - protein, 33 aa, Artificial Sequence
  GFR-binding peptide
  MOD_RES (1)..(3): Xaa is C or S
XKXSRVIMSMEGIVKPKRGVMIQITINSLAQPV

SEQ ID NO: 47934 - protein, 36 aa, Artificial Sequence; identical to SEQ ID NO: 18092
  GFR-binding peptide

SEQ ID NO: 47935 - protein, 36 aa, Artificial Sequence; identical to SEQ ID NO: 18093
  GFR-binding peptide
  MOD_RES (1)..(1): Xaa is C or S

SEQ ID NO: 47936 - protein, 38 aa, Artificial Sequence; identical to SEQ ID NO: 18094
  GFR-binding peptide
  MOD_RES (1)..(35): Xaa is C or S
  MOD_RES (13)..(14)..(15)..(16)..(17): Xaa is A or G
  MOD_RES (18)..(19)..(20)..(21): Xaa is A or G or is absent

SEQ ID NO: 47937 - protein, 34 aa, Artificial Sequence; identical to SEQ ID NO: 10958
  GFR-binding peptide
  MOD_RES (1)..(3): Xaa is C or S

SEQ ID NO: 47938 - protein, 38 aa, Artificial Sequence
  GFR-binding peptide
  MOD_RES (32)..(33): Xaa is C or S
GEVVMEVQVEKVVKDYEDVKAMKVSRLETPVXXAKPIS

SEQ ID NO: 47939 - protein, 43 aa, Artificial Sequence; identical to SEQ ID NO: 10961
  GFR-binding peptide
  MOD_RES (1)..(3)..(37)..(38): Xaa is C or S
  MOD_RES (15)..(16)..(17)..(18)..(19): Xaa is A or G
  MOD_RES (20)..(21)..(22)..(23): Xaa is A or G or is absent

SEQ ID NO: 47940 - protein, 32 aa, Artificial Sequence; identical to SEQ ID NO: 10962
  GFR-binding peptide
  MOD_RES (1)..(1): Xaa is C or S

SEQ ID NO: 47941 - protein, 40 aa, Artificial Sequence
  GFR-binding peptide
  MOD_RES (1)..(3)..(37)..(38): Xaa is C or S
  MOD_RES (15)..(16)..(17)..(18)..(19): Xaa is A or G
  MOD_RES (20)..(21)..(22)..(23): Xaa is A or G or is absent
XGXARVVMNVTAKKXXXXXXXXXIKRVQVPRLQTPAXXPK

SEQ ID NO: 47942 - protein, 38 aa, Artificial Sequence; identical to SEQ ID NO: 10966
  GFR-binding peptide
  MOD_RES (32)..(33): Xaa is C or S

SEQ ID NO: 47943 - protein, 38 aa, Artificial Sequence
  GFR-binding peptide
  MOD_RES (32)..(32): Xaa is C or S
SRVVMNVQVEKIVNSSDDVKAVKVSRLKTPAXTPKTVH

SEQ ID NO: 47944 - protein, 43 aa, Artificial Sequence; identical to SEQ ID NO: 10970
  GFR-binding peptide
  MOD_RES (1)..(3)..(37): Xaa is C or S
  MOD_RES (15)..(16)..(17)..(18)..(19): Xaa is A or G
  MOD_RES (20)..(21)..(22)..(23): Xaa is A or G or is absent

SEQ ID NO: 47945 - protein, 31 aa, Artificial Sequence; identical to SEQ ID NO: 10972
  GFR-binding peptide
  MOD_RES (31)..(31): Xaa is C or S

SEQ ID NO: 47946 - protein, 34 aa, Artificial Sequence; identical to SEQ ID NO: 18100
  GFR-binding peptide
  MOD_RES (34)..(34): Xaa is C or S

SEQ ID NO: 47947 - protein, 44 aa, Artificial Sequence; identical to SEQ ID NO: 18103
  GFR-binding peptide
  MOD_RES (2)..(4)..(41): Xaa is C or S

SEQ ID NO: 47948 - protein, 38 aa, Artificial Sequence; identical to SEQ ID NO: 10974
  GFR-binding peptide
  MOD_RES (34)..(35): Xaa is C or S
  MOD_RES (12)..(13)..(14)..(15)..(16): Xaa is A or G
  MOD_RES (17)..(18)..(19)..(20): Xaa is A or G or is absent

SEQ ID NO: 47949 - protein, 37 aa, Artificial Sequence
  GFR-binding peptide
  MOD_RES (1)..(35)..(36): Xaa is C or S
  MOD_RES (13)..(14)..(15)..(16)..(17): Xaa is A or G
  MOD_RES (18)..(19)..(20)..(21): Xaa is A or G or is absent
XSRVVMNVTAKKXXXXXXXXXIKRVQVPRLKTPAXXP

SEQ ID NO: 47950 - protein, 38 aa, Artificial Sequence
  GFR-binding peptide
  MOD_RES (1)..(3)..(37): Xaa is C or S
XEXKNHQLFNSLQEHQGQHPKIRYYLMTLPEEETPVXE

SEQ ID NO: 47951 - protein, 40 aa, Artificial Sequence
  GFR-binding peptide
  MOD_RES (1)..(3)..(37): Xaa is C or S
  MOD_RES (15)..(16)..(17)..(18)..(19): Xaa is A or G
  MOD_RES (20)..(21)..(22)..(23): Xaa is A or G or is absent
XEXKNHQLFNSLQEXXXXXXXXXYYLMTLPEEETPVXELG

SEQ ID NO: 47952 - protein, 38 aa, Artificial Sequence
  GFR-binding peptide
  MOD_RES (1)..(3)..(37)..(38): Xaa is C or S
  MOD_RES (15)..(16)..(17)..(18)..(19): Xaa is A or G
  MOD_RES (20)..(21)..(22)..(23): Xaa is A or G or is absent
XGXGEVVMESMEGIXXXXXXXXXMIQMTINSLETPVXX

SEQ ID NO: 47953 - protein, 36 aa, Artificial Sequence
  GFR-binding peptide
  MOD_RES (1)..(3): Xaa is C or S
XEXKNHQLFNSLQEHQGQHPKIRYYLMTLPEEETPV

SEQ ID NO: 47954 - protein, 38 aa, Artificial Sequence
  GFR-binding peptide
  MOD_RES (2)..(4): Xaa is C or S
AXAXELHEELRNSLQELKPKKRVYEYYLVTLPEHHVRS

SEQ ID NO: 47955 - protein, 41 aa, Artificial Sequence; identical to SEQ ID NO: 10977
  GFR-binding peptide
  MOD_RES (1)..(3)..(35)..(36): Xaa is C or S

SEQ ID NO: 47956 - protein, 31 aa, Artificial Sequence
  GFR-binding peptide
  MOD_RES (1)..(1): Xaa is C or S
XSKVVMVTAKKVKPTRGVIKRIQVPRLDQPV

SEQ ID NO: 47957 - protein, 41 aa, Artificial Sequence
  GFR-binding peptide
  MOD_RES (2)..(4)..(36)..(37): Xaa is C or S
RXGXGEVVMDVQVEKVVKENEDVKAMKVSRLETPVXXAKPI

SEQ ID NO: 47958 - protein, 39 aa, Artificial Sequence
  GFR-binding peptide
  MOD_RES (33)..(34): Xaa is C or S
  MOD_RES (11)..(12)..(13)..(14)..(15): Xaa is A or G
  MOD_RES (16)..(17)..(18)..(19): Xaa is A or G or is absent
RVVMNSMEGIXXXXXXXXXMIQVTINSLKTPAXXPKPVY

SEQ ID NO: 47959 - protein, 40 aa, Artificial Sequence; identical to SEQ ID NO: 18108
  GFR-binding peptide
  MOD_RES (37)..(37): Xaa is C or S

SEQ ID NO: 47960 - protein, 30 aa, Artificial Sequence; identical to SEQ ID NO: 10978
  GFR-binding peptide

SEQ ID NO: 47961 - protein, 38 aa, Artificial Sequence; identical to SEQ ID NO: 18110
  GFR-binding peptide
  MOD_RES (36)..(36): Xaa is C or S
  MOD_RES (12)..(13)..(14)..(15)..(16): Xaa is A or G
  MOD_RES (17)..(18)..(19)..(20): Xaa is A or G or is absent

SEQ ID NO: 47962 - protein, 43 aa, Artificial Sequence
  GFR-binding peptide
  MOD_RES (1)..(3)..(37)..(38): Xaa is C or S
  MOD_RES (15)..(16)..(17)..(18)..(19): Xaa is A or G
  MOD_RES (20)..(21)..(22)..(23): Xaa is A or G or is absent
XGXARVVMNSMEGIXXXXXXXXXMIQVTINSLQTPAXXPKPVT

SEQ ID NO: 47963 - protein, 32 aa, Artificial Sequence
  GFR-binding peptide
  MOD_RES (1)..(32): Xaa is C or S
XSKVIMVTAKKIKPTKGIIKRIQVPRLDQSVX

SEQ ID NO: 47964 - protein, 34 aa, Artificial Sequence
  GFR-binding peptide
  MOD_RES (1)..(33): Xaa is C or S
XSRVVMNSMEGIIVNSSDDMIQVTINSLKTPAXT

SEQ ID NO: 47965 - protein, 41 aa, Artificial Sequence; identical to SEQ ID NO: 18113
  GFR-binding peptide
  MOD_RES (2)..(39): Xaa is C or S

SEQ ID NO: 47966 - protein, 36 aa, Artificial Sequence; identical to SEQ ID NO: 10983
  GFR-binding peptide
  MOD_RES (2)..(34): Xaa is C or S

SEQ ID NO: 47967 - protein, 39 aa, Artificial Sequence; identical to SEQ ID NO: 18114
  GFR-binding peptide
  MOD_RES (1)..(38): Xaa is C or S

SEQ ID NO: 47968 - protein, 36 aa, Artificial Sequence; identical to SEQ ID NO: 18115
  GFR-binding peptide
  MOD_RES (35)..(35): Xaa is C or S
  MOD_RES (11)..(12)..(13)..(14)..(15): Xaa is A or G
  MOD_RES (16)..(17)..(18)..(19): Xaa is A or G or is absent

SEQ ID NO: 47969 - protein, 35 aa, Artificial Sequence; identical to SEQ ID NO: 10984
  GFR-binding peptide
  MOD_RES (1)..(3)..(34)..(35): Xaa is C or S

SEQ ID NO: 47970 - protein, 44 aa, Artificial Sequence; identical to SEQ ID NO: 18117
  GFR-binding peptide
  MOD_RES (1)..(3)..(40): Xaa is C or S
  MOD_RES (16)..(17)..(18)..(19)..(20): Xaa is A or G
  MOD_RES (21)..(22)..(23)..(24): Xaa is A or G or is absent

SEQ ID NO: 47971 - protein, 36 aa, Artificial Sequence; identical to SEQ ID NO: 10985
  GFR-binding peptide
  MOD_RES (1)..(35)..(36): Xaa is C or S
  MOD_RES (13)..(14)..(15)..(16)..(17): Xaa is A or G
  MOD_RES (18)..(19)..(20)..(21): Xaa is A or G or is absent

SEQ ID NO: 47972 - protein, 35 aa, Artificial Sequence; identical to SEQ ID NO: 10986
  GFR-binding peptide
  MOD_RES (1)..(3)..(35): Xaa is C or S

SEQ ID NO: 47973 - protein, 35 aa, Artificial Sequence
  GFR-binding peptide
  MOD_RES (2)..(4): Xaa is C or S
HXGXARVVMNSMEGIIVNSSDDMIQVTINSLQTPA

SEQ ID NO: 47974 - protein, 44 aa, Artificial Sequence
  GFR-binding peptide
  MOD_RES (2)..(4)..(38): Xaa is C or S
  MOD_RES (16)..(17)..(18)..(19)..(20): Xaa is A or G
  MOD_RES (21)..(22)..(23)..(24): Xaa is A or G or is absent
HXGXSRVVMNVTAKKXXXXXXXXXIKRVQVPRLKTPAXTPKTVH

SEQ ID NO: 47975 - protein, 36 aa, Artificial Sequence; identical to SEQ ID NO: 10989
  GFR-binding peptide
  MOD_RES (2)..(34)..(35): Xaa is C or S

SEQ ID NO: 47976 - protein, 43 aa, Artificial Sequence; identical to SEQ ID NO: 18121
  GFR-binding peptide
  MOD_RES (2)..(4)..(41): Xaa is C or S

SEQ ID NO: 47977 - protein, 38 aa, Artificial Sequence; identical to SEQ ID NO: 18122
  GFR-binding peptide
  MOD_RES (2)..(4)..(38): Xaa is C or S
  MOD_RES (16)..(17)..(18)..(19)..(20): Xaa is A or G
  MOD_RES (21)..(22)..(23)..(24): Xaa is A or G or is absent

SEQ ID NO: 47978 - protein, 35 aa, Artificial Sequence; identical to SEQ ID NO: 37462
  GFR-binding peptide
  MOD_RES (1)..(3)..(34)..(35): Xaa is C or S

SEQ ID NO: 47979 - protein, 40 aa, Artificial Sequence; identical to SEQ ID NO: 10990
  GFR-binding peptide
  MOD_RES (2)..(34)..(35): Xaa is C or S

SEQ ID NO: 47980 - protein, 39 aa, Artificial Sequence; identical to SEQ ID NO: 10991
  GFR-binding peptide
  MOD_RES (2)..(4)..(38)..(39): Xaa is C or S
  MOD_RES (16)..(17)..(18)..(19)..(20): Xaa is A or G
  MOD_RES (21)..(22)..(23)..(24): Xaa is A or G or is absent

SEQ ID NO: 47981 - protein, 40 aa, Artificial Sequence
  GFR-binding peptide
  MOD_RES (2)..(34)..(35): Xaa is C or S
GXGEVVMEVQVEKVVKDYEDVKAMKVSRLETPVXXAKPIS

SEQ ID NO: 47982 - protein, 31 aa, Artificial Sequence
  GFR-binding peptide
  MOD_RES (31)..(31): Xaa is C or S
EVVMDSMEGIVVKENEDMIQMTINSLETPVX

SEQ ID NO: 47983 - protein, 32 aa, Artificial Sequence; identical to SEQ ID NO: 10993
  GFR-binding peptide
  MOD_RES (2)..(2): Xaa is C or S

SEQ ID NO: 47984 - protein, 38 aa, Artificial Sequence
  GFR-binding peptide
  MOD_RES (1)..(38): Xaa is C or S
XALHDELTNSLQEFIPKKRVIEYYLVTLPELQVQTPRX

SEQ ID NO: 47985 - protein, 39 aa, Artificial Sequence
  GFR-binding peptide
  MOD_RES (1)..(34)..(35): Xaa is C or S
  MOD_RES (12)..(13)..(14)..(15)..(16): Xaa is A or G
  MOD_RES (17)..(18)..(19)..(20): Xaa is A or G or is absent
XSKVVMVQVEKXXXXXXXXXVKAIKVSRLDQPVXXPSAS

SEQ ID NO: 47986 - protein, 45 aa, Artificial Sequence; identical to SEQ ID NO: 18125
  GFR-binding peptide
  MOD_RES (2)..(4)..(41): Xaa is C or S

SEQ ID NO: 47987 - protein, 37 aa, Artificial Sequence; identical to SEQ ID NO: 10997
  GFR-binding peptide
  MOD_RES (31)..(31): Xaa is C or S

SEQ ID NO: 47988 - protein, 38 aa, Artificial Sequence
  GFR-binding peptide
  MOD_RES (34)..(35): Xaa is C or S
  MOD_RES (12)..(13)..(14)..(15)..(16): Xaa is A or G
  MOD_RES (17)..(18)..(19)..(20): Xaa is A or G or is absent
SRVVMNVQVEKXXXXXXXXXVKAVKVSRLKTPAXXPKP

SEQ ID NO: 47989 - protein, 37 aa, Artificial Sequence; identical to SEQ ID NO: 18127
  GFR-binding peptide
  MOD_RES (1)..(3): Xaa is C or S

SEQ ID NO: 47990 - protein, 34 aa, Artificial Sequence
  GFR-binding peptide
  MOD_RES (1)..(33): Xaa is C or S
XSRVVMNVTAKKIVNSSDDIKRVQVPRLKTPAXT

SEQ ID NO: 47991 - protein, 40 aa, Artificial Sequence; identical to SEQ ID NO: 18128
  GFR-binding peptide
  MOD_RES (2)..(4)..(38): Xaa is C or S
  MOD_RES (16)..(17)..(18)..(19)..(20): Xaa is A or G
  MOD_RES (21)..(22)..(23)..(24): Xaa is A or G or is absent

SEQ ID NO: 47992 - protein, 37 aa, Artificial Sequence
  GFR-binding peptide
  MOD_RES (31)..(32): Xaa is C or S
RVVMNVTAKKIVNSSDDIKRVQVPRLQTPAXXPKPVT

SEQ ID NO: 47993 - protein, 42 aa, Artificial Sequence
  GFR-binding peptide
  MOD_RES (2)..(4)..(38)..(39): Xaa is C or S
  MOD_RES (16)..(17)..(18)..(19)..(20): Xaa is A or G
  MOD_RES (21)..(22)..(23)..(24): Xaa is A or G or is absent
HXGXSRVVMNVTAKKXXXXXXXXXIKRVQVPRLKTPAXXPKP

SEQ ID NO: 47994 - protein, 42 aa, Artificial Sequence
  GFR-binding peptide
  MOD_RES (2)..(4)..(38): Xaa is C or S
  MOD_RES (16)..(17)..(18)..(19)..(20): Xaa is A or G
  MOD_RES (21)..(22)..(23)..(24): Xaa is A or G or is absent
HXGXSRVVMNVQVEKXXXXXXXXXVKAVKVSRLKTPAXTPKT

SEQ ID NO: 47995 - protein, 44 aa, Artificial Sequence; identical to SEQ ID NO: 18130
  GFR-binding peptide
  MOD_RES (2)..(4)..(38): Xaa is C or S
  MOD_RES (16)..(17)..(18)..(19)..(20): Xaa is A or G
  MOD_RES (21)..(22)..(23)..(24): Xaa is A or G or is absent

SEQ ID NO: 47996 - protein, 37 aa, Artificial Sequence
  GFR-binding peptide
  MOD_RES (2)..(4)..(36)..(37): Xaa is C or S
HXGXARVVMNSMEGIIVNSSDDMIQVTINSLQTPAXX

SEQ ID NO: 47997 - protein, 38 aa, Artificial Sequence
  GFR-binding peptide
  MOD_RES (1)..(38): Xaa is C or S
  MOD_RES (14)..(15)..(16)..(17)..(18): Xaa is A or G
  MOD_RES (19)..(20)..(21)..(22): Xaa is A or G or is absent
XALHDELTNSLQEXXXXXXXXXYYVVPLPELQVQTPRX

SEQ ID NO: 47998 - protein, 31 aa, Artificial Sequence; identical to SEQ ID NO: 37488
  GFR-binding peptide
  MOD_RES (31)..(31): Xaa is C or S

SEQ ID NO: 47999 - protein, 34 aa, Artificial Sequence; identical to SEQ ID NO: 11005
  GFR-binding peptide
  MOD_RES (34)..(34): Xaa is C or S
  MOD_RES (12)..(13)..(14)..(15)..(16): Xaa is A or G
  MOD_RES (17)..(18)..(19)..(20): Xaa is A or G or is absent

SEQ ID NO: 48000 - protein, 44 aa, Artificial Sequence
  GFR-binding peptide
  MOD_RES (2)..(4)..(38): Xaa is C or S
  MOD_RES (16)..(17)..(18)..(19)..(20): Xaa is A or G
  MOD_RES (21)..(22)..(23)..(24): Xaa is A or G or is absent
RXEXKNHQLFNSLQEXXXXXXXXXYYLMTLPEEETPVXELGEDN

SEQ ID NO: 48001 - protein, 39 aa, Artificial Sequence
  GFR-binding peptide
  MOD_RES (1)..(3): Xaa is C or S
  MOD_RES (16)..(17)..(18)..(19)..(20): Xaa is A or G
  MOD_RES (21)..(22)..(23)..(24): Xaa is A or G or is absent
XAXELHEELRNSLQEXXXXXXXXXYYVVPLPEHHVRSPQ

SEQ ID NO: 48002 - protein, 40 aa, Artificial Sequence
  GFR-binding peptide
  MOD_RES (2)..(4)..(35)..(36): Xaa is C or S
SXKXSKVIMVTAKKIKPTKGIIKRIQVPRLDQSVXXPSAS

SEQ ID NO: 48003 - protein, 35 aa, Artificial Sequence; identical to SEQ ID NO: 11008
  GFR-binding peptide
  MOD_RES (31)..(32): Xaa is C or S

SEQ ID NO: 48004 - protein, 37 aa, Artificial Sequence; identical to SEQ ID NO: 11009
  GFR-binding peptide
  MOD_RES (2)..(4)..(36): Xaa is C or S

SEQ ID NO: 48005 - protein, 41 aa, Artificial Sequence; identical to SEQ ID NO: 11010
  GFR-binding peptide
  MOD_RES (2)..(4)..(37)..(38): Xaa is C or S
  MOD_RES (15)..(16)..(17)..(18)..(19): Xaa is A or G
  MOD_RES (20)..(21)..(22)..(23): Xaa is A or G or is absent

SEQ ID NO: 48006 - protein, 36 aa, Artificial Sequence
  GFR-binding peptide
  MOD_RES (34)..(35): Xaa is C or S
  MOD_RES (12)..(13)..(14)..(15)..(16): Xaa is A or G
  MOD_RES (17)..(18)..(19)..(20): Xaa is A or G or is absent
SRVVMNSMEGIXXXXXXXXXMIQVTINSLKTPAXXP

SEQ ID NO: 48007 - protein, 35 aa, Artificial Sequence
  GFR-binding peptide
  MOD_RES (2)..(4)..(35): Xaa is C or S
SXKXSKVIMVQVEKIKPTKGIVKAIKVSRLDQSVX

SEQ ID NO: 48008 - protein, 40 aa, Artificial Sequence; identical to SEQ ID NO: 11014
  GFR-binding peptide
  MOD_RES (34)..(35): Xaa is C or S
  MOD_RES (12)..(13)..(14)..(15)..(16): Xaa is A or G
  MOD_RES (17)..(18)..(19)..(20): Xaa is A or G or is absent

SEQ ID NO: 48009 - protein, 37 aa, Artificial Sequence
  GFR-binding peptide
  MOD_RES (2)..(2): Xaa is C or S
AXELHEELRNSLQELKPKKRVYEYYVVPLPEHHVRSP

SEQ ID NO: 48010 - protein, 38 aa, Artificial Sequence; identical to SEQ ID NO: 18144
  GFR-binding peptide
  MOD_RES (34)..(34): Xaa is C or S
  MOD_RES (12)..(13)..(14)..(15)..(16): Xaa is A or G
  MOD_RES (17)..(18)..(19)..(20): Xaa is A or G or is absent

SEQ ID NO: 48011 - protein, 41 aa, Artificial Sequence
  GFR-binding peptide
  MOD_RES (2)..(4)..(36)..(37): Xaa is C or S
RXGXGEVVMEVTAKKVVKDYEDIKRMQVPRLETPVXXAKPI

SEQ ID NO: 48012 - protein, 34 aa, Artificial Sequence; identical to SEQ ID NO: 11017
  GFR-binding peptide
  MOD_RES (2)..(34): Xaa is C or S

SEQ ID NO: 48013 - protein, 39 aa, Artificial Sequence
  GFR-binding peptide
  MOD_RES (2)..(36): Xaa is C or S
  MOD_RES (14)..(15)..(16)..(17)..(18): Xaa is A or G
  MOD_RES (19)..(20)..(21)..(22): Xaa is A or G or is absent
GXSRVVMNVQVEKXXXXXXXXXVKAVKVSRLKTPAXTPK

SEQ ID NO: 48014 - protein, 36 aa, Artificial Sequence; identical to SEQ ID NO: 11019
  GFR-binding peptide
  MOD_RES (1)..(35)..(36): Xaa is C or S
  MOD_RES (13)..(14)..(15)..(16)..(17): Xaa is A or G
  MOD_RES (18)..(19)..(20)..(21): Xaa is A or G or is absent

SEQ ID NO: 48015 - protein, 34 aa, Artificial Sequence
  GFR-binding peptide
  MOD_RES (1)..(33): Xaa is C or S
XSRVVMNVQVEKIVNSSDDVKAVKVSRLKTPAXT

SEQ ID NO: 48016 - protein, 40 aa, Artificial Sequence; identical to SEQ ID NO: 11020
  GFR-binding peptide
  MOD_RES (34)..(35): Xaa is C or S
  MOD_RES (12)..(13)..(14)..(15)..(16): Xaa is A or G
  MOD_RES (17)..(18)..(19)..(20): Xaa is A or G or is absent

SEQ ID NO: 48017 - protein, 37 aa, Artificial Sequence
  GFR-binding peptide
  MOD_RES (32)..(33): Xaa is C or S
ARVVMNVTAKKIVNSSDDIKRVQVPRLQTPAXXPKPV

SEQ ID NO: 48018 - protein, 34 aa, Artificial Sequence
  GFR-binding peptide
  MOD_RES (2)..(4): Xaa is C or S
SXKXSKVIMVTAKKIKPTKGIIKRIQVPRLDQSV

SEQ ID NO: 48019 - protein, 40 aa, Artificial Sequence; identical to SEQ ID NO: 11022
  GFR-binding peptide
  MOD_RES (2)..(34): Xaa is C or S

SEQ ID NO: 48020 - protein, 40 aa, Artificial Sequence; identical to SEQ ID NO: 18147
  GFR-binding peptide
  MOD_RES (1)..(35): Xaa is C or S
  MOD_RES (13)..(14)..(15)..(16)..(17): Xaa is A or G
  MOD_RES (18)..(19)..(20)..(21): Xaa is A or G or is absent

SEQ ID NO: 48021 - protein, 40 aa, Artificial Sequence; identical to SEQ ID NO: 18149
  GFR-binding peptide
  MOD_RES (36)..(36): Xaa is C or S
  MOD_RES (12)..(13)..(14)..(15)..(16): Xaa is A or G
  MOD_RES (17)..(18)..(19)..(20): Xaa is A or G or is absent

SEQ ID NO: 48022 - protein, 35 aa, Artificial Sequence; identical to SEQ ID NO: 11023
  GFR-binding peptide
  MOD_RES (2)..(33)..(34): Xaa is C or S

SEQ ID NO: 48023 - protein, 34 aa, Artificial Sequence
  GFR-binding peptide
  MOD_RES (1)..(34): Xaa is C or S
  MOD_RES (12)..(13)..(14)..(15)..(16): Xaa is A or G
  MOD_RES (17)..(18)..(19)..(20): Xaa is A or G or is absent
XSRVIMSMEGIXXXXXXXXXMIQITINSLAQPVX

SEQ ID NO: 48024 - protein, 37 aa, Artificial Sequence; identical to SEQ ID NO: 11024
  GFR-binding peptide
  MOD_RES (2)..(4): Xaa is C or S
  MOD_RES (16)..(17)..(18)..(19)..(20): Xaa is A or G
  MOD_RES (21)..(22)..(23)..(24): Xaa is A or G or is absent

SEQ ID NO: 48025 - protein, 37 aa, Artificial Sequence
  GFR-binding peptide
  MOD_RES (35)..(35): Xaa is C or S
  MOD_RES (11)..(12)..(13)..(14)..(15): Xaa is A or G
  MOD_RES (16)..(17)..(18)..(19): Xaa is A or G or is absent
HDELTNSLQEXXXXXXXXXYYVVPLPELQVQTPRXQV

SEQ ID NO: 48026 - protein, 37 aa, Artificial Sequence; identical to SEQ ID NO: 11028
  GFR-binding peptide
  MOD_RES (2)..(34)..(35): Xaa is C or S

SEQ ID NO: 48027 - protein, 39 aa, Artificial Sequence; identical to SEQ ID NO: 11031
  GFR-binding peptide
  MOD_RES (2)..(36)..(37): Xaa is C or S
  MOD_RES (14)..(15)..(16)..(17)..(18): Xaa is A or G
  MOD_RES (19)..(20)..(21)..(22): Xaa is A or G or is absent

SEQ ID NO: 48028 - protein, 39 aa, Artificial Sequence
  GFR-binding peptide
  MOD_RES (35)..(35): Xaa is C or S
HEELRNSLQELKPKKRVYEYYLVTLPEHHVRSPQXKVSS

SEQ ID NO: 48029 - protein, 36 aa, Artificial Sequence; identical to SEQ ID NO: 11032
  GFR-binding peptide
  MOD_RES (31)..(32): Xaa is C or S

SEQ ID NO: 48030 - protein, 37 aa, Artificial Sequence; identical to SEQ ID NO: 11033
  GFR-binding peptide
  MOD_RES (2)..(4)..(36)..(37): Xaa is C or S

SEQ ID NO: 48031 - protein, 36 aa, Artificial Sequence; identical to SEQ ID NO: 18157
  GFR-binding peptide
  MOD_RES (1)..(35): Xaa is C or S
  MOD_RES (13)..(14)..(15)..(16)..(17): Xaa is A or G
  MOD_RES (18)..(19)..(20)..(21): Xaa is A or G or is absent

SEQ ID NO: 48032 - protein, 39 aa, Artificial Sequence
  GFR-binding peptide
  MOD_RES (33)..(34): Xaa is C or S
  MOD_RES (11)..(12)..(13)..(14)..(15): Xaa is A or G
  MOD_RES (16)..(17)..(18)..(19): Xaa is A or G or is absent
SKVIMSMEGIXXXXXXXXXMIQITINSLDQSVXXPSASA

SEQ ID NO: 48033 - protein, 39 aa, Artificial Sequence
  GFR-binding peptide
  MOD_RES (1)..(33)..(34): Xaa is C or S
XGEVVMDVQVEKVVKENEDVKAMKVSRLETPVXXAKPIK

SEQ ID NO: 48034 - protein, 35 aa, Artificial Sequence
  GFR-binding peptide
  MOD_RES (2)..(2): Xaa is C or S
  MOD_RES (14)..(15)..(16)..(17)..(18): Xaa is A or G
  MOD_RES (19)..(20)..(21)..(22): Xaa is A or G or is absent
GXGEVVMDSMEGIXXXXXXXXXMIQMTINSLETPV

SEQ ID NO: 48035 - protein, 34 aa, Artificial Sequence
  GFR-binding peptide
  MOD_RES (1)..(1): Xaa is C or S
  MOD_RES (13)..(14)..(15)..(16)..(17): Xaa is A or G
  MOD_RES (18)..(19)..(20)..(21): Xaa is A or G or is absent
XGEVVMESMEGIXXXXXXXXXMIQMTINSLETPV

SEQ ID NO: 48036 - protein, 37 aa, Artificial Sequence; identical to SEQ ID NO: 18162
  GFR-binding peptide
  MOD_RES (36)..(36): Xaa is C or S

SEQ ID NO: 48037 - protein, 30 aa, Artificial Sequence; identical to SEQ ID NO: 11038
  GFR-binding peptide

SEQ ID NO: 48038 - protein, 38 aa, Artificial Sequence; identical to SEQ ID NO: 11039
  GFR-binding peptide
  MOD_RES (1)..(3)..(37)..(38): Xaa is C or S
  MOD_RES (15)..(16)..(17)..(18)..(19): Xaa is A or G
  MOD_RES (20)..(21)..(22)..(23): Xaa is A or G or is absent

SEQ ID NO: 48039 - protein, 39 aa, Artificial Sequence
  GFR-binding peptide
  MOD_RES (2)..(36)..(37): Xaa is C or S
  MOD_RES (14)..(15)..(16)..(17)..(18): Xaa is A or G
  MOD_RES (19)..(20)..(21)..(22): Xaa is A or G or is absent
GXARVVMNVTAKKXXXXXXXXXIKRVQVPRLQTPAXXPK

SEQ ID NO: 48040 - protein, 39 aa, Artificial Sequence; identical to SEQ ID NO: 11040
  GFR-binding peptide
  MOD_RES (2)..(4)..(36)..(37): Xaa is C or S

SEQ ID NO: 48041 - protein, 39 aa, Artificial Sequence
  GFR-binding peptide
  MOD_RES (2)..(33)..(34): Xaa is C or S
KXSRVIMVTAKKVKPKRGVIKRIQVPRLAQPVXXPAASA

SEQ ID NO: 48042 - protein, 34 aa, Artificial Sequence
  GFR-binding peptide
  MOD_RES (2)..(33)..(34): Xaa is C or S
KXSRVIMSMEGIVKPKRGVMIQITINSLAQPVXX

SEQ ID NO: 48043 - protein, 41 aa, Artificial Sequence; identical to SEQ ID NO: 11042
  GFR-binding peptide
  MOD_RES (2)..(35)..(36): Xaa is C or S
  MOD_RES (13)..(14)..(15)..(16)..(17): Xaa is A or G
  MOD_RES (18)..(19)..(20)..(21): Xaa is A or G or is absent

SEQ ID NO: 48044 - protein, 43 aa, Artificial Sequence; identical to SEQ ID NO: 11044
  GFR-binding peptide
  MOD_RES (2)..(4)..(38)..(39): Xaa is C or S
  MOD_RES (16)..(17)..(18)..(19)..(20): Xaa is A or G
  MOD_RES (21)..(22)..(23)..(24): Xaa is A or G or is absent

SEQ ID NO: 48045 - protein, 42 aa, Artificial Sequence; identical to SEQ ID NO: 11046
  GFR-binding peptide
  MOD_RES (2)..(4)..(36)..(37): Xaa is C or S

SEQ ID NO: 48046 - protein, 37 aa, Artificial Sequence
  GFR-binding peptide
  MOD_RES (31)..(32): Xaa is C or S
SKVIMVTAKKIKPTKGIIKRIQVPRLDQSVXXPSASA

SEQ ID NO: 48047 - protein, 35 aa, Artificial Sequence
  GFR-binding peptide
  MOD_RES (1)..(34)..(35): Xaa is C or S
  MOD_RES (12)..(13)..(14)..(15)..(16): Xaa is A or G
  MOD_RES (17)..(18)..(19)..(20): Xaa is A or G or is absent
XSKVIMSMEGIXXXXXXXXXMIQITINSLDQSVXX

SEQ ID NO: 48048 - protein, 37 aa, Artificial Sequence; identical to SEQ ID NO: 11049
  GFR-binding peptide
  MOD_RES (2)..(34)..(35): Xaa is C or S

SEQ ID NO: 48049 - protein, 34 aa, Artificial Sequence; identical to SEQ ID NO: 11050
  GFR-binding peptide
  MOD_RES (2)..(33)..(34): Xaa is C or S

SEQ ID NO: 48050 - protein, 38 aa, Artificial Sequence; identical to SEQ ID NO: 11051
  GFR-binding peptide
  MOD_RES (2)..(33)..(34): Xaa is C or S

SEQ ID NO: 48051 - protein, 40 aa, Artificial Sequence
  GFR-binding peptide
  MOD_RES (2)..(4)..(36)..(37): Xaa is C or S
RXGXGEVVMEVQVEKVVKDYEDVKAMKVSRLETPVXXAKP

SEQ ID NO: 48052 - protein, 40 aa, Artificial Sequence
  GFR-binding peptide
  MOD_RES (1)..(3)..(35)..(36): Xaa is C or S
XGXSRVVMNSMEGIIVNSSDDMIQVTINSLKTPAXXPKPV

SEQ ID NO: 48053 - protein, 37 aa, Artificial Sequence; identical to SEQ ID NO: 11052
  GFR-binding peptide
  MOD_RES (33)..(33): Xaa is C or S
  MOD_RES (11)..(12)..(13)..(14)..(15): Xaa is A or G
  MOD_RES (16)..(17)..(18)..(19): Xaa is A or G or is absent

SEQ ID NO: 48054 - protein, 34 aa, Artificial Sequence; identical to SEQ ID NO: 11053
  GFR-binding peptide
  MOD_RES (32)..(33): Xaa is C or S

SEQ ID NO: 48055 - protein, 43 aa, Artificial Sequence; identical to SEQ ID NO: 18166
  GFR-binding peptide
  MOD_RES (1)..(3)..(40): Xaa is C or S

SEQ ID NO: 48056 - protein, 41 aa, Artificial Sequence
  GFR-binding peptide
  MOD_RES (1)..(35)..(36): Xaa is C or S
  MOD_RES (13)..(14)..(15)..(16)..(17): Xaa is A or G
  MOD_RES (18)..(19)..(20)..(21): Xaa is A or G or is absent
XGEVVMESMEGIXXXXXXXXXMIQMTINSLETPVXXAKPIS

SEQ ID NO: 48057 - protein, 37 aa, Artificial Sequence
  GFR-binding peptide
  MOD_RES (1)..(3)..(35)..(36): Xaa is C or S
XGXGEVVMEVQVEKVVKDYEDVKAMKVSRLETPVXXA

SEQ ID NO: 48058 - protein, 38 aa, Artificial Sequence
  GFR-binding peptide
  MOD_RES (2)..(4)..(38): Xaa is C or S
  MOD_RES (16)..(17)..(18)..(19)..(20): Xaa is A or G
  MOD_RES (21)..(22)..(23)..(24): Xaa is A or G or is absent
HXGXSRVVMNSMEGIXXXXXXXXXMIQVTINSLKTPAX

SEQ ID NO: 48059 - protein, 40 aa, Artificial Sequence
  GFR-binding peptide
  MOD_RES (34)..(34): Xaa is C or S
KNHQLFNSLQEHQGQHPKIRYYLMTLPEEETPVXELGEDN

SEQ ID NO: 48060 - protein, 38 aa, Artificial Sequence; identical to SEQ ID NO: 18167
  GFR-binding peptide
  MOD_RES (35)..(35): Xaa is C or S

SEQ ID NO: 48061 - protein, 37 aa, Artificial Sequence
  GFR-binding peptide
  MOD_RES (1)..(3)..(36)..(37): Xaa is C or S
  MOD_RES (14)..(15)..(16)..(17)..(18): Xaa is A or G
  MOD_RES (19)..(20)..(21)..(22): Xaa is A or G or is absent
XKXSKVVMVTAKKXXXXXXXXXIKRIQVPRLDQPVXX

SEQ ID NO: 48062 - protein, 37 aa, Artificial Sequence
  GFR-binding peptide
  MOD_RES (2)..(4)..(37): Xaa is C or S
  MOD_RES (15)..(16)..(17)..(18)..(19): Xaa is A or G
  MOD_RES (20)..(21)..(22)..(23): Xaa is A or G or is absent
SXKXSRVIMSMEGIXXXXXXXXXMIQITINSLAQPVX

SEQ ID NO: 48063 - protein, 37 aa, Artificial Sequence; identical to SEQ ID NO: 11055
  GFR-binding peptide
  MOD_RES (1)..(33)..(34): Xaa is C or S

SEQ ID NO: 48064 - protein, 30 aa, Artificial Sequence
  GFR-binding peptide
SKVVMVQVEKVKPTRGVVKAIKVSRLDQPV

SEQ ID NO: 48065 - protein, 42 aa, Artificial Sequence; identical to SEQ ID NO: 11058
  GFR-binding peptide
  MOD_RES (2)..(4)..(36): Xaa is C or S

SEQ ID NO: 48066 - protein, 36 aa, Artificial Sequence
  GFR-binding peptide
  MOD_RES (1)..(1): Xaa is C or S
  MOD_RES (14)..(15)..(16)..(17)..(18): Xaa is A or G
  MOD_RES (19)..(20)..(21)..(22): Xaa is A or G or is absent
XELHEELRNSLQEXXXXXXXXXYYLVTLPEHHVRSP

SEQ ID NO: 48067 - protein, 38 aa, Artificial Sequence
  GFR-binding peptide
  MOD_RES (32)..(33): Xaa is C or S
ARVVMNVTAKKIVNSSDDIKRVQVPRLQTPAXXPKPVT

SEQ ID NO: 48068 - protein, 33 aa, Artificial Sequence
  GFR-binding peptide
  MOD_RES (31)..(31): Xaa is C or S
RVVMNVQVEKIVNSSDDVKAVKVSRLKTPAXTP

SEQ ID NO: 48069 - protein, 39 aa, Artificial Sequence; identical to SEQ ID NO: 18180
  GFR-binding peptide
  MOD_RES (2)..(4)..(38): Xaa is C or S

SEQ ID NO: 48070 - protein, 36 aa, Artificial Sequence
  GFR-binding peptide
  MOD_RES (1)..(3): Xaa is C or S
  MOD_RES (15)..(16)..(17)..(18)..(19): Xaa is A or G
  MOD_RES (20)..(21)..(22)..(23): Xaa is A or G or is absent
XGXGEVVMEVTAKKXXXXXXXXXIKRMQVPRLETPV

SEQ ID NO: 48071 - protein, 33 aa, Artificial Sequence; identical to SEQ ID NO: 11060
  GFR-binding peptide
  MOD_RES (32)..(33): Xaa is C or S

SEQ ID NO: 48072 - protein, 40 aa, Artificial Sequence; identical to SEQ ID NO: 11063
  GFR-binding peptide
  MOD_RES (1)..(3)..(35)..(36): Xaa is C or S

SEQ ID NO: 48073 - protein, 40 aa, Artificial Sequence
  GFR-binding peptide
  MOD_RES (34)..(35): Xaa is C or S
  MOD_RES (12)..(13)..(14)..(15)..(16): Xaa is A or G
  MOD_RES (17)..(18)..(19)..(20): Xaa is A or G or is absent
ARVVMNSMEGIXXXXXXXXXMIQVTINSLQTPAXXPKPVT

SEQ ID NO: 48074 - protein, 42 aa, Artificial Sequence; identical to SEQ ID NO: 18184
  GFR-binding peptide
  MOD_RES (1)..(3)..(37): Xaa is C or S

SEQ ID NO: 48075 - protein, 38 aa, Artificial Sequence
  GFR-binding peptide
  MOD_RES (1)..(3)..(35)..(36): Xaa is C or S
XGXGEVVMESMEGIVVKDYEDMIQMTINSLETPVXXAK

SEQ ID NO: 48076 - protein, 33 aa, Artificial Sequence
  GFR-binding peptide
  MOD_RES (2)..(33): Xaa is C or S
KXSRVIMSMEGIVKPKRGVMIQITINSLAQPVX

SEQ ID NO: 48077 - protein, 40 aa, Artificial Sequence
  GFR-binding peptide
  MOD_RES (2)..(4)..(36)..(37): Xaa is C or S
RXGXGEVVMDVTAKKVVKENEDIKRMQVPRLETPVXXAKP

SEQ ID NO: 48078 - protein, 31 aa, Artificial Sequence; identical to SEQ ID NO: 11066
  GFR-binding peptide
  MOD_RES (31)..(31): Xaa is C or S

SEQ ID NO: 48079 - protein, 39 aa, Artificial Sequence; identical to SEQ ID NO: 18185
  GFR-binding peptide
  MOD_RES (35)..(35): Xaa is C or S

SEQ ID NO: 48080 - protein, 42 aa, Artificial Sequence; identical to SEQ ID NO: 11068
  GFR-binding peptide
  MOD_RES (1)..(3)..(37): Xaa is C or S
  MOD_RES (15)..(16)..(17)..(18)..(19): Xaa is A or G
  MOD_RES (20)..(21)..(22)..(23): Xaa is A or G or is absent

SEQ ID NO: 48081 - protein, 39 aa, Artificial Sequence
  GFR-binding peptide
  MOD_RES (2)..(4)..(35)..(36): Xaa is C or S
SXKXSRVIMVTAKKVKPKRGVIKRIQVPRLAQPVXXPAA

SEQ ID NO: 48082 - protein, 39 aa, Artificial Sequence
  GFR-binding peptide
  MOD_RES (1)..(3): Xaa is C or S
XKXALHDELTNSLQEFIPKKRVIEYYLVTLPELQVQTPR

SEQ ID NO: 48083 - protein, 36 aa, Artificial Sequence; identical to SEQ ID NO: 11071
  GFR-binding peptide
  MOD_RES (33)..(34): Xaa is C or S
  MOD_RES (11)..(12)..(13)..(14)..(15): Xaa is A or G
  MOD_RES (16)..(17)..(18)..(19): Xaa is A or G or is absent

SEQ ID NO: 48084 - protein, 36 aa, Artificial Sequence; identical to SEQ ID NO: 18196
  GFR-binding peptide
  MOD_RES (2)..(2): Xaa is C or S

SEQ ID NO: 48085 - protein, 34 aa, Artificial Sequence
  GFR-binding peptide
  MOD_RES (33)..(34): Xaa is C or S
  MOD_RES (11)..(12)..(13)..(14)..(15): Xaa is A or G
  MOD_RES (16)..(17)..(18)..(19): Xaa is A or G or is absent
SKVVMSMEGIXXXXXXXXXMIQITINSLDQPVXX

SEQ ID NO: 48086 - protein, 33 aa, Artificial Sequence; identical to SEQ ID NO: 11075
  GFR-binding peptide
  MOD_RES (33)..(33): Xaa is C or S
  MOD_RES (11)..(12)..(13)..(14)..(15): Xaa is A or G
  MOD_RES (16)..(17)..(18)..(19): Xaa is A or G or is absent

SEQ ID NO: 48087 - protein, 42 aa, Artificial Sequence; identical to SEQ ID NO: 18198
  GFR-binding peptide
  MOD_RES (2)..(4)..(41): Xaa is C or S

SEQ ID NO: 48088 - protein, 37 aa, Artificial Sequence; identical to SEQ ID NO: 11078
  GFR-binding peptide
  MOD_RES (33)..(34): Xaa is C or S
  MOD_RES (11)..(12)..(13)..(14)..(15): Xaa is A or G
  MOD_RES (16)..(17)..(18)..(19): Xaa is A or G or is absent

SEQ ID NO: 48089 - protein, 43 aa, Artificial Sequence
  GFR-binding peptide
  MOD_RES (2)..(4)..(38): Xaa is C or S
RXEXKNHQLFNSLQEHQGQHPKIRYYLMTLPEEETPVXELGED

SEQ ID NO: 48090 - protein, 33 aa, Artificial Sequence; identical to SEQ ID NO: 11079
  GFR-binding peptide
  MOD_RES (33)..(33): Xaa is C or S
  MOD_RES (11)..(12)..(13)..(14)..(15): Xaa is A or G
  MOD_RES (16)..(17)..(18)..(19): Xaa is A or G or is absent

SEQ ID NO: 48091 - protein, 40 aa, Artificial Sequence; identical to SEQ ID NO: 11080
  GFR-binding peptide
  MOD_RES (2)..(4)..(35)..(36): Xaa is C or S

SEQ ID NO: 48092 - protein, 41 aa, Artificial Sequence
  GFR-binding peptide
  MOD_RES (2)..(4)..(35)..(36): Xaa is C or S
SXKXSKVIMSMEGIIKPTKGIMIQITINSLDQSVXXPSASA

SEQ ID NO: 48093 - protein, 36 aa, Artificial Sequence
  GFR-binding peptide
  MOD_RES (2)..(4)..(35)..(36): Xaa is C or S
SXKXSKVIMSMEGIIKPTKGIMIQITINSLDQSVXX

SEQ ID NO: 48094 - protein, 37 aa, Artificial Sequence; identical to SEQ ID NO: 18199
  GFR-binding peptide
  MOD_RES (34)..(34): Xaa is C or S
  MOD_RES (12)..(13)..(14)..(15)..(16): Xaa is A or G
  MOD_RES (17)..(18)..(19)..(20): Xaa is A or G or is absent

SEQ ID NO: 48095 - protein, 42 aa, Artificial Sequence
  GFR-binding peptide
  MOD_RES (2)..(36): Xaa is C or S
  MOD_RES (14)..(15)..(16)..(17)..(18): Xaa is A or G
  MOD_RES (19)..(20)..(21)..(22): Xaa is A or G or is absent
GXSRVVMNSMEGIXXXXXXXXXMIQVTINSLKTPAXTPKTVH

SEQ ID NO: 48096 - protein, 42 aa, Artificial Sequence; identical to SEQ ID NO: 18200
  GFR-binding peptide
  MOD_RES (2)..(4)..(41): Xaa is C or S

SEQ ID NO: 48097 - protein, 36 aa, Artificial Sequence
  GFR-binding peptide
  MOD_RES (13)..(14)..(15)..(16)..(17): Xaa is A or G
  MOD_RES (18)..(19)..(20)..(21): Xaa is A or G or is absent
ELHEELRNSLQEXXXXXXXXXYYVVPLPEHHVRSPQ

SEQ ID NO: 48098 - protein, 44 aa, Artificial Sequence
  GFR-binding peptide
  MOD_RES (2)..(4)..(41): Xaa is C or S
  MOD_RES (17)..(18)..(19)..(20)..(21): Xaa is A or G
  MOD_RES (22)..(23)..(24)..(25): Xaa is A or G or is absent
EXKXALHDELTNSLQEXXXXXXXXXYYVVPLPELQVQTPRXQVN

SEQ ID NO: 48099 - protein, 42 aa, Artificial Sequence
  GFR-binding peptide
  MOD_RES (2)..(36)..(37): Xaa is C or S
  MOD_RES (14)..(15)..(16)..(17)..(18): Xaa is A or G
  MOD_RES (19)..(20)..(21)..(22): Xaa is A or G or is absent
GXSRVVMNSMEGIXXXXXXXXXMIQVTINSLKTPAXXPKPVY

SEQ ID NO: 48100 - protein, 44 aa, Artificial Sequence; identical to SEQ ID NO: 18201
  GFR-binding peptide
  MOD_RES (2)..(4)..(41): Xaa is C or S
  MOD_RES (17)..(18)..(19)..(20)..(21): Xaa is A or G
  MOD_RES (22)..(23)..(24)..(25): Xaa is A or G or is absent

SEQ ID NO: 48101 - protein, 36 aa, Artificial Sequence; identical to SEQ ID NO: 11082
  GFR-binding peptide
  MOD_RES (2)..(4): Xaa is C or S
  MOD_RES (15)..(16)..(17)..(18)..(19): Xaa is A or G
  MOD_RES (20)..(21)..(22)..(23): Xaa is A or G or is absent

SEQ ID NO: 48102 - protein, 37 aa, Artificial Sequence
  GFR-binding peptide
  MOD_RES (2)..(2): Xaa is C or S
  MOD_RES (15)..(16)..(17)..(18)..(19): Xaa is A or G
  MOD_RES (20)..(21)..(22)..(23): Xaa is A or G or is absent
KXALHDELTNSLQEXXXXXXXXXYYLVTLPELQVQTP

SEQ ID NO: 48103 - protein, 42 aa, Artificial Sequence; identical to SEQ ID NO: 11087
  GFR-binding peptide
  MOD_RES (1)..(3)..(37)..(38): Xaa is C or S
  MOD_RES (15)..(16)..(17)..(18)..(19): Xaa is A or G
  MOD_RES (20)..(21)..(22)..(23): Xaa is A or G or is absent

SEQ ID NO: 48104 - protein, 39 aa, Artificial Sequence; identical to SEQ ID NO: 18207
  GFR-binding peptide
  MOD_RES (35)..(35): Xaa is C or S

SEQ ID NO: 48105 - protein, 32 aa, Artificial Sequence; identical to SEQ ID NO: 11088
  GFR-binding peptide
  MOD_RES (1)..(1): Xaa is C or S

SEQ ID NO: 48106 - protein, 38 aa, Artificial Sequence
  GFR-binding peptide
  MOD_RES (37)..(37): Xaa is C or S
ELHEELRNSLQELKPKKRVYEYYLVTLPEHHVRSPQXK

SEQ ID NO: 48107 - protein, 32 aa, Artificial Sequence; identical to SEQ ID NO: 11089
  GFR-binding peptide
  MOD_RES (11)..(12)..(13)..(14)..(15): Xaa is A or G
  MOD_RES (16)..(17)..(18)..(19): Xaa is A or G or is absent

SEQ ID NO: 48108 - protein, 40 aa, Artificial Sequence
  GFR-binding peptide
  MOD_RES (1)..(3)..(36)..(37): Xaa is C or S
  MOD_RES (14)..(15)..(16)..(17)..(18): Xaa is A or G
  MOD_RES (19)..(20)..(21)..(22): Xaa is A or G or is absent
XKXSRVIMVTAKKXXXXXXXXXIKRIQVPRLAQPVXXPAA

SEQ ID NO: 48109 - protein, 33 aa, Artificial Sequence
  GFR-binding peptide
  MOD_RES (1)..(33): Xaa is C or S
XGEVVMDVTAKKVVKENEDIKRMQVPRLETPVX

SEQ ID NO: 48110 - protein, 38 aa, Artificial Sequence; identical to SEQ ID NO: 18212
  GFR-binding peptide
  MOD_RES (33)..(33): Xaa is C or S
  MOD_RES (11)..(12)..(13)..(14)..(15): Xaa is A or G
  MOD_RES (16)..(17)..(18)..(19): Xaa is A or G or is absent

SEQ ID NO: 48111 - protein, 42 aa, Artificial Sequence
  GFR-binding peptide
  MOD_RES (2)..(39): Xaa is C or S
KXALHDELTNSLQEFIPKKRVIEYYVVPLPELQVQTPRXQVN

SEQ ID NO: 48112 - protein, 32 aa, Artificial Sequence; identical to SEQ ID NO: 11094
  GFR-binding peptide
  MOD_RES (31)..(32): Xaa is C or S

SEQ ID NO: 48113 - protein, 44 aa, Artificial Sequence; identical to SEQ ID NO: 18214
  GFR-binding peptide
  MOD_RES (1)..(3)..(40): Xaa is C or S

SEQ ID NO: 48114 - protein, 38 aa, Artificial Sequence
  GFR-binding peptide
  MOD_RES (1)..(3)..(37)..(38): Xaa is C or S
  MOD_RES (15)..(16)..(17)..(18)..(19): Xaa is A or G
  MOD_RES (20)..(21)..(22)..(23): Xaa is A or G or is absent
XGXSRVVMNSMEGIXXXXXXXXXMIQVTINSLKTPAXX

SEQ ID NO: 48115 - protein, 40 aa, Artificial Sequence; identical to SEQ ID NO: 11098
  GFR-binding peptide
  MOD_RES (2)..(36)..(37): Xaa is C or S
  MOD_RES (14)..(15)..(16)..(17)..(18): Xaa is A or G
  MOD_RES (19)..(20)..(21)..(22): Xaa is A or G or is absent

SEQ ID NO: 48116 - protein, 34 aa, Artificial Sequence
  GFR-binding peptide
  MOD_RES (34)..(34): Xaa is C or S
  MOD_RES (12)..(13)..(14)..(15)..(16): Xaa is A or G
  MOD_RES (17)..(18)..(19)..(20): Xaa is A or G or is absent
GEVVMDVTAKKXXXXXXXXXIKRMQVPRLETPVX

SEQ ID NO: 48117 - protein, 41 aa, Artificial Sequence
  GFR-binding peptide
  MOD_RES (1)..(3)..(37)..(38): Xaa is C or S
  MOD_RES (15)..(16)..(17)..(18)..(19): Xaa is A or G
  MOD_RES (20)..(21)..(22)..(23): Xaa is A or G or is absent
XGXGEVVMEVTAKKXXXXXXXXXIKRMQVPRLETPVXXAKP

SEQ ID NO: 48118 - protein, 38 aa, Artificial Sequence; identical to SEQ ID NO: 18220
  GFR-binding peptide
  MOD_RES (37)..(37): Xaa is C or S

SEQ ID NO: 48119 - protein, 40 aa, Artificial Sequence; identical to SEQ ID NO: 18221
  GFR-binding peptide
  MOD_RES (1)..(3)..(37): Xaa is C or S
  MOD_RES (15)..(16)..(17)..(18)..(19): Xaa is A or G
  MOD_RES (20)..(21)..(22)..(23): Xaa is A or G or is absent

SEQ ID NO: 48120 - protein, 36 aa, Artificial Sequence
  GFR-binding peptide
  MOD_RES (1)..(35)..(36): Xaa is C or S
  MOD_RES (13)..(14)..(15)..(16)..(17): Xaa is A or G
  MOD_RES (18)..(19)..(20)..(21): Xaa is A or G or is absent
XSRVVMNVTAKKXXXXXXXXXIKRVQVPRLKTPAXX

SEQ ID NO: 48121 - protein, 38 aa, Artificial Sequence; identical to SEQ ID NO: 11101
  GFR-binding peptide
  MOD_RES (33)..(34): Xaa is C or S
  MOD_RES (11)..(12)..(13)..(14)..(15): Xaa is A or G
  MOD_RES (16)..(17)..(18)..(19): Xaa is A or G or is absent

SEQ ID NO: 48122 - protein, 35 aa, Artificial Sequence
  GFR-binding peptide
  MOD_RES (12)..(13)..(14)..(15)..(16): Xaa is A or G
  MOD_RES (17)..(18)..(19)..(20): Xaa is A or G or is absent
LHEELRNSLQEXXXXXXXXXYYLVTLPEHHVRSPQ

SEQ ID NO: 48123 - protein, 40 aa, Artificial Sequence; identical to SEQ ID NO: 11103
  GFR-binding peptide
  MOD_RES (1)..(35)..(36): Xaa is C or S
  MOD_RES (13)..(14)..(15)..(16)..(17): Xaa is A or G
  MOD_RES (18)..(19)..(20)..(21): Xaa is A or G or is absent

SEQ ID NO: 48124 - protein, 42 aa, Artificial Sequence; identical to SEQ ID NO: 11106
  GFR-binding peptide
  MOD_RES (1)..(3)..(37)..(38): Xaa is C or S
  MOD_RES (15)..(16)..(17)..(18)..(19): Xaa is A or G
  MOD_RES (20)..(21)..(22)..(23): Xaa is A or G or is absent

SEQ ID NO: 48125 - protein, 36 aa, Artificial Sequence
  GFR-binding peptide
  MOD_RES (2)..(4)..(36): Xaa is C or S
HXGXSRVVMNVTAKKIVNSSDDIKRVQVPRLKTPAX

SEQ ID NO: 48126 - protein, 39 aa, Artificial Sequence; identical to SEQ ID NO: 18226
  GFR-binding peptide
  MOD_RES (2)..(4): Xaa is C or S

SEQ ID NO: 48127 - protein, 37 aa, Artificial Sequence; identical to SEQ ID NO: 11109
  GFR-binding peptide
  MOD_RES (2)..(34)..(35): Xaa is C or S

SEQ ID NO: 48128 - protein, 38 aa, Artificial Sequence
  GFR-binding peptide
  MOD_RES (1)..(34)..(35): Xaa is C or S
  MOD_RES (12)..(13)..(14)..(15)..(16): Xaa is A or G
  MOD_RES (17)..(18)..(19)..(20): Xaa is A or G or is absent
XSKVVMVTAKKXXXXXXXXXIKRIQVPRLDQPVXXPSA

SEQ ID NO: 48129 - protein, 35 aa, Artificial Sequence
  GFR-binding peptide
  MOD_RES (2)..(2): Xaa is C or S
  MOD_RES (14)..(15)..(16)..(17)..(18): Xaa is A or G
  MOD_RES (19)..(20)..(21)..(22): Xaa is A or G or is absent
GXARVVMNVQVEKXXXXXXXXXVKAVKVSRLQTPA

SEQ ID NO: 48130 - protein, 39 aa, Artificial Sequence; identical to SEQ ID NO: 11113
  GFR-binding peptide
  MOD_RES (1)..(35): Xaa is C or S
  MOD_RES (13)..(14)..(15)..(16)..(17): Xaa is A or G
  MOD_RES (18)..(19)..(20)..(21): Xaa is A or G or is absent

SEQ ID NO: 48131 - protein, 33 aa, Artificial Sequence
  GFR-binding peptide
  MOD_RES (12)..(13)..(14)..(15)..(16): Xaa is A or G
  MOD_RES (17)..(18)..(19)..(20): Xaa is A or G or is absent
GEVVMESMEGIXXXXXXXXXMIQMTINSLETPV

SEQ ID NO: 48132 - protein, 38 aa, Artificial Sequence; identical to SEQ ID NO: 11114
  GFR-binding peptide
  MOD_RES (2)..(4)..(38): Xaa is C or S
  MOD_RES (16)..(17)..(18)..(19)..(20): Xaa is A or G
  MOD_RES (21)..(22)..(23)..(24): Xaa is A or G or is absent

SEQ ID NO: 48133 - protein, 38 aa, Artificial Sequence; identical to SEQ ID NO: 11117
  GFR-binding peptide
  MOD_RES (33)..(34): Xaa is C or S
  MOD_RES (11)..(12)..(13)..(14)..(15): Xaa is A or G
  MOD_RES (16)..(17)..(18)..(19): Xaa is A or G or is absent

SEQ ID NO: 48134 - protein, 40 aa, Artificial Sequence; identical to SEQ ID NO: 11119
  GFR-binding peptide
  MOD_RES (34)..(35): Xaa is C or S
  MOD_RES (12)..(13)..(14)..(15)..(16): Xaa is A or G
  MOD_RES (17)..(18)..(19)..(20): Xaa is A or G or is absent

SEQ ID NO: 48135 - protein, 35 aa, Artificial Sequence
  GFR-binding peptide
  MOD_RES (2)..(35): Xaa is C or S
  MOD_RES (13)..(14)..(15)..(16)..(17): Xaa is A or G
  MOD_RES (18)..(19)..(20)..(21): Xaa is A or G or is absent
KXSKVIMVQVEKXXXXXXXXXVKAIKVSRLDQSVX

SEQ ID NO: 48136 - protein, 41 aa, Artificial Sequence; identical to SEQ ID NO: 11120
  GFR-binding peptide
  MOD_RES (2)..(4)..(38)..(39): Xaa is C or S
  MOD_RES (16)..(17)..(18)..(19)..(20): Xaa is A or G
  MOD_RES (21)..(22)..(23)..(24): Xaa is A or G or is absent

SEQ ID NO: 48137 - protein, 39 aa, Artificial Sequence
  GFR-binding peptide
  MOD_RES (33)..(33): Xaa is C or S
  MOD_RES (11)..(12)..(13)..(14)..(15): Xaa is A or G
  MOD_RES (16)..(17)..(18)..(19): Xaa is A or G or is absent
RVVMNVTAKKXXXXXXXXXIKRVQVPRLKTPAXTPKTVH

SEQ ID NO: 48138 - protein, 39 aa, Artificial Sequence
  GFR-binding peptide
  MOD_RES (33)..(33): Xaa is C or S
  MOD_RES (11)..(12)..(13)..(14)..(15): Xaa is A or G
  MOD_RES (16)..(17)..(18)..(19): Xaa is A or G or is absent
RVVMNVQVEKXXXXXXXXXVKAVKVSRLKTPAXTPKTVH

SEQ ID NO: 48139 - protein, 37 aa, Artificial Sequence; identical to SEQ ID NO: 11128
  GFR-binding peptide
  MOD_RES (33)..(33): Xaa is C or S
  MOD_RES (11)..(12)..(13)..(14)..(15): Xaa is A or G
  MOD_RES (16)..(17)..(18)..(19): Xaa is A or G or is absent

SEQ ID NO: 48140 - protein, 36 aa, Artificial Sequence
  GFR-binding peptide
  MOD_RES (2)..(36): Xaa is C or S
  MOD_RES (14)..(15)..(16)..(17)..(18): Xaa is A or G
  MOD_RES (19)..(20)..(21)..(22): Xaa is A or G or is absent
EXKNHQLFNSLQEXXXXXXXXXYYVMPLPEEETPVX

SEQ ID NO: 48141 - protein, 41 aa, Artificial Sequence; identical to SEQ ID NO: 18238
  GFR-binding peptide
  MOD_RES (1)..(35): Xaa is C or S
  MOD_RES (13)..(14)..(15)..(16)..(17): Xaa is A or G
  MOD_RES (18)..(19)..(20)..(21): Xaa is A or G or is absent

SEQ ID NO: 48142 - protein, 38 aa, Artificial Sequence
  GFR-binding peptide
  MOD_RES (36)..(36): Xaa is C or S
  MOD_RES (12)..(13)..(14)..(15)..(16): Xaa is A or G
  MOD_RES (17)..(18)..(19)..(20): Xaa is A or G or is absent
LHDELTNSLQEXXXXXXXXXYYLVTLPELQVQTPRXQV

SEQ ID NO: 48143 - protein, 38 aa, Artificial Sequence; identical to SEQ ID NO: 18242
  GFR-binding peptide
  MOD_RES (33)..(33): Xaa is C or S

SEQ ID NO: 48144 - protein, 35 aa, Artificial Sequence
  GFR-binding peptide
  MOD_RES (32)..(33): Xaa is C or S
GEVVMDVTAKKVVKENEDIKRMQVPRLETPVXXAK

SEQ ID NO: 48145 - protein, 40 aa, Artificial Sequence
  GFR-binding peptide
  MOD_RES (34)..(34): Xaa is C or S
  MOD_RES (12)..(13)..(14)..(15)..(16): Xaa is A or G
  MOD_RES (17)..(18)..(19)..(20): Xaa is A or G or is absent
KNHQLFNSLQEXXXXXXXXXYYLMTLPEEETPVXELGEDN

SEQ ID NO: 48146 - protein, 40 aa, Artificial Sequence; identical to SEQ ID NO: 11135
  GFR-binding peptide
  MOD_RES (34)..(35): Xaa is C or S
  MOD_RES (12)..(13)..(14)..(15)..(16): Xaa is A or G
  MOD_RES (17)..(18)..(19)..(20): Xaa is A or G or is absent

SEQ ID NO: 48147 - protein, 42 aa, Artificial Sequence; identical to SEQ ID NO: 18243
  GFR-binding peptide
  MOD_RES (1)..(3)..(40): Xaa is C or S
  MOD_RES (16)..(17)..(18)..(19)..(20): Xaa is A or G
  MOD_RES (21)..(22)..(23)..(24): Xaa is A or G or is absent

SEQ ID NO: 48148 - protein, 41 aa, Artificial Sequence
  GFR-binding peptide
  MOD_RES (1)..(38): Xaa is C or S
XALHDELTNSLQEFIPKKRVIEYYLVTLPELQVQTPRXQVN

SEQ ID NO: 48149 - protein, 38 aa, Artificial Sequence
  GFR-binding peptide
  MOD_RES (1)..(33)..(34): Xaa is C or S
XARVVMNVTAKKIVNSSDDIKRVQVPRLQTPAXXPKPV

SEQ ID NO: 48150 - protein, 33 aa, Artificial Sequence
  GFR-binding peptide
  MOD_RES (2)..(2): Xaa is C or S
GXGEVVMDSMEGIVVKENEDMIQMTINSLETPV

SEQ ID NO: 48151 - protein, 41 aa, Artificial Sequence
  GFR-binding peptide
  MOD_RES (2)..(36)..(37): Xaa is C or S
  MOD_RES (14)..(15)..(16)..(17)..(18): Xaa is A or G
  MOD_RES (19)..(20)..(21)..(22): Xaa is A or G or is absent
GXGEVVMDVTAKKXXXXXXXXXIKRMQVPRLETPVXXAKPI

SEQ ID NO: 48152 - protein, 36 aa, Artificial Sequence
  GFR-binding peptide
  MOD_RES (1)..(3): Xaa is C or S
XEXKNHQLFNSLQEHQGQHPKIRYYVMPLPEEETPV

SEQ ID NO: 48153 - protein, 39 aa, Artificial Sequence; identical to SEQ ID NO: 11142
  GFR-binding peptide
  MOD_RES (2)..(4)..(35)..(36): Xaa is C or S

SEQ ID NO: 48154 - protein, 40 aa, Artificial Sequence
  GFR-binding peptide
  MOD_RES (1)..(34)..(35): Xaa is C or S
  MOD_RES (12)..(13)..(14)..(15)..(16): Xaa is A or G
  MOD_RES (17)..(18)..(19)..(20): Xaa is A or G or is absent
XSRVIMSMEGIXXXXXXXXXMIQITINSLAQPVXXPAASA

SEQ ID NO: 48155 - protein, 40 aa, Artificial Sequence; identical to SEQ ID NO: 11143
  GFR-binding peptide
  MOD_RES (1)..(3)..(35)..(36): Xaa is C or S

SEQ ID NO: 48156 - protein, 43 aa, Artificial Sequence; identical to SEQ ID NO: 11144
  GFR-binding peptide
  MOD_RES (1)..(3)..(37)..(38): Xaa is C or S
  MOD_RES (15)..(16)..(17)..(18)..(19): Xaa is A or G
  MOD_RES (20)..(21)..(22)..(23): Xaa is A or G or is absent

SEQ ID NO: 48157 - protein, 33 aa, Artificial Sequence; identical to SEQ ID NO: 11145
  GFR-binding peptide
  MOD_RES (12)..(13)..(14)..(15)..(16): Xaa is A or G
  MOD_RES (17)..(18)..(19)..(20): Xaa is A or G or is absent

SEQ ID NO: 48158 - protein, 32 aa, Artificial Sequence; identical to SEQ ID NO: 11146
  GFR-binding peptide
  MOD_RES (31)..(32): Xaa is C or S

SEQ ID NO: 48159 - protein, 38 aa, Artificial Sequence
  GFR-binding peptide
  MOD_RES (35)..(35): Xaa is C or S
HEELRNSLQELKPKKRVYEYYLVTLPEHHVRSPQXKVS

SEQ ID NO: 48160 - protein, 42 aa, Artificial Sequence; identical to SEQ ID NO: 11147
  GFR-binding peptide
  MOD_RES (2)..(4)..(38)..(39): Xaa is C or S
  MOD_RES (16)..(17)..(18)..(19)..(20): Xaa is A or G
  MOD_RES (21)..(22)..(23)..(24): Xaa is A or G or is absent

SEQ ID NO: 48161 - protein, 36 aa, Artificial Sequence
  GFR-binding peptide
  MOD_RES (1)..(3)..(35): Xaa is C or S
XGXSRVVMNVTAKKIVNSSDDIKRVQVPRLKTPAXT

SEQ ID NO: 48162 - protein, 34 aa, Artificial Sequence; identical to SEQ ID NO: 11148
  GFR-binding peptide
  MOD_RES (32)..(33): Xaa is C or S

SEQ ID NO: 48163 - protein, 37 aa, Artificial Sequence
  GFR-binding peptide
  MOD_RES (1)..(32)..(33): Xaa is C or S
XSRVIMSMEGIVKPKRGVMIQITINSLAQPVXXPAAS

SEQ ID NO: 48164 - protein, 37 aa, Artificial Sequence
  GFR-binding peptide
  MOD_RES (34)..(35): Xaa is C or S
  MOD_RES (12)..(13)..(14)..(15)..(16): Xaa is A or G
  MOD_RES (17)..(18)..(19)..(20): Xaa is A or G or is absent
GEVVMEVTAKKXXXXXXXXXIKRMQVPRLETPVXXAK

SEQ ID NO: 48165 - protein, 41 aa, Artificial Sequence; identical to SEQ ID NO: 11151
  GFR-binding peptide
  MOD_RES (1)..(3)..(35)..(36): Xaa is C or S

SEQ ID NO: 48166 - protein, 40 aa, Artificial Sequence
  GFR-binding peptide
  MOD_RES (1)..(3)..(36)..(37): Xaa is C or S
  MOD_RES (14)..(15)..(16)..(17)..(18): Xaa is A or G
  MOD_RES (19)..(20)..(21)..(22): Xaa is A or G or is absent
XKXSKVIMVTAKKXXXXXXXXXIKRIQVPRLDQSVXXPSA

SEQ ID NO: 48167 - protein, 38 aa, Artificial Sequence
  GFR-binding peptide
  MOD_RES (35)..(35): Xaa is C or S
HEELRNSLQELKPKKRVYEYYVVPLPEHHVRSPQXKVS

SEQ ID NO: 48168 - protein, 40 aa, Artificial Sequence
  GFR-binding peptide
  MOD_RES (2)..(34)..(35): Xaa is C or S
GXARVVMNVQVEKIVNSSDDVKAVKVSRLQTPAXXPKPVT

SEQ ID NO: 48169 - protein, 37 aa, Artificial Sequence
  GFR-binding peptide
  MOD_RES (1)..(3)..(37): Xaa is C or S
  MOD_RES (15)..(16)..(17)..(18)..(19): Xaa is A or G
  MOD_RES (20)..(21)..(22)..(23): Xaa is A or G or is absent
XEXKNHQLFNSLQEXXXXXXXXXYYVMPLPEEETPVX

SEQ ID NO: 48170 - protein, 34 aa, Artificial Sequence; identical to SEQ ID NO: 11154
  GFR-binding peptide
  MOD_RES (2)..(4): Xaa is C or S

SEQ ID NO: 48171 - protein, 36 aa, Artificial Sequence
  GFR-binding peptide
  MOD_RES (2)..(35)..(36): Xaa is C or S
  MOD_RES (13)..(14)..(15)..(16)..(17): Xaa is A or G
  MOD_RES (18)..(19)..(20)..(21): Xaa is A or G or is absent
KXSKVVMVQVEKXXXXXXXXXVKAIKVSRLDQPVXX

SEQ ID NO: 48172 - protein, 38 aa, Artificial Sequence; identical to SEQ ID NO: 11156
  GFR-binding peptide
  MOD_RES (1)..(3)..(37): Xaa is C or S
  MOD_RES (15)..(16)..(17)..(18)..(19): Xaa is A or G
  MOD_RES (20)..(21)..(22)..(23): Xaa is A or G or is absent

SEQ ID NO: 48173 - protein, 39 aa, Artificial Sequence; identical to SEQ ID NO: 11157
  GFR-binding peptide
  MOD_RES (2)..(33)..(34): Xaa is C or S

SEQ ID NO: 48174 - protein, 39 aa, Artificial Sequence; identical to SEQ ID NO: 18254
  GFR-binding peptide
  MOD_RES (1)..(35): Xaa is C or S
  MOD_RES (13)..(14)..(15)..(16)..(17): Xaa is A or G
  MOD_RES (18)..(19)..(20)..(21): Xaa is A or G or is absent

SEQ ID NO: 48175 - protein, 40 aa, Artificial Sequence; identical to SEQ ID NO: 11158
  GFR-binding peptide
  MOD_RES (1)..(3)..(37)..(38): Xaa is C or S
  MOD_RES (15)..(16)..(17)..(18)..(19): Xaa is A or G
  MOD_RES (20)..(21)..(22)..(23): Xaa is A or G or is absent

SEQ ID NO: 48176 - protein, 37 aa, Artificial Sequence; identical to SEQ ID NO: 37740
  GFR-binding peptide
  MOD_RES (33)..(34): Xaa is C or S
  MOD_RES (11)..(12)..(13)..(14)..(15): Xaa is A or G
  MOD_RES (16)..(17)..(18)..(19): Xaa is A or G or is absent

SEQ ID NO: 48177 - protein, 38 aa, Artificial Sequence; identical to SEQ ID NO: 18255
  GFR-binding peptide
  MOD_RES (2)..(4): Xaa is C or S

SEQ ID NO: 48178 - protein, 33 aa, Artificial Sequence
  GFR-binding peptide
  MOD_RES (2)..(33): Xaa is C or S
KXSRVIMVQVEKVKPKRGVVKAIKVSRLAQPVX

SEQ ID NO: 48179 - protein, 36 aa, Artificial Sequence; identical to SEQ ID NO: 11160
  GFR-binding peptide
  MOD_RES (1)..(3)..(35)..(36): Xaa is C or S

SEQ ID NO: 48180 - protein, 40 aa, Artificial Sequence
  GFR-binding peptide
  MOD_RES (37)..(37): Xaa is C or S
  MOD_RES (13)..(14)..(15)..(16)..(17): Xaa is A or G
  MOD_RES (18)..(19)..(20)..(21): Xaa is A or G or is absent
ALHDELTNSLQEXXXXXXXXXYYLVTLPELQVQTPRXQVN

SEQ ID NO: 48181 - protein, 39 aa, Artificial Sequence; identical to SEQ ID NO: 11163
  GFR-binding peptide
  MOD_RES (1)..(33)..(34): Xaa is C or S

SEQ ID NO: 48182 - protein, 38 aa, Artificial Sequence
  GFR-binding peptide
  MOD_RES (2)..(4)..(36)..(37): Xaa is C or S
HXGXSRVVMNVQVEKIVNSSDDVKAVKVSRLKTPAXXP

SEQ ID NO: 48183 - protein, 39 aa, Artificial Sequence
  GFR-binding peptide
  MOD_RES (35)..(35): Xaa is C or S
  MOD_RES (11)..(12)..(13)..(14)..(15): Xaa is A or G
  MOD_RES (16)..(17)..(18)..(19): Xaa is A or G or is absent
HEELRNSLQEXXXXXXXXXYYVVPLPEHHVRSPQXKVSS

SEQ ID NO: 48184 - protein, 40 aa, Artificial Sequence; identical to SEQ ID NO: 18260
  GFR-binding peptide
  MOD_RES (37)..(37): Xaa is C or S

SEQ ID NO: 48185 - protein, 34 aa, Artificial Sequence
  GFR-binding peptide
  MOD_RES (33)..(34): Xaa is C or S
  MOD_RES (11)..(12)..(13)..(14)..(15): Xaa is A or G
  MOD_RES (16)..(17)..(18)..(19): Xaa is A or G or is absent
EVVMDVTAKKXXXXXXXXXIKRMQVPRLETPVXX

SEQ ID NO: 48186 - protein, 35 aa, Artificial Sequence; identical to SEQ ID NO: 11165
  GFR-binding peptide
  MOD_RES (2)..(2): Xaa is C or S
  MOD_RES (14)..(15)..(16)..(17)..(18): Xaa is A or G
  MOD_RES (19)..(20)..(21)..(22): Xaa is A or G or is absent

SEQ ID NO: 48187 - protein, 40 aa, Artificial Sequence
  GFR-binding peptide
  MOD_RES (1)..(3)..(34)..(35): Xaa is C or S
XKXSRVIMVQVEKVKPKRGVVKAIKVSRLAQPVXXPAASA

SEQ ID NO: 48188 - protein, 39 aa, Artificial Sequence; identical to SEQ ID NO: 11167
  GFR-binding peptide
  MOD_RES (1)..(3)..(35)..(36): Xaa is C or S

SEQ ID NO: 48189 - protein, 36 aa, Artificial Sequence
  GFR-binding peptide
  MOD_RES (13)..(14)..(15)..(16)..(17): Xaa is A or G
  MOD_RES (18)..(19)..(20)..(21): Xaa is A or G or is absent
ALHDELTNSLQEXXXXXXXXXYYVVPLPELQVQTPR

SEQ ID NO: 48190 - protein, 38 aa, Artificial Sequence
  GFR-binding peptide
  MOD_RES (2)..(4): Xaa is C or S
  MOD_RES (17)..(18)..(19)..(20)..(21): Xaa is A or G
  MOD_RES (22)..(23)..(24)..(25): Xaa is A or G or is absent
EXKXALHDELTNSLQEXXXXXXXXXYYVVPLPELQVQT

SEQ ID NO: 48191 - protein, 41 aa, Artificial Sequence
  GFR-binding peptide
  MOD_RES (37)..(37): Xaa is C or S
ALHDELTNSLQEFIPKKRVIEYYLVTLPELQVQTPRXQVNR

SEQ ID NO: 48192 - protein, 42 aa, Artificial Sequence; identical to SEQ ID NO: 11171
  GFR-binding peptide
  MOD_RES (1)..(3)..(37)..(38): Xaa is C or S
  MOD_RES (15)..(16)..(17)..(18)..(19): Xaa is A or G
  MOD_RES (20)..(21)..(22)..(23): Xaa is A or G or is absent

SEQ ID NO: 48193 - protein, 37 aa, Artificial Sequence
  GFR-binding peptide
  MOD_RES (33)..(34): Xaa is C or S
  MOD_RES (11)..(12)..(13)..(14)..(15): Xaa is A or G
  MOD_RES (16)..(17)..(18)..(19): Xaa is A or G or is absent
SRVIMVQVEKXXXXXXXXXVKAIKVSRLAQPVXXPAA

SEQ ID NO: 48194 - protein, 34 aa, Artificial Sequence; identical to SEQ ID NO: 18268
  GFR-binding peptide

SEQ ID NO: 48195 - protein, 32 aa, Artificial Sequence
  GFR-binding peptide
  MOD_RES (31)..(32): Xaa is C or S
SKVVMVTAKKVKPTRGVIKRIQVPRLDQPVXX

SEQ ID NO: 48196 - protein, 35 aa, Artificial Sequence; identical to SEQ ID NO: 11173
  GFR-binding peptide
  MOD_RES (1)..(3)..(35): Xaa is C or S

SEQ ID NO: 48197 - protein, 37 aa, Artificial Sequence; identical to SEQ ID NO: 18269
  GFR-binding peptide
  MOD_RES (33)..(33): Xaa is C or S
  MOD_RES (11)..(12)..(13)..(14)..(15): Xaa is A or G
  MOD_RES (16)..(17)..(18)..(19): Xaa is A or G or is absent

SEQ ID NO: 48198 - protein, 37 aa, Artificial Sequence; identical to SEQ ID NO: 11174
  GFR-binding peptide
  MOD_RES (1)..(3)..(35): Xaa is C or S

SEQ ID NO: 48199 - protein, 36 aa, Artificial Sequence
  GFR-binding peptide
  MOD_RES (1)..(34)..(35): Xaa is C or S
  MOD_RES (12)..(13)..(14)..(15)..(16): Xaa is A or G
  MOD_RES (17)..(18)..(19)..(20): Xaa is A or G or is absent
XSKVIMVTAKKXXXXXXXXXIKRIQVPRLDQSVXXP

SEQ ID NO: 48200 - protein, 42 aa, Artificial Sequence; identical to SEQ ID NO: 11175
  GFR-binding peptide
  MOD_RES (2)..(4)..(37)..(38): Xaa is C or S
  MOD_RES (15)..(16)..(17)..(18)..(19): Xaa is A or G
  MOD_RES (20)..(21)..(22)..(23): Xaa is A or G or is absent

SEQ ID NO: 48201 - protein, 40 aa, Artificial Sequence; identical to SEQ ID NO: 18271
  GFR-binding peptide
  MOD_RES (34)..(34): Xaa is C or S

SEQ ID NO: 48202 - protein, 37 aa, Artificial Sequence; identical to SEQ ID NO: 18272
  GFR-binding peptide
  MOD_RES (2)..(4): Xaa is C or S
  MOD_RES (16)..(17)..(18)..(19)..(20): Xaa is A or G
  MOD_RES (21)..(22)..(23)..(24): Xaa is A or G or is absent

SEQ ID NO: 48203 - protein, 31 aa, Artificial Sequence
  GFR-binding peptide
  MOD_RES (31)..(31): Xaa is C or S
SKVVMVTAKKVKPTRGVIKRIQVPRLDQPVX

SEQ ID NO: 48204 - protein, 34 aa, Artificial Sequence; identical to SEQ ID NO: 11176
  GFR-binding peptide
  MOD_RES (1)..(1): Xaa is C or S
  MOD_RES (13)..(14)..(15)..(16)..(17): Xaa is A or G
  MOD_RES (18)..(19)..(20)..(21): Xaa is A or G or is absent

SEQ ID NO: 48205 - protein, 36 aa, Artificial Sequence
  GFR-binding peptide
  MOD_RES (1)..(33)..(34): Xaa is C or S
XGEVVMEVQVEKVVKDYEDVKAMKVSRLETPVXXAK

SEQ ID NO: 48206 - protein, 43 aa, Artificial Sequence; identical to SEQ ID NO: 11177
  GFR-binding peptide
  MOD_RES (2)..(4)..(38)..(39): Xaa is C or S
  MOD_RES (16)..(17)..(18)..(19)..(20): Xaa is A or G
  MOD_RES (21)..(22)..(23)..(24): Xaa is A or G or is absent

SEQ ID NO: 48207 - protein, 42 aa, Artificial Sequence
  GFR-binding peptide
  MOD_RES (2)..(4)..(38)..(39): Xaa is C or S
  MOD_RES (16)..(17)..(18)..(19)..(20): Xaa is A or G
  MOD_RES (21)..(22)..(23)..(24): Xaa is A or G or is absent
RXGXGEVVMDVTAKKXXXXXXXXXIKRMQVPRLETPVXXAKP

SEQ ID NO: 48208 - protein, 38 aa, Artificial Sequence; identical to SEQ ID NO: 18275
  GFR-binding peptide
  MOD_RES (1)..(35): Xaa is C or S

SEQ ID NO: 48209 - protein, 38 aa, Artificial Sequence; identical to SEQ ID NO: 18276
  GFR-binding peptide
  MOD_RES (35)..(35): Xaa is C or S
  MOD_RES (11)..(12)..(13)..(14)..(15): Xaa is A or G
  MOD_RES (16)..(17)..(18)..(19): Xaa is A or G or is absent

SEQ ID NO: 48210 - protein, 38 aa, Artificial Sequence; identical to SEQ ID NO: 18277
  GFR-binding peptide
  MOD_RES (2)..(4): Xaa is C or S
  MOD_RES (17)..(18)..(19)..(20)..(21): Xaa is A or G
  MOD_RES (22)..(23)..(24)..(25): Xaa is A or G or is absent

SEQ ID NO: 48211 - protein, 37 aa, Artificial Sequence; identical to SEQ ID NO: 11179
  GFR-binding peptide
  MOD_RES (2)..(35)..(36): Xaa is C or S
  MOD_RES (13)..(14)..(15)..(16)..(17): Xaa is A or G
  MOD_RES (18)..(19)..(20)..(21): Xaa is A or G or is absent

SEQ ID NO: 48212 - protein, 38 aa, Artificial Sequence
  GFR-binding peptide
  MOD_RES (34)..(35): Xaa is C or S
  MOD_RES (12)..(13)..(14)..(15)..(16): Xaa is A or G
  MOD_RES (17)..(18)..(19)..(20): Xaa is A or G or is absent
SRVVMNVTAKKXXXXXXXXXIKRVQVPRLKTPAXXPKP

SEQ ID NO: 48213 - protein, 40 aa, Artificial Sequence; identical to SEQ ID NO: 11183
  GFR-binding peptide
  MOD_RES (1)..(3)..(37)..(38): Xaa is C or S
  MOD_RES (15)..(16)..(17)..(18)..(19): Xaa is A or G
  MOD_RES (20)..(21)..(22)..(23): Xaa is A or G or is absent

SEQ ID NO: 48214 - protein, 37 aa, Artificial Sequence
  GFR-binding peptide
  MOD_RES (2)..(34)..(35): Xaa is C or S
GXARVVMNVTAKKIVNSSDDIKRVQVPRLQTPAXXPK

SEQ ID NO: 48215 - protein, 36 aa, Artificial Sequence
  GFR-binding peptide
  MOD_RES (1)..(3): Xaa is C or S
  MOD_RES (15)..(16)..(17)..(18)..(19): Xaa is A or G
  MOD_RES (20)..(21)..(22)..(23): Xaa is A or G or is absent
XGXSRVVMNSMEGIXXXXXXXXXMIQVTINSLKTPA

SEQ ID NO: 48216 - protein, 41 aa, Artificial Sequence
  GFR-binding peptide
  MOD_RES (2)..(35)..(36): Xaa is C or S
  MOD_RES (13)..(14)..(15)..(16)..(17): Xaa is A or G
  MOD_RES (18)..(19)..(20)..(21): Xaa is A or G or is absent
KXSKVIMVTAKKXXXXXXXXXIKRIQVPRLDQSVXXPSASA

SEQ ID NO: 48217 - protein, 40 aa, Artificial Sequence; identical to SEQ ID NO: 11186
  GFR-binding peptide
  MOD_RES (1)..(3)..(37)..(38): Xaa is C or S
  MOD_RES (15)..(16)..(17)..(18)..(19): Xaa is A or G
  MOD_RES (20)..(21)..(22)..(23): Xaa is A or G or is absent

SEQ ID NO: 48218 - protein, 38 aa, Artificial Sequence; identical to SEQ ID NO: 11189
  GFR-binding peptide
  MOD_RES (1)..(3)..(35)..(36): Xaa is C or S

SEQ ID NO: 48219 - protein, 37 aa, Artificial Sequence; identical to SEQ ID NO: 11190
  GFR-binding peptide
  MOD_RES (31)..(32): Xaa is C or S

SEQ ID NO: 48220 - protein, 41 aa, Artificial Sequence
  GFR-binding peptide
  MOD_RES (1)..(3)..(35): Xaa is C or S
XGXSRVVMNSMEGIIVNSSDDMIQVTINSLKTPAXTPKTVH

SEQ ID NO: 48221 - protein, 37 aa, Artificial Sequence
  GFR-binding peptide
  MOD_RES (1)..(3)..(35)..(36): Xaa is C or S
XGXGEVVMDVQVEKVVKENEDVKAMKVSRLETPVXXA

SEQ ID NO: 48222 - protein, 34 aa, Artificial Sequence
  GFR-binding peptide
  MOD_RES (1)..(3): Xaa is C or S
XGXARVVMNVTAKKIVNSSDDIKRVQVPRLQTPA

SEQ ID NO: 48223 - protein, 36 aa, Artificial Sequence
  GFR-binding peptide
  MOD_RES (2)..(33)..(34): Xaa is C or S
KXSKVVMSMEGIVKPTRGVMIQITINSLDQPVXXPS

SEQ ID NO: 48224 - protein, 38 aa, Artificial Sequence; identical to SEQ ID NO: 18289
  GFR-binding peptide
  MOD_RES (37)..(37): Xaa is C or S
  MOD_RES (13)..(14)..(15)..(16)..(17): Xaa is A or G
  MOD_RES (18)..(19)..(20)..(21): Xaa is A or G or is absent

SEQ ID NO: 48225 - protein, 41 aa, Artificial Sequence; identical to SEQ ID NO: 18291
  GFR-binding peptide
  MOD_RES (37)..(37): Xaa is C or S

SEQ ID NO: 48226 - protein, 38 aa, Artificial Sequence
  GFR-binding peptide
  MOD_RES (37)..(37): Xaa is C or S
  MOD_RES (13)..(14)..(15)..(16)..(17): Xaa is A or G
  MOD_RES (18)..(19)..(20)..(21): Xaa is A or G or is absent
ALHDELTNSLQEXXXXXXXXXYYLVTLPELQVQTPRXQ

SEQ ID NO: 48227 - protein, 38 aa, Artificial Sequence; identical to SEQ ID NO: 18292
  GFR-binding peptide
  MOD_RES (1)..(3): Xaa is C or S

SEQ ID NO: 48228 - protein, 32 aa, Artificial Sequence; identical to SEQ ID NO: 18294
  GFR-binding peptide
  MOD_RES (11)..(12)..(13)..(14)..(15): Xaa is A or G
  MOD_RES (16)..(17)..(18)..(19): Xaa is A or G or is absent

SEQ ID NO: 48229 - protein, 36 aa, Artificial Sequence; identical to SEQ ID NO: 18295
  GFR-binding peptide
  MOD_RES (36)..(36): Xaa is C or S

SEQ ID NO: 48230 - protein, 40 aa, Artificial Sequence
  GFR-binding peptide
  MOD_RES (1)..(3)..(37): Xaa is C or S
  MOD_RES (15)..(16)..(17)..(18)..(19): Xaa is A or G
  MOD_RES (20)..(21)..(22)..(23): Xaa is A or G or is absent
XEXKNHQLFNSLQEXXXXXXXXXYYVMPLPEEETPVXELG

SEQ ID NO: 48231 - protein, 41 aa, Artificial Sequence; identical to SEQ ID NO: 11200
  GFR-binding peptide
  MOD_RES (1)..(35)..(36): Xaa is C or S
  MOD_RES (13)..(14)..(15)..(16)..(17): Xaa is A or G
  MOD_RES (18)..(19)..(20)..(21): Xaa is A or G or is absent

SEQ ID NO: 48232 - protein, 33 aa, Artificial Sequence; identical to SEQ ID NO: 11201
  GFR-binding peptide
  MOD_RES (33)..(33): Xaa is C or S
  MOD_RES (11)..(12)..(13)..(14)..(15): Xaa is A or G
  MOD_RES (16)..(17)..(18)..(19): Xaa is A or G or is absent

SEQ ID NO: 48233 - protein, 32 aa, Artificial Sequence; identical to SEQ ID NO: 11203
  GFR-binding peptide
  MOD_RES (31)..(32): Xaa is C or S

SEQ ID NO: 48234 - protein, 42 aa, Artificial Sequence; identical to SEQ ID NO: 11204
  GFR-binding peptide
  MOD_RES (2)..(4)..(38): Xaa is C or S
  MOD_RES (16)..(17)..(18)..(19)..(20): Xaa is A or G
  MOD_RES (21)..(22)..(23)..(24): Xaa is A or G or is absent

SEQ ID NO: 48235 - protein, 41 aa, Artificial Sequence
  GFR-binding peptide
  MOD_RES (1)..(3)..(37)..(38): Xaa is C or S
  MOD_RES (15)..(16)..(17)..(18)..(19): Xaa is A or G
  MOD_RES (20)..(21)..(22)..(23): Xaa is A or G or is absent
XGXARVVMNVTAKKXXXXXXXXXIKRVQVPRLQTPAXXPKP

SEQ ID NO: 48236 - protein, 41 aa, Artificial Sequence
  GFR-binding peptide
  MOD_RES (1)..(3)..(37)..(38): Xaa is C or S
  MOD_RES (15)..(16)..(17)..(18)..(19): Xaa is A or G
  MOD_RES (20)..(21)..(22)..(23): Xaa is A or G or is absent
XGXGEVVMEVQVEKXXXXXXXXXVKAMKVSRLETPVXXAKP

SEQ ID NO: 48237 - protein, 39 aa, Artificial Sequence
  GFR-binding peptide
  MOD_RES (2)..(4): Xaa is C or S
AXAXELHEELRNSLQELKPKKRVYEYYLVTLPEHHVRSP

SEQ ID NO: 48238 - protein, 33 aa, Artificial Sequence
  GFR-binding peptide
  MOD_RES (33)..(33): Xaa is C or S
  MOD_RES (11)..(12)..(13)..(14)..(15): Xaa is A or G
  MOD_RES (16)..(17)..(18)..(19): Xaa is A or G or is absent
SRVIMVQVEKXXXXXXXXXVKAIKVSRLAQPVX

SEQ ID NO: 48239 - protein, 40 aa, Artificial Sequence
  GFR-binding peptide
  MOD_RES (37)..(37): Xaa is C or S
  MOD_RES (13)..(14)..(15)..(16)..(17): Xaa is A or G
  MOD_RES (18)..(19)..(20)..(21): Xaa is A or G or is absent
ALHDELTNSLQEXXXXXXXXXYYVVPLPELQVQTPRXQVN

SEQ ID NO: 48240 - protein, 36 aa, Artificial Sequence; identical to SEQ ID NO: 11210
  GFR-binding peptide
  MOD_RES (2)..(34)..(35): Xaa is C or S

SEQ ID NO: 48241 - protein, 37 aa, Artificial Sequence
  GFR-binding peptide
  MOD_RES (1)..(3)..(37): Xaa is C or S
  MOD_RES (15)..(16)..(17)..(18)..(19): Xaa is A or G
  MOD_RES (20)..(21)..(22)..(23): Xaa is A or G or is absent
XGXGEVVMDVTAKKXXXXXXXXXIKRMQVPRLETPVX

SEQ ID NO: 48242 - protein, 35 aa, Artificial Sequence
  GFR-binding peptide
  MOD_RES (32)..(33): Xaa is C or S
ARVVMNSMEGIIVNSSDDMIQVTINSLQTPAXXPK

SEQ ID NO: 48243 - protein, 38 aa, Artificial Sequence; identical to SEQ ID NO: 11211
  GFR-binding peptide
  MOD_RES (1)..(32)..(33): Xaa is C or S

SEQ ID NO: 48244 - protein, 37 aa, Artificial Sequence
  GFR-binding peptide
  MOD_RES (1)..(3)..(36)..(37): Xaa is C or S
  MOD_RES (14)..(15)..(16)..(17)..(18): Xaa is A or G
  MOD_RES (19)..(20)..(21)..(22): Xaa is A or G or is absent
XKXSKVVMVQVEKXXXXXXXXXVKAIKVSRLDQPVXX

SEQ ID NO: 48245 - protein, 35 aa, Artificial Sequence; identical to SEQ ID NO: 11212
  GFR-binding peptide
  MOD_RES (2)..(4): Xaa is C or S

SEQ ID NO: 48246 - protein, 32 aa, Artificial Sequence; identical to SEQ ID NO: 37820
  GFR-binding peptide
  MOD_RES (11)..(12)..(13)..(14)..(15): Xaa is A or G
  MOD_RES (16)..(17)..(18)..(19): Xaa is A or G or is absent

SEQ ID NO: 48247 - protein, 32 aa, Artificial Sequence
  GFR-binding peptide
  MOD_RES (11)..(12)..(13)..(14)..(15): Xaa is A or G
  MOD_RES (16)..(17)..(18)..(19): Xaa is A or G or is absent
SKVVMSMEGIXXXXXXXXXMIQITINSLDQPV

SEQ ID NO: 48248 - protein, 40 aa, Artificial Sequence; identical to SEQ ID NO: 11213
  GFR-binding peptide
  MOD_RES (1)..(3)..(35)..(36): Xaa is C or S

SEQ ID NO: 48249 - protein, 38 aa, Artificial Sequence
  GFR-binding peptide
  MOD_RES (1)..(3)..(36)..(37): Xaa is C or S
  MOD_RES (14)..(15)..(16)..(17)..(18): Xaa is A or G
  MOD_RES (19)..(20)..(21)..(22): Xaa is A or G or is absent
XKXSKVIMVTAKKXXXXXXXXXIKRIQVPRLDQSVXXP

SEQ ID NO: 48250 - protein, 37 aa, Artificial Sequence
  GFR-binding peptide
  MOD_RES (1)..(34)..(35): Xaa is C or S
  MOD_RES (12)..(13)..(14)..(15)..(16): Xaa is A or G
  MOD_RES (17)..(18)..(19)..(20): Xaa is A or G or is absent
XSKVVMVQVEKXXXXXXXXXVKAIKVSRLDQPVXXPS

SEQ ID NO: 48251 - protein, 35 aa, Artificial Sequence; identical to SEQ ID NO: 18303
  GFR-binding peptide
  MOD_RES (12)..(13)..(14)..(15)..(16): Xaa is A or G
  MOD_RES (17)..(18)..(19)..(20): Xaa is A or G or is absent

SEQ ID NO: 48252 - protein, 40 aa, Artificial Sequence
  GFR-binding peptide
  MOD_RES (1)..(34)..(35): Xaa is C or S
  MOD_RES (12)..(13)..(14)..(15)..(16): Xaa is A or G
  MOD_RES (17)..(18)..(19)..(20): Xaa is A or G or is absent
XSKVIMSMEGIXXXXXXXXXMIQITINSLDQSVXXPSASA

SEQ ID NO: 48253 - protein, 40 aa, Artificial Sequence
  GFR-binding peptide
  MOD_RES (1)..(35)..(36): Xaa is C or S
  MOD_RES (13)..(14)..(15)..(16)..(17): Xaa is A or G
  MOD_RES (18)..(19)..(20)..(21): Xaa is A or G or is absent
XSRVVMNVQVEKXXXXXXXXXVKAVKVSRLKTPAXXPKPV

SEQ ID NO: 48254 - protein, 37 aa, Artificial Sequence
  GFR-binding peptide
  MOD_RES (31)..(32): Xaa is C or S
RVVMNVTAKKIVNSSDDIKRVQVPRLKTPAXXPKPVY

SEQ ID NO: 48255 - protein, 39 aa, Artificial Sequence
  GFR-binding peptide
  MOD_RES (2)..(35)..(36): Xaa is C or S
  MOD_RES (13)..(14)..(15)..(16)..(17): Xaa is A or G
  MOD_RES (18)..(19)..(20)..(21): Xaa is A or G or is absent
KXSKVVMSMEGIXXXXXXXXXMIQITINSLDQPVXXPSA

SEQ ID NO: 48256 - protein, 34 aa, Artificial Sequence
  GFR-binding peptide
  MOD_RES (2)..(2): Xaa is C or S
  MOD_RES (13)..(14)..(15)..(16)..(17): Xaa is A or G
  MOD_RES (18)..(19)..(20)..(21): Xaa is A or G or is absent
KXSKVIMVQVEKXXXXXXXXXVKAIKVSRLDQSV

SEQ ID NO: 48257 - protein, 40 aa, Artificial Sequence
  GFR-binding peptide
  MOD_RES (2)..(4)..(35)..(36): Xaa is C or S
SXKXSRVIMVTAKKVKPKRGVIKRIQVPRLAQPVXXPAAS

SEQ ID NO: 48258 - protein, 40 aa, Artificial Sequence
  GFR-binding peptide
  MOD_RES (2)..(4): Xaa is C or S
AXAXELHEELRNSLQELKPKKRVYEYYLVTLPEHHVRSPQ

SEQ ID NO: 48259 - protein, 37 aa, Artificial Sequence
  GFR-binding peptide
  MOD_RES (2)..(34): Xaa is C or S
GXSRVVMNSMEGIIVNSSDDMIQVTINSLKTPAXTPK

SEQ ID NO: 48260 - protein, 35 aa, Artificial Sequence; identical to SEQ ID NO: 11222
  GFR-binding peptide
  MOD_RES (1)..(32)..(33): Xaa is C or S

SEQ ID NO: 48261 - protein, 42 aa, Artificial Sequence
  GFR-binding peptide
  MOD_RES (2)..(39): Xaa is C or S
  MOD_RES (15)..(16)..(17)..(18)..(19): Xaa is A or G
  MOD_RES (20)..(21)..(22)..(23): Xaa is A or G or is absent
KXALHDELTNSLQEXXXXXXXXXYYVVPLPELQVQTPRXQVN

SEQ ID NO: 48262 - protein, 41 aa, Artificial Sequence
  GFR-binding peptide
  MOD_RES (2)..(4)..(35)..(36): Xaa is C or S
SXKXSKVIMVQVEKIKPTKGIVKAIKVSRLDQSVXXPSASA

SEQ ID NO: 48263 - protein, 33 aa, Artificial Sequence
  GFR-binding peptide
  MOD_RES (12)..(13)..(14)..(15)..(16): Xaa is A or G
  MOD_RES (17)..(18)..(19)..(20): Xaa is A or G or is absent
KNHQLFNSLQEXXXXXXXXXYYLMTLPEEETPV

SEQ ID NO: 48264 - protein, 39 aa, Artificial Sequence; identical to SEQ ID NO: 11224
  GFR-binding peptide
  MOD_RES (2)..(35)..(36): Xaa is C or S
  MOD_RES (13)..(14)..(15)..(16)..(17): Xaa is A or G
  MOD_RES (18)..(19)..(20)..(21): Xaa is A or G or is absent

SEQ ID NO: 48265 - protein, 36 aa, Artificial Sequence; identical to SEQ ID NO: 18306
  GFR-binding peptide
  MOD_RES (35)..(35): Xaa is C or S

SEQ ID NO: 48266 - protein, 40 aa, Artificial Sequence; identical to SEQ ID NO: 18307
  GFR-binding peptide
  MOD_RES (2)..(36): Xaa is C or S
  MOD_RES (14)..(15)..(16)..(17)..(18): Xaa is A or G
  MOD_RES (19)..(20)..(21)..(22): Xaa is A or G or is absent

SEQ ID NO: 48267 - protein, 39 aa, Artificial Sequence; identical to SEQ ID NO: 11226
  GFR-binding peptide
  MOD_RES (2)..(4)..(38)..(39): Xaa is C or S
  MOD_RES (16)..(17)..(18)..(19)..(20): Xaa is A or G
  MOD_RES (21)..(22)..(23)..(24): Xaa is A or G or is absent

SEQ ID NO: 48268 - protein, 35 aa, Artificial Sequence; identical to SEQ ID NO: 18308
  GFR-binding peptide
  MOD_RES (2)..(2): Xaa is C or S
  MOD_RES (14)..(15)..(16)..(17)..(18): Xaa is A or G
  MOD_RES (19)..(20)..(21)..(22): Xaa is A or G or is absent

SEQ ID NO: 48269 - protein, 35 aa, Artificial Sequence; identical to SEQ ID NO: 11228
  GFR-binding peptide
  MOD_RES (34)..(35): Xaa is C or S
  MOD_RES (12)..(13)..(14)..(15)..(16): Xaa is A or G
  MOD_RES (17)..(18)..(19)..(20): Xaa is A or G or is absent

SEQ ID NO: 48270 - protein, 37 aa, Artificial Sequence
  GFR-binding peptide
  MOD_RES (33)..(34): Xaa is C or S
  MOD_RES (11)..(12)..(13)..(14)..(15): Xaa is A or G
  MOD_RES (16)..(17)..(18)..(19): Xaa is A or G or is absent
RVVMNSMEGIXXXXXXXXXMIQVTINSLKTPAXXPKP

SEQ ID NO: 48271 - protein, 39 aa, Artificial Sequence; identical to SEQ ID NO: 18310
  GFR-binding peptide
  MOD_RES (1)..(3): Xaa is C or S
  MOD_RES (16)..(17)..(18)..(19)..(20): Xaa is A or G
  MOD_RES (21)..(22)..(23)..(24): Xaa is A or G or is absent

SEQ ID NO: 48272 - protein, 40 aa, Artificial Sequence
  GFR-binding peptide
  MOD_RES (2)..(4)..(38): Xaa is C or S
RXEXKNHQLFNSLQEHQGQHPKIRYYLMTLPEEETPVXEL

SEQ ID NO: 48273 - protein, 39 aa, Artificial Sequence; identical to SEQ ID NO: 11231
  GFR-binding peptide
  MOD_RES (34)..(35): Xaa is C or S
  MOD_RES (12)..(13)..(14)..(15)..(16): Xaa is A or G
  MOD_RES (17)..(18)..(19)..(20): Xaa is A or G or is absent

SEQ ID NO: 48274 - protein, 38 aa, Artificial Sequence
  GFR-binding peptide
  MOD_RES (33)..(34): Xaa is C or S
  MOD_RES (11)..(12)..(13)..(14)..(15): Xaa is A or G
  MOD_RES (16)..(17)..(18)..(19): Xaa is A or G or is absent
RVVMNVTAKKXXXXXXXXXIKRVQVPRLKTPAXXPKPV

SEQ ID NO: 48275 - protein, 41 aa, Artificial Sequence
  GFR-binding peptide
  MOD_RES (1)..(3)..(37)..(38): Xaa is C or S
  MOD_RES (15)..(16)..(17)..(18)..(19): Xaa is A or G
  MOD_RES (20)..(21)..(22)..(23): Xaa is A or G or is absent
XGXARVVMNSMEGIXXXXXXXXXMIQVTINSLQTPAXXPKP

SEQ ID NO: 48276 - protein, 31 aa, Artificial Sequence
  GFR-binding peptide
  MOD_RES (1)..(1): Xaa is C or S
XSKVIMVTAKKIKPTKGIIKRIQVPRLDQSV

SEQ ID NO: 48277 - protein, 34 aa, Artificial Sequence; identical to SEQ ID NO: 18316
  GFR-binding peptide
  MOD_RES (34)..(34): Xaa is C or S
  MOD_RES (12)..(13)..(14)..(15)..(16): Xaa is A or G
  MOD_RES (17)..(18)..(19)..(20): Xaa is A or G or is absent

SEQ ID NO: 48278 - protein, 37 aa, Artificial Sequence
  GFR-binding peptide
  MOD_RES (1)..(35)..(36): Xaa is C or S
  MOD_RES (13)..(14)..(15)..(16)..(17): Xaa is A or G
  MOD_RES (18)..(19)..(20)..(21): Xaa is A or G or is absent
XGEVVMESMEGIXXXXXXXXXMIQMTINSLETPVXXA

SEQ ID NO: 48279 - protein, 36 aa, Artificial Sequence; identical to SEQ ID NO: 11233
  GFR-binding peptide
  MOD_RES (31)..(32): Xaa is C or S

SEQ ID NO: 48280 - protein, 30 aa, Artificial Sequence
  GFR-binding peptide
SKVIMVTAKKIKPTKGIIKRIQVPRLDQSV

SEQ ID NO: 48281 - protein, 39 aa, Artificial Sequence
  GFR-binding peptide
  MOD_RES (1)..(3)..(36)..(37): Xaa is C or S
  MOD_RES (14)..(15)..(16)..(17)..(18): Xaa is A or G
  MOD_RES (19)..(20)..(21)..(22): Xaa is A or G or is absent
XKXSRVIMVQVEKXXXXXXXXXVKAIKVSRLAQPVXXPA

SEQ ID NO: 48282 - protein, 40 aa, Artificial Sequence; identical to SEQ ID NO: 11236
  GFR-binding peptide
  MOD_RES (34)..(35): Xaa is C or S
  MOD_RES (12)..(13)..(14)..(15)..(16): Xaa is A or G
  MOD_RES (17)..(18)..(19)..(20): Xaa is A or G or is absent

SEQ ID NO: 48283 - protein, 36 aa, Artificial Sequence; identical to SEQ ID NO: 18320
  GFR-binding peptide
  MOD_RES (36)..(36): Xaa is C or S

SEQ ID NO: 48284 - protein, 43 aa, Artificial Sequence; identical to SEQ ID NO: 18324
  GFR-binding peptide
  MOD_RES (2)..(4)..(41): Xaa is C or S

SEQ ID NO: 48285 - protein, 33 aa, Artificial Sequence
  GFR-binding peptide
  MOD_RES (32)..(33): Xaa is C or S
GEVVMEVTAKKVVKDYEDIKRMQVPRLETPVXX

SEQ ID NO: 48286 - protein, 38 aa, Artificial Sequence
  GFR-binding peptide
  MOD_RES (1)..(35): Xaa is C or S
XKNHQLFNSLQEHQGQHPKIRYYVMPLPEEETPVXELG

SEQ ID NO: 48287 - protein, 33 aa, Artificial Sequence
  GFR-binding peptide
  MOD_RES (1)..(33): Xaa is C or S
XGEVVMDSMEGIVVKENEDMIQMTINSLETPVX

SEQ ID NO: 48288 - protein, 32 aa, Artificial Sequence; identical to SEQ ID NO: 11238
  GFR-binding peptide
  MOD_RES (31)..(32): Xaa is C or S

SEQ ID NO: 48289 - protein, 39 aa, Artificial Sequence
  GFR-binding peptide
  MOD_RES (1)..(33)..(34): Xaa is C or S
XARVVMNVTAKKIVNSSDDIKRVQVPRLQTPAXXPKPVT

SEQ ID NO: 48290 - protein, 41 aa, Artificial Sequence; identical to SEQ ID NO: 18327
  GFR-binding peptide
  MOD_RES (1)..(38): Xaa is C or S
  MOD_RES (14)..(15)..(16)..(17)..(18): Xaa is A or G
  MOD_RES (19)..(20)..(21)..(22): Xaa is A or G or is absent

SEQ ID NO: 48291 - protein, 43 aa, Artificial Sequence; identical to SEQ ID NO: 18328
  GFR-binding peptide
  MOD_RES (1)..(3)..(40): Xaa is C or S
  MOD_RES (16)..(17)..(18)..(19)..(20): Xaa is A or G
  MOD_RES (21)..(22)..(23)..(24): Xaa is A or G or is absent

SEQ ID NO: 48292 - protein, 37 aa, Artificial Sequence
  GFR-binding peptide
  MOD_RES (31)..(32): Xaa is C or S
RVVMNVQVEKIVNSSDDVKAVKVSRLQTPAXXPKPVT

SEQ ID NO: 48293 - protein, 40 aa, Artificial Sequence
  GFR-binding peptide
  MOD_RES (1)..(35)..(36): Xaa is C or S
  MOD_RES (13)..(14)..(15)..(16)..(17): Xaa is A or G
  MOD_RES (18)..(19)..(20)..(21): Xaa is A or G or is absent
XARVVMNSMEGIXXXXXXXXXMIQVTINSLQTPAXXPKPV

SEQ ID NO: 48294 - protein, 34 aa, Artificial Sequence
  GFR-binding peptide
  MOD_RES (31)..(32): Xaa is C or S
SKVVMVTAKKVKPTRGVIKRIQVPRLDQPVXXPS

SEQ ID NO: 48295 - protein, 44 aa, Artificial Sequence; identical to SEQ ID NO: 18331
  GFR-binding peptide
  MOD_RES (2)..(4)..(38): Xaa is C or S

SEQ ID NO: 48296 - protein, 41 aa, Artificial Sequence
  GFR-binding peptide
  MOD_RES (37)..(37): Xaa is C or S
ALHDELTNSLQEFIPKKRVIEYYVVPLPELQVQTPRXQVNR

SEQ ID NO: 48297 - protein, 39 aa, Artificial Sequence
  GFR-binding peptide
  MOD_RES (1)..(3)..(36)..(37): Xaa is C or S
  MOD_RES (14)..(15)..(16)..(17)..(18): Xaa is A or G
  MOD_RES (19)..(20)..(21)..(22): Xaa is A or G or is absent
XKXSKVIMVQVEKXXXXXXXXXVKAIKVSRLDQSVXXPS

SEQ ID NO: 48298 - protein, 32 aa, Artificial Sequence
  GFR-binding peptide
  MOD_RES (1)..(1): Xaa is C or S
XSRVVMNVTAKKIVNSSDDIKRVQVPRLKTPA

SEQ ID NO: 48299 - protein, 32 aa, Artificial Sequence
  GFR-binding peptide
NHQLFNSLQEHQGQHPKIRYYLMTLPEEETPV

SEQ ID NO: 48300 - protein, 36 aa, Artificial Sequence
  GFR-binding peptide
  MOD_RES (32)..(33): Xaa is C or S
GEVVMESMEGIVVKDYEDMIQMTINSLETPVXXAKP

SEQ ID NO: 48301 - protein, 38 aa, Artificial Sequence
  GFR-binding peptide
  MOD_RES (2)..(36): Xaa is C or S
  MOD_RES (14)..(15)..(16)..(17)..(18): Xaa is A or G
  MOD_RES (19)..(20)..(21)..(22): Xaa is A or G or is absent
GXSRVVMNVTAKKXXXXXXXXXIKRVQVPRLKTPAXTP

SEQ ID NO: 48302 - protein, 36 aa, Artificial Sequence; identical to SEQ ID NO: 18334
  GFR-binding peptide
  MOD_RES (1)..(1): Xaa is C or S
  MOD_RES (14)..(15)..(16)..(17)..(18): Xaa is A or G
  MOD_RES (19)..(20)..(21)..(22): Xaa is A or G or is absent

SEQ ID NO: 48303 - protein, 40 aa, Artificial Sequence; identical to SEQ ID NO: 11246
  GFR-binding peptide
  MOD_RES (2)..(34)..(35): Xaa is C or S

SEQ ID NO: 48304 - protein, 39 aa, Artificial Sequence
  GFR-binding peptide
  MOD_RES (2)..(36)..(37): Xaa is C or S
  MOD_RES (14)..(15)..(16)..(17)..(18): Xaa is A or G
  MOD_RES (19)..(20)..(21)..(22): Xaa is A or G or is absent
GXGEVVMEVTAKKXXXXXXXXXIKRMQVPRLETPVXXAK

SEQ ID NO: 48305 - protein, 36 aa, Artificial Sequence
  GFR-binding peptide
  MOD_RES (31)..(31): Xaa is C or S
RVVMNSMEGIIVNSSDDMIQVTINSLKTPAXTPKTV

SEQ ID NO: 48306 - protein, 40 aa, Artificial Sequence
  GFR-binding peptide
  MOD_RES (2)..(4)..(36): Xaa is C or S
HXGXSRVVMNSMEGIIVNSSDDMIQVTINSLKTPAXTPKT

SEQ ID NO: 48307 - protein, 38 aa, Artificial Sequence; identical to SEQ ID NO: 18337
  GFR-binding peptide
  MOD_RES (1)..(35): Xaa is C or S
  MOD_RES (13)..(14)..(15)..(16)..(17): Xaa is A or G
  MOD_RES (18)..(19)..(20)..(21): Xaa is A or G or is absent

SEQ ID NO: 48308 - protein, 39 aa, Artificial Sequence
  GFR-binding peptide
  MOD_RES (1)..(35): Xaa is C or S
XKNHQLFNSLQEHQGQHPKIRYYVMPLPEEETPVXELGE

SEQ ID NO: 48309 - protein, 40 aa, Artificial Sequence
  GFR-binding peptide
  MOD_RES (2)..(4): Xaa is C or S
  MOD_RES (17)..(18)..(19)..(20)..(21): Xaa is A or G
  MOD_RES (22)..(23)..(24)..(25): Xaa is A or G or is absent
EXKXALHDELTNSLQEXXXXXXXXXYYVVPLPELQVQTPR

SEQ ID NO: 48310 - protein, 34 aa, Artificial Sequence
  GFR-binding peptide
  MOD_RES (1)..(32)..(33): Xaa is C or S
XSKVIMVQVEKIKPTKGIVKAIKVSRLDQSVXXP

SEQ ID NO: 48311 - protein, 42 aa, Artificial Sequence
  GFR-binding peptide
  MOD_RES (2)..(4)..(41): Xaa is C or S
EXKXALHDELTNSLQEFIPKKRVIEYYVVPLPELQVQTPRXQ

SEQ ID NO: 48312 - protein, 37 aa, Artificial Sequence
  GFR-binding peptide
  MOD_RES (2)..(36): Xaa is C or S
  MOD_RES (14)..(15)..(16)..(17)..(18): Xaa is A or G
  MOD_RES (19)..(20)..(21)..(22): Xaa is A or G or is absent
EXKNHQLFNSLQEXXXXXXXXXYYLMTLPEEETPVXE

SEQ ID NO: 48313 - protein, 42 aa, Artificial Sequence; identical to SEQ ID NO: 11249
  GFR-binding peptide
  MOD_RES (2)..(36)..(37): Xaa is C or S
  MOD_RES (14)..(15)..(16)..(17)..(18): Xaa is A or G
  MOD_RES (19)..(20)..(21)..(22): Xaa is A or G or is absent

SEQ ID NO: 48314 - protein, 38 aa, Artificial Sequence; identical to SEQ ID NO: 11250
  GFR-binding peptide
  MOD_RES (2)..(36)..(37): Xaa is C or S
  MOD_RES (14)..(15)..(16)..(17)..(18): Xaa is A or G
  MOD_RES (19)..(20)..(21)..(22): Xaa is A or G or is absent

SEQ ID NO: 48315 - protein, 35 aa, Artificial Sequence
  GFR-binding peptide
  MOD_RES (1)..(35): Xaa is C or S
  MOD_RES (13)..(14)..(15)..(16)..(17): Xaa is A or G
  MOD_RES (18)..(19)..(20)..(21): Xaa is A or G or is absent
XGEVVMDVTAKKXXXXXXXXXIKRMQVPRLETPVX

SEQ ID NO: 48316 - protein, 43 aa, Artificial Sequence
  GFR-binding peptide
  MOD_RES (2)..(4)..(38): Xaa is C or S
  MOD_RES (16)..(17)..(18)..(19)..(20): Xaa is A or G
  MOD_RES (21)..(22)..(23)..(24): Xaa is A or G or is absent
HXGXSRVVMNSMEGIXXXXXXXXXMIQVTINSLKTPAXTPKTV

SEQ ID NO: 48317 - protein, 38 aa, Artificial Sequence; identical to SEQ ID NO: 18342
  GFR-binding peptide
  MOD_RES (1)..(3): Xaa is C or S

SEQ ID NO: 48318 - protein, 32 aa, Artificial Sequence; identical to SEQ ID NO: 37894
  GFR-binding peptide
  MOD_RES (31)..(32): Xaa is C or S

SEQ ID NO: 48319 - protein, 38 aa, Artificial Sequence
  GFR-binding peptide
  MOD_RES (2)..(36)..(37): Xaa is C or S
  MOD_RES (14)..(15)..(16)..(17)..(18): Xaa is A or G
  MOD_RES (19)..(20)..(21)..(22): Xaa is A or G or is absent
GXGEVVMDVTAKKXXXXXXXXXIKRMQVPRLETPVXXA

SEQ ID NO: 48320 - protein, 36 aa, Artificial Sequence
  GFR-binding peptide
  MOD_RES (1)..(32)..(33): Xaa is C or S
XSKVIMVQVEKIKPTKGIVKAIKVSRLDQSVXXPSA

SEQ ID NO: 48321 - protein, 33 aa, Artificial Sequence; identical to SEQ ID NO: 11254
  GFR-binding peptide
  MOD_RES (33)..(33): Xaa is C or S
  MOD_RES (11)..(12)..(13)..(14)..(15): Xaa is A or G
  MOD_RES (16)..(17)..(18)..(19): Xaa is A or G or is absent

SEQ ID NO: 48322 - protein, 34 aa, Artificial Sequence; identical to SEQ ID NO: 18344
  GFR-binding peptide
  MOD_RES (13)..(14)..(15)..(16)..(17): Xaa is A or G
  MOD_RES (18)..(19)..(20)..(21): Xaa is A or G or is absent

SEQ ID NO: 48323 - protein, 34 aa, Artificial Sequence
  GFR-binding peptide
  MOD_RES (13)..(14)..(15)..(16)..(17): Xaa is A or G
  MOD_RES (18)..(19)..(20)..(21): Xaa is A or G or is absent
ALHDELTNSLQEXXXXXXXXXYYVVPLPELQVQT

SEQ ID NO: 48324 - protein, 36 aa, Artificial Sequence
  GFR-binding peptide
  MOD_RES (2)..(4)..(35)..(36): Xaa is C or S
SXKXSKVVMVTAKKVKPTRGVIKRIQVPRLDQPVXX

SEQ ID NO: 48325 - protein, 35 aa, Artificial Sequence; identical to SEQ ID NO: 18347
  GFR-binding peptide

SEQ ID NO: 48326 - protein, 35 aa, Artificial Sequence
  GFR-binding peptide
  MOD_RES (2)..(4)..(35): Xaa is C or S
SXKXSRVIMVTAKKVKPKRGVIKRIQVPRLAQPVX

SEQ ID NO: 48327 - protein, 39 aa, Artificial Sequence
  GFR-binding peptide
  MOD_RES (2)..(4)..(38): Xaa is C or S
RXEXKNHQLFNSLQEHQGQHPKIRYYVMPLPEEETPVXE

SEQ ID NO: 48328 - protein, 41 aa, Artificial Sequence
  GFR-binding peptide
  MOD_RES (2)..(4)..(38)..(39): Xaa is C or S
  MOD_RES (16)..(17)..(18)..(19)..(20): Xaa is A or G
  MOD_RES (21)..(22)..(23)..(24): Xaa is A or G or is absent
HXGXARVVMNVQVEKXXXXXXXXXVKAVKVSRLQTPAXXPK

SEQ ID NO: 48329 - protein, 39 aa, Artificial Sequence
  GFR-binding peptide
  MOD_RES (33)..(34): Xaa is C or S
  MOD_RES (11)..(12)..(13)..(14)..(15): Xaa is A or G
  MOD_RES (16)..(17)..(18)..(19): Xaa is A or G or is absent
EVVMDVQVEKXXXXXXXXXVKAMKVSRLETPVXXAKPIK

SEQ ID NO: 48330 - protein, 39 aa, Artificial Sequence; identical to SEQ ID NO: 11258
  GFR-binding peptide
  MOD_RES (1)..(3)..(35)..(36): Xaa is C or S

SEQ ID NO: 48331 - protein, 34 aa, Artificial Sequence; identical to SEQ ID NO: 11259
  GFR-binding peptide
  MOD_RES (33)..(34): Xaa is C or S
  MOD_RES (11)..(12)..(13)..(14)..(15): Xaa is A or G
  MOD_RES (16)..(17)..(18)..(19): Xaa is A or G or is absent

SEQ ID NO: 48332 - protein, 44 aa, Artificial Sequence; identical to SEQ ID NO: 18351
  GFR-binding peptide
  MOD_RES (1)..(3)..(40): Xaa is C or S
  MOD_RES (16)..(17)..(18)..(19)..(20): Xaa is A or G
  MOD_RES (21)..(22)..(23)..(24): Xaa is A or G or is absent

SEQ ID NO: 48333 - protein, 39 aa, Artificial Sequence; identical to SEQ ID NO: 11262
  GFR-binding peptide
  MOD_RES (2)..(33)..(34): Xaa is C or S

SEQ ID NO: 48334 - protein, 33 aa, Artificial Sequence
  GFR-binding peptide
LHDELTNSLQEFIPKKRVIEYYVVPLPELQVQT

SEQ ID NO: 48335 - protein, 41 aa, Artificial Sequence; identical to SEQ ID NO: 11265
  GFR-binding peptide
  MOD_RES (1)..(35): Xaa is C or S
  MOD_RES (13)..(14)..(15)..(16)..(17): Xaa is A or G
  MOD_RES (18)..(19)..(20)..(21): Xaa is A or G or is absent

SEQ ID NO: 48336 - protein, 38 aa, Artificial Sequence
  GFR-binding peptide
  MOD_RES (1)..(35): Xaa is C or S
  MOD_RES (13)..(14)..(15)..(16)..(17): Xaa is A or G
  MOD_RES (18)..(19)..(20)..(21): Xaa is A or G or is absent
XSRVVMNVQVEKXXXXXXXXXVKAVKVSRLKTPAXTPK

SEQ ID NO: 48337 - protein, 37 aa, Artificial Sequence; identical to SEQ ID NO: 18358
  GFR-binding peptide
  MOD_RES (1)..(3)..(37): Xaa is C or S
  MOD_RES (15)..(16)..(17)..(18)..(19): Xaa is A or G
  MOD_RES (20)..(21)..(22)..(23): Xaa is A or G or is absent

SEQ ID NO: 48338 - protein, 42 aa, Artificial Sequence; identical to SEQ ID NO: 11268
  GFR-binding peptide
  MOD_RES (2)..(4)..(36)..(37): Xaa is C or S

SEQ ID NO: 48339 - protein, 34 aa, Artificial Sequence; identical to SEQ ID NO: 18359
  GFR-binding peptide
  MOD_RES (34)..(34): Xaa is C or S

SEQ ID NO: 48340 - protein, 39 aa, Artificial Sequence; identical to SEQ ID NO: 11270
  GFR-binding peptide
  MOD_RES (2)..(4)..(36)..(37): Xaa is C or S

SEQ ID NO: 48341 - protein, 39 aa, Artificial Sequence
  GFR-binding peptide
  MOD_RES (1)..(33)..(34): Xaa is C or S
XGEVVMEVTAKKVVKDYEDIKRMQVPRLETPVXXAKPIS

SEQ ID NO: 48342 - protein, 38 aa, Artificial Sequence
  GFR-binding peptide
  MOD_RES (1)..(35): Xaa is C or S
  MOD_RES (13)..(14)..(15)..(16)..(17): Xaa is A or G
  MOD_RES (18)..(19)..(20)..(21): Xaa is A or G or is absent
XKNHQLFNSLQEXXXXXXXXXYYVMPLPEEETPVXELG

SEQ ID NO: 48343 - protein, 40 aa, Artificial Sequence; identical to SEQ ID NO: 18361
  GFR-binding peptide
  MOD_RES (1)..(38): Xaa is C or S

SEQ ID NO: 48344 - protein, 34 aa, Artificial Sequence
  GFR-binding peptide
  MOD_RES (31)..(32): Xaa is C or S
RVVMNVQVEKIVNSSDDVKAVKVSRLKTPAXXPK

SEQ ID NO: 48345 - protein, 38 aa, Artificial Sequence; identical to SEQ ID NO: 18364
  GFR-binding peptide
  MOD_RES (35)..(35): Xaa is C or S
  MOD_RES (11)..(12)..(13)..(14)..(15): Xaa is A or G
  MOD_RES (16)..(17)..(18)..(19): Xaa is A or G or is absent

SEQ ID NO: 48346 - protein, 38 aa, Artificial Sequence; identical to SEQ ID NO: 11272
  GFR-binding peptide
  MOD_RES (2)..(33)..(34): Xaa is C or S

SEQ ID NO: 48347 - protein, 38 aa, Artificial Sequence; identical to SEQ ID NO: 11274
  GFR-binding peptide
  MOD_RES (1)..(3)..(35)..(36): Xaa is C or S

SEQ ID NO: 48348 - protein, 42 aa, Artificial Sequence; identical to SEQ ID NO: 18365
  GFR-binding peptide
  MOD_RES (1)..(3)..(40): Xaa is C or S
  MOD_RES (16)..(17)..(18)..(19)..(20): Xaa is A or G
  MOD_RES (21)..(22)..(23)..(24): Xaa is A or G or is absent

SEQ ID NO: 48349 - protein, 39 aa, Artificial Sequence; identical to SEQ ID NO: 18368
  GFR-binding peptide
  MOD_RES (2)..(39): Xaa is C or S
  MOD_RES (15)..(16)..(17)..(18)..(19): Xaa is A or G
  MOD_RES (20)..(21)..(22)..(23): Xaa is A or G or is absent

SEQ ID NO: 48350 - protein, 35 aa, Artificial Sequence; identical to SEQ ID NO: 11276
  GFR-binding peptide
  MOD_RES (32)..(33): Xaa is C or S

SEQ ID NO: 48351 - protein, 42 aa, Artificial Sequence
  GFR-binding peptide
  MOD_RES (2)..(4)..(36)..(37): Xaa is C or S
RXGXGEVVMDVTAKKVVKENEDIKRMQVPRLETPVXXAKPIK

SEQ ID NO: 48352 - protein, 35 aa, Artificial Sequence; identical to SEQ ID NO: 18369
  GFR-binding peptide
  MOD_RES (34)..(34): Xaa is C or S
  MOD_RES (12)..(13)..(14)..(15)..(16): Xaa is A or G
  MOD_RES (17)..(18)..(19)..(20): Xaa is A or G or is absent

SEQ ID NO: 48353 - protein, 41 aa, Artificial Sequence
  GFR-binding peptide
  MOD_RES (2)..(36)..(37): Xaa is C or S
  MOD_RES (14)..(15)..(16)..(17)..(18): Xaa is A or G
  MOD_RES (19)..(20)..(21)..(22): Xaa is A or G or is absent
GXARVVMNVTAKKXXXXXXXXXIKRVQVPRLQTPAXXPKPV

SEQ ID NO: 48354 - protein, 40 aa, Artificial Sequence; identical to SEQ ID NO: 11279
  GFR-binding peptide
  MOD_RES (1)..(34)..(35): Xaa is C or S
  MOD_RES (12)..(13)..(14)..(15)..(16): Xaa is A or G
  MOD_RES (17)..(18)..(19)..(20): Xaa is A or G or is absent

SEQ ID NO: 48355 - protein, 39 aa, Artificial Sequence; identical to SEQ ID NO: 18370
  GFR-binding peptide
  MOD_RES (36)..(36): Xaa is C or S
  MOD_RES (12)..(13)..(14)..(15)..(16): Xaa is A or G
  MOD_RES (17)..(18)..(19)..(20): Xaa is A or G or is absent

SEQ ID NO: 48356 - protein, 40 aa, Artificial Sequence; identical to SEQ ID NO: 18372
  GFR-binding peptide
  MOD_RES (1)..(38): Xaa is C or S

SEQ ID NO: 48357 - protein, 35 aa, Artificial Sequence; identical to SEQ ID NO: 11282
  GFR-binding peptide
  MOD_RES (31)..(32): Xaa is C or S

SEQ ID NO: 48358 - protein, 32 aa, Artificial Sequence
  GFR-binding peptide
  MOD_RES (1)..(1): Xaa is C or S
XGEVVMDSMEGIVVKENEDMIQMTINSLETPV

SEQ ID NO: 48359 - protein, 41 aa, Artificial Sequence
  GFR-binding peptide
  MOD_RES (2)..(36): Xaa is C or S
  MOD_RES (14)..(15)..(16)..(17)..(18): Xaa is A or G
  MOD_RES (19)..(20)..(21)..(22): Xaa is A or G or is absent
GXSRVVMNVTAKKXXXXXXXXXIKRVQVPRLKTPAXTPKTV

SEQ ID NO: 48360 - protein, 37 aa, Artificial Sequence
  GFR-binding peptide
  MOD_RES (2)..(4)..(35)..(36): Xaa is C or S
SXKXSRVIMSMEGIVKPKRGVMIQITINSLAQPVXXP

SEQ ID NO: 48361 - protein, 37 aa, Artificial Sequence; identical to SEQ ID NO: 11285
  GFR-binding peptide
  MOD_RES (33)..(34): Xaa is C or S
  MOD_RES (11)..(12)..(13)..(14)..(15): Xaa is A or G
  MOD_RES (16)..(17)..(18)..(19): Xaa is A or G or is absent

SEQ ID NO: 48362 - protein, 37 aa, Artificial Sequence; identical to SEQ ID NO: 11286
  GFR-binding peptide
  MOD_RES (2)..(4)..(35)..(36): Xaa is C or S

SEQ ID NO: 48363 - protein, 34 aa, Artificial Sequence
  GFR-binding peptide
  MOD_RES (32)..(33): Xaa is C or S
GEVVMEVQVEKVVKDYEDVKAMKVSRLETPVXXA

SEQ ID NO: 48364 - protein, 40 aa, Artificial Sequence
  GFR-binding peptide
  MOD_RES (1)..(3)..(37)..(38): Xaa is C or S
  MOD_RES (15)..(16)..(17)..(18)..(19): Xaa is A or G
  MOD_RES (20)..(21)..(22)..(23): Xaa is A or G or is absent
XGXARVVMNVQVEKXXXXXXXXXVKAVKVSRLQTPAXXPK

SEQ ID NO: 48365 - protein, 39 aa, Artificial Sequence
  GFR-binding peptide
  MOD_RES (35)..(35): Xaa is C or S
  MOD_RES (11)..(12)..(13)..(14)..(15): Xaa is A or G
  MOD_RES (16)..(17)..(18)..(19): Xaa is A or G or is absent
HDELTNSLQEXXXXXXXXXYYLVTLPELQVQTPRXQVNR

SEQ ID NO: 48366 - protein, 36 aa, Artificial Sequence; identical to SEQ ID NO: 18373
  GFR-binding peptide
  MOD_RES (35)..(35): Xaa is C or S

SEQ ID NO: 48367 - protein, 37 aa, Artificial Sequence; identical to SEQ ID NO: 11288
  GFR-binding peptide
  MOD_RES (2)..(4)..(35)..(36): Xaa is C or S

SEQ ID NO: 48368 - protein, 37 aa, Artificial Sequence
  GFR-binding peptide
  MOD_RES (2)..(4)..(37): Xaa is C or S
  MOD_RES (15)..(16)..(17)..(18)..(19): Xaa is A or G
  MOD_RES (20)..(21)..(22)..(23): Xaa is A or G or is absent
SXKXSKVVMVQVEKXXXXXXXXXVKAIKVSRLDQPVX

SEQ ID NO: 48369 - protein, 40 aa, Artificial Sequence
  GFR-binding peptide
  MOD_RES (1)..(3)..(34)..(35): Xaa is C or S
XKXSRVIMVTAKKVKPKRGVIKRIQVPRLAQPVXXPAASA

SEQ ID NO: 48370 - protein, 37 aa, Artificial Sequence
  GFR-binding peptide
  MOD_RES (1)..(3)..(36)..(37): Xaa is C or S
  MOD_RES (14)..(15)..(16)..(17)..(18): Xaa is A or G
  MOD_RES (19)..(20)..(21)..(22): Xaa is A or G or is absent
XKXSKVIMVQVEKXXXXXXXXXVKAIKVSRLDQSVXX

SEQ ID NO: 48371 - protein, 36 aa, Artificial Sequence; identical to SEQ ID NO: 37950
  GFR-binding peptide
  MOD_RES (2)..(4): Xaa is C or S
  MOD_RES (15)..(16)..(17)..(18)..(19): Xaa is A or G
  MOD_RES (20)..(21)..(22)..(23): Xaa is A or G or is absent

SEQ ID NO: 48372 - protein, 38 aa, Artificial Sequence
  GFR-binding peptide
  MOD_RES (32)..(33): Xaa is C or S
GEVVMDVTAKKVVKENEDIKRMQVPRLETPVXXAKPIK

SEQ ID NO: 48373 - protein, 33 aa, Artificial Sequence; identical to SEQ ID NO: 18384
  GFR-binding peptide

SEQ ID NO: 48374 - protein, 36 aa, Artificial Sequence
  GFR-binding peptide
ELHEELRNSLQELKPKKRVYEYYLVTLPEHHVRSPQ

SEQ ID NO: 48375 - protein, 33 aa, Artificial Sequence
  GFR-binding peptide
  MOD_RES (33)..(33): Xaa is C or S
  MOD_RES (11)..(12)..(13)..(14)..(15): Xaa is A or G
  MOD_RES (16)..(17)..(18)..(19): Xaa is A or G or is absent
SKVIMVTAKKXXXXXXXXXIKRIQVPRLDQSVX

SEQ ID NO: 48376 - protein, 39 aa, Artificial Sequence
  GFR-binding peptide
  MOD_RES (1)..(3)..(35)..(36): Xaa is C or S
XGXARVVMNSMEGIIVNSSDDMIQVTINSLQTPAXXPKP

SEQ ID NO: 48377 - protein, 34 aa, Artificial Sequence
  GFR-binding peptide
  MOD_RES (2)..(34): Xaa is C or S
GXGEVVMDSMEGIVVKENEDMIQMTINSLETPVX

SEQ ID NO: 48378 - protein, 38 aa, Artificial Sequence
  GFR-binding peptide
  MOD_RES (36)..(36): Xaa is C or S
LHEELRNSLQELKPKKRVYEYYLVTLPEHHVRSPQXKV

SEQ ID NO: 48379 - protein, 33 aa, Artificial Sequence
  GFR-binding peptide
  MOD_RES (2)..(2): Xaa is C or S
GXSRVVMNSMEGIIVNSSDDMIQVTINSLKTPA

SEQ ID NO: 48380 - protein, 34 aa, Artificial Sequence; identical to SEQ ID NO: 18387
  GFR-binding peptide
  MOD_RES (13)..(14)..(15)..(16)..(17): Xaa is A or G
  MOD_RES (18)..(19)..(20)..(21): Xaa is A or G or is absent

SEQ ID NO: 48381 - protein, 38 aa, Artificial Sequence
  GFR-binding peptide
  MOD_RES (1)..(3)..(35)..(36): Xaa is C or S
XGXARVVMNSMEGIIVNSSDDMIQVTINSLQTPAXXPK

SEQ ID NO: 48382 - protein, 40 aa, Artificial Sequence
  GFR-binding peptide
  MOD_RES (34)..(34): Xaa is C or S
  MOD_RES (12)..(13)..(14)..(15)..(16): Xaa is A or G
  MOD_RES (17)..(18)..(19)..(20): Xaa is A or G or is absent
SRVVMNVTAKKXXXXXXXXXIKRVQVPRLKTPAXTPKTVH

SEQ ID NO: 48383 - protein, 33 aa, Artificial Sequence; identical to SEQ ID NO: 18388
  GFR-binding peptide

SEQ ID NO: 48384 - protein, 41 aa, Artificial Sequence
  GFR-binding peptide
  MOD_RES (1)..(3)..(35)..(36): Xaa is C or S
XGXGEVVMEVTAKKVVKDYEDIKRMQVPRLETPVXXAKPIS

SEQ ID NO: 48385 - protein, 44 aa, Artificial Sequence; identical to SEQ ID NO: 18390
  GFR-binding peptide
  MOD_RES (2)..(4)..(41): Xaa is C or S

SEQ ID NO: 48386 - protein, 36 aa, Artificial Sequence; identical to SEQ ID NO: 37964
  GFR-binding peptide
  MOD_RES (1)..(3)..(34)..(35): Xaa is C or S

SEQ ID NO: 48387 - protein, 31 aa, Artificial Sequence
  GFR-binding peptide
  MOD_RES (31)..(31): Xaa is C or S
SKVVMVQVEKVKPTRGVVKAIKVSRLDQPVX

SEQ ID NO: 48388 - protein, 40 aa, Artificial Sequence
  GFR-binding peptide
  MOD_RES (2)..(4)..(37)..(38): Xaa is C or S
  MOD_RES (15)..(16)..(17)..(18)..(19): Xaa is A or G
  MOD_RES (20)..(21)..(22)..(23): Xaa is A or G or is absent
SXKXSKVIMVQVEKXXXXXXXXXVKAIKVSRLDQSVXXPS

SEQ ID NO: 48389 - protein, 38 aa, Artificial Sequence
  GFR-binding peptide
  MOD_RES (2)..(35)..(36): Xaa is C or S
  MOD_RES (13)..(14)..(15)..(16)..(17): Xaa is A or G
  MOD_RES (18)..(19)..(20)..(21): Xaa is A or G or is absent
KXSRVIMVQVEKXXXXXXXXXVKAIKVSRLAQPVXXPA

SEQ ID NO: 48390 - protein, 38 aa, Artificial Sequence
  GFR-binding peptide
  MOD_RES (2)..(34)..(35): Xaa is C or S
GXSRVVMNVQVEKIVNSSDDVKAVKVSRLKTPAXXPKP

SEQ ID NO: 48391 - protein, 40 aa, Artificial Sequence; identical to SEQ ID NO: 11299
  GFR-binding peptide
  MOD_RES (2)..(4)..(36): Xaa is C or S

SEQ ID NO: 48392 - protein, 38 aa, Artificial Sequence
  GFR-binding peptide
  MOD_RES (2)..(4)..(38): Xaa is C or S
  MOD_RES (16)..(17)..(18)..(19)..(20): Xaa is A or G
  MOD_RES (21)..(22)..(23)..(24): Xaa is A or G or is absent
RXGXGEVVMESMEGIXXXXXXXXXMIQMTINSLETPVX

SEQ ID NO: 48393 - protein, 33 aa, Artificial Sequence
  GFR-binding peptide
  MOD_RES (31)..(32): Xaa is C or S
EVVMESMEGIVVKDYEDMIQMTINSLETPVXXA

SEQ ID NO: 48394 - protein, 40 aa, Artificial Sequence; identical to SEQ ID NO: 18399
  GFR-binding peptide
  MOD_RES (34)..(34): Xaa is C or S

SEQ ID NO: 48395 - protein, 40 aa, Artificial Sequence
  GFR-binding peptide
  MOD_RES (36)..(36): Xaa is C or S
  MOD_RES (12)..(13)..(14)..(15)..(16): Xaa is A or G
  MOD_RES (17)..(18)..(19)..(20): Xaa is A or G or is absent
LHEELRNSLQEXXXXXXXXXYYVVPLPEHHVRSPQXKVSS

SEQ ID NO: 48396 - protein, 35 aa, Artificial Sequence
  GFR-binding peptide
  MOD_RES (1)..(3): Xaa is C or S
  MOD_RES (14)..(15)..(16)..(17)..(18): Xaa is A or G
  MOD_RES (19)..(20)..(21)..(22): Xaa is A or G or is absent
XKXSKVIMVTAKKXXXXXXXXXIKRIQVPRLDQSV

SEQ ID NO: 48397 - protein, 35 aa, Artificial Sequence; identical to SEQ ID NO: 18400
  GFR-binding peptide

SEQ ID NO: 48398 - protein, 39 aa, Artificial Sequence; identical to SEQ ID NO: 18401
  GFR-binding peptide
  MOD_RES (35)..(35): Xaa is C or S

SEQ ID NO: 48399 - protein, 35 aa, Artificial Sequence
  GFR-binding peptide
  MOD_RES (2)..(35): Xaa is C or S
  MOD_RES (13)..(14)..(15)..(16)..(17): Xaa is A or G
  MOD_RES (18)..(19)..(20)..(21): Xaa is A or G or is absent
KXSRVIMSMEGIXXXXXXXXXMIQITINSLAQPVX

SEQ ID NO: 48400 - protein, 39 aa, Artificial Sequence
  GFR-binding peptide
  MOD_RES (35)..(35): Xaa is C or S
HDELTNSLQEFIPKKRVIEYYLVTLPELQVQTPRXQVNR

SEQ ID NO: 48401 - protein, 37 aa, Artificial Sequence
  GFR-binding peptide
  MOD_RES (2)..(4)..(36): Xaa is C or S
HXGXSRVVMNVTAKKIVNSSDDIKRVQVPRLKTPAXT

SEQ ID NO: 48402 - protein, 37 aa, Artificial Sequence; identical to SEQ ID NO: 18403
  GFR-binding peptide
  MOD_RES (2)..(2): Xaa is C or S
  MOD_RES (15)..(16)..(17)..(18)..(19): Xaa is A or G
  MOD_RES (20)..(21)..(22)..(23): Xaa is A or G or is absent

SEQ ID NO: 48403 - protein, 36 aa, Artificial Sequence; identical to SEQ ID NO: 18404
  GFR-binding peptide

SEQ ID NO: 48404 - protein, 37 aa, Artificial Sequence; identical to SEQ ID NO: 18405
  GFR-binding peptide
  MOD_RES (1)..(1): Xaa is C or S
  MOD_RES (14)..(15)..(16)..(17)..(18): Xaa is A or G
  MOD_RES (19)..(20)..(21)..(22): Xaa is A or G or is absent

SEQ ID NO: 48405 - protein, 38 aa, Artificial Sequence
  GFR-binding peptide
  MOD_RES (1)..(33)..(34): Xaa is C or S
XARVVMNVQVEKIVNSSDDVKAVKVSRLQTPAXXPKPV

SEQ ID NO: 48406 - protein, 34 aa, Artificial Sequence; identical to SEQ ID NO: 18407
  GFR-binding peptide
  MOD_RES (12)..(13)..(14)..(15)..(16): Xaa is A or G
  MOD_RES (17)..(18)..(19)..(20): Xaa is A or G or is absent

SEQ ID NO: 48407 - protein, 39 aa, Artificial Sequence
  GFR-binding peptide
  MOD_RES (2)..(4)..(35)..(36): Xaa is C or S
SXKXSKVIMVQVEKIKPTKGIVKAIKVSRLDQSVXXPSA

SEQ ID NO: 48408 - protein, 39 aa, Artificial Sequence; identical to SEQ ID NO: 11306
  GFR-binding peptide
  MOD_RES (1)..(3)..(35)..(36): Xaa is C or S

SEQ ID NO: 48409 - protein, 39 aa, Artificial Sequence
  GFR-binding peptide
  MOD_RES (1)..(33)..(34): Xaa is C or S
XSRVVMNVQVEKIVNSSDDVKAVKVSRLKTPAXXPKPVY

SEQ ID NO: 48410 - protein, 38 aa, Artificial Sequence; identical to SEQ ID NO: 18411
  GFR-binding peptide
  MOD_RES (36)..(36): Xaa is C or S
  MOD_RES (12)..(13)..(14)..(15)..(16): Xaa is A or G
  MOD_RES (17)..(18)..(19)..(20): Xaa is A or G or is absent

SEQ ID NO: 48411 - protein, 39 aa, Artificial Sequence
  GFR-binding peptide
  MOD_RES (1)..(3)..(37): Xaa is C or S
XEXKNHQLFNSLQEHQGQHPKIRYYVMPLPEEETPVXEL

SEQ ID NO: 48412 - protein, 38 aa, Artificial Sequence
  GFR-binding peptide
  MOD_RES (36)..(36): Xaa is C or S
  MOD_RES (12)..(13)..(14)..(15)..(16): Xaa is A or G
  MOD_RES (17)..(18)..(19)..(20): Xaa is A or G or is absent
LHDELTNSLQEXXXXXXXXXYYVVPLPELQVQTPRXQV

SEQ ID NO: 48413 - protein, 39 aa, Artificial Sequence
  GFR-binding peptide
  MOD_RES (1)..(34)..(35): Xaa is C or S
  MOD_RES (12)..(13)..(14)..(15)..(16): Xaa is A or G
  MOD_RES (17)..(18)..(19)..(20): Xaa is A or G or is absent
XSKVVMVTAKKXXXXXXXXXIKRIQVPRLDQPVXXPSAS

SEQ ID NO: 48414 - protein, 35 aa, Artificial Sequence
  GFR-binding peptide
  MOD_RES (2)..(34)..(35): Xaa is C or S
GXARVVMNSMEGIIVNSSDDMIQVTINSLQTPAXX

SEQ ID NO: 48415 - protein, 38 aa, Artificial Sequence; identical to SEQ ID NO: 18412
  GFR-binding peptide
  MOD_RES (36)..(36): Xaa is C or S

SEQ ID NO: 48416 - protein, 40 aa, Artificial Sequence; identical to SEQ ID NO: 18413
  GFR-binding peptide
  MOD_RES (2)..(4): Xaa is C or S
  MOD_RES (17)..(18)..(19)..(20)..(21): Xaa is A or G
  MOD_RES (22)..(23)..(24)..(25): Xaa is A or G or is absent

SEQ ID NO: 48417 - protein, 32 aa, Artificial Sequence
  GFR-binding peptide
  MOD_RES (11)..(12)..(13)..(14)..(15): Xaa is A or G
  MOD_RES (16)..(17)..(18)..(19): Xaa is A or G or is absent
EVVMEVTAKKXXXXXXXXXIKRMQVPRLETPV

SEQ ID NO: 48418 - protein, 41 aa, Artificial Sequence; identical to SEQ ID NO: 11311
  GFR-binding peptide
  MOD_RES (1)..(35)..(36): Xaa is C or S
  MOD_RES (13)..(14)..(15)..(16)..(17): Xaa is A or G
  MOD_RES (18)..(19)..(20)..(21): Xaa is A or G or is absent

SEQ ID NO: 48419 - protein, 37 aa, Artificial Sequence; identical to SEQ ID NO: 11313
  GFR-binding peptide
  MOD_RES (1)..(32)..(33): Xaa is C or S

SEQ ID NO: 48420 - protein, 43 aa, Artificial Sequence; identical to SEQ ID NO: 18416
  GFR-binding peptide
  MOD_RES (1)..(3)..(40): Xaa is C or S

SEQ ID NO: 48421 - protein, 40 aa, Artificial Sequence; identical to SEQ ID NO: 18417
  GFR-binding peptide
  MOD_RES (2)..(39): Xaa is C or S

SEQ ID NO: 48422 - protein, 42 aa, Artificial Sequence; identical to SEQ ID NO: 11314
  GFR-binding peptide
  MOD_RES (2)..(36): Xaa is C or S
  MOD_RES (14)..(15)..(16)..(17)..(18): Xaa is A or G
  MOD_RES (19)..(20)..(21)..(22): Xaa is A or G or is absent

SEQ ID NO: 48423 - protein, 37 aa, Artificial Sequence
  GFR-binding peptide
  MOD_RES (1)..(35): Xaa is C or S
  MOD_RES (13)..(14)..(15)..(16)..(17): Xaa is A or G
  MOD_RES (18)..(19)..(20)..(21): Xaa is A or G or is absent
XSRVVMNSMEGIXXXXXXXXXMIQVTINSLKTPAXTP

SEQ ID NO: 48424 - protein, 37 aa, Artificial Sequence
  GFR-binding peptide
  MOD_RES (2)..(4)..(35)..(36): Xaa is C or S
SXKXSKVVMVTAKKVKPTRGVIKRIQVPRLDQPVXXP

SEQ ID NO: 48425 - protein, 32 aa, Artificial Sequence
  GFR-binding peptide
  MOD_RES (11)..(12)..(13)..(14)..(15): Xaa is A or G
  MOD_RES (16)..(17)..(18)..(19): Xaa is A or G or is absent
RVVMNVQVEKXXXXXXXXXVKAVKVSRLKTPA

SEQ ID NO: 48426 - protein, 34 aa, Artificial Sequence
  GFR-binding peptide
  MOD_RES (1)..(33)..(34): Xaa is C or S
XGEVVMDVQVEKVVKENEDVKAMKVSRLETPVXX

SEQ ID NO: 48427 - protein, 39 aa, Artificial Sequence
  GFR-binding peptide
  MOD_RES (1)..(35): Xaa is C or S
  MOD_RES (13)..(14)..(15)..(16)..(17): Xaa is A or G
  MOD_RES (18)..(19)..(20)..(21): Xaa is A or G or is absent
XKNHQLFNSLQEXXXXXXXXXYYVMPLPEEETPVXELGE

SEQ ID NO: 48428 - protein, 36 aa, Artificial Sequence
  GFR-binding peptide
  MOD_RES (1)..(34)..(35): Xaa is C or S
  MOD_RES (12)..(13)..(14)..(15)..(16): Xaa is A or G
  MOD_RES (17)..(18)..(19)..(20): Xaa is A or G or is absent
XSKVIMVQVEKXXXXXXXXXVKAIKVSRLDQSVXXP

SEQ ID NO: 48429 - protein, 41 aa, Artificial Sequence; identical to SEQ ID NO: 11315
  GFR-binding peptide
  MOD_RES (1)..(3)..(35): Xaa is C or S

SEQ ID NO: 48430 - protein, 39 aa, Artificial Sequence; identical to SEQ ID NO: 18420
  GFR-binding peptide
  MOD_RES (2)..(36): Xaa is C or S

SEQ ID NO: 48431 - protein, 35 aa, Artificial Sequence; identical to SEQ ID NO: 11317
  GFR-binding peptide
  MOD_RES (31)..(32): Xaa is C or S

SEQ ID NO: 48432 - protein, 41 aa, Artificial Sequence
  GFR-binding peptide
  MOD_RES (1)..(3)..(37)..(38): Xaa is C or S
  MOD_RES (15)..(16)..(17)..(18)..(19): Xaa is A or G
  MOD_RES (20)..(21)..(22)..(23): Xaa is A or G or is absent
XGXARVVMNVQVEKXXXXXXXXXVKAVKVSRLQTPAXXPKP

SEQ ID NO: 48433 - protein, 37 aa, Artificial Sequence
  GFR-binding peptide
  MOD_RES (1)..(3)..(37): Xaa is C or S
  MOD_RES (15)..(16)..(17)..(18)..(19): Xaa is A or G
  MOD_RES (20)..(21)..(22)..(23): Xaa is A or G or is absent
XGXGEVVMDVQVEKXXXXXXXXXVKAMKVSRLETPVX

SEQ ID NO: 48434 - protein, 39 aa, Artificial Sequence
  GFR-binding peptide
  MOD_RES (34)..(35): Xaa is C or S
  MOD_RES (12)..(13)..(14)..(15)..(16): Xaa is A or G
  MOD_RES (17)..(18)..(19)..(20): Xaa is A or G or is absent
GEVVMEVQVEKXXXXXXXXXVKAMKVSRLETPVXXAKPI

SEQ ID NO: 48435 - protein, 37 aa, Artificial Sequence
  GFR-binding peptide
  MOD_RES (35)..(35): Xaa is C or S
HDELTNSLQEFIPKKRVIEYYVVPLPELQVQTPRXQV

SEQ ID NO: 48436 - protein, 37 aa, Artificial Sequence
  GFR-binding peptide
  MOD_RES (1)..(3)..(36)..(37): Xaa is C or S
  MOD_RES (14)..(15)..(16)..(17)..(18): Xaa is A or G
  MOD_RES (19)..(20)..(21)..(22): Xaa is A or G or is absent
XKXSRVIMVTAKKXXXXXXXXXIKRIQVPRLAQPVXX

SEQ ID NO: 48437 - protein, 33 aa, Artificial Sequence; identical to SEQ ID NO: 11321
  GFR-binding peptide
  MOD_RES (12)..(13)..(14)..(15)..(16): Xaa is A or G
  MOD_RES (17)..(18)..(19)..(20): Xaa is A or G or is absent

SEQ ID NO: 48438 - protein, 40 aa, Artificial Sequence
  GFR-binding peptide
  MOD_RES (1)..(3)..(35)..(36): Xaa is C or S
XGXGEVVMESMEGIVVKDYEDMIQMTINSLETPVXXAKPI

SEQ ID NO: 48439 - protein, 33 aa, Artificial Sequence; identical to SEQ ID NO: 38013
  GFR-binding peptide
  MOD_RES (2)..(33): Xaa is C or S

SEQ ID NO: 48440 - protein, 38 aa, Artificial Sequence; identical to SEQ ID NO: 11323
  GFR-binding peptide
  MOD_RES (2)..(34)..(35): Xaa is C or S

SEQ ID NO: 48441 - protein, 30 aa, Artificial Sequence; identical to SEQ ID NO: 11324
  GFR-binding peptide

SEQ ID NO: 48442 - protein, 42 aa, Artificial Sequence
  GFR-binding peptide
  MOD_RES (2)..(4)..(38): Xaa is C or S
RXEXKNHQLFNSLQEHQGQHPKIRYYLMTLPEEETPVXELGE

SEQ ID NO: 48443 - protein, 38 aa, Artificial Sequence; identical to SEQ ID NO: 18428
  GFR-binding peptide
  MOD_RES (1)..(3)..(37): Xaa is C or S
  MOD_RES (15)..(16)..(17)..(18)..(19): Xaa is A or G
  MOD_RES (20)..(21)..(22)..(23): Xaa is A or G or is absent

SEQ ID NO: 48444 - protein, 35 aa, Artificial Sequence; identical to SEQ ID NO: 18429
  GFR-binding peptide
  MOD_RES (35)..(35): Xaa is C or S
  MOD_RES (11)..(12)..(13)..(14)..(15): Xaa is A or G
  MOD_RES (16)..(17)..(18)..(19): Xaa is A or G or is absent

SEQ ID NO: 48445 - protein, 38 aa, Artificial Sequence; identical to SEQ ID NO: 11325
  GFR-binding peptide
  MOD_RES (1)..(3)..(36)..(37): Xaa is C or S
  MOD_RES (14)..(15)..(16)..(17)..(18): Xaa is A or G
  MOD_RES (19)..(20)..(21)..(22): Xaa is A or G or is absent

SEQ ID NO: 48446 - protein, 35 aa, Artificial Sequence
  GFR-binding peptide
  MOD_RES (32)..(32): Xaa is C or S
SRVVMNVQVEKIVNSSDDVKAVKVSRLKTPAXTPK

SEQ ID NO: 48447 - protein, 43 aa, Artificial Sequence; identical to SEQ ID NO: 11326
  GFR-binding peptide
  MOD_RES (2)..(4)..(38)..(39): Xaa is C or S
  MOD_RES (16)..(17)..(18)..(19)..(20): Xaa is A or G
  MOD_RES (21)..(22)..(23)..(24): Xaa is A or G or is absent

SEQ ID NO: 48448 - protein, 38 aa, Artificial Sequence
  GFR-binding peptide
  MOD_RES (34)..(34): Xaa is C or S
  MOD_RES (12)..(13)..(14)..(15)..(16): Xaa is A or G
  MOD_RES (17)..(18)..(19)..(20): Xaa is A or G or is absent
SRVVMNSMEGIXXXXXXXXXMIQVTINSLKTPAXTPKT

SEQ ID NO: 48449 - protein, 40 aa, Artificial Sequence
  GFR-binding peptide
  MOD_RES (2)..(36)..(37): Xaa is C or S
  MOD_RES (14)..(15)..(16)..(17)..(18): Xaa is A or G
  MOD_RES (19)..(20)..(21)..(22): Xaa is A or G or is absent
GXSRVVMNSMEGIXXXXXXXXXMIQVTINSLKTPAXXPKP

SEQ ID NO: 48450 - protein, 37 aa, Artificial Sequence; identical to SEQ ID NO: 18436
  GFR-binding peptide
  MOD_RES (35)..(35): Xaa is C or S

SEQ ID NO: 48451 - protein, 33 aa, Artificial Sequence; identical to SEQ ID NO: 18437
  GFR-binding peptide
  MOD_RES (12)..(13)..(14)..(15)..(16): Xaa is A or G
  MOD_RES (17)..(18)..(19)..(20): Xaa is A or G or is absent

SEQ ID NO: 48452 - protein, 40 aa, Artificial Sequence; identical to SEQ ID NO: 18438
  GFR-binding peptide
  MOD_RES (37)..(37): Xaa is C or S
  MOD_RES (13)..(14)..(15)..(16)..(17): Xaa is A or G
  MOD_RES (18)..(19)..(20)..(21): Xaa is A or G or is absent

SEQ ID NO: 48453 - protein, 41 aa, Artificial Sequence
  GFR-binding peptide
  MOD_RES (1)..(3)..(40): Xaa is C or S
  MOD_RES (16)..(17)..(18)..(19)..(20): Xaa is A or G
  MOD_RES (21)..(22)..(23)..(24): Xaa is A or G or is absent
XKXALHDELTNSLQEXXXXXXXXXYYLVTLPELQVQTPRXQ

SEQ ID NO: 48454 - protein, 35 aa, Artificial Sequence; identical to SEQ ID NO: 11332
  GFR-binding peptide
  MOD_RES (1)..(3): Xaa is C or S
  MOD_RES (14)..(15)..(16)..(17)..(18): Xaa is A or G
  MOD_RES (19)..(20)..(21)..(22): Xaa is A or G or is absent

SEQ ID NO: 48455 - protein, 43 aa, Artificial Sequence
  GFR-binding peptide
  MOD_RES (2)..(39): Xaa is C or S
AXELHEELRNSLQELKPKKRVYEYYVVPLPEHHVRSPQXKVSS

SEQ ID NO: 48456 - protein, 35 aa, Artificial Sequence
  GFR-binding peptide
  MOD_RES (12)..(13)..(14)..(15)..(16): Xaa is A or G
  MOD_RES (17)..(18)..(19)..(20): Xaa is A or G or is absent
LHEELRNSLQEXXXXXXXXXYYVVPLPEHHVRSPQ

SEQ ID NO: 48457 - protein, 31 aa, Artificial Sequence
  GFR-binding peptide
  MOD_RES (31)..(31): Xaa is C or S
RVVMNSMEGIIVNSSDDMIQVTINSLQTPAX

SEQ ID NO: 48458 - protein, 37 aa, Artificial Sequence; identical to SEQ ID NO: 11335
  GFR-binding peptide
  MOD_RES (32)..(33): Xaa is C or S

SEQ ID NO: 48459 - protein, 40 aa, Artificial Sequence; identical to SEQ ID NO: 18441
  GFR-binding peptide
  MOD_RES (1)..(3)..(40): Xaa is C or S
  MOD_RES (16)..(17)..(18)..(19)..(20): Xaa is A or G
  MOD_RES (21)..(22)..(23)..(24): Xaa is A or G or is absent

SEQ ID NO: 48460 - protein, 37 aa, Artificial Sequence; identical to SEQ ID NO: 11336
  GFR-binding peptide
  MOD_RES (1)..(3)..(37): Xaa is C or S
  MOD_RES (15)..(16)..(17)..(18)..(19): Xaa is A or G
  MOD_RES (20)..(21)..(22)..(23): Xaa is A or G or is absent

SEQ ID NO: 48461 - protein, 38 aa, Artificial Sequence
  GFR-binding peptide
  MOD_RES (2)..(4)..(38): Xaa is C or S
  MOD_RES (16)..(17)..(18)..(19)..(20): Xaa is A or G
  MOD_RES (21)..(22)..(23)..(24): Xaa is A or G or is absent
RXEXKNHQLFNSLQEXXXXXXXXXYYVMPLPEEETPVX

SEQ ID NO: 48462 - protein, 41 aa, Artificial Sequence
  GFR-binding peptide
  MOD_RES (2)..(4)..(38)..(39): Xaa is C or S
  MOD_RES (16)..(17)..(18)..(19)..(20): Xaa is A or G
  MOD_RES (21)..(22)..(23)..(24): Xaa is A or G or is absent
RXGXGEVVMEVQVEKXXXXXXXXXVKAMKVSRLETPVXXAK

SEQ ID NO: 48463 - protein, 38 aa, Artificial Sequence
  GFR-binding peptide
  MOD_RES (1)..(33)..(34): Xaa is C or S
XSRVVMNVTAKKIVNSSDDIKRVQVPRLKTPAXXPKPV

SEQ ID NO: 48464 - protein, 40 aa, Artificial Sequence; identical to SEQ ID NO: 18442
  GFR-binding peptide
  MOD_RES (37)..(37): Xaa is C or S
  MOD_RES (13)..(14)..(15)..(16)..(17): Xaa is A or G
  MOD_RES (18)..(19)..(20)..(21): Xaa is A or G or is absent

SEQ ID NO: 48465 - protein, 40 aa, Artificial Sequence
  GFR-binding peptide
  MOD_RES (2)..(4): Xaa is C or S
AXAXELHEELRNSLQELKPKKRVYEYYVVPLPEHHVRSPQ

SEQ ID NO: 48466 - protein, 38 aa, Artificial Sequence; identical to SEQ ID NO: 18443
  GFR-binding peptide
  MOD_RES (2)..(36): Xaa is C or S
  MOD_RES (14)..(15)..(16)..(17)..(18): Xaa is A or G
  MOD_RES (19)..(20)..(21)..(22): Xaa is A or G or is absent

SEQ ID NO: 48467 - protein, 38 aa, Artificial Sequence; identical to SEQ ID NO: 11339
  GFR-binding peptide
  MOD_RES (34)..(35): Xaa is C or S
  MOD_RES (12)..(13)..(14)..(15)..(16): Xaa is A or G
  MOD_RES (17)..(18)..(19)..(20): Xaa is A or G or is absent

SEQ ID NO: 48468 - protein, 33 aa, Artificial Sequence
  GFR-binding peptide
  MOD_RES (2)..(33): Xaa is C or S
KXSRVIMVTAKKVKPKRGVIKRIQVPRLAQPVX

SEQ ID NO: 48469 - protein, 35 aa, Artificial Sequence
  GFR-binding peptide
  MOD_RES (32)..(33): Xaa is C or S
GEVVMESMEGIVVKDYEDMIQMTINSLETPVXXAK

SEQ ID NO: 48470 - protein, 37 aa, Artificial Sequence
  GFR-binding peptide
  MOD_RES (2)..(35)..(36): Xaa is C or S
  MOD_RES (13)..(14)..(15)..(16)..(17): Xaa is A or G
  MOD_RES (18)..(19)..(20)..(21): Xaa is A or G or is absent
KXSRVIMVQVEKXXXXXXXXXVKAIKVSRLAQPVXXP

SEQ ID NO: 48471 - protein, 38 aa, Artificial Sequence
  GFR-binding peptide
  MOD_RES (2)..(36)..(37): Xaa is C or S
  MOD_RES (14)..(15)..(16)..(17)..(18): Xaa is A or G
  MOD_RES (19)..(20)..(21)..(22): Xaa is A or G or is absent
GXARVVMNVTAKKXXXXXXXXXIKRVQVPRLQTPAXXP

SEQ ID NO: 48472 - protein, 37 aa, Artificial Sequence
  GFR-binding peptide
  MOD_RES (1)..(1): Xaa is C or S
XELHEELRNSLQELKPKKRVYEYYVVPLPEHHVRSPQ

SEQ ID NO: 48473 - protein, 36 aa, Artificial Sequence
  GFR-binding peptide
  MOD_RES (1)..(3): Xaa is C or S
  MOD_RES (15)..(16)..(17)..(18)..(19): Xaa is A or G
  MOD_RES (20)..(21)..(22)..(23): Xaa is A or G or is absent
XGXSRVVMNVTAKKXXXXXXXXXIKRVQVPRLKTPA

SEQ ID NO: 48474 - protein, 34 aa, Artificial Sequence; identical to SEQ ID NO: 38050
  GFR-binding peptide
  MOD_RES (2)..(4): Xaa is C or S

SEQ ID NO: 48475 - protein, 38 aa, Artificial Sequence
  GFR-binding peptide
  MOD_RES (2)..(4): Xaa is C or S
EXKXALHDELTNSLQEFIPKKRVIEYYLVTLPELQVQT

SEQ ID NO: 48476 - protein, 33 aa, Artificial Sequence
  GFR-binding peptide
  MOD_RES (33)..(33): Xaa is C or S
  MOD_RES (11)..(12)..(13)..(14)..(15): Xaa is A or G
  MOD_RES (16)..(17)..(18)..(19): Xaa is A or G or is absent
EVVMEVQVEKXXXXXXXXXVKAMKVSRLETPVX

SEQ ID NO: 48477 - protein, 39 aa, Artificial Sequence; identical to SEQ ID NO: 11341
  GFR-binding peptide
  MOD_RES (1)..(3)..(37)..(38): Xaa is C or S
  MOD_RES (15)..(16)..(17)..(18)..(19): Xaa is A or G
  MOD_RES (20)..(21)..(22)..(23): Xaa is A or G or is absent

SEQ ID NO: 48478 - protein, 36 aa, Artificial Sequence
  GFR-binding peptide
  MOD_RES (33)..(34): Xaa is C or S
  MOD_RES (11)..(12)..(13)..(14)..(15): Xaa is A or G
  MOD_RES (16)..(17)..(18)..(19): Xaa is A or G or is absent
EVVMESMEGIXXXXXXXXXMIQMTINSLETPVXXAK

SEQ ID NO: 48479 - protein, 41 aa, Artificial Sequence; identical to SEQ ID NO: 11346
  GFR-binding peptide
  MOD_RES (2)..(36)..(37): Xaa is C or S
  MOD_RES (14)..(15)..(16)..(17)..(18): Xaa is A or G
  MOD_RES (19)..(20)..(21)..(22): Xaa is A or G or is absent

SEQ ID NO: 48480 - protein, 39 aa, Artificial Sequence
  GFR-binding peptide
  MOD_RES (35)..(35): Xaa is C or S
HDELTNSLQEFIPKKRVIEYYVVPLPELQVQTPRXQVNR

SEQ ID NO: 48481 - protein, 39 aa, Artificial Sequence
  GFR-binding peptide
  MOD_RES (1)..(3)..(35)..(36): Xaa is C or S
XGXSRVVMNSMEGIIVNSSDDMIQVTINSLKTPAXXPKP

SEQ ID NO: 48482 - protein, 33 aa, Artificial Sequence
  GFR-binding peptide
  MOD_RES (33)..(33): Xaa is C or S
  MOD_RES (11)..(12)..(13)..(14)..(15): Xaa is A or G
  MOD_RES (16)..(17)..(18)..(19): Xaa is A or G or is absent
EVVMEVTAKKXXXXXXXXXIKRMQVPRLETPVX

SEQ ID NO: 48483 - protein, 31 aa, Artificial Sequence
  GFR-binding peptide
  MOD_RES (31)..(31): Xaa is C or S
SKVIMVTAKKIKPTKGIIKRIQVPRLDQSVX

SEQ ID NO: 48484 - protein, 40 aa, Artificial Sequence
  GFR-binding peptide
  MOD_RES (2)..(36): Xaa is C or S
  MOD_RES (14)..(15)..(16)..(17)..(18): Xaa is A or G
  MOD_RES (19)..(20)..(21)..(22): Xaa is A or G or is absent
GXSRVVMNVQVEKXXXXXXXXXVKAVKVSRLKTPAXTPKT

SEQ ID NO: 48485 - protein, 36 aa, Artificial Sequence
  GFR-binding peptide
  MOD_RES (2)..(35)..(36): Xaa is C or S
  MOD_RES (13)..(14)..(15)..(16)..(17): Xaa is A or G
  MOD_RES (18)..(19)..(20)..(21): Xaa is A or G or is absent
KXSKVIMVTAKKXXXXXXXXXIKRIQVPRLDQSVXX

SEQ ID NO: 48486 - protein, 37 aa, Artificial Sequence
  GFR-binding peptide
  MOD_RES (33)..(34): Xaa is C or S
  MOD_RES (11)..(12)..(13)..(14)..(15): Xaa is A or G
  MOD_RES (16)..(17)..(18)..(19): Xaa is A or G or is absent
RVVMNVQVEKXXXXXXXXXVKAVKVSRLQTPAXXPKP

SEQ ID NO: 48487 - protein, 32 aa, Artificial Sequence
  GFR-binding peptide
  MOD_RES (11)..(12)..(13)..(14)..(15): Xaa is A or G
  MOD_RES (16)..(17)..(18)..(19): Xaa is A or G or is absent
SRVIMVTAKKXXXXXXXXXIKRIQVPRLAQPV

SEQ ID NO: 48488 - protein, 37 aa, Artificial Sequence
  GFR-binding peptide
  MOD_RES (1)..(3): Xaa is C or S
XAXELHEELRNSLQELKPKKRVYEYYVVPLPEHHVRS

SEQ ID NO: 48489 - protein, 36 aa, Artificial Sequence
  GFR-binding peptide
  MOD_RES (1)..(33)..(34): Xaa is C or S
XGEVVMEVTAKKVVKDYEDIKRMQVPRLETPVXXAK

SEQ ID NO: 48490 - protein, 34 aa, Artificial Sequence; identical to SEQ ID NO: 18458
  GFR-binding peptide

SEQ ID NO: 48491 - protein, 37 aa, Artificial Sequence; identical to SEQ ID NO: 11353
  GFR-binding peptide
  MOD_RES (1)..(32)..(33): Xaa is C or S

SEQ ID NO: 48492 - protein, 39 aa, Artificial Sequence
  GFR-binding peptide
  MOD_RES (2)..(36)..(37): Xaa is C or S
  MOD_RES (14)..(15)..(16)..(17)..(18): Xaa is A or G
  MOD_RES (19)..(20)..(21)..(22): Xaa is A or G or is absent
GXSRVVMNSMEGIXXXXXXXXXMIQVTINSLKTPAXXPK

SEQ ID NO: 48493 - protein, 41 aa, Artificial Sequence
  GFR-binding peptide
  MOD_RES (1)..(3)..(36)..(37): Xaa is C or S
  MOD_RES (14)..(15)..(16)..(17)..(18): Xaa is A or G
  MOD_RES (19)..(20)..(21)..(22): Xaa is A or G or is absent
XKXSKVIMSMEGIXXXXXXXXXMIQITINSLDQSVXXPSAS

SEQ ID NO: 48494 - protein, 37 aa, Artificial Sequence; identical to SEQ ID NO: 18461
  GFR-binding peptide
  MOD_RES (1)..(3)..(37): Xaa is C or S
  MOD_RES (15)..(16)..(17)..(18)..(19): Xaa is A or G
  MOD_RES (20)..(21)..(22)..(23): Xaa is A or G or is absent

SEQ ID NO: 48495 - protein, 38 aa, Artificial Sequence
  GFR-binding peptide
  MOD_RES (1)..(34)..(35): Xaa is C or S
  MOD_RES (12)..(13)..(14)..(15)..(16): Xaa is A or G
  MOD_RES (17)..(18)..(19)..(20): Xaa is A or G or is absent
XSKVVMVQVEKXXXXXXXXXVKAIKVSRLDQPVXXPSA

SEQ ID NO: 48496 - protein, 41 aa, Artificial Sequence; identical to SEQ ID NO: 18463
  GFR-binding peptide
  MOD_RES (2)..(39): Xaa is C or S
  MOD_RES (15)..(16)..(17)..(18)..(19): Xaa is A or G
  MOD_RES (20)..(21)..(22)..(23): Xaa is A or G or is absent

SEQ ID NO: 48497 - protein, 42 aa, Artificial Sequence; identical to SEQ ID NO: 18464
  GFR-binding peptide
  MOD_RES (1)..(3)..(40): Xaa is C or S
  MOD_RES (16)..(17)..(18)..(19)..(20): Xaa is A or G
  MOD_RES (21)..(22)..(23)..(24): Xaa is A or G or is absent

SEQ ID NO: 48498 - protein, 40 aa, Artificial Sequence
  GFR-binding peptide
  MOD_RES (2)..(4)..(36)..(37): Xaa is C or S
RXGXGEVVMESMEGIVVKDYEDMIQMTINSLETPVXXAKP

SEQ ID NO: 48499 - protein, 34 aa, Artificial Sequence
  GFR-binding peptide
  MOD_RES (1)..(1): Xaa is C or S
  MOD_RES (13)..(14)..(15)..(16)..(17): Xaa is A or G
  MOD_RES (18)..(19)..(20)..(21): Xaa is A or G or is absent
XSRVVMNVQVEKXXXXXXXXXVKAVKVSRLKTPA

SEQ ID NO: 48500 - protein, 41 aa, Artificial Sequence; identical to SEQ ID NO: 18467
  GFR-binding peptide
  MOD_RES (2)..(4)..(38): Xaa is C or S

SEQ ID NO: 48501 - protein, 37 aa, Artificial Sequence
  GFR-binding peptide
  MOD_RES (2)..(4): Xaa is C or S
  MOD_RES (16)..(17)..(18)..(19)..(20): Xaa is A or G
  MOD_RES (21)..(22)..(23)..(24): Xaa is A or G or is absent
HXGXARVVMNSMEGIXXXXXXXXXMIQVTINSLQTPA

SEQ ID NO: 48502 - protein, 42 aa, Artificial Sequence
  GFR-binding peptide
  MOD_RES (1)..(3)..(37): Xaa is C or S
  MOD_RES (15)..(16)..(17)..(18)..(19): Xaa is A or G
  MOD_RES (20)..(21)..(22)..(23): Xaa is A or G or is absent
XGXSRVVMNSMEGIXXXXXXXXXMIQVTINSLKTPAXTPKTV

SEQ ID NO: 48503 - protein, 39 aa, Artificial Sequence
  GFR-binding peptide
  MOD_RES (2)..(34): Xaa is C or S
GXSRVVMNVQVEKIVNSSDDVKAVKVSRLKTPAXTPKTV

SEQ ID NO: 48504 - protein, 37 aa, Artificial Sequence; identical to SEQ ID NO: 38082
  GFR-binding peptide
  MOD_RES (1)..(3)..(36)..(37): Xaa is C or S
  MOD_RES (14)..(15)..(16)..(17)..(18): Xaa is A or G
  MOD_RES (19)..(20)..(21)..(22): Xaa is A or G or is absent

SEQ ID NO: 48505 - protein, 35 aa, Artificial Sequence; identical to SEQ ID NO: 11359
  GFR-binding peptide
  MOD_RES (1)..(34)..(35): Xaa is C or S
  MOD_RES (12)..(13)..(14)..(15)..(16): Xaa is A or G
  MOD_RES (17)..(18)..(19)..(20): Xaa is A or G or is absent

SEQ ID NO: 48506 - protein, 38 aa, Artificial Sequence; identical to SEQ ID NO: 18469
  GFR-binding peptide
  MOD_RES (37)..(37): Xaa is C or S

SEQ ID NO: 48507 - protein, 37 aa, Artificial Sequence
  GFR-binding peptide
  MOD_RES (34)..(35): Xaa is C or S
  MOD_RES (12)..(13)..(14)..(15)..(16): Xaa is A or G
  MOD_RES (17)..(18)..(19)..(20): Xaa is A or G or is absent
SRVVMNVQVEKXXXXXXXXXVKAVKVSRLKTPAXXPK

SEQ ID NO: 48508 - protein, 41 aa, Artificial Sequence
  GFR-binding peptide
  MOD_RES (2)..(4)..(36): Xaa is C or S
HXGXSRVVMNVQVEKIVNSSDDVKAVKVSRLKTPAXTPKTV

SEQ ID NO: 48509 - protein, 36 aa, Artificial Sequence; identical to SEQ ID NO: 11365
  GFR-binding peptide
  MOD_RES (1)..(3)..(34)..(35): Xaa is C or S

SEQ ID NO: 48510 - protein, 38 aa, Artificial Sequence
  GFR-binding peptide
  MOD_RES (2)..(35)..(36): Xaa is C or S
  MOD_RES (13)..(14)..(15)..(16)..(17): Xaa is A or G
  MOD_RES (18)..(19)..(20)..(21): Xaa is A or G or is absent
KXSKVIMVQVEKXXXXXXXXXVKAIKVSRLDQSVXXPS

SEQ ID NO: 48511 - protein, 40 aa, Artificial Sequence; identical to SEQ ID NO: 11366
  GFR-binding peptide
  MOD_RES (2)..(4)..(36)..(37): Xaa is C or S

SEQ ID NO: 48512 - protein, 33 aa, Artificial Sequence; identical to SEQ ID NO: 11368
  GFR-binding peptide
  MOD_RES (32)..(33): Xaa is C or S

SEQ ID NO: 48513 - protein, 40 aa, Artificial Sequence; identical to SEQ ID NO: 11369
  GFR-binding peptide
  MOD_RES (2)..(35)..(36): Xaa is C or S
  MOD_RES (13)..(14)..(15)..(16)..(17): Xaa is A or G
  MOD_RES (18)..(19)..(20)..(21): Xaa is A or G or is absent

SEQ ID NO: 48514 - protein, 36 aa, Artificial Sequence; identical to SEQ ID NO: 11372
  GFR-binding peptide
  MOD_RES (2)..(36): Xaa is C or S
  MOD_RES (14)..(15)..(16)..(17)..(18): Xaa is A or G
  MOD_RES (19)..(20)..(21)..(22): Xaa is A or G or is absent

SEQ ID NO: 48515 - protein, 37 aa, Artificial Sequence; identical to SEQ ID NO: 11373
  GFR-binding peptide
  MOD_RES (1)..(35)..(36): Xaa is C or S
  MOD_RES (13)..(14)..(15)..(16)..(17): Xaa is A or G
  MOD_RES (18)..(19)..(20)..(21): Xaa is A or G or is absent

SEQ ID NO: 48516 - protein, 41 aa, Artificial Sequence; identical to SEQ ID NO: 11376
  GFR-binding peptide
  MOD_RES (1)..(3)..(37)..(38): Xaa is C or S
  MOD_RES (15)..(16)..(17)..(18)..(19): Xaa is A or G
  MOD_RES (20)..(21)..(22)..(23): Xaa is A or G or is absent

SEQ ID NO: 48517 - protein, 42 aa, Artificial Sequence; identical to SEQ ID NO: 18474
  GFR-binding peptide
  MOD_RES (2)..(36): Xaa is C or S

SEQ ID NO: 48518 - protein, 37 aa, Artificial Sequence; identical to SEQ ID NO: 18476
  GFR-binding peptide
  MOD_RES (1)..(3): Xaa is C or S
  MOD_RES (16)..(17)..(18)..(19)..(20): Xaa is A or G
  MOD_RES (21)..(22)..(23)..(24): Xaa is A or G or is absent

SEQ ID NO: 48519 - protein, 39 aa, Artificial Sequence; identical to SEQ ID NO: 11381
  GFR-binding peptide
  MOD_RES (2)..(34): Xaa is C or S

SEQ ID NO: 48520 - protein, 40 aa, Artificial Sequence; identical to SEQ ID NO: 18477
  GFR-binding peptide
  MOD_RES (1)..(38): Xaa is C or S

SEQ ID NO: 48521 - protein, 40 aa, Artificial Sequence
  GFR-binding peptide
  MOD_RES (34)..(35): Xaa is C or S
  MOD_RES (12)..(13)..(14)..(15)..(16): Xaa is A or G
  MOD_RES (17)..(18)..(19)..(20): Xaa is A or G or is absent
GEVVMDVQVEKXXXXXXXXXVKAMKVSRLETPVXXAKPIK

SEQ ID NO: 48522 - protein, 35 aa, Artificial Sequence
  GFR-binding peptide
  MOD_RES (2)..(4): Xaa is C or S
HXGXSRVVMNVQVEKIVNSSDDVKAVKVSRLKTPA

SEQ ID NO: 48523 - protein, 33 aa, Artificial Sequence; identical to SEQ ID NO: 11382
  GFR-binding peptide
  MOD_RES (31)..(31): Xaa is C or S

SEQ ID NO: 48524 - protein, 42 aa, Artificial Sequence; identical to SEQ ID NO: 18479
  GFR-binding peptide
  MOD_RES (1)..(38): Xaa is C or S
  MOD_RES (14)..(15)..(16)..(17)..(18): Xaa is A or G
  MOD_RES (19)..(20)..(21)..(22): Xaa is A or G or is absent

SEQ ID NO: 48525 - protein, 39 aa, Artificial Sequence
  GFR-binding peptide
  MOD_RES (2)..(39): Xaa is C or S
  MOD_RES (15)..(16)..(17)..(18)..(19): Xaa is A or G
  MOD_RES (20)..(21)..(22)..(23): Xaa is A or G or is absent
AXELHEELRNSLQEXXXXXXXXXYYLVTLPEHHVRSPQX

SEQ ID NO: 48526 - protein, 37 aa, Artificial Sequence
  GFR-binding peptide
  MOD_RES (31)..(31): Xaa is C or S
RVVMNVQVEKIVNSSDDVKAVKVSRLKTPAXTPKTVH

SEQ ID NO: 48527 - protein, 37 aa, Artificial Sequence
  GFR-binding peptide
  MOD_RES (1)..(1): Xaa is C or S
XALHDELTNSLQEFIPKKRVIEYYVVPLPELQVQTPR

SEQ ID NO: 48528 - protein, 44 aa, Artificial Sequence; identical to SEQ ID NO: 11387
  GFR-binding peptide
  MOD_RES (2)..(4)..(38)..(39): Xaa is C or S
  MOD_RES (16)..(17)..(18)..(19)..(20): Xaa is A or G
  MOD_RES (21)..(22)..(23)..(24): Xaa is A or G or is absent

SEQ ID NO: 48529 - protein, 41 aa, Artificial Sequence; identical to SEQ ID NO: 11388
  GFR-binding peptide
  MOD_RES (1)..(3)..(36)..(37): Xaa is C or S
  MOD_RES (14)..(15)..(16)..(17)..(18): Xaa is A or G
  MOD_RES (19)..(20)..(21)..(22): Xaa is A or G or is absent

SEQ ID NO: 48530 - protein, 40 aa, Artificial Sequence; identical to SEQ ID NO: 18484
  GFR-binding peptide
  MOD_RES (36)..(36): Xaa is C or S

SEQ ID NO: 48531 - protein, 40 aa, Artificial Sequence
  GFR-binding peptide
  MOD_RES (2)..(36)..(37): Xaa is C or S
  MOD_RES (14)..(15)..(16)..(17)..(18): Xaa is A or G
  MOD_RES (19)..(20)..(21)..(22): Xaa is A or G or is absent
GXGEVVMEVTAKKXXXXXXXXXIKRMQVPRLETPVXXAKP

SEQ ID NO: 48532 - protein, 39 aa, Artificial Sequence
  GFR-binding peptide
  MOD_RES (1)..(35): Xaa is C or S
  MOD_RES (13)..(14)..(15)..(16)..(17): Xaa is A or G
  MOD_RES (18)..(19)..(20)..(21): Xaa is A or G or is absent
XSRVVMNVQVEKXXXXXXXXXVKAVKVSRLKTPAXTPKT

SEQ ID NO: 48533 - protein, 39 aa, Artificial Sequence; identical to SEQ ID NO: 11394
  GFR-binding peptide
  MOD_RES (1)..(3)..(34)..(35): Xaa is C or S

SEQ ID NO: 48534 - protein, 38 aa, Artificial Sequence
  GFR-binding peptide
  MOD_RES (37)..(37): Xaa is C or S
ALHDELTNSLQEFIPKKRVIEYYLVTLPELQVQTPRXQ

SEQ ID NO: 48535 - protein, 37 aa, Artificial Sequence
  GFR-binding peptide
  MOD_RES (33)..(34): Xaa is C or S
  MOD_RES (11)..(12)..(13)..(14)..(15): Xaa is A or G
  MOD_RES (16)..(17)..(18)..(19): Xaa is A or G or is absent
EVVMDSMEGIXXXXXXXXXMIQMTINSLETPVXXAKP

SEQ ID NO: 48536 - protein, 34 aa, Artificial Sequence; identical to SEQ ID NO: 11396
  GFR-binding peptide
  MOD_RES (34)..(34): Xaa is C or S
  MOD_RES (12)..(13)..(14)..(15)..(16): Xaa is A or G
  MOD_RES (17)..(18)..(19)..(20): Xaa is A or G or is absent

SEQ ID NO: 48537 - protein, 42 aa, Artificial Sequence; identical to SEQ ID NO: 18488
  GFR-binding peptide
  MOD_RES (1)..(3)..(40): Xaa is C or S
  MOD_RES (16)..(17)..(18)..(19)..(20): Xaa is A or G
  MOD_RES (21)..(22)..(23)..(24): Xaa is A or G or is absent

SEQ ID NO: 48538 - protein, 34 aa, Artificial Sequence
  GFR-binding peptide
  MOD_RES (1)..(32)..(33): Xaa is C or S
XSRVIMSMEGIVKPKRGVMIQITINSLAQPVXXP

SEQ ID NO: 48539 - protein, 36 aa, Artificial Sequence
  GFR-binding peptide
  MOD_RES (2)..(36): Xaa is C or S
  MOD_RES (14)..(15)..(16)..(17)..(18): Xaa is A or G
  MOD_RES (19)..(20)..(21)..(22): Xaa is A or G or is absent
GXSRVVMNVQVEKXXXXXXXXXVKAVKVSRLKTPAX

SEQ ID NO: 48540 - protein, 38 aa, Artificial Sequence; identical to SEQ ID NO: 38136
  GFR-binding peptide
  MOD_RES (2)..(4)..(37)..(38): Xaa is C or S
  MOD_RES (15)..(16)..(17)..(18)..(19): Xaa is A or G
  MOD_RES (20)..(21)..(22)..(23): Xaa is A or G or is absent

SEQ ID NO: 48541 - protein, 43 aa, Artificial Sequence; identical to SEQ ID NO: 18493
  GFR-binding peptide
  MOD_RES (2)..(39): Xaa is C or S
  MOD_RES (15)..(16)..(17)..(18)..(19): Xaa is A or G
  MOD_RES (20)..(21)..(22)..(23): Xaa is A or G or is absent

SEQ ID NO: 48542 - protein, 37 aa, Artificial Sequence
  GFR-binding peptide
  MOD_RES (32)..(33): Xaa is C or S
SRVVMNSMEGIIVNSSDDMIQVTINSLKTPAXXPKPV

SEQ ID NO: 48543 - protein, 40 aa, Artificial Sequence; identical to SEQ ID NO: 11402
  GFR-binding peptide
  MOD_RES (1)..(34)..(35): Xaa is C or S
  MOD_RES (12)..(13)..(14)..(15)..(16): Xaa is A or G
  MOD_RES (17)..(18)..(19)..(20): Xaa is A or G or is absent

SEQ ID NO: 48544 - protein, 37 aa, Artificial Sequence; identical to SEQ ID NO: 18495
  GFR-binding peptide
  MOD_RES (1)..(3): Xaa is C or S
  MOD_RES (16)..(17)..(18)..(19)..(20): Xaa is A or G
  MOD_RES (21)..(22)..(23)..(24): Xaa is A or G or is absent

SEQ ID NO: 48545 - protein, 35 aa, Artificial Sequence
  GFR-binding peptide
  MOD_RES (31)..(32): Xaa is C or S
RVVMNSMEGIIVNSSDDMIQVTINSLQTPAXXPKP

SEQ ID NO: 48546 - protein, 38 aa, Artificial Sequence
  GFR-binding peptide
  MOD_RES (2)..(2): Xaa is C or S
KXALHDELTNSLQEFIPKKRVIEYYVVPLPELQVQTPR

SEQ ID NO: 48547 - protein, 38 aa, Artificial Sequence; identical to SEQ ID NO: 11404
  GFR-binding peptide
  MOD_RES (2)..(4)..(38): Xaa is C or S
  MOD_RES (16)..(17)..(18)..(19)..(20): Xaa is A or G
  MOD_RES (21)..(22)..(23)..(24): Xaa is A or G or is absent

SEQ ID NO: 48548 - protein, 42 aa, Artificial Sequence; identical to SEQ ID NO: 11405
  GFR-binding peptide
  MOD_RES (2)..(4)..(38)..(39): Xaa is C or S
  MOD_RES (16)..(17)..(18)..(19)..(20): Xaa is A or G
  MOD_RES (21)..(22)..(23)..(24): Xaa is A or G or is absent

SEQ ID NO: 48549 - protein, 34 aa, Artificial Sequence
  GFR-binding peptide
  MOD_RES (34)..(34): Xaa is C or S
  MOD_RES (12)..(13)..(14)..(15)..(16): Xaa is A or G
  MOD_RES (17)..(18)..(19)..(20): Xaa is A or G or is absent
SRVVMNSMEGIXXXXXXXXXMIQVTINSLKTPAX

SEQ ID NO: 48550 - protein, 37 aa, Artificial Sequence
  GFR-binding peptide
  MOD_RES (2)..(36)..(37): Xaa is C or S
  MOD_RES (14)..(15)..(16)..(17)..(18): Xaa is A or G
  MOD_RES (19)..(20)..(21)..(22): Xaa is A or G or is absent
GXARVVMNVTAKKXXXXXXXXXIKRVQVPRLQTPAXX

SEQ ID NO: 48551 - protein, 40 aa, Artificial Sequence
  GFR-binding peptide
  MOD_RES (2)..(34)..(35): Xaa is C or S
GXGEVVMDVTAKKVVKENEDIKRMQVPRLETPVXXAKPIK

SEQ ID NO: 48552 - protein, 42 aa, Artificial Sequence
  GFR-binding peptide
  MOD_RES (2)..(36)..(37): Xaa is C or S
  MOD_RES (14)..(15)..(16)..(17)..(18): Xaa is A or G
  MOD_RES (19)..(20)..(21)..(22): Xaa is A or G or is absent
GXGEVVMDVQVEKXXXXXXXXXVKAMKVSRLETPVXXAKPIK

SEQ ID NO: 48553 - protein, 41 aa, Artificial Sequence; identical to SEQ ID NO: 18497
  GFR-binding peptide
  MOD_RES (37)..(37): Xaa is C or S
  MOD_RES (13)..(14)..(15)..(16)..(17): Xaa is A or G
  MOD_RES (18)..(19)..(20)..(21): Xaa is A or G or is absent

SEQ ID NO: 48554 - protein, 39 aa, Artificial Sequence
  GFR-binding peptide
  MOD_RES (2)..(4)..(38)..(39): Xaa is C or S
  MOD_RES (16)..(17)..(18)..(19)..(20): Xaa is A or G
  MOD_RES (21)..(22)..(23)..(24): Xaa is A or G or is absent
RXGXGEVVMDVTAKKXXXXXXXXXIKRMQVPRLETPVXX

SEQ ID NO: 48555 - protein, 41 aa, Artificial Sequence
  GFR-binding peptide
  MOD_RES (1)..(3)..(40): Xaa is C or S
XKXALHDELTNSLQEFIPKKRVIEYYLVTLPELQVQTPRXQ

SEQ ID NO: 48556 - protein, 40 aa, Artificial Sequence; identical to SEQ ID NO: 11413
  GFR-binding peptide
  MOD_RES (2)..(35)..(36): Xaa is C or S
  MOD_RES (13)..(14)..(15)..(16)..(17): Xaa is A or G
  MOD_RES (18)..(19)..(20)..(21): Xaa is A or G or is absent

SEQ ID NO: 48557 - protein, 38 aa, Artificial Sequence; identical to SEQ ID NO: 11414
  GFR-binding peptide
  MOD_RES (1)..(35)..(36): Xaa is C or S
  MOD_RES (13)..(14)..(15)..(16)..(17): Xaa is A or G
  MOD_RES (18)..(19)..(20)..(21): Xaa is A or G or is absent

SEQ ID NO: 48558 - protein, 33 aa, Artificial Sequence
  GFR-binding peptide
  MOD_RES (32)..(33): Xaa is C or S
ARVVMNVTAKKIVNSSDDIKRVQVPRLQTPAXX

SEQ ID NO: 48559 - protein, 37 aa, Artificial Sequence
  GFR-binding peptide
  MOD_RES (2)..(36)..(37): Xaa is C or S
  MOD_RES (14)..(15)..(16)..(17)..(18): Xaa is A or G
  MOD_RES (19)..(20)..(21)..(22): Xaa is A or G or is absent
GXGEVVMDVTAKKXXXXXXXXXIKRMQVPRLETPVXX

SEQ ID NO: 48560 - protein, 38 aa, Artificial Sequence; identical to SEQ ID NO: 18502
  GFR-binding peptide
  MOD_RES (1)..(3): Xaa is C or S

SEQ ID NO: 48561 - protein, 35 aa, Artificial Sequence
  GFR-binding peptide
  MOD_RES (1)..(33)..(34): Xaa is C or S
XARVVMNVTAKKIVNSSDDIKRVQVPRLQTPAXXP

SEQ ID NO: 48562 - protein, 39 aa, Artificial Sequence
  GFR-binding peptide
  MOD_RES (34)..(35): Xaa is C or S
  MOD_RES (12)..(13)..(14)..(15)..(16): Xaa is A or G
  MOD_RES (17)..(18)..(19)..(20): Xaa is A or G or is absent
GEVVMEVTAKKXXXXXXXXXIKRMQVPRLETPVXXAKPI

SEQ ID NO: 48563 - protein, 39 aa, Artificial Sequence; identical to SEQ ID NO: 11419
  GFR-binding peptide
  MOD_RES (34)..(34): Xaa is C or S
  MOD_RES (12)..(13)..(14)..(15)..(16): Xaa is A or G
  MOD_RES (17)..(18)..(19)..(20): Xaa is A or G or is absent

SEQ ID NO: 48564 - protein, 35 aa, Artificial Sequence; identical to SEQ ID NO: 18504
  GFR-binding peptide
  MOD_RES (13)..(14)..(15)..(16)..(17): Xaa is A or G
  MOD_RES (18)..(19)..(20)..(21): Xaa is A or G or is absent

SEQ ID NO: 48565 - protein, 38 aa, Artificial Sequence
  GFR-binding peptide
  MOD_RES (2)..(4): Xaa is C or S
  MOD_RES (17)..(18)..(19)..(20)..(21): Xaa is A or G
  MOD_RES (22)..(23)..(24)..(25): Xaa is A or G or is absent
EXKXALHDELTNSLQEXXXXXXXXXYYLVTLPELQVQT

SEQ ID NO: 48566 - protein, 41 aa, Artificial Sequence; identical to SEQ ID NO: 18505
  GFR-binding peptide
  MOD_RES (2)..(36): Xaa is C or S
  MOD_RES (14)..(15)..(16)..(17)..(18): Xaa is A or G
  MOD_RES (19)..(20)..(21)..(22): Xaa is A or G or is absent

SEQ ID NO: 48567 - protein, 34 aa, Artificial Sequence; identical to SEQ ID NO: 11420
  GFR-binding peptide
  MOD_RES (31)..(32): Xaa is C or S

SEQ ID NO: 48568 - protein, 40 aa, Artificial Sequence; identical to SEQ ID NO: 18507
  GFR-binding peptide
  MOD_RES (2)..(4): Xaa is C or S

SEQ ID NO: 48569 - protein, 33 aa, Artificial Sequence
  GFR-binding peptide
  MOD_RES (1)..(33): Xaa is C or S
XARVVMNSMEGIIVNSSDDMIQVTINSLQTPAX

SEQ ID NO: 48570 - protein, 35 aa, Artificial Sequence
  GFR-binding peptide
  MOD_RES (1)..(33)..(34): Xaa is C or S
XGEVVMDVTAKKVVKENEDIKRMQVPRLETPVXXA

SEQ ID NO: 48571 - protein, 39 aa, Artificial Sequence; identical to SEQ ID NO: 18511
  GFR-binding peptide
  MOD_RES (2)..(4): Xaa is C or S
  MOD_RES (17)..(18)..(19)..(20)..(21): Xaa is A or G
  MOD_RES (22)..(23)..(24)..(25): Xaa is A or G or is absent

SEQ ID NO: 48572 - protein, 40 aa, Artificial Sequence
  GFR-binding peptide
  MOD_RES (2)..(35)..(36): Xaa is C or S
  MOD_RES (13)..(14)..(15)..(16)..(17): Xaa is A or G
  MOD_RES (18)..(19)..(20)..(21): Xaa is A or G or is absent
KXSRVIMVTAKKXXXXXXXXXIKRIQVPRLAQPVXXPAAS

SEQ ID NO: 48573 - protein, 31 aa, Artificial Sequence; identical to SEQ ID NO: 11422
  GFR-binding peptide
  MOD_RES (31)..(31): Xaa is C or S

SEQ ID NO: 48574 - protein, 34 aa, Artificial Sequence; identical to SEQ ID NO: 11426
  GFR-binding peptide
  MOD_RES (1)..(3): Xaa is C or S

SEQ ID NO: 48575 - protein, 44 aa, Artificial Sequence
  GFR-binding peptide
  MOD_RES (1)..(3)..(40): Xaa is C or S
XAXELHEELRNSLQELKPKKRVYEYYVVPLPEHHVRSPQXKVSS

SEQ ID NO: 48576 - protein, 40 aa, Artificial Sequence
  GFR-binding peptide
  MOD_RES (34)..(34): Xaa is C or S
  MOD_RES (12)..(13)..(14)..(15)..(16): Xaa is A or G
  MOD_RES (17)..(18)..(19)..(20): Xaa is A or G or is absent
SRVVMNVQVEKXXXXXXXXXVKAVKVSRLKTPAXTPKTVH

SEQ ID NO: 48577 - protein, 35 aa, Artificial Sequence
  GFR-binding peptide
  MOD_RES (2)..(2): Xaa is C or S
  MOD_RES (14)..(15)..(16)..(17)..(18): Xaa is A or G
  MOD_RES (19)..(20)..(21)..(22): Xaa is A or G or is absent
EXKNHQLFNSLQEXXXXXXXXXYYLMTLPEEETPV

SEQ ID NO: 48578 - protein, 43 aa, Artificial Sequence
  GFR-binding peptide
  MOD_RES (1)..(3)..(40): Xaa is C or S
XAXELHEELRNSLQELKPKKRVYEYYVVPLPEHHVRSPQXKVS

SEQ ID NO: 48579 - protein, 33 aa, Artificial Sequence; identical to SEQ ID NO: 11427
  GFR-binding peptide
  MOD_RES (2)..(33): Xaa is C or S

SEQ ID NO: 48580 - protein, 38 aa, Artificial Sequence; identical to SEQ ID NO: 11430
  GFR-binding peptide
  MOD_RES (2)..(4)..(38): Xaa is C or S
  MOD_RES (16)..(17)..(18)..(19)..(20): Xaa is A or G
  MOD_RES (21)..(22)..(23)..(24): Xaa is A or G or is absent

SEQ ID NO: 48581 - protein, 35 aa, Artificial Sequence
  GFR-binding peptide
  MOD_RES (2)..(34)..(35): Xaa is C or S
GXGEVVMEVTAKKVVKDYEDIKRMQVPRLETPVXX

SEQ ID NO: 48582 - protein, 37 aa, Artificial Sequence
  GFR-binding peptide
  MOD_RES (2)..(4): Xaa is C or S
  MOD_RES (16)..(17)..(18)..(19)..(20): Xaa is A or G
  MOD_RES (21)..(22)..(23)..(24): Xaa is A or G or is absent
RXGXGEVVMDVTAKKXXXXXXXXXIKRMQVPRLETPV

SEQ ID NO: 48583 - protein, 38 aa, Artificial Sequence; identical to SEQ ID NO: 18513
  GFR-binding peptide
  MOD_RES (36)..(36): Xaa is C or S

SEQ ID NO: 48584 - protein, 40 aa, Artificial Sequence
  GFR-binding peptide
  MOD_RES (2)..(39): Xaa is C or S
  MOD_RES (15)..(16)..(17)..(18)..(19): Xaa is A or G
  MOD_RES (20)..(21)..(22)..(23): Xaa is A or G or is absent
KXALHDELTNSLQEXXXXXXXXXYYLVTLPELQVQTPRXQ

SEQ ID NO: 48585 - protein, 37 aa, Artificial Sequence
  GFR-binding peptide
  MOD_RES (35)..(35): Xaa is C or S
HDELTNSLQEFIPKKRVIEYYLVTLPELQVQTPRXQV

SEQ ID NO: 48586 - protein, 33 aa, Artificial Sequence; identical to SEQ ID NO: 18515
  GFR-binding peptide

SEQ ID NO: 48587 - protein, 38 aa, Artificial Sequence; identical to SEQ ID NO: 11436
  GFR-binding peptide
  MOD_RES (2)..(34)..(35): Xaa is C or S

SEQ ID NO: 48588 - protein, 42 aa, Artificial Sequence; identical to SEQ ID NO: 18517
  GFR-binding peptide
  MOD_RES (2)..(39): Xaa is C or S

SEQ ID NO: 48589 - protein, 38 aa, Artificial Sequence; identical to SEQ ID NO: 18519
  GFR-binding peptide
  MOD_RES (1)..(3): Xaa is C or S
  MOD_RES (16)..(17)..(18)..(19)..(20): Xaa is A or G
  MOD_RES (21)..(22)..(23)..(24): Xaa is A or G or is absent

SEQ ID NO: 48590 - protein, 38 aa, Artificial Sequence
  GFR-binding peptide
  MOD_RES (33)..(34): Xaa is C or S
  MOD_RES (11)..(12)..(13)..(14)..(15): Xaa is A or G
  MOD_RES (16)..(17)..(18)..(19): Xaa is A or G or is absent
RVVMNVQVEKXXXXXXXXXVKAVKVSRLKTPAXXPKPV

SEQ ID NO: 48591 - protein, 36 aa, Artificial Sequence; identical to SEQ ID NO: 11439
  GFR-binding peptide
  MOD_RES (2)..(4)..(35)..(36): Xaa is C or S

SEQ ID NO: 48592 - protein, 42 aa, Artificial Sequence
  GFR-binding peptide
  MOD_RES (1)..(3)..(37)..(38): Xaa is C or S
  MOD_RES (15)..(16)..(17)..(18)..(19): Xaa is A or G
  MOD_RES (20)..(21)..(22)..(23): Xaa is A or G or is absent
XGXGEVVMDSMEGIXXXXXXXXXMIQMTINSLETPVXXAKPI

SEQ ID NO: 48593 - protein, 43 aa, Artificial Sequence
  GFR-binding peptide
  MOD_RES (1)..(3)..(37): Xaa is C or S
XEXKNHQLFNSLQEHQGQHPKIRYYVMPLPEEETPVXELGEDN

SEQ ID NO: 48594 - protein, 35 aa, Artificial Sequence; identical to SEQ ID NO: 18521
  GFR-binding peptide
  MOD_RES (1)..(1): Xaa is C or S

SEQ ID NO: 48595 - protein, 36 aa, Artificial Sequence; identical to SEQ ID NO: 18523
  GFR-binding peptide
  MOD_RES (1)..(1): Xaa is C or S

SEQ ID NO: 48596 - protein, 42 aa, Artificial Sequence
  GFR-binding peptide
  MOD_RES (2)..(39): Xaa is C or S
  MOD_RES (15)..(16)..(17)..(18)..(19): Xaa is A or G
  MOD_RES (20)..(21)..(22)..(23): Xaa is A or G or is absent
AXELHEELRNSLQEXXXXXXXXXYYVVPLPEHHVRSPQXKVS

SEQ ID NO: 48597 - protein, 34 aa, Artificial Sequence; identical to SEQ ID NO: 11442
  GFR-binding peptide
  MOD_RES (2)..(33)..(34): Xaa is C or S

SEQ ID NO: 48598 - protein, 40 aa, Artificial Sequence
  GFR-binding peptide
  MOD_RES (37)..(37): Xaa is C or S
ALHDELTNSLQEFIPKKRVIEYYLVTLPELQVQTPRXQVN

SEQ ID NO: 48599 - protein, 41 aa, Artificial Sequence
  GFR-binding peptide
  MOD_RES (1)..(35): Xaa is C or S
  MOD_RES (13)..(14)..(15)..(16)..(17): Xaa is A or G
  MOD_RES (18)..(19)..(20)..(21): Xaa is A or G or is absent
XSRVVMNVTAKKXXXXXXXXXIKRVQVPRLKTPAXTPKTVH

SEQ ID NO: 48600 - protein, 34 aa, Artificial Sequence; identical to SEQ ID NO: 18527
  GFR-binding peptide

SEQ ID NO: 48601 - protein, 42 aa, Artificial Sequence
  GFR-binding peptide
  MOD_RES (1)..(3)..(36)..(37): Xaa is C or S
  MOD_RES (14)..(15)..(16)..(17)..(18): Xaa is A or G
  MOD_RES (19)..(20)..(21)..(22): Xaa is A or G or is absent
XKXSKVVMVTAKKXXXXXXXXXIKRIQVPRLDQPVXXPSASA

SEQ ID NO: 48602 - protein, 35 aa, Artificial Sequence; identical to SEQ ID NO: 11449
  GFR-binding peptide
  MOD_RES (1)..(32)..(33): Xaa is C or S

SEQ ID NO: 48603 - protein, 33 aa, Artificial Sequence
  GFR-binding peptide
  MOD_RES (1)..(32)..(33): Xaa is C or S
XSKVVMVQVEKVKPTRGVVKAIKVSRLDQPVXX

SEQ ID NO: 48604 - protein, 38 aa, Artificial Sequence
  GFR-binding peptide
  MOD_RES (2)..(34)..(35): Xaa is C or S
GXGEVVMDVQVEKVVKENEDVKAMKVSRLETPVXXAKP

SEQ ID NO: 48605 - protein, 35 aa, Artificial Sequence
  GFR-binding peptide
  MOD_RES (1)..(32)..(33): Xaa is C or S
XSRVIMVTAKKVKPKRGVIKRIQVPRLAQPVXXPA

SEQ ID NO: 48606 - protein, 38 aa, Artificial Sequence; identical to SEQ ID NO: 18532
  GFR-binding peptide
  MOD_RES (37)..(37): Xaa is C or S

SEQ ID NO: 48607 - protein, 34 aa, Artificial Sequence; identical to SEQ ID NO: 11456
  GFR-binding peptide
  MOD_RES (2)..(34): Xaa is C or S

SEQ ID NO: 48608 - protein, 35 aa, Artificial Sequence; identical to SEQ ID NO: 11457
  GFR-binding peptide
  MOD_RES (31)..(32): Xaa is C or S

SEQ ID NO: 48609 - protein, 32 aa, Artificial Sequence
  GFR-binding peptide
  MOD_RES (2)..(2): Xaa is C or S
KXSRVIMVTAKKVKPKRGVIKRIQVPRLAQPV

SEQ ID NO: 48610 - protein, 36 aa, Artificial Sequence; identical to SEQ ID NO: 11458
  GFR-binding peptide
  MOD_RES (1)..(3)..(35)..(36): Xaa is C or S

SEQ ID NO: 48611 - protein, 38 aa, Artificial Sequence
  GFR-binding peptide
  MOD_RES (2)..(4)..(35)..(36): Xaa is C or S
SXKXSKVVMVTAKKVKPTRGVIKRIQVPRLDQPVXXPS

SEQ ID NO: 48612 - protein, 34 aa, Artificial Sequence
  GFR-binding peptide
  MOD_RES (1)..(33)..(34): Xaa is C or S
XARVVMNVQVEKIVNSSDDVKAVKVSRLQTPAXX

SEQ ID NO: 48613 - protein, 33 aa, Artificial Sequence
  GFR-binding peptide
  MOD_RES (31)..(32): Xaa is C or S
SRVIMVTAKKVKPKRGVIKRIQVPRLAQPVXXP

SEQ ID NO: 48614 - protein, 39 aa, Artificial Sequence
  GFR-binding peptide
  MOD_RES (2)..(4)..(36)..(37): Xaa is C or S
HXGXSRVVMNVQVEKIVNSSDDVKAVKVSRLKTPAXXPK

SEQ ID NO: 48615 - protein, 32 aa, Artificial Sequence; identical to SEQ ID NO: 11459
  GFR-binding peptide
  MOD_RES (11)..(12)..(13)..(14)..(15): Xaa is A or G
  MOD_RES (16)..(17)..(18)..(19): Xaa is A or G or is absent

SEQ ID NO: 48616 - protein, 39 aa, Artificial Sequence; identical to SEQ ID NO: 11460
  GFR-binding peptide
  MOD_RES (2)..(35)..(36): Xaa is C or S
  MOD_RES (13)..(14)..(15)..(16)..(17): Xaa is A or G
  MOD_RES (18)..(19)..(20)..(21): Xaa is A or G or is absent

SEQ ID NO: 48617 - protein, 34 aa, Artificial Sequence; identical to SEQ ID NO: 11461
  GFR-binding peptide
  MOD_RES (31)..(32): Xaa is C or S

SEQ ID NO: 48618 - protein, 42 aa, Artificial Sequence; identical to SEQ ID NO: 11465
  GFR-binding peptide
  MOD_RES (2)..(36)..(37): Xaa is C or S
  MOD_RES (14)..(15)..(16)..(17)..(18): Xaa is A or G
  MOD_RES (19)..(20)..(21)..(22): Xaa is A or G or is absent

SEQ ID NO: 48619 - protein, 37 aa, Artificial Sequence; identical to SEQ ID NO: 11467
  GFR-binding peptide
  MOD_RES (33)..(34): Xaa is C or S
  MOD_RES (11)..(12)..(13)..(14)..(15): Xaa is A or G
  MOD_RES (16)..(17)..(18)..(19): Xaa is A or G or is absent

SEQ ID NO: 48620 - protein, 41 aa, Artificial Sequence
  GFR-binding peptide
  MOD_RES (1)..(3)..(36)..(37): Xaa is C or S
  MOD_RES (14)..(15)..(16)..(17)..(18): Xaa is A or G
  MOD_RES (19)..(20)..(21)..(22): Xaa is A or G or is absent
XKXSRVIMSMEGIXXXXXXXXXMIQITINSLAQPVXXPAAS

SEQ ID NO: 48621 - protein, 37 aa, Artificial Sequence; identical to SEQ ID NO: 18538
  GFR-binding peptide
  MOD_RES (1)..(3)..(37): Xaa is C or S
  MOD_RES (15)..(16)..(17)..(18)..(19): Xaa is A or G
  MOD_RES (20)..(21)..(22)..(23): Xaa is A or G or is absent

SEQ ID NO: 48622 - protein, 40 aa, Artificial Sequence; identical to SEQ ID NO: 18543
  GFR-binding peptide
  MOD_RES (1)..(38): Xaa is C or S
  MOD_RES (14)..(15)..(16)..(17)..(18): Xaa is A or G
  MOD_RES (19)..(20)..(21)..(22): Xaa is A or G or is absent

SEQ ID NO: 48623 - protein, 42 aa, Artificial Sequence
  GFR-binding peptide
  MOD_RES (1)..(3)..(40): Xaa is C or S
XAXELHEELRNSLQELKPKKRVYEYYLVTLPEHHVRSPQXKV

SEQ ID NO: 48624 - protein, 37 aa, Artificial Sequence; identical to SEQ ID NO: 11471
  GFR-binding peptide
  MOD_RES (33)..(34): Xaa is C or S
  MOD_RES (11)..(12)..(13)..(14)..(15): Xaa is A or G
  MOD_RES (16)..(17)..(18)..(19): Xaa is A or G or is absent

SEQ ID NO: 48625 - protein, 38 aa, Artificial Sequence; identical to SEQ ID NO: 11472
  GFR-binding peptide
  MOD_RES (1)..(35)..(36): Xaa is C or S
  MOD_RES (13)..(14)..(15)..(16)..(17): Xaa is A or G
  MOD_RES (18)..(19)..(20)..(21): Xaa is A or G or is absent

SEQ ID NO: 48626 - protein, 40 aa, Artificial Sequence
  GFR-binding peptide
  MOD_RES (1)..(35): Xaa is C or S
  MOD_RES (13)..(14)..(15)..(16)..(17): Xaa is A or G
  MOD_RES (18)..(19)..(20)..(21): Xaa is A or G or is absent
XSRVVMNVTAKKXXXXXXXXXIKRVQVPRLKTPAXTPKTV

SEQ ID NO: 48627 - protein, 36 aa, Artificial Sequence
  GFR-binding peptide
  MOD_RES (32)..(33): Xaa is C or S
GEVVMDVQVEKVVKENEDVKAMKVSRLETPVXXAKP

SEQ ID NO: 48628 - protein, 40 aa, Artificial Sequence
  GFR-binding peptide
  MOD_RES (34)..(35): Xaa is C or S
  MOD_RES (12)..(13)..(14)..(15)..(16): Xaa is A or G
  MOD_RES (17)..(18)..(19)..(20): Xaa is A or G or is absent
GEVVMEVTAKKXXXXXXXXXIKRMQVPRLETPVXXAKPIS

SEQ ID NO: 48629 - protein, 44 aa, Artificial Sequence
  GFR-binding peptide
  MOD_RES (2)..(4)..(41): Xaa is C or S
  MOD_RES (17)..(18)..(19)..(20)..(21): Xaa is A or G
  MOD_RES (22)..(23)..(24)..(25): Xaa is A or G or is absent
EXKXALHDELTNSLQEXXXXXXXXXYYLVTLPELQVQTPRXQVN

SEQ ID NO: 48630 - protein, 38 aa, Artificial Sequence
  GFR-binding peptide
  MOD_RES (1)..(3)..(35)..(36): Xaa is C or S
XGXGEVVMDVQVEKVVKENEDVKAMKVSRLETPVXXAK

SEQ ID NO: 48631 - protein, 38 aa, Artificial Sequence
  GFR-binding peptide
  MOD_RES (1)..(3)..(35)..(36): Xaa is C or S
XGXGEVVMEVQVEKVVKDYEDVKAMKVSRLETPVXXAK

SEQ ID NO: 48632 - protein, 40 aa, Artificial Sequence
  GFR-binding peptide
  MOD_RES (1)..(3)..(36)..(37): Xaa is C or S
  MOD_RES (14)..(15)..(16)..(17)..(18): Xaa is A or G
  MOD_RES (19)..(20)..(21)..(22): Xaa is A or G or is absent
XKXSKVVMVTAKKXXXXXXXXXIKRIQVPRLDQPVXXPSA

SEQ ID NO: 48633 - protein, 40 aa, Artificial Sequence
  GFR-binding peptide
  MOD_RES (34)..(34): Xaa is C or S
KNHQLFNSLQEHQGQHPKIRYYVMPLPEEETPVXELGEDN

SEQ ID NO: 48634 - protein, 40 aa, Artificial Sequence; identical to SEQ ID NO: 18547
  GFR-binding peptide
  MOD_RES (2)..(4): Xaa is C or S

SEQ ID NO: 48635 - protein, 33 aa, Artificial Sequence
  GFR-binding peptide
  MOD_RES (2)..(2): Xaa is C or S
GXARVVMNSMEGIIVNSSDDMIQVTINSLQTPA

SEQ ID NO: 48636 - protein, 42 aa, Artificial Sequence
  GFR-binding peptide
  MOD_RES (2)..(36)..(37): Xaa is C or S
  MOD_RES (14)..(15)..(16)..(17)..(18): Xaa is A or G
  MOD_RES (19)..(20)..(21)..(22): Xaa is A or G or is absent
GXARVVMNSMEGIXXXXXXXXXMIQVTINSLQTPAXXPKPVT

SEQ ID NO: 48637 - protein, 36 aa, Artificial Sequence; identical to SEQ ID NO: 18549
  GFR-binding peptide
  MOD_RES (36)..(36): Xaa is C or S
  MOD_RES (12)..(13)..(14)..(15)..(16): Xaa is A or G
  MOD_RES (17)..(18)..(19)..(20): Xaa is A or G or is absent

SEQ ID NO: 48638 - protein, 39 aa, Artificial Sequence
  GFR-binding peptide
  MOD_RES (33)..(34): Xaa is C or S
  MOD_RES (11)..(12)..(13)..(14)..(15): Xaa is A or G
  MOD_RES (16)..(17)..(18)..(19): Xaa is A or G or is absent
RVVMNSMEGIXXXXXXXXXMIQVTINSLQTPAXXPKPVT

SEQ ID NO: 48639 - protein, 33 aa, Artificial Sequence; identical to SEQ ID NO: 18551
  GFR-binding peptide

SEQ ID NO: 48640 - protein, 36 aa, Artificial Sequence
  GFR-binding peptide
  MOD_RES (2)..(4)..(35)..(36): Xaa is C or S
SXKXSRVIMSMEGIVKPKRGVMIQITINSLAQPVXX

SEQ ID NO: 48641 - protein, 34 aa, Artificial Sequence
  GFR-binding peptide
  MOD_RES (34)..(34): Xaa is C or S
  MOD_RES (12)..(13)..(14)..(15)..(16): Xaa is A or G
  MOD_RES (17)..(18)..(19)..(20): Xaa is A or G or is absent
KNHQLFNSLQEXXXXXXXXXYYVMPLPEEETPVX

SEQ ID NO: 48642 - protein, 42 aa, Artificial Sequence
  GFR-binding peptide
  MOD_RES (1)..(3)..(40): Xaa is C or S
  MOD_RES (16)..(17)..(18)..(19)..(20): Xaa is A or G
  MOD_RES (21)..(22)..(23)..(24): Xaa is A or G or is absent
XKXALHDELTNSLQEXXXXXXXXXYYVVPLPELQVQTPRXQV

SEQ ID NO: 48643 - protein, 38 aa, Artificial Sequence; identical to SEQ ID NO: 18555
  GFR-binding peptide
  MOD_RES (1)..(38): Xaa is C or S
  MOD_RES (14)..(15)..(16)..(17)..(18): Xaa is A or G
  MOD_RES (19)..(20)..(21)..(22): Xaa is A or G or is absent

SEQ ID NO: 48644 - protein, 38 aa, Artificial Sequence
  GFR-binding peptide
  MOD_RES (1)..(35)..(36): Xaa is C or S
  MOD_RES (13)..(14)..(15)..(16)..(17): Xaa is A or G
  MOD_RES (18)..(19)..(20)..(21): Xaa is A or G or is absent
XSRVVMNVQVEKXXXXXXXXXVKAVKVSRLKTPAXXPK

SEQ ID NO: 48645 - protein, 35 aa, Artificial Sequence; identical to SEQ ID NO: 11479
  GFR-binding peptide
  MOD_RES (32)..(33): Xaa is C or S

SEQ ID NO: 48646 - protein, 40 aa, Artificial Sequence; identical to SEQ ID NO: 11481
  GFR-binding peptide
  MOD_RES (2)..(4)..(35)..(36): Xaa is C or S

SEQ ID NO: 48647 - protein, 36 aa, Artificial Sequence; identical to SEQ ID NO: 18558
  GFR-binding peptide
  MOD_RES (36)..(36): Xaa is C or S

SEQ ID NO: 48648 - protein, 44 aa, Artificial Sequence
  GFR-binding peptide
  MOD_RES (2)..(4)..(38)..(39): Xaa is C or S
  MOD_RES (16)..(17)..(18)..(19)..(20): Xaa is A or G
  MOD_RES (21)..(22)..(23)..(24): Xaa is A or G or is absent
RXGXGEVVMDVTAKKXXXXXXXXXIKRMQVPRLETPVXXAKPIK

SEQ ID NO: 48649 - protein, 35 aa, Artificial Sequence
  GFR-binding peptide
  MOD_RES (2)..(2): Xaa is C or S
EXKNHQLFNSLQEHQGQHPKIRYYLMTLPEEETPV

SEQ ID NO: 48650 - protein, 38 aa, Artificial Sequence; identical to SEQ ID NO: 38267
  GFR-binding peptide
  MOD_RES (2)..(33)..(34): Xaa is C or S

SEQ ID NO: 48651 - protein, 36 aa, Artificial Sequence; identical to SEQ ID NO: 11485
  GFR-binding peptide
  MOD_RES (1)..(34)..(35): Xaa is C or S
  MOD_RES (12)..(13)..(14)..(15)..(16): Xaa is A or G
  MOD_RES (17)..(18)..(19)..(20): Xaa is A or G or is absent

SEQ ID NO: 48652 - protein, 41 aa, Artificial Sequence; identical to SEQ ID NO: 18561
  GFR-binding peptide
  MOD_RES (37)..(37): Xaa is C or S
  MOD_RES (13)..(14)..(15)..(16)..(17): Xaa is A or G
  MOD_RES (18)..(19)..(20)..(21): Xaa is A or G or is absent

SEQ ID NO: 48653 - protein, 42 aa, Artificial Sequence; identical to SEQ ID NO: 18562
  GFR-binding peptide
  MOD_RES (2)..(4)..(41): Xaa is C or S
  MOD_RES (17)..(18)..(19)..(20)..(21): Xaa is A or G
  MOD_RES (22)..(23)..(24)..(25): Xaa is A or G or is absent

SEQ ID NO: 48654 - protein, 36 aa, Artificial Sequence
  GFR-binding peptide
  MOD_RES (1)..(34)..(35): Xaa is C or S
  MOD_RES (12)..(13)..(14)..(15)..(16): Xaa is A or G
  MOD_RES (17)..(18)..(19)..(20): Xaa is A or G or is absent
XSKVVMSMEGIXXXXXXXXXMIQITINSLDQPVXXP

SEQ ID NO: 48655 - protein, 33 aa, Artificial Sequence; identical to SEQ ID NO: 11492
  GFR-binding peptide
  MOD_RES (33)..(33): Xaa is C or S
  MOD_RES (11)..(12)..(13)..(14)..(15): Xaa is A or G
  MOD_RES (16)..(17)..(18)..(19): Xaa is A or G or is absent

SEQ ID NO: 48656 - protein, 34 aa, Artificial Sequence; identical to SEQ ID NO: 11495
  GFR-binding peptide
  MOD_RES (33)..(34): Xaa is C or S
  MOD_RES (11)..(12)..(13)..(14)..(15): Xaa is A or G
  MOD_RES (16)..(17)..(18)..(19): Xaa is A or G or is absent

SEQ ID NO: 48657 - protein, 39 aa, Artificial Sequence; identical to SEQ ID NO: 11496
  GFR-binding peptide
  MOD_RES (2)..(35)..(36): Xaa is C or S
  MOD_RES (13)..(14)..(15)..(16)..(17): Xaa is A or G
  MOD_RES (18)..(19)..(20)..(21): Xaa is A or G or is absent

SEQ ID NO: 48658 - protein, 38 aa, Artificial Sequence
  GFR-binding peptide
  MOD_RES (2)..(34)..(35): Xaa is C or S
GXARVVMNVTAKKIVNSSDDIKRVQVPRLQTPAXXPKP

SEQ ID NO: 48659 - protein, 34 aa, Artificial Sequence
  GFR-binding peptide
ALHDELTNSLQEFIPKKRVIEYYVVPLPELQVQT

SEQ ID NO: 48660 - protein, 41 aa, Artificial Sequence
  GFR-binding peptide
  MOD_RES (37)..(37): Xaa is C or S
  MOD_RES (13)..(14)..(15)..(16)..(17): Xaa is A or G
  MOD_RES (18)..(19)..(20)..(21): Xaa is A or G or is absent
ALHDELTNSLQEXXXXXXXXXYYVVPLPELQVQTPRXQVNR

SEQ ID NO: 48661 - protein, 41 aa, Artificial Sequence; identical to SEQ ID NO: 18570
  GFR-binding peptide
  MOD_RES (2)..(36): Xaa is C or S

SEQ ID NO: 48662 - protein, 36 aa, Artificial Sequence
  GFR-binding peptide
  MOD_RES (1)..(35)..(36): Xaa is C or S
  MOD_RES (13)..(14)..(15)..(16)..(17): Xaa is A or G
  MOD_RES (18)..(19)..(20)..(21): Xaa is A or G or is absent
XARVVMNVQVEKXXXXXXXXXVKAVKVSRLQTPAXX

SEQ ID NO: 48663 - protein, 41 aa, Artificial Sequence; identical to SEQ ID NO: 11499
  GFR-binding peptide
  MOD_RES (2)..(4)..(36)..(37): Xaa is C or S

SEQ ID NO: 48664 - protein, 36 aa, Artificial Sequence; identical to SEQ ID NO: 11500
  GFR-binding peptide
  MOD_RES (2)..(35)..(36): Xaa is C or S
  MOD_RES (13)..(14)..(15)..(16)..(17): Xaa is A or G
  MOD_RES (18)..(19)..(20)..(21): Xaa is A or G or is absent

SEQ ID NO: 48665 - protein, 43 aa, Artificial Sequence
  GFR-binding peptide
  MOD_RES (1)..(3)..(37): Xaa is C or S
  MOD_RES (15)..(16)..(17)..(18)..(19): Xaa is A or G
  MOD_RES (20)..(21)..(22)..(23): Xaa is A or G or is absent
XGXSRVVMNVTAKKXXXXXXXXXIKRVQVPRLKTPAXTPKTVH

SEQ ID NO: 48666 - protein, 35 aa, Artificial Sequence; identical to SEQ ID NO: 18572
  GFR-binding peptide
  MOD_RES (12)..(13)..(14)..(15)..(16): Xaa is A or G
  MOD_RES (17)..(18)..(19)..(20): Xaa is A or G or is absent

SEQ ID NO: 48667 - protein, 40 aa, Artificial Sequence; identical to SEQ ID NO: 11502
  GFR-binding peptide
  MOD_RES (1)..(3)..(37)..(38): Xaa is C or S
  MOD_RES (15)..(16)..(17)..(18)..(19): Xaa is A or G
  MOD_RES (20)..(21)..(22)..(23): Xaa is A or G or is absent

SEQ ID NO: 48668 - protein, 39 aa, Artificial Sequence; identical to SEQ ID NO: 18573
  GFR-binding peptide
  MOD_RES (1)..(3): Xaa is C or S
  MOD_RES (16)..(17)..(18)..(19)..(20): Xaa is A or G
  MOD_RES (21)..(22)..(23)..(24): Xaa is A or G or is absent

SEQ ID NO: 48669 - protein, 39 aa, Artificial Sequence; identical to SEQ ID NO: 11503
  GFR-binding peptide
  MOD_RES (2)..(34)..(35): Xaa is C or S

SEQ ID NO: 48670 - protein, 39 aa, Artificial Sequence; identical to SEQ ID NO: 18574
  GFR-binding peptide
  MOD_RES (2)..(39): Xaa is C or S

SEQ ID NO: 48671 - protein, 36 aa, Artificial Sequence
  GFR-binding peptide
  MOD_RES (1)..(35)..(36): Xaa is C or S
  MOD_RES (13)..(14)..(15)..(16)..(17): Xaa is A or G
  MOD_RES (18)..(19)..(20)..(21): Xaa is A or G or is absent
XGEVVMEVQVEKXXXXXXXXXVKAMKVSRLETPVXX

SEQ ID NO: 48672 - protein, 43 aa, Artificial Sequence
  GFR-binding peptide
  MOD_RES (2)..(4)..(37)..(38): Xaa is C or S
  MOD_RES (15)..(16)..(17)..(18)..(19): Xaa is A or G
  MOD_RES (20)..(21)..(22)..(23): Xaa is A or G or is absent
SXKXSKVIMVQVEKXXXXXXXXXVKAIKVSRLDQSVXXPSASA

SEQ ID NO: 48673 - protein, 43 aa, Artificial Sequence; identical to SEQ ID NO: 11507
  GFR-binding peptide
  MOD_RES (1)..(3)..(37)..(38): Xaa is C or S
  MOD_RES (15)..(16)..(17)..(18)..(19): Xaa is A or G
  MOD_RES (20)..(21)..(22)..(23): Xaa is A or G or is absent

SEQ ID NO: 48674 - protein, 32 aa, Artificial Sequence; identical to SEQ ID NO: 11508
  GFR-binding peptide
  MOD_RES (31)..(32): Xaa is C or S

SEQ ID NO: 48675 - protein, 35 aa, Artificial Sequence; identical to SEQ ID NO: 18576
  GFR-binding peptide

SEQ ID NO: 48676 - protein, 39 aa, Artificial Sequence; identical to SEQ ID NO: 18579
  GFR-binding peptide
  MOD_RES (2)..(36): Xaa is C or S
  MOD_RES (14)..(15)..(16)..(17)..(18): Xaa is A or G
  MOD_RES (19)..(20)..(21)..(22): Xaa is A or G or is absent

SEQ ID NO: 48677 - protein, 39 aa, Artificial Sequence; identical to SEQ ID NO: 11509
  GFR-binding peptide
  MOD_RES (34)..(34): Xaa is C or S
  MOD_RES (12)..(13)..(14)..(15)..(16): Xaa is A or G
  MOD_RES (17)..(18)..(19)..(20): Xaa is A or G or is absent

SEQ ID NO: 48678 - protein, 37 aa, Artificial Sequence
  GFR-binding peptide
  MOD_RES (31)..(32): Xaa is C or S
SKVIMVQVEKIKPTKGIVKAIKVSRLDQSVXXPSASA

SEQ ID NO: 48679 - protein, 38 aa, Artificial Sequence
  GFR-binding peptide
  MOD_RES (1)..(3)..(35)..(36): Xaa is C or S
XGXSRVVMNSMEGIIVNSSDDMIQVTINSLKTPAXXPK

SEQ ID NO: 48680 - protein, 38 aa, Artificial Sequence; identical to SEQ ID NO: 11510
  GFR-binding peptide
  MOD_RES (2)..(36)..(37): Xaa is C or S
  MOD_RES (14)..(15)..(16)..(17)..(18): Xaa is A or G
  MOD_RES (19)..(20)..(21)..(22): Xaa is A or G or is absent

SEQ ID NO: 48681 - protein, 44 aa, Artificial Sequence; identical to SEQ ID NO: 11511
  GFR-binding peptide
  MOD_RES (2)..(4)..(38)..(39): Xaa is C or S
  MOD_RES (16)..(17)..(18)..(19)..(20): Xaa is A or G
  MOD_RES (21)..(22)..(23)..(24): Xaa is A or G or is absent

SEQ ID NO: 48682 - protein, 31 aa, Artificial Sequence; identical to SEQ ID NO: 11513
  GFR-binding peptide
  MOD_RES (31)..(31): Xaa is C or S

SEQ ID NO: 48683 - protein, 37 aa, Artificial Sequence
  GFR-binding peptide
  MOD_RES (33)..(34): Xaa is C or S
  MOD_RES (11)..(12)..(13)..(14)..(15): Xaa is A or G
  MOD_RES (16)..(17)..(18)..(19): Xaa is A or G or is absent
SKVIMVQVEKXXXXXXXXXVKAIKVSRLDQSVXXPSA

SEQ ID NO: 48684 - protein, 39 aa, Artificial Sequence; identical to SEQ ID NO: 18585
  GFR-binding peptide
  MOD_RES (35)..(35): Xaa is C or S
  MOD_RES (11)..(12)..(13)..(14)..(15): Xaa is A or G
  MOD_RES (16)..(17)..(18)..(19): Xaa is A or G or is absent

SEQ ID NO: 48685 - protein, 43 aa, Artificial Sequence
  GFR-binding peptide
  MOD_RES (2)..(4)..(38)..(39): Xaa is C or S
  MOD_RES (16)..(17)..(18)..(19)..(20): Xaa is A or G
  MOD_RES (21)..(22)..(23)..(24): Xaa is A or G or is absent
RXGXGEVVMEVQVEKXXXXXXXXXVKAMKVSRLETPVXXAKPI

SEQ ID NO: 48686 - protein, 42 aa, Artificial Sequence
  GFR-binding peptide
  MOD_RES (1)..(3)..(36)..(37): Xaa is C or S
  MOD_RES (14)..(15)..(16)..(17)..(18): Xaa is A or G
  MOD_RES (19)..(20)..(21)..(22): Xaa is A or G or is absent
XKXSKVIMVQVEKXXXXXXXXXVKAIKVSRLDQSVXXPSASA

SEQ ID NO: 48687 - protein, 34 aa, Artificial Sequence; identical to SEQ ID NO: 11515
  GFR-binding peptide
  MOD_RES (32)..(33): Xaa is C or S

SEQ ID NO: 48688 - protein, 36 aa, Artificial Sequence; identical to SEQ ID NO: 18586
  GFR-binding peptide

SEQ ID NO: 48689 - protein, 32 aa, Artificial Sequence; identical to SEQ ID NO: 11520
  GFR-binding peptide
  MOD_RES (11)..(12)..(13)..(14)..(15): Xaa is A or G
  MOD_RES (16)..(17)..(18)..(19): Xaa is A or G or is absent

SEQ ID NO: 48690 - protein, 41 aa, Artificial Sequence
  GFR-binding peptide
  MOD_RES (1)..(35)..(36): Xaa is C or S
  MOD_RES (13)..(14)..(15)..(16)..(17): Xaa is A or G
  MOD_RES (18)..(19)..(20)..(21): Xaa is A or G or is absent
XARVVMNVTAKKXXXXXXXXXIKRVQVPRLQTPAXXPKPVT

SEQ ID NO: 48691 - protein, 37 aa, Artificial Sequence; identical to SEQ ID NO: 11523
  GFR-binding peptide
  MOD_RES (33)..(34): Xaa is C or S
  MOD_RES (11)..(12)..(13)..(14)..(15): Xaa is A or G
  MOD_RES (16)..(17)..(18)..(19): Xaa is A or G or is absent

SEQ ID NO: 48692 - protein, 37 aa, Artificial Sequence
  GFR-binding peptide
  MOD_RES (34)..(34): Xaa is C or S
KNHQLFNSLQEHQGQHPKIRYYLMTLPEEETPVXELG

SEQ ID NO: 48693 - protein, 33 aa, Artificial Sequence
  GFR-binding peptide
  MOD_RES (12)..(13)..(14)..(15)..(16): Xaa is A or G
  MOD_RES (17)..(18)..(19)..(20): Xaa is A or G or is absent
KNHQLFNSLQEXXXXXXXXXYYVMPLPEEETPV

SEQ ID NO: 48694 - protein, 42 aa, Artificial Sequence; identical to SEQ ID NO: 18594
  GFR-binding peptide
  MOD_RES (1)..(3)..(40): Xaa is C or S

SEQ ID NO: 48695 - protein, 40 aa, Artificial Sequence
  GFR-binding peptide
  MOD_RES (2)..(35)..(36): Xaa is C or S
  MOD_RES (13)..(14)..(15)..(16)..(17): Xaa is A or G
  MOD_RES (18)..(19)..(20)..(21): Xaa is A or G or is absent
KXSKVIMVTAKKXXXXXXXXXIKRIQVPRLDQSVXXPSAS

SEQ ID NO: 48696 - protein, 33 aa, Artificial Sequence
  GFR-binding peptide
  MOD_RES (1)..(33): Xaa is C or S
XARVVMNVQVEKIVNSSDDVKAVKVSRLQTPAX

SEQ ID NO: 48697 - protein, 40 aa, Artificial Sequence; identical to SEQ ID NO: 18596
  GFR-binding peptide
  MOD_RES (36)..(36): Xaa is C or S
  MOD_RES (12)..(13)..(14)..(15)..(16): Xaa is A or G
  MOD_RES (17)..(18)..(19)..(20): Xaa is A or G or is absent

SEQ ID NO: 48698 - protein, 40 aa, Artificial Sequence; identical to SEQ ID NO: 11531
  GFR-binding peptide
  MOD_RES (2)..(4)..(38)..(39): Xaa is C or S
  MOD_RES (16)..(17)..(18)..(19)..(20): Xaa is A or G
  MOD_RES (21)..(22)..(23)..(24): Xaa is A or G or is absent

SEQ ID NO: 48699 - protein, 30 aa, Artificial Sequence
  GFR-binding peptide
SRVIMSMEGIVKPKRGVMIQITINSLAQPV

SEQ ID NO: 48700 - protein, 37 aa, Artificial Sequence; identical to SEQ ID NO: 11532
  GFR-binding peptide
  MOD_RES (2)..(4)..(37): Xaa is C or S
  MOD_RES (15)..(16)..(17)..(18)..(19): Xaa is A or G
  MOD_RES (20)..(21)..(22)..(23): Xaa is A or G or is absent

SEQ ID NO: 48701 - protein, 33 aa, Artificial Sequence
  GFR-binding peptide
  MOD_RES (32)..(32): Xaa is C or S
SRVVMNVQVEKIVNSSDDVKAVKVSRLKTPAXT

SEQ ID NO: 48702 - protein, 36 aa, Artificial Sequence
  GFR-binding peptide
  MOD_RES (2)..(33)..(34): Xaa is C or S
KXSKVIMSMEGIIKPTKGIMIQITINSLDQSVXXPS

SEQ ID NO: 48703 - protein, 37 aa, Artificial Sequence
  GFR-binding peptide
  MOD_RES (32)..(33): Xaa is C or S
GEVVMDSMEGIVVKENEDMIQMTINSLETPVXXAKPI

SEQ ID NO: 48704 - protein, 37 aa, Artificial Sequence
  GFR-binding peptide
  MOD_RES (31)..(31): Xaa is C or S
RVVMNVTAKKIVNSSDDIKRVQVPRLKTPAXTPKTVH

SEQ ID NO: 48705 - protein, 42 aa, Artificial Sequence
  GFR-binding peptide
  MOD_RES (1)..(3)..(37): Xaa is C or S
  MOD_RES (15)..(16)..(17)..(18)..(19): Xaa is A or G
  MOD_RES (20)..(21)..(22)..(23): Xaa is A or G or is absent
XGXSRVVMNVQVEKXXXXXXXXXVKAVKVSRLKTPAXTPKTV

SEQ ID NO: 48706 - protein, 33 aa, Artificial Sequence
  GFR-binding peptide
  MOD_RES (31)..(32): Xaa is C or S
EVVMDVQVEKVVKENEDVKAMKVSRLETPVXXA

SEQ ID NO: 48707 - protein, 33 aa, Artificial Sequence
  GFR-binding peptide
  MOD_RES (31)..(32): Xaa is C or S
SRVIMVQVEKVKPKRGVVKAIKVSRLAQPVXXP

SEQ ID NO: 48708 - protein, 34 aa, Artificial Sequence; identical to SEQ ID NO: 11539
  GFR-binding peptide
  MOD_RES (1)..(34): Xaa is C or S
  MOD_RES (12)..(13)..(14)..(15)..(16): Xaa is A or G
  MOD_RES (17)..(18)..(19)..(20): Xaa is A or G or is absent

SEQ ID NO: 48709 - protein, 35 aa, Artificial Sequence
  GFR-binding peptide
  MOD_RES (2)..(4): Xaa is C or S
HXGXSRVVMNSMEGIIVNSSDDMIQVTINSLKTPA

SEQ ID NO: 48710 - protein, 40 aa, Artificial Sequence; identical to SEQ ID NO: 11541
  GFR-binding peptide
  MOD_RES (1)..(3)..(34)..(35): Xaa is C or S

SEQ ID NO: 48711 - protein, 38 aa, Artificial Sequence
  GFR-binding peptide
  MOD_RES (1)..(35): Xaa is C or S
XKNHQLFNSLQEHQGQHPKIRYYLMTLPEEETPVXELG

SEQ ID NO: 48712 - protein, 32 aa, Artificial Sequence
  GFR-binding peptide
  MOD_RES (31)..(32): Xaa is C or S
SKVIMVQVEKIKPTKGIVKAIKVSRLDQSVXX

SEQ ID NO: 48713 - protein, 33 aa, Artificial Sequence; identical to SEQ ID NO: 11542
  GFR-binding peptide
  MOD_RES (2)..(33): Xaa is C or S

SEQ ID NO: 48714 - protein, 35 aa, Artificial Sequence; identical to SEQ ID NO: 18605
  GFR-binding peptide
  MOD_RES (1)..(35): Xaa is C or S

SEQ ID NO: 48715 - protein, 36 aa, Artificial Sequence
  GFR-binding peptide
  MOD_RES (35)..(35): Xaa is C or S
HEELRNSLQELKPKKRVYEYYVVPLPEHHVRSPQXK

SEQ ID NO: 48716 - protein, 38 aa, Artificial Sequence; identical to SEQ ID NO: 38348
  GFR-binding peptide
  MOD_RES (2)..(35)..(36): Xaa is C or S
  MOD_RES (13)..(14)..(15)..(16)..(17): Xaa is A or G
  MOD_RES (18)..(19)..(20)..(21): Xaa is A or G or is absent

SEQ ID NO: 48717 - protein, 32 aa, Artificial Sequence; identical to SEQ ID NO: 11543
  GFR-binding peptide
  MOD_RES (2)..(2): Xaa is C or S

SEQ ID NO: 48718 - protein, 43 aa, Artificial Sequence; identical to SEQ ID NO: 18608
  GFR-binding peptide
  MOD_RES (2)..(39): Xaa is C or S

SEQ ID NO: 48719 - protein, 36 aa, Artificial Sequence
  GFR-binding peptide
  MOD_RES (33)..(34): Xaa is C or S
  MOD_RES (11)..(12)..(13)..(14)..(15): Xaa is A or G
  MOD_RES (16)..(17)..(18)..(19): Xaa is A or G or is absent
SKVVMVTAKKXXXXXXXXXIKRIQVPRLDQPVXXPS

SEQ ID NO: 48720 - protein, 41 aa, Artificial Sequence; identical to SEQ ID NO: 18609
  GFR-binding peptide
  MOD_RES (1)..(3)..(40): Xaa is C or S

SEQ ID NO: 48721 - protein, 38 aa, Artificial Sequence
  GFR-binding peptide
  MOD_RES (2)..(2): Xaa is C or S
  MOD_RES (15)..(16)..(17)..(18)..(19): Xaa is A or G
  MOD_RES (20)..(21)..(22)..(23): Xaa is A or G or is absent
KXALHDELTNSLQEXXXXXXXXXYYVVPLPELQVQTPR

SEQ ID NO: 48722 - protein, 34 aa, Artificial Sequence; identical to SEQ ID NO: 11547
  GFR-binding peptide
  MOD_RES (1)..(32)..(33): Xaa is C or S

SEQ ID NO: 48723 - protein, 37 aa, Artificial Sequence; identical to SEQ ID NO: 18611
  GFR-binding peptide
  MOD_RES (2)..(36): Xaa is C or S

SEQ ID NO: 48724 - protein, 38 aa, Artificial Sequence
  GFR-binding peptide
  MOD_RES (1)..(3): Xaa is C or S
XAXELHEELRNSLQELKPKKRVYEYYVVPLPEHHVRSP

SEQ ID NO: 48725 - protein, 36 aa, Artificial Sequence
  GFR-binding peptide
ALHDELTNSLQEFIPKKRVIEYYLVTLPELQVQTPR

SEQ ID NO: 48726 - protein, 37 aa, Artificial Sequence; identical to SEQ ID NO: 11549
  GFR-binding peptide
  MOD_RES (31)..(32): Xaa is C or S

SEQ ID NO: 48727 - protein, 37 aa, Artificial Sequence; identical to SEQ ID NO: 11550
  GFR-binding peptide
  MOD_RES (32)..(33): Xaa is C or S

SEQ ID NO: 48728 - protein, 33 aa, Artificial Sequence
  GFR-binding peptide
  MOD_RES (1)..(33): Xaa is C or S
XSRVVMNVTAKKIVNSSDDIKRVQVPRLKTPAX

SEQ ID NO: 48729 - protein, 44 aa, Artificial Sequence; identical to SEQ ID NO: 18615
  GFR-binding peptide
  MOD_RES (1)..(3)..(40): Xaa is C or S

SEQ ID NO: 48730 - protein, 33 aa, Artificial Sequence
  GFR-binding peptide
  MOD_RES (1)..(1): Xaa is C or S
  MOD_RES (12)..(13)..(14)..(15)..(16): Xaa is A or G
  MOD_RES (17)..(18)..(19)..(20): Xaa is A or G or is absent
XSKVIMSMEGIXXXXXXXXXMIQITINSLDQSV

SEQ ID NO: 48731 - protein, 39 aa, Artificial Sequence; identical to SEQ ID NO: 11552
  GFR-binding peptide
  MOD_RES (1)..(35)..(36): Xaa is C or S
  MOD_RES (13)..(14)..(15)..(16)..(17): Xaa is A or G
  MOD_RES (18)..(19)..(20)..(21): Xaa is A or G or is absent

SEQ ID NO: 48732 - protein, 32 aa, Artificial Sequence; identical to SEQ ID NO: 11554
  GFR-binding peptide
  MOD_RES (32)..(32): Xaa is C or S

SEQ ID NO: 48733 - protein, 38 aa, Artificial Sequence
  GFR-binding peptide
  MOD_RES (36)..(36): Xaa is C or S
  MOD_RES (12)..(13)..(14)..(15)..(16): Xaa is A or G
  MOD_RES (17)..(18)..(19)..(20): Xaa is A or G or is absent
LHEELRNSLQEXXXXXXXXXYYLVTLPEHHVRSPQXKV

SEQ ID NO: 48734 - protein, 42 aa, Artificial Sequence; identical to SEQ ID NO: 18616
  GFR-binding peptide
  MOD_RES (2)..(36): Xaa is C or S
  MOD_RES (14)..(15)..(16)..(17)..(18): Xaa is A or G
  MOD_RES (19)..(20)..(21)..(22): Xaa is A or G or is absent

SEQ ID NO: 48735 - protein, 35 aa, Artificial Sequence
  GFR-binding peptide
ELHEELRNSLQELKPKKRVYEYYLVTLPEHHVRSP

SEQ ID NO: 48736 - protein, 36 aa, Artificial Sequence; identical to SEQ ID NO: 11557
  GFR-binding peptide
  MOD_RES (2)..(4)..(35)..(36): Xaa is C or S

SEQ ID NO: 48737 - protein, 44 aa, Artificial Sequence; identical to SEQ ID NO: 11558
  GFR-binding peptide
  MOD_RES (2)..(4)..(38)..(39): Xaa is C or S
  MOD_RES (16)..(17)..(18)..(19)..(20): Xaa is A or G
  MOD_RES (21)..(22)..(23)..(24): Xaa is A or G or is absent

SEQ ID NO: 48738 - protein, 31 aa, Artificial Sequence
  GFR-binding peptide
SRVVMNVTAKKIVNSSDDIKRVQVPRLKTPA

SEQ ID NO: 48739 - protein, 38 aa, Artificial Sequence
  GFR-binding peptide
  MOD_RES (34)..(35): Xaa is C or S
  MOD_RES (12)..(13)..(14)..(15)..(16): Xaa is A or G
  MOD_RES (17)..(18)..(19)..(20): Xaa is A or G or is absent
GEVVMEVQVEKXXXXXXXXXVKAMKVSRLETPVXXAKP

SEQ ID NO: 48740 - protein, 39 aa, Artificial Sequence; identical to SEQ ID NO: 18618
  GFR-binding peptide
  MOD_RES (2)..(4): Xaa is C or S
  MOD_RES (17)..(18)..(19)..(20)..(21): Xaa is A or G
  MOD_RES (22)..(23)..(24)..(25): Xaa is A or G or is absent

SEQ ID NO: 48741 - protein, 38 aa, Artificial Sequence
  GFR-binding peptide
  MOD_RES (1)..(35): Xaa is C or S
  MOD_RES (13)..(14)..(15)..(16)..(17): Xaa is A or G
  MOD_RES (18)..(19)..(20)..(21): Xaa is A or G or is absent
XKNHQLFNSLQEXXXXXXXXXYYLMTLPEEETPVXELG

SEQ ID NO: 48742 - protein, 36 aa, Artificial Sequence; identical to SEQ ID NO: 11561
  GFR-binding peptide
  MOD_RES (2)..(36): Xaa is C or S
  MOD_RES (14)..(15)..(16)..(17)..(18): Xaa is A or G
  MOD_RES (19)..(20)..(21)..(22): Xaa is A or G or is absent

SEQ ID NO: 48743 - protein, 37 aa, Artificial Sequence; identical to SEQ ID NO: 18619
  GFR-binding peptide
  MOD_RES (35)..(35): Xaa is C or S

SEQ ID NO: 48744 - protein, 42 aa, Artificial Sequence
  GFR-binding peptide
  MOD_RES (2)..(4)..(36)..(37): Xaa is C or S
RXGXGEVVMEVQVEKVVKDYEDVKAMKVSRLETPVXXAKPIS

SEQ ID NO: 48745 - protein, 38 aa, Artificial Sequence
  GFR-binding peptide
  MOD_RES (2)..(34)..(35): Xaa is C or S
GXSRVVMNVTAKKIVNSSDDIKRVQVPRLKTPAXXPKP

SEQ ID NO: 48746 - protein, 38 aa, Artificial Sequence
  GFR-binding peptide
  MOD_RES (2)..(33)..(34): Xaa is C or S
KXSRVIMVTAKKVKPKRGVIKRIQVPRLAQPVXXPAAS

SEQ ID NO: 48747 - protein, 41 aa, Artificial Sequence
  GFR-binding peptide
  MOD_RES (1)..(3)..(40): Xaa is C or S
  MOD_RES (16)..(17)..(18)..(19)..(20): Xaa is A or G
  MOD_RES (21)..(22)..(23)..(24): Xaa is A or G or is absent
XAXELHEELRNSLQEXXXXXXXXXYYLVTLPEHHVRSPQXK

SEQ ID NO: 48748 - protein, 36 aa, Artificial Sequence
  GFR-binding peptide
  MOD_RES (34)..(35): Xaa is C or S
  MOD_RES (12)..(13)..(14)..(15)..(16): Xaa is A or G
  MOD_RES (17)..(18)..(19)..(20): Xaa is A or G or is absent
GEVVMESMEGIXXXXXXXXXMIQMTINSLETPVXXA

SEQ ID NO: 48749 - protein, 37 aa, Artificial Sequence; identical to SEQ ID NO: 11564
  GFR-binding peptide
  MOD_RES (1)..(3)..(35)..(36): Xaa is C or S

SEQ ID NO: 48750 - protein, 36 aa, Artificial Sequence
  GFR-binding peptide
  MOD_RES (35)..(35): Xaa is C or S
HEELRNSLQELKPKKRVYEYYLVTLPEHHVRSPQXK

SEQ ID NO: 48751 - protein, 43 aa, Artificial Sequence; identical to SEQ ID NO: 18623
  GFR-binding peptide
  MOD_RES (2)..(4)..(41): Xaa is C or S
  MOD_RES (17)..(18)..(19)..(20)..(21): Xaa is A or G
  MOD_RES (22)..(23)..(24)..(25): Xaa is A or G or is absent

SEQ ID NO: 48752 - protein, 41 aa, Artificial Sequence; identical to SEQ ID NO: 18625
  GFR-binding peptide
  MOD_RES (2)..(39): Xaa is C or S

SEQ ID NO: 48753 - protein, 32 aa, Artificial Sequence; identical to SEQ ID NO: 11566
  GFR-binding peptide
  MOD_RES (11)..(12)..(13)..(14)..(15): Xaa is A or G
  MOD_RES (16)..(17)..(18)..(19): Xaa is A or G or is absent

SEQ ID NO: 48754 - protein, 40 aa, Artificial Sequence
  GFR-binding peptide
  MOD_RES (36)..(36): Xaa is C or S
LHEELRNSLQELKPKKRVYEYYVVPLPEHHVRSPQXKVSS

SEQ ID NO: 48755 - protein, 37 aa, Artificial Sequence; identical to SEQ ID NO: 11567
  GFR-binding peptide
  MOD_RES (2)..(33)..(34): Xaa is C or S

SEQ ID NO: 48756 - protein, 38 aa, Artificial Sequence
  GFR-binding peptide
  MOD_RES (1)..(35)..(36): Xaa is C or S
  MOD_RES (13)..(14)..(15)..(16)..(17): Xaa is A or G
  MOD_RES (18)..(19)..(20)..(21): Xaa is A or G or is absent
XGEVVMDVQVEKXXXXXXXXXVKAMKVSRLETPVXXAK

SEQ ID NO: 48757 - protein, 41 aa, Artificial Sequence; identical to SEQ ID NO: 18626
  GFR-binding peptide
  MOD_RES (2)..(4)..(38): Xaa is C or S

SEQ ID NO: 48758 - protein, 39 aa, Artificial Sequence
  GFR-binding peptide
  MOD_RES (1)..(3)..(35)..(36): Xaa is C or S
XGXGEVVMDVQVEKVVKENEDVKAMKVSRLETPVXXAKP

SEQ ID NO: 48759 - protein, 36 aa, Artificial Sequence
  GFR-binding peptide
  MOD_RES (33)..(34): Xaa is C or S
  MOD_RES (11)..(12)..(13)..(14)..(15): Xaa is A or G
  MOD_RES (16)..(17)..(18)..(19): Xaa is A or G or is absent
SKVVMVQVEKXXXXXXXXXVKAIKVSRLDQPVXXPS

SEQ ID NO: 48760 - protein, 36 aa, Artificial Sequence
  GFR-binding peptide
  MOD_RES (1)..(3)..(35)..(36): Xaa is C or S
XGXGEVVMESMEGIVVKDYEDMIQMTINSLETPVXX

SEQ ID NO: 48761 - protein, 33 aa, Artificial Sequence; identical to SEQ ID NO: 11568
  GFR-binding peptide
  MOD_RES (33)..(33): Xaa is C or S
  MOD_RES (11)..(12)..(13)..(14)..(15): Xaa is A or G
  MOD_RES (16)..(17)..(18)..(19): Xaa is A or G or is absent

SEQ ID NO: 48762 - protein, 33 aa, Artificial Sequence; identical to SEQ ID NO: 38396
  GFR-binding peptide
  MOD_RES (33)..(33): Xaa is C or S
  MOD_RES (11)..(12)..(13)..(14)..(15): Xaa is A or G
  MOD_RES (16)..(17)..(18)..(19): Xaa is A or G or is absent

SEQ ID NO: 48763 - protein, 37 aa, Artificial Sequence
  GFR-binding peptide
  MOD_RES (2)..(4)..(36)..(37): Xaa is C or S
HXGXARVVMNVQVEKIVNSSDDVKAVKVSRLQTPAXX

SEQ ID NO: 48764 - protein, 33 aa, Artificial Sequence; identical to SEQ ID NO: 11570
  GFR-binding peptide
  MOD_RES (33)..(33): Xaa is C or S
  MOD_RES (11)..(12)..(13)..(14)..(15): Xaa is A or G
  MOD_RES (16)..(17)..(18)..(19): Xaa is A or G or is absent

SEQ ID NO: 48765 - protein, 38 aa, Artificial Sequence; identical to SEQ ID NO: 11571
  GFR-binding peptide
  MOD_RES (2)..(4)..(35)..(36): Xaa is C or S

SEQ ID NO: 48766 - protein, 37 aa, Artificial Sequence
  GFR-binding peptide
  MOD_RES (33)..(34): Xaa is C or S
  MOD_RES (11)..(12)..(13)..(14)..(15): Xaa is A or G
  MOD_RES (16)..(17)..(18)..(19): Xaa is A or G or is absent
SKVVMSMEGIXXXXXXXXXMIQITINSLDQPVXXPSA

SEQ ID NO: 48767 - protein, 36 aa, Artificial Sequence
  GFR-binding peptide
  MOD_RES (1)..(33): Xaa is C or S
XSRVVMNVQVEKIVNSSDDVKAVKVSRLKTPAXTPK

SEQ ID NO: 48768 - protein, 38 aa, Artificial Sequence; identical to SEQ ID NO: 18634
  GFR-binding peptide
  MOD_RES (1)..(3)..(37): Xaa is C or S
  MOD_RES (15)..(16)..(17)..(18)..(19): Xaa is A or G
  MOD_RES (20)..(21)..(22)..(23): Xaa is A or G or is absent

SEQ ID NO: 48769 - protein, 38 aa, Artificial Sequence
  GFR-binding peptide
  MOD_RES (1)..(35)..(36): Xaa is C or S
  MOD_RES (13)..(14)..(15)..(16)..(17): Xaa is A or G
  MOD_RES (18)..(19)..(20)..(21): Xaa is A or G or is absent
XARVVMNSMEGIXXXXXXXXXMIQVTINSLQTPAXXPK

SEQ ID NO: 48770 - protein, 39 aa, Artificial Sequence
  GFR-binding peptide
  MOD_RES (2)..(39): Xaa is C or S
AXELHEELRNSLQELKPKKRVYEYYVVPLPEHHVRSPQX

SEQ ID NO: 48771 - protein, 35 aa, Artificial Sequence; identical to SEQ ID NO: 18638
  GFR-binding peptide
  MOD_RES (12)..(13)..(14)..(15)..(16): Xaa is A or G
  MOD_RES (17)..(18)..(19)..(20): Xaa is A or G or is absent

SEQ ID NO: 48772 - protein, 36 aa, Artificial Sequence
  GFR-binding peptide
  MOD_RES (1)..(35)..(36): Xaa is C or S
  MOD_RES (13)..(14)..(15)..(16)..(17): Xaa is A or G
  MOD_RES (18)..(19)..(20)..(21): Xaa is A or G or is absent
XGEVVMDSMEGIXXXXXXXXXMIQMTINSLETPVXX

SEQ ID NO: 48773 - protein, 40 aa, Artificial Sequence; identical to SEQ ID NO: 11576
  GFR-binding peptide
  MOD_RES (2)..(4)..(37)..(38): Xaa is C or S
  MOD_RES (15)..(16)..(17)..(18)..(19): Xaa is A or G
  MOD_RES (20)..(21)..(22)..(23): Xaa is A or G or is absent

SEQ ID NO: 48774 - protein, 43 aa, Artificial Sequence; identical to SEQ ID NO: 18640
  GFR-binding peptide
  MOD_RES (1)..(3)..(40): Xaa is C or S
  MOD_RES (16)..(17)..(18)..(19)..(20): Xaa is A or G
  MOD_RES (21)..(22)..(23)..(24): Xaa is A or G or is absent

SEQ ID NO: 48775 - protein, 43 aa, Artificial Sequence
  GFR-binding peptide
  MOD_RES (1)..(3)..(37): Xaa is C or S
  MOD_RES (15)..(16)..(17)..(18)..(19): Xaa is A or G
  MOD_RES (20)..(21)..(22)..(23): Xaa is A or G or is absent
XGXSRVVMNSMEGIXXXXXXXXXMIQVTINSLKTPAXTPKTVH

SEQ ID NO: 48776 - protein, 33 aa, Artificial Sequence
  GFR-binding peptide
  MOD_RES (12)..(13)..(14)..(15)..(16): Xaa is A or G
  MOD_RES (17)..(18)..(19)..(20): Xaa is A or G or is absent
SRVVMNSMEGIXXXXXXXXXMIQVTINSLKTPA

SEQ ID NO: 48777 - protein, 41 aa, Artificial Sequence
  GFR-binding peptide
  MOD_RES (2)..(4)..(36)..(37): Xaa is C or S
HXGXSRVVMNSMEGIIVNSSDDMIQVTINSLKTPAXXPKPV

SEQ ID NO: 48778 - protein, 41 aa, Artificial Sequence
  GFR-binding peptide
  MOD_RES (2)..(36)..(37): Xaa is C or S
  MOD_RES (14)..(15)..(16)..(17)..(18): Xaa is A or G
  MOD_RES (19)..(20)..(21)..(22): Xaa is A or G or is absent
GXGEVVMEVTAKKXXXXXXXXXIKRMQVPRLETPVXXAKPI

SEQ ID NO: 48779 - protein, 38 aa, Artificial Sequence; identical to SEQ ID NO: 18644
  GFR-binding peptide
  MOD_RES (2)..(36): Xaa is C or S

SEQ ID NO: 48780 - protein, 35 aa, Artificial Sequence
  GFR-binding peptide
  MOD_RES (1)..(33): Xaa is C or S
XSRVVMNVTAKKIVNSSDDIKRVQVPRLKTPAXTP

SEQ ID NO: 48781 - protein, 37 aa, Artificial Sequence
  GFR-binding peptide
  MOD_RES (36)..(36): Xaa is C or S
LHDELTNSLQEFIPKKRVIEYYLVTLPELQVQTPRXQ

SEQ ID NO: 48782 - protein, 38 aa, Artificial Sequence; identical to SEQ ID NO: 11582
  GFR-binding peptide
  MOD_RES (2)..(4)..(36)..(37): Xaa is C or S

SEQ ID NO: 48783 - protein, 32 aa, Artificial Sequence
  GFR-binding peptide
  MOD_RES (11)..(12)..(13)..(14)..(15): Xaa is A or G
  MOD_RES (16)..(17)..(18)..(19): Xaa is A or G or is absent
RVVMNSMEGIXXXXXXXXXMIQVTINSLQTPA

SEQ ID NO: 48784 - protein, 39 aa, Artificial Sequence; identical to SEQ ID NO: 11584
  GFR-binding peptide
  MOD_RES (2)..(4)..(36): Xaa is C or S

SEQ ID NO: 48785 - protein, 37 aa, Artificial Sequence
  GFR-binding peptide
  MOD_RES (1)..(3)..(35)..(36): Xaa is C or S
XGXGEVVMESMEGIVVKDYEDMIQMTINSLETPVXXA

SEQ ID NO: 48786 - protein, 40 aa, Artificial Sequence; identical to SEQ ID NO: 11585
  GFR-binding peptide
  MOD_RES (1)..(3)..(37)..(38): Xaa is C or S
  MOD_RES (15)..(16)..(17)..(18)..(19): Xaa is A or G
  MOD_RES (20)..(21)..(22)..(23): Xaa is A or G or is absent

SEQ ID NO: 48787 - protein, 42 aa, Artificial Sequence
  GFR-binding peptide
  MOD_RES (1)..(3)..(37)..(38): Xaa is C or S
  MOD_RES (15)..(16)..(17)..(18)..(19): Xaa is A or G
  MOD_RES (20)..(21)..(22)..(23): Xaa is A or G or is absent
XGXGEVVMDVQVEKXXXXXXXXXVKAMKVSRLETPVXXAKPI

SEQ ID NO: 48788 - protein, 38 aa, Artificial Sequence; identical to SEQ ID NO: 11588
  GFR-binding peptide
  MOD_RES (1)..(3)..(36)..(37): Xaa is C or S
  MOD_RES (14)..(15)..(16)..(17)..(18): Xaa is A or G
  MOD_RES (19)..(20)..(21)..(22): Xaa is A or G or is absent

SEQ ID NO: 48789 - protein, 34 aa, Artificial Sequence; identical to SEQ ID NO: 11589
  GFR-binding peptide
  MOD_RES (34)..(34): Xaa is C or S
  MOD_RES (12)..(13)..(14)..(15)..(16): Xaa is A or G
  MOD_RES (17)..(18)..(19)..(20): Xaa is A or G or is absent

SEQ ID NO: 48790 - protein, 41 aa, Artificial Sequence; identical to SEQ ID NO: 18650
  GFR-binding peptide
  MOD_RES (2)..(4)..(38): Xaa is C or S
  MOD_RES (16)..(17)..(18)..(19)..(20): Xaa is A or G
  MOD_RES (21)..(22)..(23)..(24): Xaa is A or G or is absent

SEQ ID NO: 48791 - protein, 41 aa, Artificial Sequence; identical to SEQ ID NO: 18651
  GFR-binding peptide
  MOD_RES (2)..(39): Xaa is C or S
  MOD_RES (15)..(16)..(17)..(18)..(19): Xaa is A or G
  MOD_RES (20)..(21)..(22)..(23): Xaa is A or G or is absent

SEQ ID NO: 48792 - protein, 41 aa, Artificial Sequence
  GFR-binding peptide
  MOD_RES (1)..(35)..(36): Xaa is C or S
  MOD_RES (13)..(14)..(15)..(16)..(17): Xaa is A or G
  MOD_RES (18)..(19)..(20)..(21): Xaa is A or G or is absent
XGEVVMDVTAKKXXXXXXXXXIKRMQVPRLETPVXXAKPIK

SEQ ID NO: 48793 - protein, 34 aa, Artificial Sequence; identical to SEQ ID NO: 11591
  GFR-binding peptide
  MOD_RES (1)..(32)..(33): Xaa is C or S

SEQ ID NO: 48794 - protein, 35 aa, Artificial Sequence; identical to SEQ ID NO: 18652
  GFR-binding peptide
  MOD_RES (1)..(35): Xaa is C or S
  MOD_RES (13)..(14)..(15)..(16)..(17): Xaa is A or G
  MOD_RES (18)..(19)..(20)..(21): Xaa is A or G or is absent

SEQ ID NO: 48795 - protein, 41 aa, Artificial Sequence; identical to SEQ ID NO: 11593
  GFR-binding peptide
  MOD_RES (2)..(4)..(36): Xaa is C or S

SEQ ID NO: 48796 - protein, 39 aa, Artificial Sequence
  GFR-binding peptide
  MOD_RES (2)..(4)..(36): Xaa is C or S
HXGXSRVVMNVTAKKIVNSSDDIKRVQVPRLKTPAXTPK

SEQ ID NO: 48797 - protein, 37 aa, Artificial Sequence
  GFR-binding peptide
  MOD_RES (1)..(3)..(37): Xaa is C or S
  MOD_RES (15)..(16)..(17)..(18)..(19): Xaa is A or G
  MOD_RES (20)..(21)..(22)..(23): Xaa is A or G or is absent
XGXGEVVMDSMEGIXXXXXXXXXMIQMTINSLETPVX

SEQ ID NO: 48798 - protein, 37 aa, Artificial Sequence
  GFR-binding peptide
  MOD_RES (1)..(35)..(36): Xaa is C or S
  MOD_RES (13)..(14)..(15)..(16)..(17): Xaa is A or G
  MOD_RES (18)..(19)..(20)..(21): Xaa is A or G or is absent
XARVVMNVQVEKXXXXXXXXXVKAVKVSRLQTPAXXP

SEQ ID NO: 48799 - protein, 34 aa, Artificial Sequence; identical to SEQ ID NO: 11596
  GFR-binding peptide
  MOD_RES (1)..(1): Xaa is C or S
  MOD_RES (13)..(14)..(15)..(16)..(17): Xaa is A or G
  MOD_RES (18)..(19)..(20)..(21): Xaa is A or G or is absent

SEQ ID NO: 48800 - protein, 37 aa, Artificial Sequence
  GFR-binding peptide
  MOD_RES (2)..(4): Xaa is C or S
  MOD_RES (16)..(17)..(18)..(19)..(20): Xaa is A or G
  MOD_RES (21)..(22)..(23)..(24): Xaa is A or G or is absent
HXGXARVVMNVQVEKXXXXXXXXXVKAVKVSRLQTPA

SEQ ID NO: 48801 - protein, 32 aa, Artificial Sequence
  GFR-binding peptide
  MOD_RES (31)..(31): Xaa is C or S
RVVMNSMEGIIVNSSDDMIQVTINSLKTPAXT

SEQ ID NO: 48802 - protein, 43 aa, Artificial Sequence
  GFR-binding peptide
  MOD_RES (1)..(3)..(37): Xaa is C or S
XEXKNHQLFNSLQEHQGQHPKIRYYLMTLPEEETPVXELGEDN

SEQ ID NO: 48803 - protein, 37 aa, Artificial Sequence; identical to SEQ ID NO: 18656
  GFR-binding peptide
  MOD_RES (2)..(2): Xaa is C or S

SEQ ID NO: 48804 - protein, 39 aa, Artificial Sequence
  GFR-binding peptide
  MOD_RES (2)..(4): Xaa is C or S
EXKXALHDELTNSLQEFIPKKRVIEYYLVTLPELQVQTP

SEQ ID NO: 48805 - protein, 42 aa, Artificial Sequence
  GFR-binding peptide
  MOD_RES (1)..(3)..(36)..(37): Xaa is C or S
  MOD_RES (14)..(15)..(16)..(17)..(18): Xaa is A or G
  MOD_RES (19)..(20)..(21)..(22): Xaa is A or G or is absent
XKXSRVIMVQVEKXXXXXXXXXVKAIKVSRLAQPVXXPAASA

SEQ ID NO: 48806 - protein, 38 aa, Artificial Sequence
  GFR-binding peptide
  MOD_RES (33)..(34): Xaa is C or S
  MOD_RES (11)..(12)..(13)..(14)..(15): Xaa is A or G
  MOD_RES (16)..(17)..(18)..(19): Xaa is A or G or is absent
RVVMNSMEGIXXXXXXXXXMIQVTINSLQTPAXXPKPV

SEQ ID NO: 48807 - protein, 36 aa, Artificial Sequence
  GFR-binding peptide
  MOD_RES (1)..(1): Xaa is C or S
  MOD_RES (14)..(15)..(16)..(17)..(18): Xaa is A or G
  MOD_RES (19)..(20)..(21)..(22): Xaa is A or G or is absent
XALHDELTNSLQEXXXXXXXXXYYVVPLPELQVQTP

SEQ ID NO: 48808 - protein, 37 aa, Artificial Sequence
  GFR-binding peptide
  MOD_RES (1)..(3)..(35)..(36): Xaa is C or S
XGXGEVVMDSMEGIVVKENEDMIQMTINSLETPVXXA

SEQ ID NO: 48809 - protein, 40 aa, Artificial Sequence; identical to SEQ ID NO: 11601
  GFR-binding peptide
  MOD_RES (1)..(35)..(36): Xaa is C or S
  MOD_RES (13)..(14)..(15)..(16)..(17): Xaa is A or G
  MOD_RES (18)..(19)..(20)..(21): Xaa is A or G or is absent

SEQ ID NO: 48810 - protein, 40 aa, Artificial Sequence
  GFR-binding peptide
  MOD_RES (34)..(35): Xaa is C or S
  MOD_RES (12)..(13)..(14)..(15)..(16): Xaa is A or G
  MOD_RES (17)..(18)..(19)..(20): Xaa is A or G or is absent
GEVVMDVTAKKXXXXXXXXXIKRMQVPRLETPVXXAKPIK

SEQ ID NO: 48811 - protein, 41 aa, Artificial Sequence
  GFR-binding peptide
  MOD_RES (37)..(37): Xaa is C or S
  MOD_RES (13)..(14)..(15)..(16)..(17): Xaa is A or G
  MOD_RES (18)..(19)..(20)..(21): Xaa is A or G or is absent
ELHEELRNSLQEXXXXXXXXXYYLVTLPEHHVRSPQXKVSS

SEQ ID NO: 48812 - protein, 41 aa, Artificial Sequence; identical to SEQ ID NO: 18661
  GFR-binding peptide
  MOD_RES (1)..(38): Xaa is C or S

SEQ ID NO: 48813 - protein, 41 aa, Artificial Sequence; identical to SEQ ID NO: 18662
  GFR-binding peptide
  MOD_RES (1)..(3)..(37): Xaa is C or S

SEQ ID NO: 48814 - protein, 39 aa, Artificial Sequence
  GFR-binding peptide
  MOD_RES (34)..(35): Xaa is C or S
  MOD_RES (12)..(13)..(14)..(15)..(16): Xaa is A or G
  MOD_RES (17)..(18)..(19)..(20): Xaa is A or G or is absent
SRVVMNSMEGIXXXXXXXXXMIQVTINSLKTPAXXPKPV

SEQ ID NO: 48815 - protein, 35 aa, Artificial Sequence
  GFR-binding peptide
  MOD_RES (31)..(32): Xaa is C or S
SKVVMSMEGIVKPTRGVMIQITINSLDQPVXXPSA

SEQ ID NO: 48816 - protein, 41 aa, Artificial Sequence
  GFR-binding peptide
  MOD_RES (2)..(35)..(36): Xaa is C or S
  MOD_RES (13)..(14)..(15)..(16)..(17): Xaa is A or G
  MOD_RES (18)..(19)..(20)..(21): Xaa is A or G or is absent
KXSRVIMVTAKKXXXXXXXXXIKRIQVPRLAQPVXXPAASA

SEQ ID NO: 48817 - protein, 36 aa, Artificial Sequence; identical to SEQ ID NO: 11605
  GFR-binding peptide
  MOD_RES (1)..(3)..(35)..(36): Xaa is C or S

SEQ ID NO: 48818 - protein, 34 aa, Artificial Sequence; identical to SEQ ID NO: 11606
  GFR-binding peptide
  MOD_RES (2)..(34): Xaa is C or S

SEQ ID NO: 48819 - protein, 39 aa, Artificial Sequence; identical to SEQ ID NO: 18668
  GFR-binding peptide
  MOD_RES (36)..(36): Xaa is C or S

SEQ ID NO: 48820 - protein, 32 aa, Artificial Sequence; identical to SEQ ID NO: 18669
  GFR-binding peptide
  MOD_RES (11)..(12)..(13)..(14)..(15): Xaa is A or G
  MOD_RES (16)..(17)..(18)..(19): Xaa is A or G or is absent

SEQ ID NO: 48821 - protein, 31 aa, Artificial Sequence
  GFR-binding peptide
  MOD_RES (31)..(31): Xaa is C or S
SKVIMVQVEKIKPTKGIVKAIKVSRLDQSVX

SEQ ID NO: 48822 - protein, 35 aa, Artificial Sequence; identical to SEQ ID NO: 11608
  GFR-binding peptide
  MOD_RES (34)..(35): Xaa is C or S
  MOD_RES (12)..(13)..(14)..(15)..(16): Xaa is A or G
  MOD_RES (17)..(18)..(19)..(20): Xaa is A or G or is absent

SEQ ID NO: 48823 - protein, 34 aa, Artificial Sequence; identical to SEQ ID NO: 18673
  GFR-binding peptide
  MOD_RES (1)..(1): Xaa is C or S
  MOD_RES (13)..(14)..(15)..(16)..(17): Xaa is A or G
  MOD_RES (18)..(19)..(20)..(21): Xaa is A or G or is absent

SEQ ID NO: 48824 - protein, 37 aa, Artificial Sequence; identical to SEQ ID NO: 11609
  GFR-binding peptide
  MOD_RES (2)..(4)..(37): Xaa is C or S
  MOD_RES (15)..(16)..(17)..(18)..(19): Xaa is A or G
  MOD_RES (20)..(21)..(22)..(23): Xaa is A or G or is absent

SEQ ID NO: 48825 - protein, 35 aa, Artificial Sequence; identical to SEQ ID NO: 11610
  GFR-binding peptide
  MOD_RES (1)..(35): Xaa is C or S
  MOD_RES (13)..(14)..(15)..(16)..(17): Xaa is A or G
  MOD_RES (18)..(19)..(20)..(21): Xaa is A or G or is absent

SEQ ID NO: 48826 - protein, 34 aa, Artificial Sequence
  GFR-binding peptide
  MOD_RES (1)..(33)..(34): Xaa is C or S
XARVVMNSMEGIIVNSSDDMIQVTINSLQTPAXX

SEQ ID NO: 48827 - protein, 36 aa, Artificial Sequence; identical to SEQ ID NO: 18677
  GFR-binding peptide
  MOD_RES (2)..(36): Xaa is C or S

SEQ ID NO: 48828 - protein, 38 aa, Artificial Sequence; identical to SEQ ID NO: 18678
  GFR-binding peptide
  MOD_RES (1)..(3)..(37): Xaa is C or S
  MOD_RES (15)..(16)..(17)..(18)..(19): Xaa is A or G
  MOD_RES (20)..(21)..(22)..(23): Xaa is A or G or is absent

SEQ ID NO: 48829 - protein, 39 aa, Artificial Sequence; identical to SEQ ID NO: 11614
  GFR-binding peptide
  MOD_RES (33)..(34): Xaa is C or S
  MOD_RES (11)..(12)..(13)..(14)..(15): Xaa is A or G
  MOD_RES (16)..(17)..(18)..(19): Xaa is A or G or is absent

SEQ ID NO: 48830 - protein, 35 aa, Artificial Sequence
  GFR-binding peptide
  MOD_RES (2)..(34): Xaa is C or S
GXSRVVMNVQVEKIVNSSDDVKAVKVSRLKTPAXT

SEQ ID NO: 48831 - protein, 39 aa, Artificial Sequence; identical to SEQ ID NO: 11615
  GFR-binding peptide
  MOD_RES (33)..(34): Xaa is C or S
  MOD_RES (11)..(12)..(13)..(14)..(15): Xaa is A or G
  MOD_RES (16)..(17)..(18)..(19): Xaa is A or G or is absent

SEQ ID NO: 48832 - protein, 39 aa, Artificial Sequence
  GFR-binding peptide
  MOD_RES (1)..(3)..(35)..(36): Xaa is C or S
XGXGEVVMEVQVEKVVKDYEDVKAMKVSRLETPVXXAKP

SEQ ID NO: 48833 - protein, 38 aa, Artificial Sequence
  GFR-binding peptide
  MOD_RES (36)..(36): Xaa is C or S
LHEELRNSLQELKPKKRVYEYYVVPLPEHHVRSPQXKV

SEQ ID NO: 48834 - protein, 36 aa, Artificial Sequence; identical to SEQ ID NO: 18682
  GFR-binding peptide
  MOD_RES (36)..(36): Xaa is C or S
  MOD_RES (12)..(13)..(14)..(15)..(16): Xaa is A or G
  MOD_RES (17)..(18)..(19)..(20): Xaa is A or G or is absent

SEQ ID NO: 48835 - protein, 31 aa, Artificial Sequence
  GFR-binding peptide
GEVVMDVTAKKVVKENEDIKRMQVPRLETPV

SEQ ID NO: 48836 - protein, 42 aa, Artificial Sequence; identical to SEQ ID NO: 18683
  GFR-binding peptide
  MOD_RES (2)..(4)..(41): Xaa is C or S

SEQ ID NO: 48837 - protein, 38 aa, Artificial Sequence; identical to SEQ ID NO: 11620
  GFR-binding peptide
  MOD_RES (2)..(35)..(36): Xaa is C or S
  MOD_RES (13)..(14)..(15)..(16)..(17): Xaa is A or G
  MOD_RES (18)..(19)..(20)..(21): Xaa is A or G or is absent

SEQ ID NO: 48838 - protein, 34 aa, Artificial Sequence; identical to SEQ ID NO: 18685
  GFR-binding peptide
  MOD_RES (11)..(12)..(13)..(14)..(15): Xaa is A or G
  MOD_RES (16)..(17)..(18)..(19): Xaa is A or G or is absent

SEQ ID NO: 48839 - protein, 34 aa, Artificial Sequence; identical to SEQ ID NO: 18686
  GFR-binding peptide
  MOD_RES (1)..(1): Xaa is C or S

SEQ ID NO: 48840 - protein, 34 aa, Artificial Sequence
  GFR-binding peptide
  MOD_RES (1)..(34): Xaa is C or S
  MOD_RES (12)..(13)..(14)..(15)..(16): Xaa is A or G
  MOD_RES (17)..(18)..(19)..(20): Xaa is A or G or is absent
XSKVIMVQVEKXXXXXXXXXVKAIKVSRLDQSVX

SEQ ID NO: 48841 - protein, 36 aa, Artificial Sequence; identical to SEQ ID NO: 11624
  GFR-binding peptide
  MOD_RES (1)..(34)..(35): Xaa is C or S
  MOD_RES (12)..(13)..(14)..(15)..(16): Xaa is A or G
  MOD_RES (17)..(18)..(19)..(20): Xaa is A or G or is absent

SEQ ID NO: 48842 - protein, 37 aa, Artificial Sequence
  GFR-binding peptide
  MOD_RES (2)..(34)..(35): Xaa is C or S
GXGEVVMDVTAKKVVKENEDIKRMQVPRLETPVXXAK

SEQ ID NO: 48843 - protein, 41 aa, Artificial Sequence
  GFR-binding peptide
  MOD_RES (2)..(4)..(36): Xaa is C or S
HXGXSRVVMNSMEGIIVNSSDDMIQVTINSLKTPAXTPKTV

SEQ ID NO: 48844 - protein, 36 aa, Artificial Sequence; identical to SEQ ID NO: 11625
  GFR-binding peptide
  MOD_RES (1)..(3)..(36): Xaa is C or S
  MOD_RES (14)..(15)..(16)..(17)..(18): Xaa is A or G
  MOD_RES (19)..(20)..(21)..(22): Xaa is A or G or is absent

SEQ ID NO: 48845 - protein, 39 aa, Artificial Sequence
  GFR-binding peptide
  MOD_RES (2)..(34): Xaa is C or S
GXSRVVMNVTAKKIVNSSDDIKRVQVPRLKTPAXTPKTV

SEQ ID NO: 48846 - protein, 35 aa, Artificial Sequence
  GFR-binding peptide
  MOD_RES (2)..(4): Xaa is C or S
RXGXGEVVMDSMEGIVVKENEDMIQMTINSLETPV

SEQ ID NO: 48847 - protein, 37 aa, Artificial Sequence; identical to SEQ ID NO: 11628
  GFR-binding peptide
  MOD_RES (2)..(35)..(36): Xaa is C or S
  MOD_RES (13)..(14)..(15)..(16)..(17): Xaa is A or G
  MOD_RES (18)..(19)..(20)..(21): Xaa is A or G or is absent

SEQ ID NO: 48848 - protein, 40 aa, Artificial Sequence; identical to SEQ ID NO: 18691
  GFR-binding peptide
  MOD_RES (1)..(38): Xaa is C or S
  MOD_RES (14)..(15)..(16)..(17)..(18): Xaa is A or G
  MOD_RES (19)..(20)..(21)..(22): Xaa is A or G or is absent

SEQ ID NO: 48849 - protein, 38 aa, Artificial Sequence
  GFR-binding peptide
  MOD_RES (2)..(4)..(36)..(37): Xaa is C or S
RXGXGEVVMEVTAKKVVKDYEDIKRMQVPRLETPVXXA

SEQ ID NO: 48850 - protein, 36 aa, Artificial Sequence
  GFR-binding peptide
  MOD_RES (1)..(33): Xaa is C or S
XSRVVMNSMEGIIVNSSDDMIQVTINSLKTPAXTPK

SEQ ID NO: 48851 - protein, 34 aa, Artificial Sequence
  GFR-binding peptide
  MOD_RES (2)..(4): Xaa is C or S
SXKXSKVVMVQVEKVKPTRGVVKAIKVSRLDQPV

SEQ ID NO: 48852 - protein, 35 aa, Artificial Sequence; identical to SEQ ID NO: 11635
  GFR-binding peptide
  MOD_RES (2)..(34): Xaa is C or S

SEQ ID NO: 48853 - protein, 41 aa, Artificial Sequence
  GFR-binding peptide
  MOD_RES (2)..(4)..(38)..(39): Xaa is C or S
  MOD_RES (16)..(17)..(18)..(19)..(20): Xaa is A or G
  MOD_RES (21)..(22)..(23)..(24): Xaa is A or G or is absent
RXGXGEVVMESMEGIXXXXXXXXXMIQMTINSLETPVXXAK

SEQ ID NO: 48854 - protein, 42 aa, Artificial Sequence; identical to SEQ ID NO: 17047
  GFR-binding peptide
  MOD_RES (2)..(36): Xaa is C or S
  MOD_RES (14)..(15)..(16)..(17)..(18): Xaa is A or G
  MOD_RES (19)..(20)..(21)..(22): Xaa is A or G or is absent

SEQ ID NO: 48855 - protein, 37 aa, Artificial Sequence
  GFR-binding peptide
  MOD_RES (2)..(4): Xaa is C or S
  MOD_RES (16)..(17)..(18)..(19)..(20): Xaa is A or G
  MOD_RES (21)..(22)..(23)..(24): Xaa is A or G or is absent
RXGXGEVVMEVQVEKXXXXXXXXXVKAMKVSRLETPV

SEQ ID NO: 48856 - protein, 39 aa, Artificial Sequence
  GFR-binding peptide
  MOD_RES (2)..(33)..(34): Xaa is C or S
KXSKVIMVTAKKIKPTKGIIKRIQVPRLDQSVXXPSASA

SEQ ID NO: 48857 - protein, 37 aa, Artificial Sequence
  GFR-binding peptide
  MOD_RES (31)..(32): Xaa is C or S
SKVIMSMEGIIKPTKGIMIQITINSLDQSVXXPSASA

SEQ ID NO: 48858 - protein, 42 aa, Artificial Sequence; identical to SEQ ID NO: 11640
  GFR-binding peptide
  MOD_RES (2)..(36)..(37): Xaa is C or S
  MOD_RES (14)..(15)..(16)..(17)..(18): Xaa is A or G
  MOD_RES (19)..(20)..(21)..(22): Xaa is A or G or is absent

SEQ ID NO: 48859 - protein, 37 aa, Artificial Sequence
  GFR-binding peptide
  MOD_RES (2)..(4): Xaa is C or S
  MOD_RES (16)..(17)..(18)..(19)..(20): Xaa is A or G
  MOD_RES (21)..(22)..(23)..(24): Xaa is A or G or is absent
RXGXGEVVMDSMEGIXXXXXXXXXMIQMTINSLETPV

SEQ ID NO: 48860 - protein, 38 aa, Artificial Sequence
  GFR-binding peptide
  MOD_RES (33)..(34): Xaa is C or S
  MOD_RES (11)..(12)..(13)..(14)..(15): Xaa is A or G
  MOD_RES (16)..(17)..(18)..(19): Xaa is A or G or is absent
SKVIMSMEGIXXXXXXXXXMIQITINSLDQSVXXPSAS

SEQ ID NO: 48861 - protein, 35 aa, Artificial Sequence; identical to SEQ ID NO: 11647
  GFR-binding peptide
  MOD_RES (2)..(2): Xaa is C or S
  MOD_RES (14)..(15)..(16)..(17)..(18): Xaa is A or G
  MOD_RES (19)..(20)..(21)..(22): Xaa is A or G or is absent

SEQ ID NO: 48862 - protein, 32 aa, Artificial Sequence
  GFR-binding peptide
  MOD_RES (11)..(12)..(13)..(14)..(15): Xaa is A or G
  MOD_RES (16)..(17)..(18)..(19): Xaa is A or G or is absent
SKVVMVQVEKXXXXXXXXXVKAIKVSRLDQPV

SEQ ID NO: 48863 - protein, 35 aa, Artificial Sequence; identical to SEQ ID NO: 11649
  GFR-binding peptide
  MOD_RES (1)..(3): Xaa is C or S
  MOD_RES (14)..(15)..(16)..(17)..(18): Xaa is A or G
  MOD_RES (19)..(20)..(21)..(22): Xaa is A or G or is absent

SEQ ID NO: 48864 - protein, 34 aa, Artificial Sequence; identical to SEQ ID NO: 35526
  GFR-binding peptide
  MOD_RES (1)..(34): Xaa is C or S
  MOD_RES (12)..(13)..(14)..(15)..(16): Xaa is A or G
  MOD_RES (17)..(18)..(19)..(20): Xaa is A or G or is absent

SEQ ID NO: 48865 - protein, 36 aa, Artificial Sequence
  GFR-binding peptide
  MOD_RES (33)..(34): Xaa is C or S
  MOD_RES (11)..(12)..(13)..(14)..(15): Xaa is A or G
  MOD_RES (16)..(17)..(18)..(19): Xaa is A or G or is absent
EVVMDVTAKKXXXXXXXXXIKRMQVPRLETPVXXAK

SEQ ID NO: 48866 - protein, 37 aa, Artificial Sequence
  GFR-binding peptide
  MOD_RES (1)..(3)..(37): Xaa is C or S
XEXKNHQLFNSLQEHQGQHPKIRYYVMPLPEEETPVX

SEQ ID NO: 48867 - protein, 35 aa, Artificial Sequence
  GFR-binding peptide
  MOD_RES (1)..(1): Xaa is C or S
  MOD_RES (14)..(15)..(16)..(17)..(18): Xaa is A or G
  MOD_RES (19)..(20)..(21)..(22): Xaa is A or G or is absent
XALHDELTNSLQEXXXXXXXXXYYLVTLPELQVQT

SEQ ID NO: 48868 - protein, 42 aa, Artificial Sequence; identical to SEQ ID NO: 17053
  GFR-binding peptide
  MOD_RES (2)..(4)..(41): Xaa is C or S
  MOD_RES (17)..(18)..(19)..(20)..(21): Xaa is A or G
  MOD_RES (22)..(23)..(24)..(25): Xaa is A or G or is absent

SEQ ID NO: 48869 - protein, 36 aa, Artificial Sequence; identical to SEQ ID NO: 11652
  GFR-binding peptide
  MOD_RES (31)..(31): Xaa is C or S

SEQ ID NO: 48870 - protein, 41 aa, Artificial Sequence
  GFR-binding peptide
  MOD_RES (1)..(3)..(35): Xaa is C or S
XGXSRVVMNVTAKKIVNSSDDIKRVQVPRLKTPAXTPKTVH

SEQ ID NO: 48871 - protein, 35 aa, Artificial Sequence; identical to SEQ ID NO: 11653
  GFR-binding peptide
  MOD_RES (2)..(35): Xaa is C or S
  MOD_RES (13)..(14)..(15)..(16)..(17): Xaa is A or G
  MOD_RES (18)..(19)..(20)..(21): Xaa is A or G or is absent

SEQ ID NO: 48872 - protein, 36 aa, Artificial Sequence
  GFR-binding peptide
  MOD_RES (31)..(32): Xaa is C or S
RVVMNVTAKKIVNSSDDIKRVQVPRLKTPAXXPKPV

SEQ ID NO: 48873 - protein, 41 aa, Artificial Sequence; identical to SEQ ID NO: 17055
  GFR-binding peptide
  MOD_RES (1)..(3)..(40): Xaa is C or S
  MOD_RES (16)..(17)..(18)..(19)..(20): Xaa is A or G
  MOD_RES (21)..(22)..(23)..(24): Xaa is A or G or is absent

SEQ ID NO: 48874 - protein, 37 aa, Artificial Sequence
  GFR-binding peptide
  MOD_RES (1)..(35)..(36): Xaa is C or S
  MOD_RES (13)..(14)..(15)..(16)..(17): Xaa is A or G
  MOD_RES (18)..(19)..(20)..(21): Xaa is A or G or is absent
XARVVMNVTAKKXXXXXXXXXIKRVQVPRLQTPAXXP

SEQ ID NO: 48875 - protein, 40 aa, Artificial Sequence
  GFR-binding peptide
  MOD_RES (36)..(36): Xaa is C or S
LHDELTNSLQEFIPKKRVIEYYLVTLPELQVQTPRXQVNR

SEQ ID NO: 48876 - protein, 39 aa, Artificial Sequence
  GFR-binding peptide
  MOD_RES (1)..(35)..(36): Xaa is C or S
  MOD_RES (13)..(14)..(15)..(16)..(17): Xaa is A or G
  MOD_RES (18)..(19)..(20)..(21): Xaa is A or G or is absent
XGEVVMEVQVEKXXXXXXXXXVKAMKVSRLETPVXXAKP

SEQ ID NO: 48877 - protein, 40 aa, Artificial Sequence
  GFR-binding peptide
  MOD_RES (2)..(4)..(38): Xaa is C or S
  MOD_RES (16)..(17)..(18)..(19)..(20): Xaa is A or G
  MOD_RES (21)..(22)..(23)..(24): Xaa is A or G or is absent
HXGXSRVVMNVTAKKXXXXXXXXXIKRVQVPRLKTPAXTP

SEQ ID NO: 48878 - protein, 32 aa, Artificial Sequence
  GFR-binding peptide
  MOD_RES (11)..(12)..(13)..(14)..(15): Xaa is A or G
  MOD_RES (16)..(17)..(18)..(19): Xaa is A or G or is absent
HEELRNSLQEXXXXXXXXXYYLVTLPEHHVRS

SEQ ID NO: 48879 - protein, 34 aa, Artificial Sequence; identical to SEQ ID NO: 11658
  GFR-binding peptide
  MOD_RES (32)..(33): Xaa is C or S

SEQ ID NO: 48880 - protein, 37 aa, Artificial Sequence
  GFR-binding peptide
  MOD_RES (1)..(3): Xaa is C or S
XAXELHEELRNSLQELKPKKRVYEYYLVTLPEHHVRS

SEQ ID NO: 48881 - protein, 34 aa, Artificial Sequence; identical to SEQ ID NO: 11660
  GFR-binding peptide
  MOD_RES (1)..(32)..(33): Xaa is C or S

SEQ ID NO: 48882 - protein, 32 aa, Artificial Sequence
  GFR-binding peptide
  MOD_RES (1)..(32): Xaa is C or S
XSKVIMSMEGIIKPTKGIMIQITINSLDQSVX

SEQ ID NO: 48883 - protein, 34 aa, Artificial Sequence
  GFR-binding peptide
  MOD_RES (32)..(33): Xaa is C or S
SRVVMNSMEGIIVNSSDDMIQVTINSLKTPAXXP

SEQ ID NO: 48884 - protein, 32 aa, Artificial Sequence
  GFR-binding peptide
  MOD_RES (1)..(1): Xaa is C or S
XGEVVMDVTAKKVVKENEDIKRMQVPRLETPV

SEQ ID NO: 48885 - protein, 37 aa, Artificial Sequence
  GFR-binding peptide
  MOD_RES (2)..(36): Xaa is C or S
  MOD_RES (14)..(15)..(16)..(17)..(18): Xaa is A or G
  MOD_RES (19)..(20)..(21)..(22): Xaa is A or G or is absent
GXSRVVMNSMEGIXXXXXXXXXMIQVTINSLKTPAXT

SEQ ID NO: 48886 - protein, 32 aa, Artificial Sequence
  GFR-binding peptide
  MOD_RES (32)..(32): Xaa is C or S
GEVVMDVTAKKVVKENEDIKRMQVPRLETPVX

SEQ ID NO: 48887 - protein, 36 aa, Artificial Sequence
  GFR-binding peptide
  MOD_RES (36)..(36): Xaa is C or S
  MOD_RES (12)..(13)..(14)..(15)..(16): Xaa is A or G
  MOD_RES (17)..(18)..(19)..(20): Xaa is A or G or is absent
LHDELTNSLQEXXXXXXXXXYYVVPLPELQVQTPRX

SEQ ID NO: 48888 - protein, 40 aa, Artificial Sequence
  GFR-binding peptide
  MOD_RES (1)..(38): Xaa is C or S
  MOD_RES (14)..(15)..(16)..(17)..(18): Xaa is A or G
  MOD_RES (19)..(20)..(21)..(22): Xaa is A or G or is absent
XALHDELTNSLQEXXXXXXXXXYYLVTLPELQVQTPRXQV

SEQ ID NO: 48889 - protein, 34 aa, Artificial Sequence
  GFR-binding peptide
  MOD_RES (34)..(34): Xaa is C or S
  MOD_RES (12)..(13)..(14)..(15)..(16): Xaa is A or G
  MOD_RES (17)..(18)..(19)..(20): Xaa is A or G or is absent
GEVVMDVQVEKXXXXXXXXXVKAMKVSRLETPVX

SEQ ID NO: 48890 - protein, 34 aa, Artificial Sequence
  GFR-binding peptide
  MOD_RES (32)..(33): Xaa is C or S
ARVVMNVTAKKIVNSSDDIKRVQVPRLQTPAXXP

SEQ ID NO: 48891 - protein, 38 aa, Artificial Sequence; identical to SEQ ID NO: 17064
  GFR-binding peptide
  MOD_RES (37)..(37): Xaa is C or S
  MOD_RES (13)..(14)..(15)..(16)..(17): Xaa is A or G
  MOD_RES (18)..(19)..(20)..(21): Xaa is A or G or is absent

SEQ ID NO: 48892 - protein, 37 aa, Artificial Sequence
  GFR-binding peptide
  MOD_RES (2)..(4): Xaa is C or S
  MOD_RES (16)..(17)..(18)..(19)..(20): Xaa is A or G
  MOD_RES (21)..(22)..(23)..(24): Xaa is A or G or is absent
RXGXGEVVMEVTAKKXXXXXXXXXIKRMQVPRLETPV

SEQ ID NO: 48893 - protein, 40 aa, Artificial Sequence
  GFR-binding peptide
  MOD_RES (2)..(4)..(37)..(38): Xaa is C or S
  MOD_RES (15)..(16)..(17)..(18)..(19): Xaa is A or G
  MOD_RES (20)..(21)..(22)..(23): Xaa is A or G or is absent
SXKXSRVIMVQVEKXXXXXXXXXVKAIKVSRLAQPVXXPA

SEQ ID NO: 48894 - protein, 36 aa, Artificial Sequence; identical to SEQ ID NO: 17067
  GFR-binding peptide
  MOD_RES (2)..(36): Xaa is C or S
  MOD_RES (14)..(15)..(16)..(17)..(18): Xaa is A or G
  MOD_RES (19)..(20)..(21)..(22): Xaa is A or G or is absent

SEQ ID NO: 48895 - protein, 40 aa, Artificial Sequence; identical to SEQ ID NO: 11662
  GFR-binding peptide
  MOD_RES (1)..(35)..(36): Xaa is C or S
  MOD_RES (13)..(14)..(15)..(16)..(17): Xaa is A or G
  MOD_RES (18)..(19)..(20)..(21): Xaa is A or G or is absent

SEQ ID NO: 48896 - protein, 35 aa, Artificial Sequence
  GFR-binding peptide
  MOD_RES (2)..(4)..(35): Xaa is C or S
SXKXSKVVMVTAKKVKPTRGVIKRIQVPRLDQPVX

SEQ ID NO: 48897 - protein, 38 aa, Artificial Sequence; identical to SEQ ID NO: 17070
  GFR-binding peptide
  MOD_RES (1)..(35): Xaa is C or S
  MOD_RES (13)..(14)..(15)..(16)..(17): Xaa is A or G
  MOD_RES (18)..(19)..(20)..(21): Xaa is A or G or is absent

SEQ ID NO: 48898 - protein, 38 aa, Artificial Sequence; identical to SEQ ID NO: 11665
  GFR-binding peptide
  MOD_RES (2)..(34)..(35): Xaa is C or S

SEQ ID NO: 48899 - protein, 36 aa, Artificial Sequence; identical to SEQ ID NO: 17071
  GFR-binding peptide
  MOD_RES (1)..(3): Xaa is C or S

SEQ ID NO: 48900 - protein, 38 aa, Artificial Sequence; identical to SEQ ID NO: 11668
  GFR-binding peptide
  MOD_RES (1)..(35)..(36): Xaa is C or S
  MOD_RES (13)..(14)..(15)..(16)..(17): Xaa is A or G
  MOD_RES (18)..(19)..(20)..(21): Xaa is A or G or is absent

SEQ ID NO: 48901 - protein, 34 aa, Artificial Sequence
  GFR-binding peptide
  MOD_RES (1)..(33)..(34): Xaa is C or S
XGEVVMEVTAKKVVKDYEDIKRMQVPRLETPVXX

SEQ ID NO: 48902 - protein, 39 aa, Artificial Sequence
  GFR-binding peptide
  MOD_RES (34)..(34): Xaa is C or S
  MOD_RES (12)..(13)..(14)..(15)..(16): Xaa is A or G
  MOD_RES (17)..(18)..(19)..(20): Xaa is A or G or is absent
SRVVMNVTAKKXXXXXXXXXIKRVQVPRLKTPAXTPKTV

SEQ ID NO: 48903 - protein, 40 aa, Artificial Sequence
  GFR-binding peptide
  MOD_RES (1)..(3)..(40): Xaa is C or S
  MOD_RES (16)..(17)..(18)..(19)..(20): Xaa is A or G
  MOD_RES (21)..(22)..(23)..(24): Xaa is A or G or is absent
XKXALHDELTNSLQEXXXXXXXXXYYLVTLPELQVQTPRX

SEQ ID NO: 48904 - protein, 37 aa, Artificial Sequence; identical to SEQ ID NO: 11672
  GFR-binding peptide
  MOD_RES (32)..(32): Xaa is C or S

SEQ ID NO: 48905 - protein, 36 aa, Artificial Sequence
  GFR-binding peptide
  MOD_RES (35)..(35): Xaa is C or S
HDELTNSLQEFIPKKRVIEYYVVPLPELQVQTPRXQ

SEQ ID NO: 48906 - protein, 40 aa, Artificial Sequence; identical to SEQ ID NO: 17075
  GFR-binding peptide
  MOD_RES (2)..(4): Xaa is C or S
  MOD_RES (17)..(18)..(19)..(20)..(21): Xaa is A or G
  MOD_RES (22)..(23)..(24)..(25): Xaa is A or G or is absent

SEQ ID NO: 48907 - protein, 40 aa, Artificial Sequence
  GFR-binding peptide
  MOD_RES (2)..(4)..(38): Xaa is C or S
  MOD_RES (16)..(17)..(18)..(19)..(20): Xaa is A or G
  MOD_RES (21)..(22)..(23)..(24): Xaa is A or G or is absent
HXGXSRVVMNVQVEKXXXXXXXXXVKAVKVSRLKTPAXTP

SEQ ID NO: 48908 - protein, 37 aa, Artificial Sequence; identical to SEQ ID NO: 17076
  GFR-binding peptide
  MOD_RES (37)..(37): Xaa is C or S

SEQ ID NO: 48909 - protein, 42 aa, Artificial Sequence; identical to SEQ ID NO: 17077
  GFR-binding peptide
  MOD_RES (1)..(38): Xaa is C or S
  MOD_RES (14)..(15)..(16)..(17)..(18): Xaa is A or G
  MOD_RES (19)..(20)..(21)..(22): Xaa is A or G or is absent

SEQ ID NO: 48910 - protein, 36 aa, Artificial Sequence; identical to SEQ ID NO: 17078
  GFR-binding peptide
  MOD_RES (2)..(2): Xaa is C or S
  MOD_RES (15)..(16)..(17)..(18)..(19): Xaa is A or G
  MOD_RES (20)..(21)..(22)..(23): Xaa is A or G or is absent

SEQ ID NO: 48911 - protein, 36 aa, Artificial Sequence; identical to SEQ ID NO: 17079
  GFR-binding peptide
  MOD_RES (36)..(36): Xaa is C or S

SEQ ID NO: 48912 - protein, 38 aa, Artificial Sequence
  GFR-binding peptide
  MOD_RES (1)..(3)..(37)..(38): Xaa is C or S
  MOD_RES (15)..(16)..(17)..(18)..(19): Xaa is A or G
  MOD_RES (20)..(21)..(22)..(23): Xaa is A or G or is absent
XGXSRVVMNVQVEKXXXXXXXXXVKAVKVSRLKTPAXX

SEQ ID NO: 48913 - protein, 35 aa, Artificial Sequence; identical to SEQ ID NO: 11677
  GFR-binding peptide
  MOD_RES (1)..(33)..(34): Xaa is C or S

SEQ ID NO: 48914 - protein, 36 aa, Artificial Sequence
  GFR-binding peptide
  MOD_RES (1)..(33)..(34): Xaa is C or S
XGEVVMESMEGIVVKDYEDMIQMTINSLETPVXXAK

SEQ ID NO: 48915 - protein, 45 aa, Artificial Sequence; identical to SEQ ID NO: 17080
  GFR-binding peptide
  MOD_RES (2)..(4)..(41): Xaa is C or S

SEQ ID NO: 48916 - protein, 37 aa, Artificial Sequence; identical to SEQ ID NO: 35579
  GFR-binding peptide
  MOD_RES (31)..(32): Xaa is C or S

SEQ ID NO: 48917 - protein, 34 aa, Artificial Sequence; identical to SEQ ID NO: 17081
  GFR-binding peptide

SEQ ID NO: 48918 - protein, 39 aa, Artificial Sequence
  GFR-binding peptide
  MOD_RES (2)..(4)..(35)..(36): Xaa is C or S
SXKXSKVIMSMEGIIKPTKGIMIQITINSLDQSVXXPSA

SEQ ID NO: 48919 - protein, 40 aa, Artificial Sequence; identical to SEQ ID NO: 11682
  GFR-binding peptide
  MOD_RES (2)..(4)..(36)..(37): Xaa is C or S

SEQ ID NO: 48920 - protein, 37 aa, Artificial Sequence; identical to SEQ ID NO: 11683
  GFR-binding peptide
  MOD_RES (1)..(34)..(35): Xaa is C or S
  MOD_RES (12)..(13)..(14)..(15)..(16): Xaa is A or G
  MOD_RES (17)..(18)..(19)..(20): Xaa is A or G or is absent

SEQ ID NO: 48921 - protein, 37 aa, Artificial Sequence
  GFR-binding peptide
  MOD_RES (1)..(3): Xaa is C or S
XKXALHDELTNSLQEFIPKKRVIEYYLVTLPELQVQT

SEQ ID NO: 48922 - protein, 34 aa, Artificial Sequence
  GFR-binding peptide
  MOD_RES (1)..(34): Xaa is C or S
  MOD_RES (12)..(13)..(14)..(15)..(16): Xaa is A or G
  MOD_RES (17)..(18)..(19)..(20): Xaa is A or G or is absent
XSKVIMSMEGIXXXXXXXXXMIQITINSLDQSVX

SEQ ID NO: 48923 - protein, 37 aa, Artificial Sequence; identical to SEQ ID NO: 17084
  GFR-binding peptide
  MOD_RES (1)..(1): Xaa is C or S
  MOD_RES (14)..(15)..(16)..(17)..(18): Xaa is A or G
  MOD_RES (19)..(20)..(21)..(22): Xaa is A or G or is absent

SEQ ID NO: 48924 - protein, 37 aa, Artificial Sequence
  GFR-binding peptide
  MOD_RES (1)..(3)..(36)..(37): Xaa is C or S
  MOD_RES (14)..(15)..(16)..(17)..(18): Xaa is A or G
  MOD_RES (19)..(20)..(21)..(22): Xaa is A or G or is absent
XKXSRVIMVQVEKXXXXXXXXXVKAIKVSRLAQPVXX

SEQ ID NO: 48925 - protein, 36 aa, Artificial Sequence; identical to SEQ ID NO: 11685
  GFR-binding peptide
  MOD_RES (2)..(35)..(36): Xaa is C or S
  MOD_RES (13)..(14)..(15)..(16)..(17): Xaa is A or G
  MOD_RES (18)..(19)..(20)..(21): Xaa is A or G or is absent

SEQ ID NO: 48926 - protein, 33 aa, Artificial Sequence
  GFR-binding peptide
  MOD_RES (1)..(1): Xaa is C or S
  MOD_RES (12)..(13)..(14)..(15)..(16): Xaa is A or G
  MOD_RES (17)..(18)..(19)..(20): Xaa is A or G or is absent
XSKVVMSMEGIXXXXXXXXXMIQITINSLDQPV

SEQ ID NO: 48927 - protein, 44 aa, Artificial Sequence; identical to SEQ ID NO: 17087
  GFR-binding peptide
  MOD_RES (2)..(4)..(41): Xaa is C or S

SEQ ID NO: 48928 - protein, 42 aa, Artificial Sequence
  GFR-binding peptide
  MOD_RES (2)..(36)..(37): Xaa is C or S
  MOD_RES (14)..(15)..(16)..(17)..(18): Xaa is A or G
  MOD_RES (19)..(20)..(21)..(22): Xaa is A or G or is absent
GXGEVVMEVQVEKXXXXXXXXXVKAMKVSRLETPVXXAKPIS

SEQ ID NO: 48929 - protein, 40 aa, Artificial Sequence
  GFR-binding peptide
  MOD_RES (2)..(35)..(36): Xaa is C or S
  MOD_RES (13)..(14)..(15)..(16)..(17): Xaa is A or G
  MOD_RES (18)..(19)..(20)..(21): Xaa is A or G or is absent
KXSRVIMSMEGIXXXXXXXXXMIQITINSLAQPVXXPAAS

SEQ ID NO: 48930 - protein, 38 aa, Artificial Sequence; identical to SEQ ID NO: 11687
  GFR-binding peptide
  MOD_RES (2)..(34)..(35): Xaa is C or S

SEQ ID NO: 48931 - protein, 39 aa, Artificial Sequence; identical to SEQ ID NO: 11688
  GFR-binding peptide
  MOD_RES (2)..(33)..(34): Xaa is C or S

SEQ ID NO: 48932 - protein, 36 aa, Artificial Sequence
  GFR-binding peptide
  MOD_RES (2)..(33)..(34): Xaa is C or S
KXSKVIMVTAKKIKPTKGIIKRIQVPRLDQSVXXPS

SEQ ID NO: 48933 - protein, 41 aa, Artificial Sequence; identical to SEQ ID NO: 11689
  GFR-binding peptide
  MOD_RES (2)..(4)..(38)..(39): Xaa is C or S
  MOD_RES (16)..(17)..(18)..(19)..(20): Xaa is A or G
  MOD_RES (21)..(22)..(23)..(24): Xaa is A or G or is absent

SEQ ID NO: 48934 - protein, 44 aa, Artificial Sequence
  GFR-binding peptide
  MOD_RES (1)..(3)..(40): Xaa is C or S
  MOD_RES (16)..(17)..(18)..(19)..(20): Xaa is A or G
  MOD_RES (21)..(22)..(23)..(24): Xaa is A or G or is absent
XAXELHEELRNSLQEXXXXXXXXXYYVVPLPEHHVRSPQXKVSS

SEQ ID NO: 48935 - protein, 35 aa, Artificial Sequence
  GFR-binding peptide
  MOD_RES (1)..(3)..(35): Xaa is C or S
XGXSRVVMNVQVEKIVNSSDDVKAVKVSRLKTPAX

SEQ ID NO: 48936 - protein, 36 aa, Artificial Sequence; identical to SEQ ID NO: 11693
  GFR-binding peptide
  MOD_RES (2)..(33)..(34): Xaa is C or S

SEQ ID NO: 48937 - protein, 36 aa, Artificial Sequence; identical to SEQ ID NO: 11694
  GFR-binding peptide
  MOD_RES (1)..(33)..(34): Xaa is C or S

SEQ ID NO: 48938 - protein, 37 aa, Artificial Sequence
  GFR-binding peptide
  MOD_RES (2)..(36)..(37): Xaa is C or S
  MOD_RES (14)..(15)..(16)..(17)..(18): Xaa is A or G
  MOD_RES (19)..(20)..(21)..(22): Xaa is A or G or is absent
GXSRVVMNVTAKKXXXXXXXXXIKRVQVPRLKTPAXX

SEQ ID NO: 48939 - protein, 38 aa, Artificial Sequence
  GFR-binding peptide
  MOD_RES (2)..(34)..(35): Xaa is C or S
GXARVVMNVQVEKIVNSSDDVKAVKVSRLQTPAXXPKP

SEQ ID NO: 48940 - protein, 40 aa, Artificial Sequence; identical to SEQ ID NO: 17092
  GFR-binding peptide
  MOD_RES (2)..(39): Xaa is C or S

SEQ ID NO: 48941 - protein, 42 aa, Artificial Sequence; identical to SEQ ID NO: 17093
  GFR-binding peptide
  MOD_RES (2)..(39): Xaa is C or S
  MOD_RES (15)..(16)..(17)..(18)..(19): Xaa is A or G
  MOD_RES (20)..(21)..(22)..(23): Xaa is A or G or is absent

SEQ ID NO: 48942 - protein, 37 aa, Artificial Sequence
  GFR-binding peptide
  MOD_RES (1)..(3)..(37): Xaa is C or S
  MOD_RES (15)..(16)..(17)..(18)..(19): Xaa is A or G
  MOD_RES (20)..(21)..(22)..(23): Xaa is A or G or is absent
XEXKNHQLFNSLQEXXXXXXXXXYYLMTLPEEETPVX

SEQ ID NO: 48943 - protein, 40 aa, Artificial Sequence
  GFR-binding peptide
  MOD_RES (2)..(34)..(35): Xaa is C or S
GXGEVVMESMEGIVVKDYEDMIQMTINSLETPVXXAKPIS

SEQ ID NO: 48944 - protein, 40 aa, Artificial Sequence; identical to SEQ ID NO: 11701
  GFR-binding peptide
  MOD_RES (2)..(4)..(36)..(37): Xaa is C or S

SEQ ID NO: 48945 - protein, 37 aa, Artificial Sequence
  GFR-binding peptide
  MOD_RES (32)..(33): Xaa is C or S
GEVVMDVTAKKVVKENEDIKRMQVPRLETPVXXAKPI

SEQ ID NO: 48946 - protein, 36 aa, Artificial Sequence
  GFR-binding peptide
  MOD_RES (2)..(4): Xaa is C or S
  MOD_RES (15)..(16)..(17)..(18)..(19): Xaa is A or G
  MOD_RES (20)..(21)..(22)..(23): Xaa is A or G or is absent
SXKXSRVIMSMEGIXXXXXXXXXMIQITINSLAQPV

SEQ ID NO: 48947 - protein, 39 aa, Artificial Sequence; identical to SEQ ID NO: 17099
  GFR-binding peptide
  MOD_RES (35)..(35): Xaa is C or S
  MOD_RES (11)..(12)..(13)..(14)..(15): Xaa is A or G
  MOD_RES (16)..(17)..(18)..(19): Xaa is A or G or is absent

SEQ ID NO: 48948 - protein, 39 aa, Artificial Sequence
  GFR-binding peptide
  MOD_RES (1)..(3)..(35): Xaa is C or S
XGXSRVVMNVQVEKIVNSSDDVKAVKVSRLKTPAXTPKT

SEQ ID NO: 48949 - protein, 37 aa, Artificial Sequence; identical to SEQ ID NO: 11702
  GFR-binding peptide
  MOD_RES (1)..(35)..(36): Xaa is C or S
  MOD_RES (13)..(14)..(15)..(16)..(17): Xaa is A or G
  MOD_RES (18)..(19)..(20)..(21): Xaa is A or G or is absent

SEQ ID NO: 48950 - protein, 39 aa, Artificial Sequence; identical to SEQ ID NO: 11703
  GFR-binding peptide
  MOD_RES (1)..(3)..(37)..(38): Xaa is C or S
  MOD_RES (15)..(16)..(17)..(18)..(19): Xaa is A or G
  MOD_RES (20)..(21)..(22)..(23): Xaa is A or G or is absent

SEQ ID NO: 48951 - protein, 33 aa, Artificial Sequence
  GFR-binding peptide
  MOD_RES (33)..(33): Xaa is C or S
  MOD_RES (11)..(12)..(13)..(14)..(15): Xaa is A or G
  MOD_RES (16)..(17)..(18)..(19): Xaa is A or G or is absent
EVVMESMEGIXXXXXXXXXMIQMTINSLETPVX

SEQ ID NO: 48952 - protein, 35 aa, Artificial Sequence
  GFR-binding peptide
  MOD_RES (1)..(33)..(34): Xaa is C or S
XSRVVMNVQVEKIVNSSDDVKAVKVSRLKTPAXXP

SEQ ID NO: 48953 - protein, 38 aa, Artificial Sequence
  GFR-binding peptide
  MOD_RES (33)..(34): Xaa is C or S
  MOD_RES (11)..(12)..(13)..(14)..(15): Xaa is A or G
  MOD_RES (16)..(17)..(18)..(19): Xaa is A or G or is absent
RVVMNVTAKKXXXXXXXXXIKRVQVPRLQTPAXXPKPV

SEQ ID NO: 48954 - protein, 40 aa, Artificial Sequence; identical to SEQ ID NO: 11704
  GFR-binding peptide
  MOD_RES (1)..(3)..(34)..(35): Xaa is C or S

SEQ ID NO: 48955 - protein, 35 aa, Artificial Sequence
  GFR-binding peptide
  MOD_RES (1)..(1): Xaa is C or S
XALHDELTNSLQEFIPKKRVIEYYLVTLPELQVQT

SEQ ID NO: 48956 - protein, 39 aa, Artificial Sequence; identical to SEQ ID NO: 17102
  GFR-binding peptide
  MOD_RES (37)..(37): Xaa is C or S

SEQ ID NO: 48957 - protein, 40 aa, Artificial Sequence
  GFR-binding peptide
  MOD_RES (1)..(38): Xaa is C or S
XALHDELTNSLQEFIPKKRVIEYYLVTLPELQVQTPRXQV

SEQ ID NO: 48958 - protein, 38 aa, Artificial Sequence
  GFR-binding peptide
  MOD_RES (32)..(33): Xaa is C or S
ARVVMNSMEGIIVNSSDDMIQVTINSLQTPAXXPKPVT

SEQ ID NO: 48959 - protein, 41 aa, Artificial Sequence; identical to SEQ ID NO: 17105
  GFR-binding peptide
  MOD_RES (1)..(38): Xaa is C or S

SEQ ID NO: 48960 - protein, 38 aa, Artificial Sequence
  GFR-binding peptide
  MOD_RES (34)..(35): Xaa is C or S
  MOD_RES (12)..(13)..(14)..(15)..(16): Xaa is A or G
  MOD_RES (17)..(18)..(19)..(20): Xaa is A or G or is absent
GEVVMEVTAKKXXXXXXXXXIKRMQVPRLETPVXXAKP

SEQ ID NO: 48961 - protein, 33 aa, Artificial Sequence
  GFR-binding peptide
  MOD_RES (2)..(33): Xaa is C or S
KXSKVVMSMEGIVKPTRGVMIQITINSLDQPVX

SEQ ID NO: 48962 - protein, 38 aa, Artificial Sequence
  GFR-binding peptide
  MOD_RES (1)..(3)..(35): Xaa is C or S
XGXSRVVMNVQVEKIVNSSDDVKAVKVSRLKTPAXTPK

SEQ ID NO: 48963 - protein, 35 aa, Artificial Sequence; identical to SEQ ID NO: 11705
  GFR-binding peptide
  MOD_RES (1)..(3)..(35): Xaa is C or S

SEQ ID NO: 48964 - protein, 37 aa, Artificial Sequence
  GFR-binding peptide
  MOD_RES (1)..(32)..(33): Xaa is C or S
XSKVVMVQVEKVKPTRGVVKAIKVSRLDQPVXXPSAS

SEQ ID NO: 48965 - protein, 38 aa, Artificial Sequence; identical to SEQ ID NO: 17107
  GFR-binding peptide
  MOD_RES (35)..(35): Xaa is C or S

SEQ ID NO: 48966 - protein, 37 aa, Artificial Sequence; identical to SEQ ID NO: 17108
  GFR-binding peptide
  MOD_RES (33)..(33): Xaa is C or S

SEQ ID NO: 48967 - protein, 33 aa, Artificial Sequence; identical to SEQ ID NO: 11706
  GFR-binding peptide
  MOD_RES (1)..(32)..(33): Xaa is C or S

SEQ ID NO: 48968 - protein, 35 aa, Artificial Sequence
  GFR-binding peptide
  MOD_RES (33)..(34): Xaa is C or S
  MOD_RES (11)..(12)..(13)..(14)..(15): Xaa is A or G
  MOD_RES (16)..(17)..(18)..(19): Xaa is A or G or is absent
EVVMDVTAKKXXXXXXXXXIKRMQVPRLETPVXXA

SEQ ID NO: 48969 - protein, 35 aa, Artificial Sequence
  GFR-binding peptide
  MOD_RES (33)..(33): Xaa is C or S
  MOD_RES (11)..(12)..(13)..(14)..(15): Xaa is A or G
  MOD_RES (16)..(17)..(18)..(19): Xaa is A or G or is absent
NHQLFNSLQEXXXXXXXXXYYLMTLPEEETPVXEL

SEQ ID NO: 48970 - protein, 37 aa, Artificial Sequence; identical to SEQ ID NO: 11708
  GFR-binding peptide
  MOD_RES (2)..(34)..(35): Xaa is C or S

SEQ ID NO: 48971 - protein, 32 aa, Artificial Sequence
  GFR-binding peptide
  MOD_RES (1)..(32): Xaa is C or S
XSKVIMVQVEKIKPTKGIVKAIKVSRLDQSVX

SEQ ID NO: 48972 - protein, 42 aa, Artificial Sequence; identical to SEQ ID NO: 11710
  GFR-binding peptide
  MOD_RES (2)..(4)..(36)..(37): Xaa is C or S

SEQ ID NO: 48973 - protein, 35 aa, Artificial Sequence; identical to SEQ ID NO: 17112
  GFR-binding peptide
  MOD_RES (35)..(35): Xaa is C or S

SEQ ID NO: 48974 - protein, 37 aa, Artificial Sequence
  GFR-binding peptide
  MOD_RES (2)..(4): Xaa is C or S
RXEXKNHQLFNSLQEHQGQHPKIRYYLMTLPEEETPV

SEQ ID NO: 48975 - protein, 40 aa, Artificial Sequence; identical to SEQ ID NO: 11713
  GFR-binding peptide
  MOD_RES (2)..(4)..(35)..(36): Xaa is C or S

SEQ ID NO: 48976 - protein, 34 aa, Artificial Sequence
  GFR-binding peptide
  MOD_RES (31)..(32): Xaa is C or S
RVVMNVTAKKIVNSSDDIKRVQVPRLKTPAXXPK

SEQ ID NO: 48977 - protein, 37 aa, Artificial Sequence
  GFR-binding peptide
  MOD_RES (2)..(4)..(36)..(37): Xaa is C or S
HXGXARVVMNVTAKKIVNSSDDIKRVQVPRLQTPAXX

SEQ ID NO: 48978 - protein, 33 aa, Artificial Sequence
  GFR-binding peptide
  MOD_RES (33)..(33): Xaa is C or S
  MOD_RES (11)..(12)..(13)..(14)..(15): Xaa is A or G
  MOD_RES (16)..(17)..(18)..(19): Xaa is A or G or is absent
SRVIMSMEGIXXXXXXXXXMIQITINSLAQPVX

SEQ ID NO: 48979 - protein, 40 aa, Artificial Sequence
  GFR-binding peptide
  MOD_RES (2)..(36)..(37): Xaa is C or S
  MOD_RES (14)..(15)..(16)..(17)..(18): Xaa is A or G
  MOD_RES (19)..(20)..(21)..(22): Xaa is A or G or is absent
GXGEVVMDVQVEKXXXXXXXXXVKAMKVSRLETPVXXAKP

SEQ ID NO: 48980 - protein, 35 aa, Artificial Sequence; identical to SEQ ID NO: 11717
  GFR-binding peptide
  MOD_RES (34)..(35): Xaa is C or S
  MOD_RES (12)..(13)..(14)..(15)..(16): Xaa is A or G
  MOD_RES (17)..(18)..(19)..(20): Xaa is A or G or is absent

SEQ ID NO: 48981 - protein, 36 aa, Artificial Sequence
  GFR-binding peptide
  MOD_RES (2)..(4)..(35)..(36): Xaa is C or S
SXKXSKVVMSMEGIVKPTRGVMIQITINSLDQPVXX

SEQ ID NO: 48982 - protein, 42 aa, Artificial Sequence
  GFR-binding peptide
  MOD_RES (1)..(38): Xaa is C or S
XELHEELRNSLQELKPKKRVYEYYVVPLPEHHVRSPQXKVSS

SEQ ID NO: 48983 - protein, 36 aa, Artificial Sequence; identical to SEQ ID NO: 11718
  GFR-binding peptide
  MOD_RES (1)..(3)..(36): Xaa is C or S
  MOD_RES (14)..(15)..(16)..(17)..(18): Xaa is A or G
  MOD_RES (19)..(20)..(21)..(22): Xaa is A or G or is absent

SEQ ID NO: 48984 - protein, 39 aa, Artificial Sequence; identical to SEQ ID NO: 11721
  GFR-binding peptide
  MOD_RES (2)..(36)..(37): Xaa is C or S
  MOD_RES (14)..(15)..(16)..(17)..(18): Xaa is A or G
  MOD_RES (19)..(20)..(21)..(22): Xaa is A or G or is absent

SEQ ID NO: 48985 - protein, 42 aa, Artificial Sequence
  GFR-binding peptide
  MOD_RES (2)..(4)..(38): Xaa is C or S
  MOD_RES (16)..(17)..(18)..(19)..(20): Xaa is A or G
  MOD_RES (21)..(22)..(23)..(24): Xaa is A or G or is absent
RXEXKNHQLFNSLQEXXXXXXXXXYYVMPLPEEETPVXELGE

SEQ ID NO: 48986 - protein, 41 aa, Artificial Sequence; identical to SEQ ID NO: 11723
  GFR-binding peptide
  MOD_RES (1)..(3)..(36)..(37): Xaa is C or S
  MOD_RES (14)..(15)..(16)..(17)..(18): Xaa is A or G
  MOD_RES (19)..(20)..(21)..(22): Xaa is A or G or is absent

SEQ ID NO: 48987 - protein, 33 aa, Artificial Sequence
  GFR-binding peptide
  MOD_RES (2)..(2): Xaa is C or S
GXGEVVMEVTAKKVVKDYEDIKRMQVPRLETPV

SEQ ID NO: 48988 - protein, 43 aa, Artificial Sequence
  GFR-binding peptide
  MOD_RES (1)..(3)..(40): Xaa is C or S
XAXELHEELRNSLQELKPKKRVYEYYLVTLPEHHVRSPQXKVS

SEQ ID NO: 48989 - protein, 40 aa, Artificial Sequence
  GFR-binding peptide
  MOD_RES (1)..(3)..(36)..(37): Xaa is C or S
  MOD_RES (14)..(15)..(16)..(17)..(18): Xaa is A or G
  MOD_RES (19)..(20)..(21)..(22): Xaa is A or G or is absent
XKXSRVIMSMEGIXXXXXXXXXMIQITINSLAQPVXXPAA

SEQ ID NO: 48990 - protein, 39 aa, Artificial Sequence; identical to SEQ ID NO: 17123
  GFR-binding peptide
  MOD_RES (34)..(34): Xaa is C or S

SEQ ID NO: 48991 - protein, 36 aa, Artificial Sequence; identical to SEQ ID NO: 17125
  GFR-binding peptide
  MOD_RES (1)..(35): Xaa is C or S
  MOD_RES (13)..(14)..(15)..(16)..(17): Xaa is A or G
  MOD_RES (18)..(19)..(20)..(21): Xaa is A or G or is absent

SEQ ID NO: 48992 - protein, 42 aa, Artificial Sequence; identical to SEQ ID NO: 17127
  GFR-binding peptide
  MOD_RES (1)..(38): Xaa is C or S

SEQ ID NO: 48993 - protein, 41 aa, Artificial Sequence
  GFR-binding peptide
  MOD_RES (1)..(3)..(37): Xaa is C or S
  MOD_RES (15)..(16)..(17)..(18)..(19): Xaa is A or G
  MOD_RES (20)..(21)..(22)..(23): Xaa is A or G or is absent
XGXSRVVMNVQVEKXXXXXXXXXVKAVKVSRLKTPAXTPKT

SEQ ID NO: 48994 - protein, 39 aa, Artificial Sequence; identical to SEQ ID NO: 11728
  GFR-binding peptide
  MOD_RES (2)..(34)..(35): Xaa is C or S

SEQ ID NO: 48995 - protein, 36 aa, Artificial Sequence; identical to SEQ ID NO: 11732
  GFR-binding peptide
  MOD_RES (1)..(3)..(35)..(36): Xaa is C or S

SEQ ID NO: 48996 - protein, 38 aa, Artificial Sequence
  GFR-binding peptide
  MOD_RES (1)..(3): Xaa is C or S
  MOD_RES (16)..(17)..(18)..(19)..(20): Xaa is A or G
  MOD_RES (21)..(22)..(23)..(24): Xaa is A or G or is absent
XKXALHDELTNSLQEXXXXXXXXXYYLVTLPELQVQTP

SEQ ID NO: 48997 - protein, 36 aa, Artificial Sequence
  GFR-binding peptide
  MOD_RES (2)..(34)..(35): Xaa is C or S
GXARVVMNSMEGIIVNSSDDMIQVTINSLQTPAXXP

SEQ ID NO: 48998 - protein, 35 aa, Artificial Sequence; identical to SEQ ID NO: 17130
  GFR-binding peptide
  MOD_RES (34)..(34): Xaa is C or S
  MOD_RES (12)..(13)..(14)..(15)..(16): Xaa is A or G
  MOD_RES (17)..(18)..(19)..(20): Xaa is A or G or is absent

SEQ ID NO: 48999 - protein, 37 aa, Artificial Sequence; identical to SEQ ID NO: 11736
  GFR-binding peptide
  MOD_RES (33)..(34): Xaa is C or S
  MOD_RES (11)..(12)..(13)..(14)..(15): Xaa is A or G
  MOD_RES (16)..(17)..(18)..(19): Xaa is A or G or is absent

SEQ ID NO: 49000 - protein, 41 aa, Artificial Sequence
  GFR-binding peptide
  MOD_RES (2)..(4)..(37)..(38): Xaa is C or S
  MOD_RES (15)..(16)..(17)..(18)..(19): Xaa is A or G
  MOD_RES (20)..(21)..(22)..(23): Xaa is A or G or is absent
SXKXSRVIMVQVEKXXXXXXXXXVKAIKVSRLAQPVXXPAA

SEQ ID NO: 49001 - protein, 41 aa, Artificial Sequence; identical to SEQ ID NO: 11737
  GFR-binding peptide
  MOD_RES (2)..(4)..(38)..(39): Xaa is C or S
  MOD_RES (16)..(17)..(18)..(19)..(20): Xaa is A or G
  MOD_RES (21)..(22)..(23)..(24): Xaa is A or G or is absent

SEQ ID NO: 49002 - protein, 34 aa, Artificial Sequence
  GFR-binding peptide
  MOD_RES (33)..(33): Xaa is C or S
NHQLFNSLQEHQGQHPKIRYYLMTLPEEETPVXE

SEQ ID NO: 49003 - protein, 38 aa, Artificial Sequence; identical to SEQ ID NO: 17136
  GFR-binding peptide
  MOD_RES (2)..(36): Xaa is C or S

SEQ ID NO: 49004 - protein, 37 aa, Artificial Sequence
  GFR-binding peptide
  MOD_RES (2)..(4)..(35)..(36): Xaa is C or S
SXKXSRVIMVTAKKVKPKRGVIKRIQVPRLAQPVXXP

SEQ ID NO: 49005 - protein, 35 aa, Artificial Sequence; identical to SEQ ID NO: 17138
  GFR-binding peptide

SEQ ID NO: 49006 - protein, 34 aa, Artificial Sequence
  GFR-binding peptide
  MOD_RES (34)..(34): Xaa is C or S
  MOD_RES (12)..(13)..(14)..(15)..(16): Xaa is A or G
  MOD_RES (17)..(18)..(19)..(20): Xaa is A or G or is absent
ARVVMNVTAKKXXXXXXXXXIKRVQVPRLQTPAX

SEQ ID NO: 49007 - protein, 39 aa, Artificial Sequence
  GFR-binding peptide
  MOD_RES (36)..(36): Xaa is C or S
LHEELRNSLQELKPKKRVYEYYVVPLPEHHVRSPQXKVS

SEQ ID NO: 49008 - protein, 36 aa, Artificial Sequence
  GFR-binding peptide
  MOD_RES (1)..(33)..(34): Xaa is C or S
XARVVMNSMEGIIVNSSDDMIQVTINSLQTPAXXPK

SEQ ID NO: 49009 - protein, 42 aa, Artificial Sequence
  GFR-binding peptide
  MOD_RES (2)..(4)..(38)..(39): Xaa is C or S
  MOD_RES (16)..(17)..(18)..(19)..(20): Xaa is A or G
  MOD_RES (21)..(22)..(23)..(24): Xaa is A or G or is absent
RXGXGEVVMESMEGIXXXXXXXXXMIQMTINSLETPVXXAKP

SEQ ID NO: 49010 - protein, 33 aa, Artificial Sequence; identical to SEQ ID NO: 11744
  GFR-binding peptide
  MOD_RES (2)..(2): Xaa is C or S

SEQ ID NO: 49011 - protein, 31 aa, Artificial Sequence
  GFR-binding peptide
  MOD_RES (31)..(31): Xaa is C or S
SKVVMSMEGIVKPTRGVMIQITINSLDQPVX

SEQ ID NO: 49012 - protein, 39 aa, Artificial Sequence; identical to SEQ ID NO: 17144
  GFR-binding peptide
  MOD_RES (2)..(39): Xaa is C or S
  MOD_RES (15)..(16)..(17)..(18)..(19): Xaa is A or G
  MOD_RES (20)..(21)..(22)..(23): Xaa is A or G or is absent

SEQ ID NO: 49013 - protein, 34 aa, Artificial Sequence; identical to SEQ ID NO: 17145
  GFR-binding peptide
  MOD_RES (11)..(12)..(13)..(14)..(15): Xaa is A or G
  MOD_RES (16)..(17)..(18)..(19): Xaa is A or G or is absent

SEQ ID NO: 49014 - protein, 38 aa, Artificial Sequence
  GFR-binding peptide
  MOD_RES (1)..(34)..(35): Xaa is C or S
  MOD_RES (12)..(13)..(14)..(15)..(16): Xaa is A or G
  MOD_RES (17)..(18)..(19)..(20): Xaa is A or G or is absent
XSKVIMSMEGIXXXXXXXXXMIQITINSLDQSVXXPSA

SEQ ID NO: 49015 - protein, 37 aa, Artificial Sequence
  GFR-binding peptide
  MOD_RES (1)..(32)..(33): Xaa is C or S
XSKVVMSMEGIVKPTRGVMIQITINSLDQPVXXPSAS

SEQ ID NO: 49016 - protein, 39 aa, Artificial Sequence
  GFR-binding peptide
  MOD_RES (1)..(35)..(36): Xaa is C or S
  MOD_RES (13)..(14)..(15)..(16)..(17): Xaa is A or G
  MOD_RES (18)..(19)..(20)..(21): Xaa is A or G or is absent
XSRVVMNSMEGIXXXXXXXXXMIQVTINSLKTPAXXPKP

SEQ ID NO: 49017 - protein, 35 aa, Artificial Sequence
  GFR-binding peptide
  MOD_RES (33)..(34): Xaa is C or S
  MOD_RES (11)..(12)..(13)..(14)..(15): Xaa is A or G
  MOD_RES (16)..(17)..(18)..(19): Xaa is A or G or is absent
SKVIMVTAKKXXXXXXXXXIKRIQVPRLDQSVXXP

SEQ ID NO: 49018 - protein, 42 aa, Artificial Sequence
  GFR-binding peptide
  MOD_RES (2)..(36)..(37): Xaa is C or S
  MOD_RES (14)..(15)..(16)..(17)..(18): Xaa is A or G
  MOD_RES (19)..(20)..(21)..(22): Xaa is A or G or is absent
GXGEVVMDSMEGIXXXXXXXXXMIQMTINSLETPVXXAKPIK

SEQ ID NO: 49019 - protein, 41 aa, Artificial Sequence
  GFR-binding peptide
  MOD_RES (1)..(3)..(35)..(36): Xaa is C or S
XGXGEVVMDSMEGIVVKENEDMIQMTINSLETPVXXAKPIK

SEQ ID NO: 49020 - protein, 43 aa, Artificial Sequence
  GFR-binding peptide
  MOD_RES (2)..(4)..(37)..(38): Xaa is C or S
  MOD_RES (15)..(16)..(17)..(18)..(19): Xaa is A or G
  MOD_RES (20)..(21)..(22)..(23): Xaa is A or G or is absent
SXKXSKVIMSMEGIXXXXXXXXXMIQITINSLDQSVXXPSASA

SEQ ID NO: 49021 - protein, 36 aa, Artificial Sequence
  GFR-binding peptide
  MOD_RES (31)..(32): Xaa is C or S
EVVMEVQVEKVVKDYEDVKAMKVSRLETPVXXAKPI

SEQ ID NO: 49022 - protein, 33 aa, Artificial Sequence
  GFR-binding peptide
  MOD_RES (33)..(33): Xaa is C or S
  MOD_RES (11)..(12)..(13)..(14)..(15): Xaa is A or G
  MOD_RES (16)..(17)..(18)..(19): Xaa is A or G or is absent
SKVIMVQVEKXXXXXXXXXVKAIKVSRLDQSVX

SEQ ID NO: 49023 - protein, 37 aa, Artificial Sequence; identical to SEQ ID NO: 11756
  GFR-binding peptide
  MOD_RES (1)..(35)..(36): Xaa is C or S
  MOD_RES (13)..(14)..(15)..(16)..(17): Xaa is A or G
  MOD_RES (18)..(19)..(20)..(21): Xaa is A or G or is absent

SEQ ID NO: 49024 - protein, 45 aa, Artificial Sequence; identical to SEQ ID NO: 17155
  GFR-binding peptide
  MOD_RES (2)..(4)..(41): Xaa is C or S
  MOD_RES (17)..(18)..(19)..(20)..(21): Xaa is A or G
  MOD_RES (22)..(23)..(24)..(25): Xaa is A or G or is absent

SEQ ID NO: 49025 - protein, 42 aa, Artificial Sequence; identical to SEQ ID NO: 11757
  GFR-binding peptide
  MOD_RES (1)..(3)..(36)..(37): Xaa is C or S
  MOD_RES (14)..(15)..(16)..(17)..(18): Xaa is A or G
  MOD_RES (19)..(20)..(21)..(22): Xaa is A or G or is absent

SEQ ID NO: 49026 - protein, 39 aa, Artificial Sequence
  GFR-binding peptide
  MOD_RES (1)..(3)..(35): Xaa is C or S
XGXSRVVMNVTAKKIVNSSDDIKRVQVPRLKTPAXTPKT

SEQ ID NO: 49027 - protein, 43 aa, Artificial Sequence; identical to SEQ ID NO: 11758
  GFR-binding peptide
  MOD_RES (2)..(4)..(37)..(38): Xaa is C or S
  MOD_RES (15)..(16)..(17)..(18)..(19): Xaa is A or G
  MOD_RES (20)..(21)..(22)..(23): Xaa is A or G or is absent

SEQ ID NO: 49028 - protein, 44 aa, Artificial Sequence
  GFR-binding peptide
  MOD_RES (1)..(3)..(40): Xaa is C or S
XKXALHDELTNSLQEFIPKKRVIEYYLVTLPELQVQTPRXQVNR

SEQ ID NO: 49029 - protein, 35 aa, Artificial Sequence
  GFR-binding peptide
  MOD_RES (31)..(32): Xaa is C or S
RVVMNVTAKKIVNSSDDIKRVQVPRLQTPAXXPKP

SEQ ID NO: 49030 - protein, 39 aa, Artificial Sequence; identical to SEQ ID NO: 17156
  GFR-binding peptide
  MOD_RES (1)..(3): Xaa is C or S

SEQ ID NO: 49031 - protein, 38 aa, Artificial Sequence
  GFR-binding peptide
  MOD_RES (1)..(3)..(36)..(37): Xaa is C or S
  MOD_RES (14)..(15)..(16)..(17)..(18): Xaa is A or G
  MOD_RES (19)..(20)..(21)..(22): Xaa is A or G or is absent
XKXSKVIMVQVEKXXXXXXXXXVKAIKVSRLDQSVXXP

SEQ ID NO: 49032 - protein, 36 aa, Artificial Sequence
  GFR-binding peptide
  MOD_RES (2)..(2): Xaa is C or S
  MOD_RES (15)..(16)..(17)..(18)..(19): Xaa is A or G
  MOD_RES (20)..(21)..(22)..(23): Xaa is A or G or is absent
KXALHDELTNSLQEXXXXXXXXXYYLVTLPELQVQT

SEQ ID NO: 49033 - protein, 43 aa, Artificial Sequence; identical to SEQ ID NO: 17157
  GFR-binding peptide
  MOD_RES (2)..(4)..(38): Xaa is C or S

SEQ ID NO: 49034 - protein, 41 aa, Artificial Sequence
  GFR-binding peptide
  MOD_RES (2)..(35)..(36): Xaa is C or S
  MOD_RES (13)..(14)..(15)..(16)..(17): Xaa is A or G
  MOD_RES (18)..(19)..(20)..(21): Xaa is A or G or is absent
KXSKVVMVQVEKXXXXXXXXXVKAIKVSRLDQPVXXPSASA

SEQ ID NO: 49035 - protein, 39 aa, Artificial Sequence
  GFR-binding peptide
  MOD_RES (2)..(4)..(36)..(37): Xaa is C or S
RXGXGEVVMDVTAKKVVKENEDIKRMQVPRLETPVXXAK

SEQ ID NO: 49036 - protein, 38 aa, Artificial Sequence; identical to SEQ ID NO: 11760
  GFR-binding peptide
  MOD_RES (2)..(36)..(37): Xaa is C or S
  MOD_RES (14)..(15)..(16)..(17)..(18): Xaa is A or G
  MOD_RES (19)..(20)..(21)..(22): Xaa is A or G or is absent

SEQ ID NO: 49037 - protein, 37 aa, Artificial Sequence
  GFR-binding peptide
  MOD_RES (2)..(35)..(36): Xaa is C or S
  MOD_RES (13)..(14)..(15)..(16)..(17): Xaa is A or G
  MOD_RES (18)..(19)..(20)..(21): Xaa is A or G or is absent
KXSRVIMVTAKKXXXXXXXXXIKRIQVPRLAQPVXXP

SEQ ID NO: 49038 - protein, 40 aa, Artificial Sequence; identical to SEQ ID NO: 17161
  GFR-binding peptide
  MOD_RES (2)..(39): Xaa is C or S

SEQ ID NO: 49039 - protein, 35 aa, Artificial Sequence
  GFR-binding peptide
  MOD_RES (34)..(34): Xaa is C or S
  MOD_RES (12)..(13)..(14)..(15)..(16): Xaa is A or G
  MOD_RES (17)..(18)..(19)..(20): Xaa is A or G or is absent
KNHQLFNSLQEXXXXXXXXXYYLMTLPEEETPVXE

SEQ ID NO: 49040 - protein, 37 aa, Artificial Sequence
  GFR-binding peptide
  MOD_RES (2)..(36): Xaa is C or S
  MOD_RES (14)..(15)..(16)..(17)..(18): Xaa is A or G
  MOD_RES (19)..(20)..(21)..(22): Xaa is A or G or is absent
EXKNHQLFNSLQEXXXXXXXXXYYVMPLPEEETPVXE

SEQ ID NO: 49041 - protein, 32 aa, Artificial Sequence; identical to SEQ ID NO: 11761
  GFR-binding peptide
  MOD_RES (31)..(32): Xaa is C or S

SEQ ID NO: 49042 - protein, 40 aa, Artificial Sequence
  GFR-binding peptide
  MOD_RES (34)..(34): Xaa is C or S
  MOD_RES (12)..(13)..(14)..(15)..(16): Xaa is A or G
  MOD_RES (17)..(18)..(19)..(20): Xaa is A or G or is absent
SRVVMNSMEGIXXXXXXXXXMIQVTINSLKTPAXTPKTVH

SEQ ID NO: 49043 - protein, 36 aa, Artificial Sequence; identical to SEQ ID NO: 11764
  GFR-binding peptide
  MOD_RES (2)..(34)..(35): Xaa is C or S

SEQ ID NO: 49044 - protein, 34 aa, Artificial Sequence; identical to SEQ ID NO: 11767
  GFR-binding peptide
  MOD_RES (1)..(3): Xaa is C or S

SEQ ID NO: 49045 - protein, 39 aa, Artificial Sequence; identical to SEQ ID NO: 11768
  GFR-binding peptide
  MOD_RES (1)..(3)..(36)..(37): Xaa is C or S
  MOD_RES (14)..(15)..(16)..(17)..(18): Xaa is A or G
  MOD_RES (19)..(20)..(21)..(22): Xaa is A or G or is absent

SEQ ID NO: 49046 - protein, 37 aa, Artificial Sequence; identical to SEQ ID NO: 11769
  GFR-binding peptide
  MOD_RES (31)..(32): Xaa is C or S

SEQ ID NO: 49047 - protein, 40 aa, Artificial Sequence
  GFR-binding peptide
  MOD_RES (2)..(39): Xaa is C or S
AXELHEELRNSLQELKPKKRVYEYYLVTLPEHHVRSPQXK

SEQ ID NO: 49048 - protein, 32 aa, Artificial Sequence
  GFR-binding peptide
  MOD_RES (1)..(32): Xaa is C or S
XSRVIMVQVEKVKPKRGVVKAIKVSRLAQPVX

SEQ ID NO: 49049 - protein, 34 aa, Artificial Sequence
  GFR-binding peptide
LHEELRNSLQELKPKKRVYEYYVVPLPEHHVRSP

SEQ ID NO: 49050 - protein, 33 aa, Artificial Sequence; identical to SEQ ID NO: 11772
  GFR-binding peptide
  MOD_RES (31)..(32): Xaa is C or S

SEQ ID NO: 49051 - protein, 40 aa, Artificial Sequence
  GFR-binding peptide
  MOD_RES (1)..(34)..(35): Xaa is C or S
  MOD_RES (12)..(13)..(14)..(15)..(16): Xaa is A or G
  MOD_RES (17)..(18)..(19)..(20): Xaa is A or G or is absent
XSKVVMVQVEKXXXXXXXXXVKAIKVSRLDQPVXXPSASA

SEQ ID NO: 49052 - protein, 38 aa, Artificial Sequence; identical to SEQ ID NO: 11776
  GFR-binding peptide
  MOD_RES (2)..(4)..(35)..(36): Xaa is C or S

SEQ ID NO: 49053 - protein, 42 aa, Artificial Sequence
  GFR-binding peptide
  MOD_RES (2)..(4)..(37)..(38): Xaa is C or S
  MOD_RES (15)..(16)..(17)..(18)..(19): Xaa is A or G
  MOD_RES (20)..(21)..(22)..(23): Xaa is A or G or is absent
SXKXSRVIMSMEGIXXXXXXXXXMIQITINSLAQPVXXPAAS

SEQ ID NO: 49054 - protein, 39 aa, Artificial Sequence; identical to SEQ ID NO: 17168
  GFR-binding peptide
  MOD_RES (1)..(3): Xaa is C or S

SEQ ID NO: 49055 - protein, 40 aa, Artificial Sequence
  GFR-binding peptide
  MOD_RES (1)..(35)..(36): Xaa is C or S
  MOD_RES (13)..(14)..(15)..(16)..(17): Xaa is A or G
  MOD_RES (18)..(19)..(20)..(21): Xaa is A or G or is absent
XARVVMNVQVEKXXXXXXXXXVKAVKVSRLQTPAXXPKPV

SEQ ID NO: 49056 - protein, 38 aa, Artificial Sequence
  GFR-binding peptide
  MOD_RES (1)..(32)..(33): Xaa is C or S
XSRVIMVQVEKVKPKRGVVKAIKVSRLAQPVXXPAASA

SEQ ID NO: 49057 - protein, 42 aa, Artificial Sequence
  GFR-binding peptide
  MOD_RES (2)..(36): Xaa is C or S
  MOD_RES (14)..(15)..(16)..(17)..(18): Xaa is A or G
  MOD_RES (19)..(20)..(21)..(22): Xaa is A or G or is absent
EXKNHQLFNSLQEXXXXXXXXXYYVMPLPEEETPVXELGEDN

SEQ ID NO: 49058 - protein, 36 aa, Artificial Sequence
  GFR-binding peptide
  MOD_RES (1)..(3)..(36): Xaa is C or S
  MOD_RES (14)..(15)..(16)..(17)..(18): Xaa is A or G
  MOD_RES (19)..(20)..(21)..(22): Xaa is A or G or is absent
XKXSRVIMVQVEKXXXXXXXXXVKAIKVSRLAQPVX

SEQ ID NO: 49059 - protein, 39 aa, Artificial Sequence; identical to SEQ ID NO: 35743
  GFR-binding peptide
  MOD_RES (2)..(35)..(36): Xaa is C or S
  MOD_RES (13)..(14)..(15)..(16)..(17): Xaa is A or G
  MOD_RES (18)..(19)..(20)..(21): Xaa is A or G or is absent

SEQ ID NO: 49060 - protein, 35 aa, Artificial Sequence
  GFR-binding peptide
  MOD_RES (1)..(35): Xaa is C or S
  MOD_RES (13)..(14)..(15)..(16)..(17): Xaa is A or G
  MOD_RES (18)..(19)..(20)..(21): Xaa is A or G or is absent
XGEVVMDVQVEKXXXXXXXXXVKAMKVSRLETPVX

SEQ ID NO: 49061 - protein, 34 aa, Artificial Sequence
  GFR-binding peptide
HDELTNSLQEFIPKKRVIEYYLVTLPELQVQTPR

SEQ ID NO: 49062 - protein, 32 aa, Artificial Sequence
  GFR-binding peptide
  MOD_RES (31)..(32): Xaa is C or S
EVVMEVTAKKVVKDYEDIKRMQVPRLETPVXX

SEQ ID NO: 49063 - protein, 40 aa, Artificial Sequence
  GFR-binding peptide
  MOD_RES (2)..(4): Xaa is C or S
  MOD_RES (17)..(18)..(19)..(20)..(21): Xaa is A or G
  MOD_RES (22)..(23)..(24)..(25): Xaa is A or G or is absent
AXAXELHEELRNSLQEXXXXXXXXXYYVVPLPEHHVRSPQ

SEQ ID NO: 49064 - protein, 32 aa, Artificial Sequence; identical to SEQ ID NO: 11782
  GFR-binding peptide
  MOD_RES (11)..(12)..(13)..(14)..(15): Xaa is A or G
  MOD_RES (16)..(17)..(18)..(19): Xaa is A or G or is absent

SEQ ID NO: 49065 - protein, 44 aa, Artificial Sequence; identical to SEQ ID NO: 17171
  GFR-binding peptide
  MOD_RES (2)..(4)..(41): Xaa is C or S

SEQ ID NO: 49066 - protein, 36 aa, Artificial Sequence
  GFR-binding peptide
  MOD_RES (1)..(33)..(34): Xaa is C or S
XGEVVMDVTAKKVVKENEDIKRMQVPRLETPVXXAK

SEQ ID NO: 49067 - protein, 34 aa, Artificial Sequence; identical to SEQ ID NO: 11783
  GFR-binding peptide
  MOD_RES (31)..(32): Xaa is C or S

SEQ ID NO: 49068 - protein, 43 aa, Artificial Sequence; identical to SEQ ID NO: 17172
  GFR-binding peptide
  MOD_RES (2)..(39): Xaa is C or S

SEQ ID NO: 49069 - protein, 31 aa, Artificial Sequence
  GFR-binding peptide
GEVVMDSMEGIVVKENEDMIQMTINSLETPV

SEQ ID NO: 49070 - protein, 33 aa, Artificial Sequence
  GFR-binding peptide
  MOD_RES (12)..(13)..(14)..(15)..(16): Xaa is A or G
  MOD_RES (17)..(18)..(19)..(20): Xaa is A or G or is absent
GEVVMDVTAKKXXXXXXXXXIKRMQVPRLETPV

SEQ ID NO: 49071 - protein, 41 aa, Artificial Sequence
  GFR-binding peptide
  MOD_RES (2)..(4)..(38): Xaa is C or S
  MOD_RES (16)..(17)..(18)..(19)..(20): Xaa is A or G
  MOD_RES (21)..(22)..(23)..(24): Xaa is A or G or is absent
RXEXKNHQLFNSLQEXXXXXXXXXYYLMTLPEEETPVXELG

SEQ ID NO: 49072 - protein, 40 aa, Artificial Sequence; identical to SEQ ID NO: 17174
  GFR-binding peptide
  MOD_RES (34)..(34): Xaa is C or S

SEQ ID NO: 49073 - protein, 36 aa, Artificial Sequence; identical to SEQ ID NO: 11785
  GFR-binding peptide
  MOD_RES (1)..(3)..(36): Xaa is C or S
  MOD_RES (14)..(15)..(16)..(17)..(18): Xaa is A or G
  MOD_RES (19)..(20)..(21)..(22): Xaa is A or G or is absent

SEQ ID NO: 49074 - protein, 32 aa, Artificial Sequence; identical to SEQ ID NO: 11786
  GFR-binding peptide
  MOD_RES (1)..(32): Xaa is C or S

SEQ ID NO: 49075 - protein, 41 aa, Artificial Sequence
  GFR-binding peptide
  MOD_RES (2)..(4)..(37)..(38): Xaa is C or S
  MOD_RES (15)..(16)..(17)..(18)..(19): Xaa is A or G
  MOD_RES (20)..(21)..(22)..(23): Xaa is A or G or is absent
SXKXSRVIMVTAKKXXXXXXXXXIKRIQVPRLAQPVXXPAA

SEQ ID NO: 49076 - protein, 36 aa, Artificial Sequence; identical to SEQ ID NO: 11788
  GFR-binding peptide
  MOD_RES (31)..(32): Xaa is C or S

SEQ ID NO: 49077 - protein, 36 aa, Artificial Sequence
  GFR-binding peptide
  MOD_RES (2)..(33)..(34): Xaa is C or S
KXSKVVMVTAKKVKPTRGVIKRIQVPRLDQPVXXPS

SEQ ID NO: 49078 - protein, 34 aa, Artificial Sequence; identical to SEQ ID NO: 35763
  GFR-binding peptide
  MOD_RES (2)..(2): Xaa is C or S
  MOD_RES (13)..(14)..(15)..(16)..(17): Xaa is A or G
  MOD_RES (18)..(19)..(20)..(21): Xaa is A or G or is absent

SEQ ID NO: 49079 - protein, 36 aa, Artificial Sequence; identical to SEQ ID NO: 17177
  GFR-binding peptide
  MOD_RES (36)..(36): Xaa is C or S

SEQ ID NO: 49080 - protein, 41 aa, Artificial Sequence; identical to SEQ ID NO: 11791
  GFR-binding peptide
  MOD_RES (1)..(3)..(37)..(38): Xaa is C or S
  MOD_RES (15)..(16)..(17)..(18)..(19): Xaa is A or G
  MOD_RES (20)..(21)..(22)..(23): Xaa is A or G or is absent

SEQ ID NO: 49081 - protein, 32 aa, Artificial Sequence
  GFR-binding peptide
  MOD_RES (11)..(12)..(13)..(14)..(15): Xaa is A or G
  MOD_RES (16)..(17)..(18)..(19): Xaa is A or G or is absent
RVVMNSMEGIXXXXXXXXXMIQVTINSLKTPA

SEQ ID NO: 49082 - protein, 33 aa, Artificial Sequence
  GFR-binding peptide
  MOD_RES (33)..(33): Xaa is C or S
  MOD_RES (11)..(12)..(13)..(14)..(15): Xaa is A or G
  MOD_RES (16)..(17)..(18)..(19): Xaa is A or G or is absent
RVVMNVQVEKXXXXXXXXXVKAVKVSRLKTPAX

SEQ ID NO: 49083 - protein, 37 aa, Artificial Sequence; identical to SEQ ID NO: 11793
  GFR-binding peptide
  MOD_RES (31)..(32): Xaa is C or S

SEQ ID NO: 49084 - protein, 37 aa, Artificial Sequence; identical to SEQ ID NO: 11795
  GFR-binding peptide
  MOD_RES (1)..(3)..(36)..(37): Xaa is C or S
  MOD_RES (14)..(15)..(16)..(17)..(18): Xaa is A or G
  MOD_RES (19)..(20)..(21)..(22): Xaa is A or G or is absent

SEQ ID NO: 49085 - protein, 40 aa, Artificial Sequence; identical to SEQ ID NO: 11796
  GFR-binding peptide
  MOD_RES (2)..(4)..(38)..(39): Xaa is C or S
  MOD_RES (16)..(17)..(18)..(19)..(20): Xaa is A or G
  MOD_RES (21)..(22)..(23)..(24): Xaa is A or G or is absent

SEQ ID NO: 49086 - protein, 37 aa, Artificial Sequence
  GFR-binding peptide
  MOD_RES (33)..(33): Xaa is C or S
  MOD_RES (11)..(12)..(13)..(14)..(15): Xaa is A or G
  MOD_RES (16)..(17)..(18)..(19): Xaa is A or G or is absent
RVVMNVTAKKXXXXXXXXXIKRVQVPRLKTPAXTPKT

SEQ ID NO: 49087 - protein, 37 aa, Artificial Sequence
  GFR-binding peptide
  MOD_RES (33)..(33): Xaa is C or S
  MOD_RES (11)..(12)..(13)..(14)..(15): Xaa is A or G
  MOD_RES (16)..(17)..(18)..(19): Xaa is A or G or is absent
RVVMNVQVEKXXXXXXXXXVKAVKVSRLKTPAXTPKT

SEQ ID NO: 49088 - protein, 38 aa, Artificial Sequence
  GFR-binding peptide
  MOD_RES (2)..(4)..(36)..(37): Xaa is C or S
HXGXARVVMNSMEGIIVNSSDDMIQVTINSLQTPAXXP

SEQ ID NO: 49089 - protein, 36 aa, Artificial Sequence
  GFR-binding peptide
  MOD_RES (2)..(4): Xaa is C or S
  MOD_RES (15)..(16)..(17)..(18)..(19): Xaa is A or G
  MOD_RES (20)..(21)..(22)..(23): Xaa is A or G or is absent
SXKXSKVVMSMEGIXXXXXXXXXMIQITINSLDQPV

SEQ ID NO: 49090 - protein, 31 aa, Artificial Sequence
  GFR-binding peptide
GEVVMESMEGIVVKDYEDMIQMTINSLETPV

SEQ ID NO: 49091 - protein, 43 aa, Artificial Sequence; identical to SEQ ID NO: 11806
  GFR-binding peptide
  MOD_RES (2)..(4)..(38)..(39): Xaa is C or S
  MOD_RES (16)..(17)..(18)..(19)..(20): Xaa is A or G
  MOD_RES (21)..(22)..(23)..(24): Xaa is A or G or is absent

SEQ ID NO: 49092 - protein, 37 aa, Artificial Sequence; identical to SEQ ID NO: 17182
  GFR-binding peptide
  MOD_RES (35)..(35): Xaa is C or S

SEQ ID NO: 49093 - protein, 38 aa, Artificial Sequence
  GFR-binding peptide
  MOD_RES (2)..(4)..(38): Xaa is C or S
  MOD_RES (16)..(17)..(18)..(19)..(20): Xaa is A or G
  MOD_RES (21)..(22)..(23)..(24): Xaa is A or G or is absent
RXGXGEVVMEVTAKKXXXXXXXXXIKRMQVPRLETPVX

SEQ ID NO: 49094 - protein, 43 aa, Artificial Sequence
  GFR-binding peptide
  MOD_RES (2)..(4)..(38): Xaa is C or S
  MOD_RES (16)..(17)..(18)..(19)..(20): Xaa is A or G
  MOD_RES (21)..(22)..(23)..(24): Xaa is A or G or is absent
HXGXSRVVMNVTAKKXXXXXXXXXIKRVQVPRLKTPAXTPKTV

SEQ ID NO: 49095 - protein, 41 aa, Artificial Sequence
  GFR-binding peptide
  MOD_RES (1)..(3)..(37): Xaa is C or S
  MOD_RES (15)..(16)..(17)..(18)..(19): Xaa is A or G
  MOD_RES (20)..(21)..(22)..(23): Xaa is A or G or is absent
XGXSRVVMNVTAKKXXXXXXXXXIKRVQVPRLKTPAXTPKT

SEQ ID NO: 49096 - protein, 34 aa, Artificial Sequence; identical to SEQ ID NO: 17186
  GFR-binding peptide

SEQ ID NO: 49097 - protein, 36 aa, Artificial Sequence; identical to SEQ ID NO: 11810
  GFR-binding peptide
  MOD_RES (1)..(35)..(36): Xaa is C or S
  MOD_RES (13)..(14)..(15)..(16)..(17): Xaa is A or G
  MOD_RES (18)..(19)..(20)..(21): Xaa is A or G or is absent

SEQ ID NO: 49098 - protein, 39 aa, Artificial Sequence
  GFR-binding peptide
  MOD_RES (1)..(33)..(34): Xaa is C or S
XARVVMNSMEGIIVNSSDDMIQVTINSLQTPAXXPKPVT

SEQ ID NO: 49099 - protein, 43 aa, Artificial Sequence
  GFR-binding peptide
  MOD_RES (2)..(4)..(37)..(38): Xaa is C or S
  MOD_RES (15)..(16)..(17)..(18)..(19): Xaa is A or G
  MOD_RES (20)..(21)..(22)..(23): Xaa is A or G or is absent
SXKXSKVVMVTAKKXXXXXXXXXIKRIQVPRLDQPVXXPSASA

SEQ ID NO: 49100 - protein, 36 aa, Artificial Sequence
  GFR-binding peptide
  MOD_RES (36)..(36): Xaa is C or S
LHDELTNSLQEFIPKKRVIEYYLVTLPELQVQTPRX

SEQ ID NO: 49101 - protein, 40 aa, Artificial Sequence
  GFR-binding peptide
  MOD_RES (2)..(4): Xaa is C or S
EXKXALHDELTNSLQEFIPKKRVIEYYLVTLPELQVQTPR

SEQ ID NO: 49102 - protein, 44 aa, Artificial Sequence; identical to SEQ ID NO: 11815
  GFR-binding peptide
  MOD_RES (2)..(4)..(38): Xaa is C or S
  MOD_RES (16)..(17)..(18)..(19)..(20): Xaa is A or G
  MOD_RES (21)..(22)..(23)..(24): Xaa is A or G or is absent

SEQ ID NO: 49103 - protein, 33 aa, Artificial Sequence
  GFR-binding peptide
  MOD_RES (33)..(33): Xaa is C or S
  MOD_RES (11)..(12)..(13)..(14)..(15): Xaa is A or G
  MOD_RES (16)..(17)..(18)..(19): Xaa is A or G or is absent
RVVMNVTAKKXXXXXXXXXIKRVQVPRLKTPAX

SEQ ID NO: 49104 - protein, 39 aa, Artificial Sequence; identical to SEQ ID NO: 11816
  GFR-binding peptide
  MOD_RES (2)..(33)..(34): Xaa is C or S

SEQ ID NO: 49105 - protein, 37 aa, Artificial Sequence
  GFR-binding peptide
  MOD_RES (2)..(4)..(36)..(37): Xaa is C or S
RXGXGEVVMEVQVEKVVKDYEDVKAMKVSRLETPVXX

SEQ ID NO: 49106 - protein, 42 aa, Artificial Sequence
  GFR-binding peptide
  MOD_RES (2)..(39): Xaa is C or S
  MOD_RES (15)..(16)..(17)..(18)..(19): Xaa is A or G
  MOD_RES (20)..(21)..(22)..(23): Xaa is A or G or is absent
AXELHEELRNSLQEXXXXXXXXXYYLVTLPEHHVRSPQXKVS

SEQ ID NO: 49107 - protein, 34 aa, Artificial Sequence
  GFR-binding peptide
  MOD_RES (33)..(34): Xaa is C or S
  MOD_RES (11)..(12)..(13)..(14)..(15): Xaa is A or G
  MOD_RES (16)..(17)..(18)..(19): Xaa is A or G or is absent
RVVMNSMEGIXXXXXXXXXMIQVTINSLQTPAXX

SEQ ID NO: 49108 - protein, 32 aa, Artificial Sequence
  GFR-binding peptide
  MOD_RES (31)..(32): Xaa is C or S
SRVIMVTAKKVKPKRGVIKRIQVPRLAQPVXX

SEQ ID NO: 49109 - protein, 40 aa, Artificial Sequence
  GFR-binding peptide
  MOD_RES (2)..(39): Xaa is C or S
KXALHDELTNSLQEFIPKKRVIEYYLVTLPELQVQTPRXQ

SEQ ID NO: 49110 - protein, 36 aa, Artificial Sequence; identical to SEQ ID NO: 17193
  GFR-binding peptide
  MOD_RES (1)..(1): Xaa is C or S
  MOD_RES (14)..(15)..(16)..(17)..(18): Xaa is A or G
  MOD_RES (19)..(20)..(21)..(22): Xaa is A or G or is absent

SEQ ID NO: 49111 - protein, 41 aa, Artificial Sequence
  GFR-binding peptide
  MOD_RES (2)..(4)..(38): Xaa is C or S
  MOD_RES (16)..(17)..(18)..(19)..(20): Xaa is A or G
  MOD_RES (21)..(22)..(23)..(24): Xaa is A or G or is absent
HXGXSRVVMNSMEGIXXXXXXXXXMIQVTINSLKTPAXTPK

SEQ ID NO: 49112 - protein, 40 aa, Artificial Sequence; identical to SEQ ID NO: 11823
  GFR-binding peptide
  MOD_RES (2)..(36)..(37): Xaa is C or S
  MOD_RES (14)..(15)..(16)..(17)..(18): Xaa is A or G
  MOD_RES (19)..(20)..(21)..(22): Xaa is A or G or is absent

SEQ ID NO: 49113 - protein, 41 aa, Artificial Sequence; identical to SEQ ID NO: 17195
  GFR-binding peptide
  MOD_RES (2)..(39): Xaa is C or S
  MOD_RES (15)..(16)..(17)..(18)..(19): Xaa is A or G
  MOD_RES (20)..(21)..(22)..(23): Xaa is A or G or is absent

SEQ ID NO: 49114 - protein, 38 aa, Artificial Sequence; identical to SEQ ID NO: 11824
  GFR-binding peptide
  MOD_RES (2)..(35)..(36): Xaa is C or S
  MOD_RES (13)..(14)..(15)..(16)..(17): Xaa is A or G
  MOD_RES (18)..(19)..(20)..(21): Xaa is A or G or is absent

SEQ ID NO: 49115 - protein, 37 aa, Artificial Sequence; identical to SEQ ID NO: 17199
  GFR-binding peptide
  MOD_RES (35)..(35): Xaa is C or S

SEQ ID NO: 49116 - protein, 40 aa, Artificial Sequence
  GFR-binding peptide
  MOD_RES (2)..(34)..(35): Xaa is C or S
GXSRVVMNVTAKKIVNSSDDIKRVQVPRLKTPAXXPKPVY

SEQ ID NO: 49117 - protein, 38 aa, Artificial Sequence
  GFR-binding peptide
  MOD_RES (2)..(4)..(36)..(37): Xaa is C or S
RXGXGEVVMESMEGIVVKDYEDMIQMTINSLETPVXXA

SEQ ID NO: 49118 - protein, 37 aa, Artificial Sequence
  GFR-binding peptide
  MOD_RES (1)..(1): Xaa is C or S
  MOD_RES (14)..(15)..(16)..(17)..(18): Xaa is A or G
  MOD_RES (19)..(20)..(21)..(22): Xaa is A or G or is absent
XELHEELRNSLQEXXXXXXXXXYYVVPLPEHHVRSPQ

SEQ ID NO: 49119 - protein, 38 aa, Artificial Sequence; identical to SEQ ID NO: 17201
  GFR-binding peptide
  MOD_RES (1)..(38): Xaa is C or S

SEQ ID NO: 49120 - protein, 38 aa, Artificial Sequence
  GFR-binding peptide
  MOD_RES (2)..(4)..(38): Xaa is C or S
  MOD_RES (16)..(17)..(18)..(19)..(20): Xaa is A or G
  MOD_RES (21)..(22)..(23)..(24): Xaa is A or G or is absent
RXGXGEVVMDVQVEKXXXXXXXXXVKAMKVSRLETPVX

SEQ ID NO: 49121 - protein, 35 aa, Artificial Sequence; identical to SEQ ID NO: 11827
  GFR-binding peptide
  MOD_RES (32)..(33): Xaa is C or S

SEQ ID NO: 49122 - protein, 36 aa, Artificial Sequence; identical to SEQ ID NO: 11828
  GFR-binding peptide
  MOD_RES (31)..(32): Xaa is C or S

SEQ ID NO: 49123 - protein, 39 aa, Artificial Sequence
  GFR-binding peptide
  MOD_RES (33)..(34): Xaa is C or S
  MOD_RES (11)..(12)..(13)..(14)..(15): Xaa is A or G
  MOD_RES (16)..(17)..(18)..(19): Xaa is A or G or is absent
SRVIMSMEGIXXXXXXXXXMIQITINSLAQPVXXPAASA

SEQ ID NO: 49124 - protein, 35 aa, Artificial Sequence
  GFR-binding peptide
  MOD_RES (2)..(4)..(35): Xaa is C or S
SXKXSKVVMVQVEKVKPTRGVVKAIKVSRLDQPVX

SEQ ID NO: 49125 - protein, 41 aa, Artificial Sequence; identical to SEQ ID NO: 17204
  GFR-binding peptide
  MOD_RES (2)..(39): Xaa is C or S
  MOD_RES (15)..(16)..(17)..(18)..(19): Xaa is A or G
  MOD_RES (20)..(21)..(22)..(23): Xaa is A or G or is absent

SEQ ID NO: 49126 - protein, 43 aa, Artificial Sequence; identical to SEQ ID NO: 17207
  GFR-binding peptide
  MOD_RES (1)..(3)..(37): Xaa is C or S
  MOD_RES (15)..(16)..(17)..(18)..(19): Xaa is A or G
  MOD_RES (20)..(21)..(22)..(23): Xaa is A or G or is absent

SEQ ID NO: 49127 - protein, 41 aa, Artificial Sequence; identical to SEQ ID NO: 11833
  GFR-binding peptide
  MOD_RES (2)..(36)..(37): Xaa is C or S
  MOD_RES (14)..(15)..(16)..(17)..(18): Xaa is A or G
  MOD_RES (19)..(20)..(21)..(22): Xaa is A or G or is absent

SEQ ID NO: 49128 - protein, 32 aa, Artificial Sequence; identical to SEQ ID NO: 11834
  GFR-binding peptide
  MOD_RES (1)..(1): Xaa is C or S

SEQ ID NO: 49129 - protein, 33 aa, Artificial Sequence; identical to SEQ ID NO: 17208
  GFR-binding peptide
  MOD_RES (33)..(33): Xaa is C or S

SEQ ID NO: 49130 - protein, 32 aa, Artificial Sequence; identical to SEQ ID NO: 11837
  GFR-binding peptide
  MOD_RES (32)..(32): Xaa is C or S

SEQ ID NO: 49131 - protein, 37 aa, Artificial Sequence
  GFR-binding peptide
  MOD_RES (2)..(33)..(34): Xaa is C or S
KXSRVIMVTAKKVKPKRGVIKRIQVPRLAQPVXXPAA

SEQ ID NO: 49132 - protein, 37 aa, Artificial Sequence; identical to SEQ ID NO: 17209
  GFR-binding peptide
  MOD_RES (37)..(37): Xaa is C or S
  MOD_RES (13)..(14)..(15)..(16)..(17): Xaa is A or G
  MOD_RES (18)..(19)..(20)..(21): Xaa is A or G or is absent

SEQ ID NO: 49133 - protein, 42 aa, Artificial Sequence; identical to SEQ ID NO: 17211
  GFR-binding peptide
  MOD_RES (1)..(38): Xaa is C or S

SEQ ID NO: 49134 - protein, 39 aa, Artificial Sequence; identical to SEQ ID NO: 11839
  GFR-binding peptide
  MOD_RES (2)..(4)..(36)..(37): Xaa is C or S

SEQ ID NO: 49135 - protein, 38 aa, Artificial Sequence; identical to SEQ ID NO: 35843
  GFR-binding peptide
  MOD_RES (1)..(32)..(33): Xaa is C or S

SEQ ID NO: 49136 - protein, 41 aa, Artificial Sequence; identical to SEQ ID NO: 17212
  GFR-binding peptide
  MOD_RES (2)..(36): Xaa is C or S

SEQ ID NO: 49137 - protein, 36 aa, Artificial Sequence
  GFR-binding peptide
  MOD_RES (2)..(36): Xaa is C or S
  MOD_RES (14)..(15)..(16)..(17)..(18): Xaa is A or G
  MOD_RES (19)..(20)..(21)..(22): Xaa is A or G or is absent
GXARVVMNVQVEKXXXXXXXXXVKAVKVSRLQTPAX

SEQ ID NO: 49138 - protein, 40 aa, Artificial Sequence
  GFR-binding peptide
  MOD_RES (2)..(36)..(37): Xaa is C or S
  MOD_RES (14)..(15)..(16)..(17)..(18): Xaa is A or G
  MOD_RES (19)..(20)..(21)..(22): Xaa is A or G or is absent
GXARVVMNVTAKKXXXXXXXXXIKRVQVPRLQTPAXXPKP

SEQ ID NO: 49139 - protein, 40 aa, Artificial Sequence; identical to SEQ ID NO: 17216
  GFR-binding peptide
  MOD_RES (2)..(36): Xaa is C or S

SEQ ID NO: 49140 - protein, 34 aa, Artificial Sequence
  GFR-binding peptide
  MOD_RES (1)..(1): Xaa is C or S
  MOD_RES (13)..(14)..(15)..(16)..(17): Xaa is A or G
  MOD_RES (18)..(19)..(20)..(21): Xaa is A or G or is absent
XGEVVMDSMEGIXXXXXXXXXMIQMTINSLETPV

SEQ ID NO: 49141 - protein, 34 aa, Artificial Sequence
  GFR-binding peptide
  MOD_RES (31)..(32): Xaa is C or S
EVVMDVQVEKVVKENEDVKAMKVSRLETPVXXAK

SEQ ID NO: 49142 - protein, 41 aa, Artificial Sequence
  GFR-binding peptide
  MOD_RES (2)..(4)..(38)..(39): Xaa is C or S
  MOD_RES (16)..(17)..(18)..(19)..(20): Xaa is A or G
  MOD_RES (21)..(22)..(23)..(24): Xaa is A or G or is absent
HXGXSRVVMNVTAKKXXXXXXXXXIKRVQVPRLKTPAXXPK

SEQ ID NO: 49143 - protein, 38 aa, Artificial Sequence
  GFR-binding peptide
  MOD_RES (2)..(33)..(34): Xaa is C or S
KXSRVIMSMEGIVKPKRGVMIQITINSLAQPVXXPAAS

SEQ ID NO: 49144 - protein, 34 aa, Artificial Sequence
  GFR-binding peptide
  MOD_RES (11)..(12)..(13)..(14)..(15): Xaa is A or G
  MOD_RES (16)..(17)..(18)..(19): Xaa is A or G or is absent
HEELRNSLQEXXXXXXXXXYYVVPLPEHHVRSPQ

SEQ ID NO: 49145 - protein, 36 aa, Artificial Sequence
  GFR-binding peptide
  MOD_RES (2)..(4)..(36): Xaa is C or S
HXGXSRVVMNSMEGIIVNSSDDMIQVTINSLKTPAX

SEQ ID NO: 49146 - protein, 43 aa, Artificial Sequence; identical to SEQ ID NO: 11847
  GFR-binding peptide
  MOD_RES (1)..(3)..(37)..(38): Xaa is C or S
  MOD_RES (15)..(16)..(17)..(18)..(19): Xaa is A or G
  MOD_RES (20)..(21)..(22)..(23): Xaa is A or G or is absent

SEQ ID NO: 49147 - protein, 43 aa, Artificial Sequence
  GFR-binding peptide
  MOD_RES (1)..(3)..(40): Xaa is C or S
XKXALHDELTNSLQEFIPKKRVIEYYVVPLPELQVQTPRXQVN

SEQ ID NO: 49148 - protein, 34 aa, Artificial Sequence; identical to SEQ ID NO: 11848
  GFR-binding peptide
  MOD_RES (1)..(3): Xaa is C or S

SEQ ID NO: 49149 - protein, 42 aa, Artificial Sequence
  GFR-binding peptide
  MOD_RES (2)..(36)..(37): Xaa is C or S
  MOD_RES (14)..(15)..(16)..(17)..(18): Xaa is A or G
  MOD_RES (19)..(20)..(21)..(22): Xaa is A or G or is absent
GXARVVMNVTAKKXXXXXXXXXIKRVQVPRLQTPAXXPKPVT

SEQ ID NO: 49150 - protein, 36 aa, Artificial Sequence; identical to SEQ ID NO: 11852
  GFR-binding peptide
  MOD_RES (1)..(3)..(34)..(35): Xaa is C or S

SEQ ID NO: 49151 - protein, 42 aa, Artificial Sequence; identical to SEQ ID NO: 11855
  GFR-binding peptide
  MOD_RES (2)..(4)..(36)..(37): Xaa is C or S

SEQ ID NO: 49152 - protein, 44 aa, Artificial Sequence; identical to SEQ ID NO: 17220
  GFR-binding peptide
  MOD_RES (2)..(4)..(41): Xaa is C or S
  MOD_RES (17)..(18)..(19)..(20)..(21): Xaa is A or G
  MOD_RES (22)..(23)..(24)..(25): Xaa is A or G or is absent

SEQ ID NO: 49153 - protein, 36 aa, Artificial Sequence; identical to SEQ ID NO: 17221
  GFR-binding peptide
  MOD_RES (1)..(3): Xaa is C or S

SEQ ID NO: 49154 - protein, 35 aa, Artificial Sequence
  GFR-binding peptide
ALHDELTNSLQEFIPKKRVIEYYLVTLPELQVQTP

SEQ ID NO: 49155 - protein, 38 aa, Artificial Sequence
  GFR-binding peptide
  MOD_RES (1)..(33)..(34): Xaa is C or S
XARVVMNSMEGIIVNSSDDMIQVTINSLQTPAXXPKPV

SEQ ID NO: 49156 - protein, 35 aa, Artificial Sequence
  GFR-binding peptide
  MOD_RES (2)..(34): Xaa is C or S
GXSRVVMNSMEGIIVNSSDDMIQVTINSLKTPAXT

SEQ ID NO: 49157 - protein, 38 aa, Artificial Sequence; identical to SEQ ID NO: 17227
  GFR-binding peptide
  MOD_RES (2)..(2): Xaa is C or S
  MOD_RES (15)..(16)..(17)..(18)..(19): Xaa is A or G
  MOD_RES (20)..(21)..(22)..(23): Xaa is A or G or is absent

SEQ ID NO: 49158 - protein, 39 aa, Artificial Sequence
  GFR-binding peptide
  MOD_RES (1)..(3)..(35)..(36): Xaa is C or S
XGXGEVVMEVTAKKVVKDYEDIKRMQVPRLETPVXXAKP

SEQ ID NO: 49159 - protein, 35 aa, Artificial Sequence
  GFR-binding peptide
  MOD_RES (1)..(3): Xaa is C or S
  MOD_RES (14)..(15)..(16)..(17)..(18): Xaa is A or G
  MOD_RES (19)..(20)..(21)..(22): Xaa is A or G or is absent
XKXSKVIMSMEGIXXXXXXXXXMIQITINSLDQSV

SEQ ID NO: 49160 - protein, 38 aa, Artificial Sequence; identical to SEQ ID NO: 11861
  GFR-binding peptide
  MOD_RES (2)..(4)..(36)..(37): Xaa is C or S

SEQ ID NO: 49161 - protein, 37 aa, Artificial Sequence
  GFR-binding peptide
  MOD_RES (37)..(37): Xaa is C or S
  MOD_RES (13)..(14)..(15)..(16)..(17): Xaa is A or G
  MOD_RES (18)..(19)..(20)..(21): Xaa is A or G or is absent
ALHDELTNSLQEXXXXXXXXXYYVVPLPELQVQTPRX

SEQ ID NO: 49162 - protein, 36 aa, Artificial Sequence
  GFR-binding peptide
  MOD_RES (1)..(35): Xaa is C or S
  MOD_RES (13)..(14)..(15)..(16)..(17): Xaa is A or G
  MOD_RES (18)..(19)..(20)..(21): Xaa is A or G or is absent
XSRVVMNVTAKKXXXXXXXXXIKRVQVPRLKTPAXT

SEQ ID NO: 49163 - protein, 35 aa, Artificial Sequence; identical to SEQ ID NO: 11865
  GFR-binding peptide
  MOD_RES (33)..(34): Xaa is C or S
  MOD_RES (11)..(12)..(13)..(14)..(15): Xaa is A or G
  MOD_RES (16)..(17)..(18)..(19): Xaa is A or G or is absent

SEQ ID NO: 49164 - protein, 34 aa, Artificial Sequence
  GFR-binding peptide
  MOD_RES (1)..(1): Xaa is C or S
  MOD_RES (13)..(14)..(15)..(16)..(17): Xaa is A or G
  MOD_RES (18)..(19)..(20)..(21): Xaa is A or G or is absent
XKNHQLFNSLQEXXXXXXXXXYYLMTLPEEETPV

SEQ ID NO: 49165 - protein, 40 aa, Artificial Sequence; identical to SEQ ID NO: 17237
  GFR-binding peptide
  MOD_RES (36)..(36): Xaa is C or S

SEQ ID NO: 49166 - protein, 37 aa, Artificial Sequence
  GFR-binding peptide
  MOD_RES (2)..(34)..(35): Xaa is C or S
GXGEVVMDVQVEKVVKENEDVKAMKVSRLETPVXXAK

SEQ ID NO: 49167 - protein, 39 aa, Artificial Sequence
  GFR-binding peptide
  MOD_RES (1)..(3)..(34)..(35): Xaa is C or S
XKXSRVIMVTAKKVKPKRGVIKRIQVPRLAQPVXXPAAS

SEQ ID NO: 49168 - protein, 35 aa, Artificial Sequence; identical to SEQ ID NO: 11868
  GFR-binding peptide
  MOD_RES (33)..(34): Xaa is C or S
  MOD_RES (11)..(12)..(13)..(14)..(15): Xaa is A or G
  MOD_RES (16)..(17)..(18)..(19): Xaa is A or G or is absent

SEQ ID NO: 49169 - protein, 35 aa, Artificial Sequence; identical to SEQ ID NO: 11870
  GFR-binding peptide
  MOD_RES (33)..(34): Xaa is C or S
  MOD_RES (11)..(12)..(13)..(14)..(15): Xaa is A or G
  MOD_RES (16)..(17)..(18)..(19): Xaa is A or G or is absent

SEQ ID NO: 49170 - protein, 38 aa, Artificial Sequence
  GFR-binding peptide
  MOD_RES (2)..(4)..(38): Xaa is C or S
RXEXKNHQLFNSLQEHQGQHPKIRYYLMTLPEEETPVX

SEQ ID NO: 49171 - protein, 42 aa, Artificial Sequence; identical to SEQ ID NO: 35885
  GFR-binding peptide
  MOD_RES (1)..(3)..(36)..(37): Xaa is C or S
  MOD_RES (14)..(15)..(16)..(17)..(18): Xaa is A or G
  MOD_RES (19)..(20)..(21)..(22): Xaa is A or G or is absent

SEQ ID NO: 49172 - protein, 36 aa, Artificial Sequence
  GFR-binding peptide
  MOD_RES (34)..(34): Xaa is C or S
  MOD_RES (12)..(13)..(14)..(15)..(16): Xaa is A or G
  MOD_RES (17)..(18)..(19)..(20): Xaa is A or G or is absent
SRVVMNSMEGIXXXXXXXXXMIQVTINSLKTPAXTP

SEQ ID NO: 49173 - protein, 39 aa, Artificial Sequence
  GFR-binding peptide
  MOD_RES (1)..(3): Xaa is C or S
  MOD_RES (16)..(17)..(18)..(19)..(20): Xaa is A or G
  MOD_RES (21)..(22)..(23)..(24): Xaa is A or G or is absent
XKXALHDELTNSLQEXXXXXXXXXYYVVPLPELQVQTPR

SEQ ID NO: 49174 - protein, 41 aa, Artificial Sequence; identical to SEQ ID NO: 11873
  GFR-binding peptide
  MOD_RES (1)..(3)..(36)..(37): Xaa is C or S
  MOD_RES (14)..(15)..(16)..(17)..(18): Xaa is A or G
  MOD_RES (19)..(20)..(21)..(22): Xaa is A or G or is absent

SEQ ID NO: 49175 - protein, 39 aa, Artificial Sequence
  GFR-binding peptide
  MOD_RES (33)..(34): Xaa is C or S
  MOD_RES (11)..(12)..(13)..(14)..(15): Xaa is A or G
  MOD_RES (16)..(17)..(18)..(19): Xaa is A or G or is absent
EVVMDSMEGIXXXXXXXXXMIQMTINSLETPVXXAKPIK

SEQ ID NO: 49176 - protein, 36 aa, Artificial Sequence; identical to SEQ ID NO: 11875
  GFR-binding peptide
  MOD_RES (1)..(3)..(35): Xaa is C or S

SEQ ID NO: 49177 - protein, 37 aa, Artificial Sequence; identical to SEQ ID NO: 17242
  GFR-binding peptide
  MOD_RES (1)..(35): Xaa is C or S
  MOD_RES (13)..(14)..(15)..(16)..(17): Xaa is A or G
  MOD_RES (18)..(19)..(20)..(21): Xaa is A or G or is absent

SEQ ID NO: 49178 - protein, 33 aa, Artificial Sequence; identical to SEQ ID NO: 11877
  GFR-binding peptide
  MOD_RES (1)..(1): Xaa is C or S
  MOD_RES (12)..(13)..(14)..(15)..(16): Xaa is A or G
  MOD_RES (17)..(18)..(19)..(20): Xaa is A or G or is absent

SEQ ID NO: 49179 - protein, 39 aa, Artificial Sequence; identical to SEQ ID NO: 17243
  GFR-binding peptide
  MOD_RES (37)..(37): Xaa is C or S
  MOD_RES (13)..(14)..(15)..(16)..(17): Xaa is A or G
  MOD_RES (18)..(19)..(20)..(21): Xaa is A or G or is absent

SEQ ID NO: 49180 - protein, 36 aa, Artificial Sequence
  GFR-binding peptide
  MOD_RES (31)..(31): Xaa is C or S
RVVMNVQVEKIVNSSDDVKAVKVSRLKTPAXTPKTV

SEQ ID NO: 49181 - protein, 40 aa, Artificial Sequence
  GFR-binding peptide
  MOD_RES (36)..(36): Xaa is C or S
  MOD_RES (12)..(13)..(14)..(15)..(16): Xaa is A or G
  MOD_RES (17)..(18)..(19)..(20): Xaa is A or G or is absent
LHDELTNSLQEXXXXXXXXXYYVVPLPELQVQTPRXQVNR

SEQ ID NO: 49182 - protein, 36 aa, Artificial Sequence; identical to SEQ ID NO: 11878
  GFR-binding peptide
  MOD_RES (34)..(35): Xaa is C or S
  MOD_RES (12)..(13)..(14)..(15)..(16): Xaa is A or G
  MOD_RES (17)..(18)..(19)..(20): Xaa is A or G or is absent

SEQ ID NO: 49183 - protein, 39 aa, Artificial Sequence
  GFR-binding peptide
  MOD_RES (2)..(36): Xaa is C or S
  MOD_RES (14)..(15)..(16)..(17)..(18): Xaa is A or G
  MOD_RES (19)..(20)..(21)..(22): Xaa is A or G or is absent
EXKNHQLFNSLQEXXXXXXXXXYYLMTLPEEETPVXELG

SEQ ID NO: 49184 - protein, 42 aa, Artificial Sequence
  GFR-binding peptide
  MOD_RES (2)..(4)..(38)..(39): Xaa is C or S
  MOD_RES (16)..(17)..(18)..(19)..(20): Xaa is A or G
  MOD_RES (21)..(22)..(23)..(24): Xaa is A or G or is absent
RXGXGEVVMDSMEGIXXXXXXXXXMIQMTINSLETPVXXAKP

SEQ ID NO: 49185 - protein, 36 aa, Artificial Sequence
  GFR-binding peptide
  MOD_RES (31)..(32): Xaa is C or S
EVVMDVTAKKVVKENEDIKRMQVPRLETPVXXAKPI

SEQ ID NO: 49186 - protein, 39 aa, Artificial Sequence; identical to SEQ ID NO: 17246
  GFR-binding peptide
  MOD_RES (36)..(36): Xaa is C or S

SEQ ID NO: 49187 - protein, 35 aa, Artificial Sequence
  GFR-binding peptide
  MOD_RES (1)..(35): Xaa is C or S
XKNHQLFNSLQEHQGQHPKIRYYVMPLPEEETPVX

SEQ ID NO: 49188 - protein, 38 aa, Artificial Sequence
  GFR-binding peptide
  MOD_RES (2)..(36)..(37): Xaa is C or S
  MOD_RES (14)..(15)..(16)..(17)..(18): Xaa is A or G
  MOD_RES (19)..(20)..(21)..(22): Xaa is A or G or is absent
GXGEVVMEVQVEKXXXXXXXXXVKAMKVSRLETPVXXA

SEQ ID NO: 49189 - protein, 37 aa, Artificial Sequence; identical to SEQ ID NO: 17248
  GFR-binding peptide
  MOD_RES (2)..(36): Xaa is C or S

SEQ ID NO: 49190 - protein, 37 aa, Artificial Sequence; identical to SEQ ID NO: 11887
  GFR-binding peptide
  MOD_RES (2)..(4)..(35)..(36): Xaa is C or S

SEQ ID NO: 49191 - protein, 37 aa, Artificial Sequence; identical to SEQ ID NO: 11888
  GFR-binding peptide
  MOD_RES (2)..(34)..(35): Xaa is C or S

SEQ ID NO: 49192 - protein, 37 aa, Artificial Sequence; identical to SEQ ID NO: 17251
  GFR-binding peptide
  MOD_RES (2)..(36): Xaa is C or S
  MOD_RES (14)..(15)..(16)..(17)..(18): Xaa is A or G
  MOD_RES (19)..(20)..(21)..(22): Xaa is A or G or is absent

SEQ ID NO: 49193 - protein, 36 aa, Artificial Sequence; identical to SEQ ID NO: 11892
  GFR-binding peptide
  MOD_RES (34)..(34): Xaa is C or S
  MOD_RES (12)..(13)..(14)..(15)..(16): Xaa is A or G
  MOD_RES (17)..(18)..(19)..(20): Xaa is A or G or is absent

SEQ ID NO: 49194 - protein, 37 aa, Artificial Sequence; identical to SEQ ID NO: 11893
  GFR-binding peptide
  MOD_RES (2)..(34)..(35): Xaa is C or S

SEQ ID NO: 49195 - protein, 40 aa, Artificial Sequence
  GFR-binding peptide
  MOD_RES (2)..(4)..(35)..(36): Xaa is C or S
SXKXSRVIMVQVEKVKPKRGVVKAIKVSRLAQPVXXPAAS

SEQ ID NO: 49196 - protein, 38 aa, Artificial Sequence; identical to SEQ ID NO: 11898
  GFR-binding peptide
  MOD_RES (1)..(32)..(33): Xaa is C or S

SEQ ID NO: 49197 - protein, 36 aa, Artificial Sequence
  GFR-binding peptide
  MOD_RES (1)..(34)..(35): Xaa is C or S
  MOD_RES (12)..(13)..(14)..(15)..(16): Xaa is A or G
  MOD_RES (17)..(18)..(19)..(20): Xaa is A or G or is absent
XSRVIMVTAKKXXXXXXXXXIKRIQVPRLAQPVXXP

SEQ ID NO: 49198 - protein, 34 aa, Artificial Sequence; identical to SEQ ID NO: 17257
  GFR-binding peptide

SEQ ID NO: 49199 - protein, 38 aa, Artificial Sequence
  GFR-binding peptide
  MOD_RES (2)..(36)..(37): Xaa is C or S
  MOD_RES (14)..(15)..(16)..(17)..(18): Xaa is A or G
  MOD_RES (19)..(20)..(21)..(22): Xaa is A or G or is absent
GXSRVVMNVTAKKXXXXXXXXXIKRVQVPRLKTPAXXP

SEQ ID NO: 49200 - protein, 41 aa, Artificial Sequence; identical to SEQ ID NO: 11899
  GFR-binding peptide
  MOD_RES (2)..(4)..(37)..(38): Xaa is C or S
  MOD_RES (15)..(16)..(17)..(18)..(19): Xaa is A or G
  MOD_RES (20)..(21)..(22)..(23): Xaa is A or G or is absent

SEQ ID NO: 49201 - protein, 40 aa, Artificial Sequence; identical to SEQ ID NO: 17260
  GFR-binding peptide
  MOD_RES (37)..(37): Xaa is C or S

SEQ ID NO: 49202 - protein, 42 aa, Artificial Sequence
  GFR-binding peptide
  MOD_RES (2)..(4)..(41): Xaa is C or S
AXAXELHEELRNSLQELKPKKRVYEYYVVPLPEHHVRSPQXK

SEQ ID NO: 49203 - protein, 31 aa, Artificial Sequence; identical to SEQ ID NO: 11901
  GFR-binding peptide
  MOD_RES (31)..(31): Xaa is C or S

SEQ ID NO: 49204 - protein, 35 aa, Artificial Sequence; identical to SEQ ID NO: 11903
  GFR-binding peptide
  MOD_RES (2)..(4)..(35): Xaa is C or S

SEQ ID NO: 49205 - protein, 35 aa, Artificial Sequence
  GFR-binding peptide
  MOD_RES (1)..(34)..(35): Xaa is C or S
  MOD_RES (12)..(13)..(14)..(15)..(16): Xaa is A or G
  MOD_RES (17)..(18)..(19)..(20): Xaa is A or G or is absent
XSKVVMVQVEKXXXXXXXXXVKAIKVSRLDQPVXX

SEQ ID NO: 49206 - protein, 33 aa, Artificial Sequence
  GFR-binding peptide
  MOD_RES (1)..(3): Xaa is C or S
XKXSKVVMVQVEKVKPTRGVVKAIKVSRLDQPV

SEQ ID NO: 49207 - protein, 38 aa, Artificial Sequence; identical to SEQ ID NO: 11904
  GFR-binding peptide
  MOD_RES (32)..(33): Xaa is C or S

SEQ ID NO: 49208 - protein, 32 aa, Artificial Sequence
  GFR-binding peptide
  MOD_RES (11)..(12)..(13)..(14)..(15): Xaa is A or G
  MOD_RES (16)..(17)..(18)..(19): Xaa is A or G or is absent
NHQLFNSLQEXXXXXXXXXYYLMTLPEEETPV

SEQ ID NO: 49209 - protein, 41 aa, Artificial Sequence
  GFR-binding peptide
  MOD_RES (1)..(3)..(35)..(36): Xaa is C or S
XGXSRVVMNSMEGIIVNSSDDMIQVTINSLKTPAXXPKPVY

SEQ ID NO: 49210 - protein, 36 aa, Artificial Sequence; identical to SEQ ID NO: 11908
  GFR-binding peptide
  MOD_RES (1)..(33)..(34): Xaa is C or S

SEQ ID NO: 49211 - protein, 32 aa, Artificial Sequence
  GFR-binding peptide
  MOD_RES (11)..(12)..(13)..(14)..(15): Xaa is A or G
  MOD_RES (16)..(17)..(18)..(19): Xaa is A or G or is absent
SKVVMVTAKKXXXXXXXXXIKRIQVPRLDQPV

SEQ ID NO: 49212 - protein, 34 aa, Artificial Sequence
  GFR-binding peptide
  MOD_RES (2)..(4): Xaa is C or S
SXKXSRVIMSMEGIVKPKRGVMIQITINSLAQPV

SEQ ID NO: 49213 - protein, 38 aa, Artificial Sequence
  GFR-binding peptide
  MOD_RES (1)..(3)..(37)..(38): Xaa is C or S
  MOD_RES (15)..(16)..(17)..(18)..(19): Xaa is A or G
  MOD_RES (20)..(21)..(22)..(23): Xaa is A or G or is absent
XGXGEVVMEVTAKKXXXXXXXXXIKRMQVPRLETPVXX

SEQ ID NO: 49214 - protein, 35 aa, Artificial Sequence
  GFR-binding peptide
  MOD_RES (1)..(33): Xaa is C or S
XSRVVMNSMEGIIVNSSDDMIQVTINSLKTPAXTP

SEQ ID NO: 49215 - protein, 36 aa, Artificial Sequence
  GFR-binding peptide
  MOD_RES (1)..(35)..(36): Xaa is C or S
  MOD_RES (13)..(14)..(15)..(16)..(17): Xaa is A or G
  MOD_RES (18)..(19)..(20)..(21): Xaa is A or G or is absent
XGEVVMESMEGIXXXXXXXXXMIQMTINSLETPVXX

SEQ ID NO: 49216 - protein, 34 aa, Artificial Sequence
  GFR-binding peptide
  MOD_RES (33)..(33): Xaa is C or S
NHQLFNSLQEHQGQHPKIRYYVMPLPEEETPVXE

SEQ ID NO: 49217 - protein, 37 aa, Artificial Sequence
  GFR-binding peptide
  MOD_RES (2)..(4): Xaa is C or S
RXEXKNHQLFNSLQEHQGQHPKIRYYVMPLPEEETPV

SEQ ID NO: 49218 - protein, 35 aa, Artificial Sequence
  GFR-binding peptide
  MOD_RES (34)..(35): Xaa is C or S
  MOD_RES (12)..(13)..(14)..(15)..(16): Xaa is A or G
  MOD_RES (17)..(18)..(19)..(20): Xaa is A or G or is absent
GEVVMDVTAKKXXXXXXXXXIKRMQVPRLETPVXX

SEQ ID NO: 49219 - protein, 32 aa, Artificial Sequence; identical to SEQ ID NO: 17271
  GFR-binding peptide

SEQ ID NO: 49220 - protein, 37 aa, Artificial Sequence; identical to SEQ ID NO: 11910
  GFR-binding peptide
  MOD_RES (33)..(34): Xaa is C or S
  MOD_RES (11)..(12)..(13)..(14)..(15): Xaa is A or G
  MOD_RES (16)..(17)..(18)..(19): Xaa is A or G or is absent

SEQ ID NO: 49221 - protein, 38 aa, Artificial Sequence; identical to SEQ ID NO: 17273
  GFR-binding peptide
  MOD_RES (2)..(4): Xaa is C or S

SEQ ID NO: 49222 - protein, 39 aa, Artificial Sequence; identical to SEQ ID NO: 11912
  GFR-binding peptide
  MOD_RES (34)..(35): Xaa is C or S
  MOD_RES (12)..(13)..(14)..(15)..(16): Xaa is A or G
  MOD_RES (17)..(18)..(19)..(20): Xaa is A or G or is absent

SEQ ID NO: 49223 - protein, 41 aa, Artificial Sequence; identical to SEQ ID NO: 17277
  GFR-binding peptide
  MOD_RES (1)..(3)..(40): Xaa is C or S
  MOD_RES (16)..(17)..(18)..(19)..(20): Xaa is A or G
  MOD_RES (21)..(22)..(23)..(24): Xaa is A or G or is absent

SEQ ID NO: 49224 - protein, 37 aa, Artificial Sequence
  GFR-binding peptide
  MOD_RES (2)..(34)..(35): Xaa is C or S
GXARVVMNVQVEKIVNSSDDVKAVKVSRLQTPAXXPK

SEQ ID NO: 49225 - protein, 38 aa, Artificial Sequence; identical to SEQ ID NO: 17278
  GFR-binding peptide
  MOD_RES (2)..(2): Xaa is C or S
  MOD_RES (15)..(16)..(17)..(18)..(19): Xaa is A or G
  MOD_RES (20)..(21)..(22)..(23): Xaa is A or G or is absent

SEQ ID NO: 49226 - protein, 35 aa, Artificial Sequence; identical to SEQ ID NO: 11918
  GFR-binding peptide
  MOD_RES (1)..(33)..(34): Xaa is C or S

SEQ ID NO: 49227 - protein, 36 aa, Artificial Sequence; identical to SEQ ID NO: 11919
  GFR-binding peptide
  MOD_RES (2)..(4): Xaa is C or S
  MOD_RES (15)..(16)..(17)..(18)..(19): Xaa is A or G
  MOD_RES (20)..(21)..(22)..(23): Xaa is A or G or is absent

SEQ ID NO: 49228 - protein, 38 aa, Artificial Sequence; identical to SEQ ID NO: 35958
  GFR-binding peptide
  MOD_RES (1)..(3)..(36)..(37): Xaa is C or S
  MOD_RES (14)..(15)..(16)..(17)..(18): Xaa is A or G
  MOD_RES (19)..(20)..(21)..(22): Xaa is A or G or is absent

SEQ ID NO: 49229 - protein, 39 aa, Artificial Sequence; identical to SEQ ID NO: 17282
  GFR-binding peptide
  MOD_RES (36)..(36): Xaa is C or S

SEQ ID NO: 49230 - protein, 33 aa, Artificial Sequence; identical to SEQ ID NO: 17285
  GFR-binding peptide
  MOD_RES (12)..(13)..(14)..(15)..(16): Xaa is A or G
  MOD_RES (17)..(18)..(19)..(20): Xaa is A or G or is absent

SEQ ID NO: 49231 - protein, 32 aa, Artificial Sequence
  GFR-binding peptide
  MOD_RES (32)..(32): Xaa is C or S
GEVVMEVTAKKVVKDYEDIKRMQVPRLETPVX

SEQ ID NO: 49232 - protein, 33 aa, Artificial Sequence; identical to SEQ ID NO: 11926
  GFR-binding peptide
  MOD_RES (32)..(33): Xaa is C or S

SEQ ID NO: 49233 - protein, 41 aa, Artificial Sequence; identical to SEQ ID NO: 17288
  GFR-binding peptide
  MOD_RES (1)..(3)..(40): Xaa is C or S
  MOD_RES (16)..(17)..(18)..(19)..(20): Xaa is A or G
  MOD_RES (21)..(22)..(23)..(24): Xaa is A or G or is absent

SEQ ID NO: 49234 - protein, 39 aa, Artificial Sequence; identical to SEQ ID NO: 17290
  GFR-binding peptide
  MOD_RES (2)..(39): Xaa is C or S

SEQ ID NO: 49235 - protein, 35 aa, Artificial Sequence; identical to SEQ ID NO: 11927
  GFR-binding peptide
  MOD_RES (1)..(34)..(35): Xaa is C or S
  MOD_RES (12)..(13)..(14)..(15)..(16): Xaa is A or G
  MOD_RES (17)..(18)..(19)..(20): Xaa is A or G or is absent

SEQ ID NO: 49236 - protein, 37 aa, Artificial Sequence; identical to SEQ ID NO: 11929
  GFR-binding peptide
  MOD_RES (33)..(34): Xaa is C or S
  MOD_RES (11)..(12)..(13)..(14)..(15): Xaa is A or G
  MOD_RES (16)..(17)..(18)..(19): Xaa is A or G or is absent

SEQ ID NO: 49237 - protein, 35 aa, Artificial Sequence; identical to SEQ ID NO: 11930
  GFR-binding peptide
  MOD_RES (1)..(3): Xaa is C or S
  MOD_RES (14)..(15)..(16)..(17)..(18): Xaa is A or G
  MOD_RES (19)..(20)..(21)..(22): Xaa is A or G or is absent

SEQ ID NO: 49238 - protein, 41 aa, Artificial Sequence
  GFR-binding peptide
  MOD_RES (2)..(4)..(38)..(39): Xaa is C or S
  MOD_RES (16)..(17)..(18)..(19)..(20): Xaa is A or G
  MOD_RES (21)..(22)..(23)..(24): Xaa is A or G or is absent
HXGXARVVMNSMEGIXXXXXXXXXMIQVTINSLQTPAXXPK

SEQ ID NO: 49239 - protein, 36 aa, Artificial Sequence; identical to SEQ ID NO: 11932
  GFR-binding peptide
  MOD_RES (2)..(33)..(34): Xaa is C or S

SEQ ID NO: 49240 - protein, 36 aa, Artificial Sequence; identical to SEQ ID NO: 11934
  GFR-binding peptide
  MOD_RES (32)..(33): Xaa is C or S

SEQ ID NO: 49241 - protein, 37 aa, Artificial Sequence
  GFR-binding peptide
  MOD_RES (32)..(33): Xaa is C or S
SRVVMNVQVEKIVNSSDDVKAVKVSRLKTPAXXPKPV

SEQ ID NO: 49242 - protein, 34 aa, Artificial Sequence
  GFR-binding peptide
  MOD_RES (33)..(34): Xaa is C or S
  MOD_RES (11)..(12)..(13)..(14)..(15): Xaa is A or G
  MOD_RES (16)..(17)..(18)..(19): Xaa is A or G or is absent
EVVMEVTAKKXXXXXXXXXIKRMQVPRLETPVXX

SEQ ID NO: 49243 - protein, 41 aa, Artificial Sequence
  GFR-binding peptide
  MOD_RES (2)..(4)..(35)..(36): Xaa is C or S
SXKXSRVIMVQVEKVKPKRGVVKAIKVSRLAQPVXXPAASA

SEQ ID NO: 49244 - protein, 35 aa, Artificial Sequence
  GFR-binding peptide
  MOD_RES (1)..(35): Xaa is C or S
  MOD_RES (13)..(14)..(15)..(16)..(17): Xaa is A or G
  MOD_RES (18)..(19)..(20)..(21): Xaa is A or G or is absent
XKNHQLFNSLQEXXXXXXXXXYYLMTLPEEETPVX

SEQ ID NO: 49245 - protein, 37 aa, Artificial Sequence
  GFR-binding peptide
  MOD_RES (1)..(3)..(36)..(37): Xaa is C or S
  MOD_RES (14)..(15)..(16)..(17)..(18): Xaa is A or G
  MOD_RES (19)..(20)..(21)..(22): Xaa is A or G or is absent
XKXSKVIMSMEGIXXXXXXXXXMIQITINSLDQSVXX

SEQ ID NO: 49246 - protein, 34 aa, Artificial Sequence
  GFR-binding peptide
  MOD_RES (34)..(34): Xaa is C or S
  MOD_RES (12)..(13)..(14)..(15)..(16): Xaa is A or G
  MOD_RES (17)..(18)..(19)..(20): Xaa is A or G or is absent
KNHQLFNSLQEXXXXXXXXXYYLMTLPEEETPVX

SEQ ID NO: 49247 - protein, 35 aa, Artificial Sequence; identical to SEQ ID NO: 17300
  GFR-binding peptide
  MOD_RES (1)..(1): Xaa is C or S
  MOD_RES (14)..(15)..(16)..(17)..(18): Xaa is A or G
  MOD_RES (19)..(20)..(21)..(22): Xaa is A or G or is absent

SEQ ID NO: 49248 - protein, 40 aa, Artificial Sequence; identical to SEQ ID NO: 17301
  GFR-binding peptide
  MOD_RES (36)..(36): Xaa is C or S

SEQ ID NO: 49249 - protein, 36 aa, Artificial Sequence
  GFR-binding peptide
  MOD_RES (1)..(35): Xaa is C or S
XKNHQLFNSLQEHQGQHPKIRYYLMTLPEEETPVXE

SEQ ID NO: 49250 - protein, 32 aa, Artificial Sequence; identical to SEQ ID NO: 11941
  GFR-binding peptide
  MOD_RES (11)..(12)..(13)..(14)..(15): Xaa is A or G
  MOD_RES (16)..(17)..(18)..(19): Xaa is A or G or is absent

SEQ ID NO: 49251 - protein, 34 aa, Artificial Sequence; identical to SEQ ID NO: 11942
  GFR-binding peptide
  MOD_RES (1)..(33)..(34): Xaa is C or S

SEQ ID NO: 49252 - protein, 34 aa, Artificial Sequence; identical to SEQ ID NO: 17307
  GFR-binding peptide

SEQ ID NO: 49253 - protein, 42 aa, Artificial Sequence; identical to SEQ ID NO: 11945
  GFR-binding peptide
  MOD_RES (1)..(3)..(36)..(37): Xaa is C or S
  MOD_RES (14)..(15)..(16)..(17)..(18): Xaa is A or G
  MOD_RES (19)..(20)..(21)..(22): Xaa is A or G or is absent

SEQ ID NO: 49254 - protein, 33 aa, Artificial Sequence; identical to SEQ ID NO: 17308
  GFR-binding peptide
  MOD_RES (12)..(13)..(14)..(15)..(16): Xaa is A or G
  MOD_RES (17)..(18)..(19)..(20): Xaa is A or G or is absent

SEQ ID NO: 49255 - protein, 36 aa, Artificial Sequence
  GFR-binding peptide
  MOD_RES (33)..(34): Xaa is C or S
  MOD_RES (11)..(12)..(13)..(14)..(15): Xaa is A or G
  MOD_RES (16)..(17)..(18)..(19): Xaa is A or G or is absent
RVVMNVTAKKXXXXXXXXXIKRVQVPRLKTPAXXPK

SEQ ID NO: 49256 - protein, 39 aa, Artificial Sequence
  GFR-binding peptide
  MOD_RES (2)..(34)..(35): Xaa is C or S
GXSRVVMNSMEGIIVNSSDDMIQVTINSLKTPAXXPKPV

SEQ ID NO: 49257 - protein, 32 aa, Artificial Sequence
  GFR-binding peptide
  MOD_RES (31)..(32): Xaa is C or S
RVVMNVQVEKIVNSSDDVKAVKVSRLKTPAXX

SEQ ID NO: 49258 - protein, 33 aa, Artificial Sequence; identical to SEQ ID NO: 17310
  GFR-binding peptide
  MOD_RES (12)..(13)..(14)..(15)..(16): Xaa is A or G
  MOD_RES (17)..(18)..(19)..(20): Xaa is A or G or is absent

SEQ ID NO: 49259 - protein, 36 aa, Artificial Sequence; identical to SEQ ID NO: 11948
  GFR-binding peptide
  MOD_RES (32)..(33): Xaa is C or S

SEQ ID NO: 49260 - protein, 35 aa, Artificial Sequence
  GFR-binding peptide
  MOD_RES (1)..(35): Xaa is C or S
  MOD_RES (13)..(14)..(15)..(16)..(17): Xaa is A or G
  MOD_RES (18)..(19)..(20)..(21): Xaa is A or G or is absent
XGEVVMESMEGIXXXXXXXXXMIQMTINSLETPVX

SEQ ID NO: 49261 - protein, 35 aa, Artificial Sequence
  GFR-binding peptide
  MOD_RES (13)..(14)..(15)..(16)..(17): Xaa is A or G
  MOD_RES (18)..(19)..(20)..(21): Xaa is A or G or is absent
ELHEELRNSLQEXXXXXXXXXYYLVTLPEHHVRSP

SEQ ID NO: 49262 - protein, 36 aa, Artificial Sequence
  GFR-binding peptide
  MOD_RES (34)..(35): Xaa is C or S
  MOD_RES (12)..(13)..(14)..(15)..(16): Xaa is A or G
  MOD_RES (17)..(18)..(19)..(20): Xaa is A or G or is absent
SRVVMNVQVEKXXXXXXXXXVKAVKVSRLKTPAXXP

SEQ ID NO: 49263 - protein, 42 aa, Artificial Sequence; identical to SEQ ID NO: 11949
  GFR-binding peptide
  MOD_RES (2)..(4)..(37)..(38): Xaa is C or S
  MOD_RES (15)..(16)..(17)..(18)..(19): Xaa is A or G
  MOD_RES (20)..(21)..(22)..(23): Xaa is A or G or is absent

SEQ ID NO: 49264 - protein, 41 aa, Artificial Sequence; identical to SEQ ID NO: 11950
  GFR-binding peptide
  MOD_RES (1)..(3)..(37)..(38): Xaa is C or S
  MOD_RES (15)..(16)..(17)..(18)..(19): Xaa is A or G
  MOD_RES (20)..(21)..(22)..(23): Xaa is A or G or is absent

SEQ ID NO: 49265 - protein, 38 aa, Artificial Sequence; identical to SEQ ID NO: 11952
  GFR-binding peptide
  MOD_RES (32)..(33): Xaa is C or S

SEQ ID NO: 49266 - protein, 40 aa, Artificial Sequence
  GFR-binding peptide
  MOD_RES (1)..(38): Xaa is C or S
XELHEELRNSLQELKPKKRVYEYYLVTLPEHHVRSPQXKV

SEQ ID NO: 49267 - protein, 32 aa, Artificial Sequence; identical to SEQ ID NO: 11954
  GFR-binding peptide
  MOD_RES (32)..(32): Xaa is C or S

SEQ ID NO: 49268 - protein, 39 aa, Artificial Sequence; identical to SEQ ID NO: 11955
  GFR-binding peptide
  MOD_RES (1)..(35)..(36): Xaa is C or S
  MOD_RES (13)..(14)..(15)..(16)..(17): Xaa is A or G
  MOD_RES (18)..(19)..(20)..(21): Xaa is A or G or is absent

SEQ ID NO: 49269 - protein, 38 aa, Artificial Sequence; identical to SEQ ID NO: 11956
  GFR-binding peptide
  MOD_RES (2)..(4)..(36): Xaa is C or S

SEQ ID NO: 49270 - protein, 41 aa, Artificial Sequence; identical to SEQ ID NO: 11957
  GFR-binding peptide
  MOD_RES (1)..(35)..(36): Xaa is C or S
  MOD_RES (13)..(14)..(15)..(16)..(17): Xaa is A or G
  MOD_RES (18)..(19)..(20)..(21): Xaa is A or G or is absent

SEQ ID NO: 49271 - protein, 38 aa, Artificial Sequence
  GFR-binding peptide
  MOD_RES (1)..(34)..(35): Xaa is C or S
  MOD_RES (12)..(13)..(14)..(15)..(16): Xaa is A or G
  MOD_RES (17)..(18)..(19)..(20): Xaa is A or G or is absent
XSRVIMVTAKKXXXXXXXXXIKRIQVPRLAQPVXXPAA

SEQ ID NO: 49272 - protein, 34 aa, Artificial Sequence; identical to SEQ ID NO: 17318
  GFR-binding peptide
  MOD_RES (33)..(33): Xaa is C or S

SEQ ID NO: 49273 - protein, 37 aa, Artificial Sequence; identical to SEQ ID NO: 17319
  GFR-binding peptide
  MOD_RES (35)..(35): Xaa is C or S
  MOD_RES (11)..(12)..(13)..(14)..(15): Xaa is A or G
  MOD_RES (16)..(17)..(18)..(19): Xaa is A or G or is absent

SEQ ID NO: 49274 - protein, 42 aa, Artificial Sequence; identical to SEQ ID NO: 11958
  GFR-binding peptide
  MOD_RES (2)..(4)..(38): Xaa is C or S
  MOD_RES (16)..(17)..(18)..(19)..(20): Xaa is A or G
  MOD_RES (21)..(22)..(23)..(24): Xaa is A or G or is absent

SEQ ID NO: 49275 - protein, 40 aa, Artificial Sequence; identical to SEQ ID NO: 11959
  GFR-binding peptide
  MOD_RES (1)..(34)..(35): Xaa is C or S
  MOD_RES (12)..(13)..(14)..(15)..(16): Xaa is A or G
  MOD_RES (17)..(18)..(19)..(20): Xaa is A or G or is absent

SEQ ID NO: 49276 - protein, 37 aa, Artificial Sequence
  GFR-binding peptide
  MOD_RES (31)..(32): Xaa is C or S
SKVVMVTAKKVKPTRGVIKRIQVPRLDQPVXXPSASA

SEQ ID NO: 49277 - protein, 42 aa, Artificial Sequence; identical to SEQ ID NO: 11964
  GFR-binding peptide
  MOD_RES (1)..(3)..(36)..(37): Xaa is C or S
  MOD_RES (14)..(15)..(16)..(17)..(18): Xaa is A or G
  MOD_RES (19)..(20)..(21)..(22): Xaa is A or G or is absent

SEQ ID NO: 49278 - protein, 42 aa, Artificial Sequence
  GFR-binding peptide
  MOD_RES (2)..(4)..(38)..(39): Xaa is C or S
  MOD_RES (16)..(17)..(18)..(19)..(20): Xaa is A or G
  MOD_RES (21)..(22)..(23)..(24): Xaa is A or G or is absent
RXGXGEVVMEVTAKKXXXXXXXXXIKRMQVPRLETPVXXAKP

SEQ ID NO: 49279 - protein, 37 aa, Artificial Sequence; identical to SEQ ID NO: 17326
  GFR-binding peptide
  MOD_RES (33)..(33): Xaa is C or S

SEQ ID NO: 49280 - protein, 37 aa, Artificial Sequence
  GFR-binding peptide
  MOD_RES (2)..(4)..(37): Xaa is C or S
  MOD_RES (15)..(16)..(17)..(18)..(19): Xaa is A or G
  MOD_RES (20)..(21)..(22)..(23): Xaa is A or G or is absent
SXKXSRVIMVTAKKXXXXXXXXXIKRIQVPRLAQPVX

SEQ ID NO: 49281 - protein, 38 aa, Artificial Sequence
  GFR-binding peptide
  MOD_RES (2)..(4)..(35)..(36): Xaa is C or S
SXKXSRVIMVQVEKVKPKRGVVKAIKVSRLAQPVXXPA

SEQ ID NO: 49282 - protein, 37 aa, Artificial Sequence
  GFR-binding peptide
  MOD_RES (31)..(32): Xaa is C or S
SKVVMVQVEKVKPTRGVVKAIKVSRLDQPVXXPSASA

SEQ ID NO: 49283 - protein, 32 aa, Artificial Sequence
  GFR-binding peptide
  MOD_RES (1)..(1): Xaa is C or S
XGEVVMESMEGIVVKDYEDMIQMTINSLETPV

SEQ ID NO: 49284 - protein, 35 aa, Artificial Sequence
  GFR-binding peptide
  MOD_RES (33)..(34): Xaa is C or S
  MOD_RES (11)..(12)..(13)..(14)..(15): Xaa is A or G
  MOD_RES (16)..(17)..(18)..(19): Xaa is A or G or is absent
EVVMDVQVEKXXXXXXXXXVKAMKVSRLETPVXXA

SEQ ID NO: 49285 - protein, 32 aa, Artificial Sequence
  GFR-binding peptide
  MOD_RES (1)..(32): Xaa is C or S
XSRVIMSMEGIVKPKRGVMIQITINSLAQPVX

SEQ ID NO: 49286 - protein, 33 aa, Artificial Sequence; identical to SEQ ID NO: 11970
  GFR-binding peptide
  MOD_RES (2)..(33): Xaa is C or S

SEQ ID NO: 49287 - protein, 37 aa, Artificial Sequence; identical to SEQ ID NO: 11972
  GFR-binding peptide
  MOD_RES (34)..(35): Xaa is C or S
  MOD_RES (12)..(13)..(14)..(15)..(16): Xaa is A or G
  MOD_RES (17)..(18)..(19)..(20): Xaa is A or G or is absent

SEQ ID NO: 49288 - protein, 35 aa, Artificial Sequence; identical to SEQ ID NO: 17332
  GFR-binding peptide
  MOD_RES (1)..(1): Xaa is C or S

SEQ ID NO: 49289 - protein, 38 aa, Artificial Sequence; identical to SEQ ID NO: 36034
  GFR-binding peptide
  MOD_RES (33)..(34): Xaa is C or S
  MOD_RES (11)..(12)..(13)..(14)..(15): Xaa is A or G
  MOD_RES (16)..(17)..(18)..(19): Xaa is A or G or is absent

SEQ ID NO: 49290 - protein, 38 aa, Artificial Sequence; identical to SEQ ID NO: 11976
  GFR-binding peptide
  MOD_RES (1)..(3)..(35)..(36): Xaa is C or S

SEQ ID NO: 49291 - protein, 42 aa, Artificial Sequence
  GFR-binding peptide
  MOD_RES (1)..(3)..(40): Xaa is C or S
XKXALHDELTNSLQEFIPKKRVIEYYVVPLPELQVQTPRXQV

SEQ ID NO: 49292 - protein, 41 aa, Artificial Sequence
  GFR-binding peptide
  MOD_RES (1)..(3)..(40): Xaa is C or S
  MOD_RES (16)..(17)..(18)..(19)..(20): Xaa is A or G
  MOD_RES (21)..(22)..(23)..(24): Xaa is A or G or is absent
XAXELHEELRNSLQEXXXXXXXXXYYVVPLPEHHVRSPQXK

SEQ ID NO: 49293 - protein, 36 aa, Artificial Sequence
  GFR-binding peptide
  MOD_RES (33)..(34): Xaa is C or S
  MOD_RES (11)..(12)..(13)..(14)..(15): Xaa is A or G
  MOD_RES (16)..(17)..(18)..(19): Xaa is A or G or is absent
EVVMDVQVEKXXXXXXXXXVKAMKVSRLETPVXXAK

SEQ ID NO: 49294 - protein, 33 aa, Artificial Sequence; identical to SEQ ID NO: 17337
  GFR-binding peptide
  MOD_RES (11)..(12)..(13)..(14)..(15): Xaa is A or G
  MOD_RES (16)..(17)..(18)..(19): Xaa is A or G or is absent

SEQ ID NO: 49295 - protein, 37 aa, Artificial Sequence
  GFR-binding peptide
  MOD_RES (31)..(32): Xaa is C or S
SRVIMSMEGIVKPKRGVMIQITINSLAQPVXXPAASA

SEQ ID NO: 49296 - protein, 41 aa, Artificial Sequence
  GFR-binding peptide
  MOD_RES (2)..(4)..(38): Xaa is C or S
  MOD_RES (16)..(17)..(18)..(19)..(20): Xaa is A or G
  MOD_RES (21)..(22)..(23)..(24): Xaa is A or G or is absent
RXEXKNHQLFNSLQEXXXXXXXXXYYVMPLPEEETPVXELG

SEQ ID NO: 49297 - protein, 32 aa, Artificial Sequence
  GFR-binding peptide
  MOD_RES (11)..(12)..(13)..(14)..(15): Xaa is A or G
  MOD_RES (16)..(17)..(18)..(19): Xaa is A or G or is absent
HEELRNSLQEXXXXXXXXXYYVVPLPEHHVRS

SEQ ID NO: 49298 - protein, 43 aa, Artificial Sequence; identical to SEQ ID NO: 17338
  GFR-binding peptide
  MOD_RES (2)..(4)..(41): Xaa is C or S
  MOD_RES (17)..(18)..(19)..(20)..(21): Xaa is A or G
  MOD_RES (22)..(23)..(24)..(25): Xaa is A or G or is absent

SEQ ID NO: 49299 - protein, 40 aa, Artificial Sequence
  GFR-binding peptide
  MOD_RES (1)..(3)..(40): Xaa is C or S
  MOD_RES (16)..(17)..(18)..(19)..(20): Xaa is A or G
  MOD_RES (21)..(22)..(23)..(24): Xaa is A or G or is absent
XAXELHEELRNSLQEXXXXXXXXXYYVVPLPEHHVRSPQX

SEQ ID NO: 49300 - protein, 35 aa, Artificial Sequence; identical to SEQ ID NO: 11984
  GFR-binding peptide
  MOD_RES (2)..(33)..(34): Xaa is C or S

SEQ ID NO: 49301 - protein, 39 aa, Artificial Sequence
  GFR-binding peptide
  MOD_RES (2)..(36)..(37): Xaa is C or S
  MOD_RES (14)..(15)..(16)..(17)..(18): Xaa is A or G
  MOD_RES (19)..(20)..(21)..(22): Xaa is A or G or is absent
GXGEVVMDSMEGIXXXXXXXXXMIQMTINSLETPVXXAK

SEQ ID NO: 49302 - protein, 36 aa, Artificial Sequence
  GFR-binding peptide
  MOD_RES (31)..(32): Xaa is C or S
SKVVMSMEGIVKPTRGVMIQITINSLDQPVXXPSAS

SEQ ID NO: 49303 - protein, 39 aa, Artificial Sequence; identical to SEQ ID NO: 11987
  GFR-binding peptide
  MOD_RES (1)..(3)..(36)..(37): Xaa is C or S
  MOD_RES (14)..(15)..(16)..(17)..(18): Xaa is A or G
  MOD_RES (19)..(20)..(21)..(22): Xaa is A or G or is absent

SEQ ID NO: 49304 - protein, 36 aa, Artificial Sequence
  GFR-binding peptide
  MOD_RES (34)..(35): Xaa is C or S
  MOD_RES (12)..(13)..(14)..(15)..(16): Xaa is A or G
  MOD_RES (17)..(18)..(19)..(20): Xaa is A or G or is absent
SRVVMNVTAKKXXXXXXXXXIKRVQVPRLKTPAXXP

SEQ ID NO: 49305 - protein, 38 aa, Artificial Sequence
  GFR-binding peptide
  MOD_RES (1)..(3): Xaa is C or S
  MOD_RES (16)..(17)..(18)..(19)..(20): Xaa is A or G
  MOD_RES (21)..(22)..(23)..(24): Xaa is A or G or is absent
XAXELHEELRNSLQEXXXXXXXXXYYVVPLPEHHVRSP

SEQ ID NO: 49306 - protein, 37 aa, Artificial Sequence; identical to SEQ ID NO: 11988
  GFR-binding peptide
  MOD_RES (2)..(33)..(34): Xaa is C or S

SEQ ID NO: 49307 - protein, 35 aa, Artificial Sequence
  GFR-binding peptide
  MOD_RES (1)..(33)..(34): Xaa is C or S
XARVVMNVQVEKIVNSSDDVKAVKVSRLQTPAXXP

SEQ ID NO: 49308 - protein, 40 aa, Artificial Sequence; identical to SEQ ID NO: 17339
  GFR-binding peptide
  MOD_RES (1)..(35): Xaa is C or S

SEQ ID NO: 49309 - protein, 36 aa, Artificial Sequence
  GFR-binding peptide
  MOD_RES (1)..(3)..(34)..(35): Xaa is C or S
XKXSKVVMSMEGIVKPTRGVMIQITINSLDQPVXXP

SEQ ID NO: 49310 - protein, 37 aa, Artificial Sequence; identical to SEQ ID NO: 11990
  GFR-binding peptide
  MOD_RES (32)..(32): Xaa is C or S

SEQ ID NO: 49311 - protein, 40 aa, Artificial Sequence; identical to SEQ ID NO: 17340
  GFR-binding peptide
  MOD_RES (2)..(4): Xaa is C or S

SEQ ID NO: 49312 - protein, 37 aa, Artificial Sequence; identical to SEQ ID NO: 17341
  GFR-binding peptide
  MOD_RES (2)..(2): Xaa is C or S

SEQ ID NO: 49313 - protein, 38 aa, Artificial Sequence; identical to SEQ ID NO: 17343
  GFR-binding peptide
  MOD_RES (34)..(34): Xaa is C or S
  MOD_RES (12)..(13)..(14)..(15)..(16): Xaa is A or G
  MOD_RES (17)..(18)..(19)..(20): Xaa is A or G or is absent

SEQ ID NO: 49314 - protein, 38 aa, Artificial Sequence
  GFR-binding peptide
  MOD_RES (1)..(3)..(37)..(38): Xaa is C or S
  MOD_RES (15)..(16)..(17)..(18)..(19): Xaa is A or G
  MOD_RES (20)..(21)..(22)..(23): Xaa is A or G or is absent
XGXSRVVMNVTAKKXXXXXXXXXIKRVQVPRLKTPAXX

SEQ ID NO: 49315 - protein, 35 aa, Artificial Sequence; identical to SEQ ID NO: 17345
  GFR-binding peptide
  MOD_RES (2)..(2): Xaa is C or S

SEQ ID NO: 49316 - protein, 32 aa, Artificial Sequence; identical to SEQ ID NO: 11994
  GFR-binding peptide
  MOD_RES (31)..(32): Xaa is C or S

SEQ ID NO: 49317 - protein, 42 aa, Artificial Sequence; identical to SEQ ID NO: 17348
  GFR-binding peptide
  MOD_RES (2)..(39): Xaa is C or S
  MOD_RES (15)..(16)..(17)..(18)..(19): Xaa is A or G
  MOD_RES (20)..(21)..(22)..(23): Xaa is A or G or is absent

SEQ ID NO: 49318 - protein, 38 aa, Artificial Sequence
  GFR-binding peptide
  MOD_RES (33)..(34): Xaa is C or S
  MOD_RES (11)..(12)..(13)..(14)..(15): Xaa is A or G
  MOD_RES (16)..(17)..(18)..(19): Xaa is A or G or is absent
SRVIMVQVEKXXXXXXXXXVKAIKVSRLAQPVXXPAAS

SEQ ID NO: 49319 - protein, 41 aa, Artificial Sequence; identical to SEQ ID NO: 11995
  GFR-binding peptide
  MOD_RES (2)..(4)..(36)..(37): Xaa is C or S

SEQ ID NO: 49320 - protein, 37 aa, Artificial Sequence; identical to SEQ ID NO: 11996
  GFR-binding peptide
  MOD_RES (34)..(35): Xaa is C or S
  MOD_RES (12)..(13)..(14)..(15)..(16): Xaa is A or G
  MOD_RES (17)..(18)..(19)..(20): Xaa is A or G or is absent

SEQ ID NO: 49321 - protein, 35 aa, Artificial Sequence
  GFR-binding peptide
  MOD_RES (33)..(34): Xaa is C or S
  MOD_RES (11)..(12)..(13)..(14)..(15): Xaa is A or G
  MOD_RES (16)..(17)..(18)..(19): Xaa is A or G or is absent
RVVMNVTAKKXXXXXXXXXIKRVQVPRLKTPAXXP

SEQ ID NO: 49322 - protein, 35 aa, Artificial Sequence; identical to SEQ ID NO: 11997
  GFR-binding peptide
  MOD_RES (2)..(4)..(35): Xaa is C or S

SEQ ID NO: 49323 - protein, 42 aa, Artificial Sequence; identical to SEQ ID NO: 17351
  GFR-binding peptide
  MOD_RES (2)..(39): Xaa is C or S

SEQ ID NO: 49324 - protein, 37 aa, Artificial Sequence
  GFR-binding peptide
  MOD_RES (1)..(34)..(35): Xaa is C or S
  MOD_RES (12)..(13)..(14)..(15)..(16): Xaa is A or G
  MOD_RES (17)..(18)..(19)..(20): Xaa is A or G or is absent
XSKVIMVTAKKXXXXXXXXXIKRIQVPRLDQSVXXPS

SEQ ID NO: 49325 - protein, 34 aa, Artificial Sequence
  GFR-binding peptide
  MOD_RES (31)..(32): Xaa is C or S
EVVMEVQVEKVVKDYEDVKAMKVSRLETPVXXAK

SEQ ID NO: 49326 - protein, 40 aa, Artificial Sequence; identical to SEQ ID NO: 12000
  GFR-binding peptide
  MOD_RES (2)..(34)..(35): Xaa is C or S

SEQ ID NO: 49327 - protein, 34 aa, Artificial Sequence
  GFR-binding peptide
  MOD_RES (2)..(33)..(34): Xaa is C or S
KXSKVVMSMEGIVKPTRGVMIQITINSLDQPVXX

SEQ ID NO: 49328 - protein, 35 aa, Artificial Sequence; identical to SEQ ID NO: 12001
  GFR-binding peptide
  MOD_RES (2)..(2): Xaa is C or S
  MOD_RES (14)..(15)..(16)..(17)..(18): Xaa is A or G
  MOD_RES (19)..(20)..(21)..(22): Xaa is A or G or is absent

SEQ ID NO: 49329 - protein, 44 aa, Artificial Sequence
  GFR-binding peptide
  MOD_RES (1)..(3)..(40): Xaa is C or S
  MOD_RES (16)..(17)..(18)..(19)..(20): Xaa is A or G
  MOD_RES (21)..(22)..(23)..(24): Xaa is A or G or is absent
XAXELHEELRNSLQEXXXXXXXXXYYLVTLPEHHVRSPQXKVSS

SEQ ID NO: 49330 - protein, 37 aa, Artificial Sequence
  GFR-binding peptide
  MOD_RES (2)..(4): Xaa is C or S
  MOD_RES (16)..(17)..(18)..(19)..(20): Xaa is A or G
  MOD_RES (21)..(22)..(23)..(24): Xaa is A or G or is absent
RXGXGEVVMESMEGIXXXXXXXXXMIQMTINSLETPV

SEQ ID NO: 49331 - protein, 36 aa, Artificial Sequence
  GFR-binding peptide
  MOD_RES (31)..(32): Xaa is C or S
SRVIMVQVEKVKPKRGVVKAIKVSRLAQPVXXPAAS

SEQ ID NO: 49332 - protein, 40 aa, Artificial Sequence; identical to SEQ ID NO: 12004
  GFR-binding peptide
  MOD_RES (2)..(34)..(35): Xaa is C or S

SEQ ID NO: 49333 - protein, 41 aa, Artificial Sequence; identical to SEQ ID NO: 17355
  GFR-binding peptide
  MOD_RES (1)..(35): Xaa is C or S

SEQ ID NO: 49334 - protein, 33 aa, Artificial Sequence; identical to SEQ ID NO: 12005
  GFR-binding peptide
  MOD_RES (32)..(33): Xaa is C or S

SEQ ID NO: 49335 - protein, 36 aa, Artificial Sequence
  GFR-binding peptide
  MOD_RES (2)..(4)..(35)..(36): Xaa is C or S
SXKXSRVIMVQVEKVKPKRGVVKAIKVSRLAQPVXX

SEQ ID NO: 49336 - protein, 41 aa, Artificial Sequence; identical to SEQ ID NO: 17356
  GFR-binding peptide
  MOD_RES (2)..(4)..(41): Xaa is C or S
  MOD_RES (17)..(18)..(19)..(20)..(21): Xaa is A or G
  MOD_RES (22)..(23)..(24)..(25): Xaa is A or G or is absent

SEQ ID NO: 49337 - protein, 39 aa, Artificial Sequence; identical to SEQ ID NO: 17357
  GFR-binding peptide
  MOD_RES (1)..(3): Xaa is C or S

SEQ ID NO: 49338 - protein, 38 aa, Artificial Sequence
  GFR-binding peptide
  MOD_RES (1)..(3)..(36)..(37): Xaa is C or S
  MOD_RES (14)..(15)..(16)..(17)..(18): Xaa is A or G
  MOD_RES (19)..(20)..(21)..(22): Xaa is A or G or is absent
XKXSKVVMVTAKKXXXXXXXXXIKRIQVPRLDQPVXXP

SEQ ID NO: 49339 - protein, 39 aa, Artificial Sequence
  GFR-binding peptide
  MOD_RES (1)..(3)..(34)..(35): Xaa is C or S
XKXSRVIMVQVEKVKPKRGVVKAIKVSRLAQPVXXPAAS

SEQ ID NO: 49340 - protein, 41 aa, Artificial Sequence
  GFR-binding peptide
  MOD_RES (1)..(3)..(37)..(38): Xaa is C or S
  MOD_RES (15)..(16)..(17)..(18)..(19): Xaa is A or G
  MOD_RES (20)..(21)..(22)..(23): Xaa is A or G or is absent
XGXGEVVMDSMEGIXXXXXXXXXMIQMTINSLETPVXXAKP

SEQ ID NO: 49341 - protein, 33 aa, Artificial Sequence
  GFR-binding peptide
  MOD_RES (2)..(33): Xaa is C or S
KXSKVIMVTAKKIKPTKGIIKRIQVPRLDQSVX

SEQ ID NO: 49342 - protein, 45 aa, Artificial Sequence
  GFR-binding peptide
  MOD_RES (2)..(4)..(41): Xaa is C or S
  MOD_RES (17)..(18)..(19)..(20)..(21): Xaa is A or G
  MOD_RES (22)..(23)..(24)..(25): Xaa is A or G or is absent
EXKXALHDELTNSLQEXXXXXXXXXYYLVTLPELQVQTPRXQVNR

SEQ ID NO: 49343 - protein, 36 aa, Artificial Sequence
  GFR-binding peptide
  MOD_RES (1)..(3): Xaa is C or S
  MOD_RES (15)..(16)..(17)..(18)..(19): Xaa is A or G
  MOD_RES (20)..(21)..(22)..(23): Xaa is A or G or is absent
XGXGEVVMDSMEGIXXXXXXXXXMIQMTINSLETPV

SEQ ID NO: 49344 - protein, 42 aa, Artificial Sequence; identical to SEQ ID NO: 17360
  GFR-binding peptide
  MOD_RES (2)..(4)..(41): Xaa is C or S
  MOD_RES (17)..(18)..(19)..(20)..(21): Xaa is A or G
  MOD_RES (22)..(23)..(24)..(25): Xaa is A or G or is absent

SEQ ID NO: 49345 - protein, 35 aa, Artificial Sequence
  GFR-binding peptide
  MOD_RES (1)..(32)..(33): Xaa is C or S
XSKVIMSMEGIIKPTKGIMIQITINSLDQSVXXPS

SEQ ID NO: 49346 - protein, 35 aa, Artificial Sequence; identical to SEQ ID NO: 12008
  GFR-binding peptide
  MOD_RES (1)..(35): Xaa is C or S
  MOD_RES (13)..(14)..(15)..(16)..(17): Xaa is A or G
  MOD_RES (18)..(19)..(20)..(21): Xaa is A or G or is absent

SEQ ID NO: 49347 - protein, 41 aa, Artificial Sequence; identical to SEQ ID NO: 12010
  GFR-binding peptide
  MOD_RES (2)..(36)..(37): Xaa is C or S
  MOD_RES (14)..(15)..(16)..(17)..(18): Xaa is A or G
  MOD_RES (19)..(20)..(21)..(22): Xaa is A or G or is absent

SEQ ID NO: 49348 - protein, 36 aa, Artificial Sequence
  GFR-binding peptide
  MOD_RES (31)..(32): Xaa is C or S
SRVIMSMEGIVKPKRGVMIQITINSLAQPVXXPAAS

SEQ ID NO: 49349 - protein, 34 aa, Artificial Sequence
  GFR-binding peptide
  MOD_RES (1)..(32)..(33): Xaa is C or S
XSKVIMVTAKKIKPTKGIIKRIQVPRLDQSVXXP

SEQ ID NO: 49350 - protein, 34 aa, Artificial Sequence
  GFR-binding peptide
  MOD_RES (32)..(33): Xaa is C or S
ARVVMNVQVEKIVNSSDDVKAVKVSRLQTPAXXP

SEQ ID NO: 49351 - protein, 36 aa, Artificial Sequence
  GFR-binding peptide
  MOD_RES (1)..(3)..(35)..(36): Xaa is C or S
XGXSRVVMNSMEGIIVNSSDDMIQVTINSLKTPAXX

SEQ ID NO: 49352 - protein, 36 aa, Artificial Sequence
  GFR-binding peptide
  MOD_RES (1)..(35)..(36): Xaa is C or S
  MOD_RES (13)..(14)..(15)..(16)..(17): Xaa is A or G
  MOD_RES (18)..(19)..(20)..(21): Xaa is A or G or is absent
XGEVVMDVTAKKXXXXXXXXXIKRMQVPRLETPVXX

SEQ ID NO: 49353 - protein, 39 aa, Artificial Sequence
  GFR-binding peptide
  MOD_RES (37)..(37): Xaa is C or S
ELHEELRNSLQELKPKKRVYEYYVVPLPEHHVRSPQXKV

SEQ ID NO: 49354 - protein, 39 aa, Artificial Sequence
  GFR-binding peptide
  MOD_RES (2)..(34)..(35): Xaa is C or S
GXARVVMNVQVEKIVNSSDDVKAVKVSRLQTPAXXPKPV

SEQ ID NO: 49355 - protein, 39 aa, Artificial Sequence; identical to SEQ ID NO: 12016
  GFR-binding peptide
  MOD_RES (33)..(34): Xaa is C or S
  MOD_RES (11)..(12)..(13)..(14)..(15): Xaa is A or G
  MOD_RES (16)..(17)..(18)..(19): Xaa is A or G or is absent

SEQ ID NO: 49356 - protein, 41 aa, Artificial Sequence
  GFR-binding peptide
  MOD_RES (1)..(3)..(37)..(38): Xaa is C or S
  MOD_RES (15)..(16)..(17)..(18)..(19): Xaa is A or G
  MOD_RES (20)..(21)..(22)..(23): Xaa is A or G or is absent
XGXGEVVMESMEGIXXXXXXXXXMIQMTINSLETPVXXAKP

SEQ ID NO: 49357 - protein, 40 aa, Artificial Sequence
  GFR-binding peptide
  MOD_RES (2)..(39): Xaa is C or S
KXALHDELTNSLQEFIPKKRVIEYYVVPLPELQVQTPRXQ

SEQ ID NO: 49358 - protein, 37 aa, Artificial Sequence
  GFR-binding peptide
  MOD_RES (2)..(36): Xaa is C or S
EXKNHQLFNSLQEHQGQHPKIRYYVMPLPEEETPVXE

SEQ ID NO: 49359 - protein, 34 aa, Artificial Sequence; identical to SEQ ID NO: 17367
  GFR-binding peptide
  MOD_RES (34)..(34): Xaa is C or S
  MOD_RES (12)..(13)..(14)..(15)..(16): Xaa is A or G
  MOD_RES (17)..(18)..(19)..(20): Xaa is A or G or is absent

SEQ ID NO: 49360 - protein, 37 aa, Artificial Sequence; identical to SEQ ID NO: 17368
  GFR-binding peptide
  MOD_RES (37)..(37): Xaa is C or S
  MOD_RES (13)..(14)..(15)..(16)..(17): Xaa is A or G
  MOD_RES (18)..(19)..(20)..(21): Xaa is A or G or is absent

SEQ ID NO: 49361 - protein, 36 aa, Artificial Sequence
  GFR-binding peptide
  MOD_RES (1)..(3): Xaa is C or S
  MOD_RES (15)..(16)..(17)..(18)..(19): Xaa is A or G
  MOD_RES (20)..(21)..(22)..(23): Xaa is A or G or is absent
XGXGEVVMESMEGIXXXXXXXXXMIQMTINSLETPV

SEQ ID NO: 49362 - protein, 37 aa, Artificial Sequence
  GFR-binding peptide
  MOD_RES (32)..(33): Xaa is C or S
GEVVMDVQVEKVVKENEDVKAMKVSRLETPVXXAKPI

SEQ ID NO: 49363 - protein, 36 aa, Artificial Sequence
  GFR-binding peptide
  MOD_RES (1)..(3)..(36): Xaa is C or S
  MOD_RES (14)..(15)..(16)..(17)..(18): Xaa is A or G
  MOD_RES (19)..(20)..(21)..(22): Xaa is A or G or is absent
XKXSKVIMSMEGIXXXXXXXXXMIQITINSLDQSVX

SEQ ID NO: 49364 - protein, 35 aa, Artificial Sequence; identical to SEQ ID NO: 12029
  GFR-binding peptide
  MOD_RES (32)..(32): Xaa is C or S

SEQ ID NO: 49365 - protein, 36 aa, Artificial Sequence; identical to SEQ ID NO: 12032
  GFR-binding peptide
  MOD_RES (1)..(32)..(33): Xaa is C or S

SEQ ID NO: 49366 - protein, 38 aa, Artificial Sequence
  GFR-binding peptide
  MOD_RES (2)..(4)..(38): Xaa is C or S
  MOD_RES (16)..(17)..(18)..(19)..(20): Xaa is A or G
  MOD_RES (21)..(22)..(23)..(24): Xaa is A or G or is absent
RXGXGEVVMDSMEGIXXXXXXXXXMIQMTINSLETPVX

SEQ ID NO: 49367 - protein, 38 aa, Artificial Sequence
  GFR-binding peptide
  MOD_RES (2)..(4)..(38): Xaa is C or S
  MOD_RES (16)..(17)..(18)..(19)..(20): Xaa is A or G
  MOD_RES (21)..(22)..(23)..(24): Xaa is A or G or is absent
RXGXGEVVMEVQVEKXXXXXXXXXVKAMKVSRLETPVX

SEQ ID NO: 49368 - protein, 38 aa, Artificial Sequence
  GFR-binding peptide
  MOD_RES (1)..(38): Xaa is C or S
XELHEELRNSLQELKPKKRVYEYYLVTLPEHHVRSPQX

SEQ ID NO: 49369 - protein, 34 aa, Artificial Sequence
  GFR-binding peptide
  MOD_RES (2)..(34): Xaa is C or S
GXGEVVMESMEGIVVKDYEDMIQMTINSLETPVX

SEQ ID NO: 49370 - protein, 37 aa, Artificial Sequence
  GFR-binding peptide
  MOD_RES (31)..(32): Xaa is C or S
EVVMEVTAKKVVKDYEDIKRMQVPRLETPVXXAKPIS

SEQ ID NO: 49371 - protein, 42 aa, Artificial Sequence
  GFR-binding peptide
  MOD_RES (2)..(36)..(37): Xaa is C or S
  MOD_RES (14)..(15)..(16)..(17)..(18): Xaa is A or G
  MOD_RES (19)..(20)..(21)..(22): Xaa is A or G or is absent
GXSRVVMNVTAKKXXXXXXXXXIKRVQVPRLKTPAXXPKPVY

SEQ ID NO: 49372 - protein, 43 aa, Artificial Sequence
  GFR-binding peptide
  MOD_RES (2)..(4)..(38): Xaa is C or S
  MOD_RES (16)..(17)..(18)..(19)..(20): Xaa is A or G
  MOD_RES (21)..(22)..(23)..(24): Xaa is A or G or is absent
HXGXSRVVMNVQVEKXXXXXXXXXVKAVKVSRLKTPAXTPKTV

SEQ ID NO: 49373 - protein, 37 aa, Artificial Sequence
  GFR-binding peptide
  MOD_RES (2)..(4)..(35)..(36): Xaa is C or S
SXKXSKVVMSMEGIVKPTRGVMIQITINSLDQPVXXP

SEQ ID NO: 49374 - protein, 38 aa, Artificial Sequence
  GFR-binding peptide
  MOD_RES (1)..(3): Xaa is C or S
  MOD_RES (16)..(17)..(18)..(19)..(20): Xaa is A or G
  MOD_RES (21)..(22)..(23)..(24): Xaa is A or G or is absent
XKXALHDELTNSLQEXXXXXXXXXYYVVPLPELQVQTP

SEQ ID NO: 49375 - protein, 37 aa, Artificial Sequence
  GFR-binding peptide
  MOD_RES (2)..(34)..(35): Xaa is C or S
GXSRVVMNVQVEKIVNSSDDVKAVKVSRLKTPAXXPK

SEQ ID NO: 49376 - protein, 34 aa, Artificial Sequence
  GFR-binding peptide
HEELRNSLQELKPKKRVYEYYLVTLPEHHVRSPQ

SEQ ID NO: 49377 - protein, 38 aa, Artificial Sequence
  GFR-binding peptide
  MOD_RES (2)..(4)..(38): Xaa is C or S
RXEXKNHQLFNSLQEHQGQHPKIRYYVMPLPEEETPVX

SEQ ID NO: 49378 - protein, 41 aa, Artificial Sequence
  GFR-binding peptide
  MOD_RES (2)..(39): Xaa is C or S
  MOD_RES (15)..(16)..(17)..(18)..(19): Xaa is A or G
  MOD_RES (20)..(21)..(22)..(23): Xaa is A or G or is absent
KXALHDELTNSLQEXXXXXXXXXYYVVPLPELQVQTPRXQV

SEQ ID NO: 49379 - protein, 36 aa, Artificial Sequence; identical to SEQ ID NO: 12039
  GFR-binding peptide
  MOD_RES (2)..(34): Xaa is C or S

SEQ ID NO: 49380 - protein, 34 aa, Artificial Sequence; identical to SEQ ID NO: 17380
  GFR-binding peptide

SEQ ID NO: 49381 - protein, 33 aa, Artificial Sequence
  GFR-binding peptide
HDELTNSLQEFIPKKRVIEYYLVTLPELQVQTP

SEQ ID NO: 49382 - protein, 37 aa, Artificial Sequence; identical to SEQ ID NO: 12040
  GFR-binding peptide
  MOD_RES (1)..(3)..(34)..(35): Xaa is C or S

SEQ ID NO: 49383 - protein, 39 aa, Artificial Sequence; identical to SEQ ID NO: 12041
  GFR-binding peptide
  MOD_RES (1)..(3)..(35): Xaa is C or S

SEQ ID NO: 49384 - protein, 34 aa, Artificial Sequence; identical to SEQ ID NO: 12042
  GFR-binding peptide
  MOD_RES (31)..(32): Xaa is C or S

SEQ ID NO: 49385 - protein, 39 aa, Artificial Sequence
  GFR-binding peptide
  MOD_RES (1)..(33)..(34): Xaa is C or S
XGEVVMDSMEGIVVKENEDMIQMTINSLETPVXXAKPIK

SEQ ID NO: 49386 - protein, 38 aa, Artificial Sequence; identical to SEQ ID NO: 17382
  GFR-binding peptide
  MOD_RES (1)..(3)..(37): Xaa is C or S

SEQ ID NO: 49387 - protein, 36 aa, Artificial Sequence
  GFR-binding peptide
  MOD_RES (34)..(35): Xaa is C or S
  MOD_RES (12)..(13)..(14)..(15)..(16): Xaa is A or G
  MOD_RES (17)..(18)..(19)..(20): Xaa is A or G or is absent
ARVVMNVQVEKXXXXXXXXXVKAVKVSRLQTPAXXP

SEQ ID NO: 49388 - protein, 36 aa, Artificial Sequence; identical to SEQ ID NO: 17385
  GFR-binding peptide
  MOD_RES (35)..(35): Xaa is C or S
  MOD_RES (11)..(12)..(13)..(14)..(15): Xaa is A or G
  MOD_RES (16)..(17)..(18)..(19): Xaa is A or G or is absent

SEQ ID NO: 49389 - protein, 41 aa, Artificial Sequence; identical to SEQ ID NO: 17388
  GFR-binding peptide
  MOD_RES (1)..(38): Xaa is C or S
  MOD_RES (14)..(15)..(16)..(17)..(18): Xaa is A or G
  MOD_RES (19)..(20)..(21)..(22): Xaa is A or G or is absent

SEQ ID NO: 49390 - protein, 32 aa, Artificial Sequence
  GFR-binding peptide
  MOD_RES (1)..(1): Xaa is C or S
XARVVMNVTAKKIVNSSDDIKRVQVPRLQTPA

SEQ ID NO: 49391 - protein, 37 aa, Artificial Sequence; identical to SEQ ID NO: 12048
  GFR-binding peptide
  MOD_RES (33)..(34): Xaa is C or S
  MOD_RES (11)..(12)..(13)..(14)..(15): Xaa is A or G
  MOD_RES (16)..(17)..(18)..(19): Xaa is A or G or is absent

SEQ ID NO: 49392 - protein, 38 aa, Artificial Sequence; identical to SEQ ID NO: 36148
  GFR-binding peptide
  MOD_RES (1)..(34)..(35): Xaa is C or S
  MOD_RES (12)..(13)..(14)..(15)..(16): Xaa is A or G
  MOD_RES (17)..(18)..(19)..(20): Xaa is A or G or is absent

SEQ ID NO: 49393 - protein, 42 aa, Artificial Sequence; identical to SEQ ID NO: 12049
  GFR-binding peptide
  MOD_RES (2)..(36)..(37): Xaa is C or S
  MOD_RES (14)..(15)..(16)..(17)..(18): Xaa is A or G
  MOD_RES (19)..(20)..(21)..(22): Xaa is A or G or is absent

SEQ ID NO: 49394 - protein, 33 aa, Artificial Sequence
  GFR-binding peptide
HDELTNSLQEFIPKKRVIEYYVVPLPELQVQTP

SEQ ID NO: 49395 - protein, 34 aa, Artificial Sequence
  GFR-binding peptide
  MOD_RES (1)..(3): Xaa is C or S
XGXSRVVMNVTAKKIVNSSDDIKRVQVPRLKTPA

SEQ ID NO: 49396 - protein, 36 aa, Artificial Sequence
  GFR-binding peptide
  MOD_RES (1)..(3): Xaa is C or S
  MOD_RES (15)..(16)..(17)..(18)..(19): Xaa is A or G
  MOD_RES (20)..(21)..(22)..(23): Xaa is A or G or is absent
XGXSRVVMNVQVEKXXXXXXXXXVKAVKVSRLKTPA

SEQ ID NO: 49397 - protein, 37 aa, Artificial Sequence
  GFR-binding peptide
  MOD_RES (37)..(37): Xaa is C or S
ALHDELTNSLQEFIPKKRVIEYYVVPLPELQVQTPRX

SEQ ID NO: 49398 - protein, 34 aa, Artificial Sequence
  GFR-binding peptide
  MOD_RES (2)..(33)..(34): Xaa is C or S
KXSRVIMVQVEKVKPKRGVVKAIKVSRLAQPVXX

SEQ ID NO: 49399 - protein, 33 aa, Artificial Sequence; identical to SEQ ID NO: 12052
  GFR-binding peptide
  MOD_RES (1)..(32)..(33): Xaa is C or S

SEQ ID NO: 49400 - protein, 35 aa, Artificial Sequence; identical to SEQ ID NO: 17389
  GFR-binding peptide
  MOD_RES (33)..(33): Xaa is C or S
  MOD_RES (11)..(12)..(13)..(14)..(15): Xaa is A or G
  MOD_RES (16)..(17)..(18)..(19): Xaa is A or G or is absent

SEQ ID NO: 49401 - protein, 33 aa, Artificial Sequence; identical to SEQ ID NO: 12053
  GFR-binding peptide
  MOD_RES (31)..(32): Xaa is C or S

SEQ ID NO: 49402 - protein, 36 aa, Artificial Sequence
  GFR-binding peptide
  MOD_RES (31)..(32): Xaa is C or S
SKVVMVQVEKVKPTRGVVKAIKVSRLDQPVXXPSAS

SEQ ID NO: 49403 - protein, 43 aa, Artificial Sequence; identical to SEQ ID NO: 17390
  GFR-binding peptide
  MOD_RES (2)..(4)..(38): Xaa is C or S

SEQ ID NO: 49404 - protein, 40 aa, Artificial Sequence; identical to SEQ ID NO: 17391
  GFR-binding peptide
  MOD_RES (1)..(3)..(40): Xaa is C or S

SEQ ID NO: 49405 - protein, 38 aa, Artificial Sequence; identical to SEQ ID NO: 12057
  GFR-binding peptide
  MOD_RES (2)..(35)..(36): Xaa is C or S
  MOD_RES (13)..(14)..(15)..(16)..(17): Xaa is A or G
  MOD_RES (18)..(19)..(20)..(21): Xaa is A or G or is absent

SEQ ID NO: 49406 - protein, 37 aa, Artificial Sequence
  GFR-binding peptide
  MOD_RES (31)..(32): Xaa is C or S
SRVIMVQVEKVKPKRGVVKAIKVSRLAQPVXXPAASA

SEQ ID NO: 49407 - protein, 38 aa, Artificial Sequence; identical to SEQ ID NO: 12059
  GFR-binding peptide
  MOD_RES (1)..(33)..(34): Xaa is C or S

SEQ ID NO: 49408 - protein, 35 aa, Artificial Sequence
  GFR-binding peptide
  MOD_RES (2)..(33)..(34): Xaa is C or S
KXSKVVMVTAKKVKPTRGVIKRIQVPRLDQPVXXP

SEQ ID NO: 49409 - protein, 44 aa, Artificial Sequence
  GFR-binding peptide
  MOD_RES (2)..(4)..(38)..(39): Xaa is C or S
  MOD_RES (16)..(17)..(18)..(19)..(20): Xaa is A or G
  MOD_RES (21)..(22)..(23)..(24): Xaa is A or G or is absent
HXGXSRVVMNVTAKKXXXXXXXXXIKRVQVPRLKTPAXXPKPVY

SEQ ID NO: 49410 - protein, 37 aa, Artificial Sequence
  GFR-binding peptide
  MOD_RES (2)..(36)..(37): Xaa is C or S
  MOD_RES (14)..(15)..(16)..(17)..(18): Xaa is A or G
  MOD_RES (19)..(20)..(21)..(22): Xaa is A or G or is absent
GXGEVVMESMEGIXXXXXXXXXMIQMTINSLETPVXX

SEQ ID NO: 49411 - protein, 37 aa, Artificial Sequence; identical to SEQ ID NO: 12061
  GFR-binding peptide
  MOD_RES (1)..(3)..(36)..(37): Xaa is C or S
  MOD_RES (14)..(15)..(16)..(17)..(18): Xaa is A or G
  MOD_RES (19)..(20)..(21)..(22): Xaa is A or G or is absent

SEQ ID NO: 49412 - protein, 36 aa, Artificial Sequence; identical to SEQ ID NO: 12062
  GFR-binding peptide
  MOD_RES (32)..(33): Xaa is C or S

SEQ ID NO: 49413 - protein, 36 aa, Artificial Sequence
  GFR-binding peptide
  MOD_RES (2)..(4)..(36): Xaa is C or S
RXGXGEVVMEVQVEKVVKDYEDVKAMKVSRLETPVX

SEQ ID NO: 49414 - protein, 34 aa, Artificial Sequence
  GFR-binding peptide
  MOD_RES (1)..(3): Xaa is C or S
XGXARVVMNVQVEKIVNSSDDVKAVKVSRLQTPA

SEQ ID NO: 49415 - protein, 34 aa, Artificial Sequence; identical to SEQ ID NO: 12064
  GFR-binding peptide
  MOD_RES (1)..(32)..(33): Xaa is C or S

SEQ ID NO: 49416 - protein, 35 aa, Artificial Sequence
  GFR-binding peptide
  MOD_RES (2)..(2): Xaa is C or S
  MOD_RES (14)..(15)..(16)..(17)..(18): Xaa is A or G
  MOD_RES (19)..(20)..(21)..(22): Xaa is A or G or is absent
GXARVVMNSMEGIXXXXXXXXXMIQVTINSLQTPA

SEQ ID NO: 49417 - protein, 40 aa, Artificial Sequence; identical to SEQ ID NO: 12065
  GFR-binding peptide
  MOD_RES (34)..(34): Xaa is C or S
  MOD_RES (12)..(13)..(14)..(15)..(16): Xaa is A or G
  MOD_RES (17)..(18)..(19)..(20): Xaa is A or G or is absent

SEQ ID NO: 49418 - protein, 37 aa, Artificial Sequence
  GFR-binding peptide
  MOD_RES (32)..(33): Xaa is C or S
SRVVMNVTAKKIVNSSDDIKRVQVPRLKTPAXXPKPV

SEQ ID NO: 49419 - protein, 38 aa, Artificial Sequence
  GFR-binding peptide
  MOD_RES (1)..(33): Xaa is C or S
XSRVVMNVQVEKIVNSSDDVKAVKVSRLKTPAXTPKTV

SEQ ID NO: 49420 - protein, 34 aa, Artificial Sequence
  GFR-binding peptide
  MOD_RES (33)..(34): Xaa is C or S
  MOD_RES (11)..(12)..(13)..(14)..(15): Xaa is A or G
  MOD_RES (16)..(17)..(18)..(19): Xaa is A or G or is absent
SRVIMVQVEKXXXXXXXXXVKAIKVSRLAQPVXX

SEQ ID NO: 49421 - protein, 32 aa, Artificial Sequence
  GFR-binding peptide
  MOD_RES (11)..(12)..(13)..(14)..(15): Xaa is A or G
  MOD_RES (16)..(17)..(18)..(19): Xaa is A or G or is absent
NHQLFNSLQEXXXXXXXXXYYVMPLPEEETPV

SEQ ID NO: 49422 - protein, 36 aa, Artificial Sequence
  GFR-binding peptide
  MOD_RES (2)..(34): Xaa is C or S
GXSRVVMNVQVEKIVNSSDDVKAVKVSRLKTPAXTP

SEQ ID NO: 49423 - protein, 34 aa, Artificial Sequence; identical to SEQ ID NO: 12068
  GFR-binding peptide
  MOD_RES (2)..(2): Xaa is C or S
  MOD_RES (13)..(14)..(15)..(16)..(17): Xaa is A or G
  MOD_RES (18)..(19)..(20)..(21): Xaa is A or G or is absent

SEQ ID NO: 49424 - protein, 39 aa, Artificial Sequence
  GFR-binding peptide
  MOD_RES (1)..(38): Xaa is C or S
  MOD_RES (14)..(15)..(16)..(17)..(18): Xaa is A or G
  MOD_RES (19)..(20)..(21)..(22): Xaa is A or G or is absent
XALHDELTNSLQEXXXXXXXXXYYLVTLPELQVQTPRXQ

SEQ ID NO: 49425 - protein, 39 aa, Artificial Sequence; identical to SEQ ID NO: 12069
  GFR-binding peptide
  MOD_RES (1)..(34)..(35): Xaa is C or S
  MOD_RES (12)..(13)..(14)..(15)..(16): Xaa is A or G
  MOD_RES (17)..(18)..(19)..(20): Xaa is A or G or is absent

SEQ ID NO: 49426 - protein, 37 aa, Artificial Sequence
  GFR-binding peptide
  MOD_RES (2)..(4)..(37): Xaa is C or S
  MOD_RES (15)..(16)..(17)..(18)..(19): Xaa is A or G
  MOD_RES (20)..(21)..(22)..(23): Xaa is A or G or is absent
SXKXSKVIMSMEGIXXXXXXXXXMIQITINSLDQSVX

SEQ ID NO: 49427 - protein, 39 aa, Artificial Sequence; identical to SEQ ID NO: 12070
  GFR-binding peptide
  MOD_RES (1)..(3)..(34)..(35): Xaa is C or S

SEQ ID NO: 49428 - protein, 33 aa, Artificial Sequence; identical to SEQ ID NO: 12072
  GFR-binding peptide
  MOD_RES (2)..(33): Xaa is C or S

SEQ ID NO: 49429 - protein, 38 aa, Artificial Sequence; identical to SEQ ID NO: 12073
  GFR-binding peptide
  MOD_RES (2)..(36)..(37): Xaa is C or S
  MOD_RES (14)..(15)..(16)..(17)..(18): Xaa is A or G
  MOD_RES (19)..(20)..(21)..(22): Xaa is A or G or is absent

SEQ ID NO: 49430 - protein, 34 aa, Artificial Sequence; identical to SEQ ID NO: 12077
  GFR-binding peptide
  MOD_RES (1)..(1): Xaa is C or S
  MOD_RES (13)..(14)..(15)..(16)..(17): Xaa is A or G
  MOD_RES (18)..(19)..(20)..(21): Xaa is A or G or is absent

SEQ ID NO: 49431 - protein, 41 aa, Artificial Sequence; identical to SEQ ID NO: 12078
  GFR-binding peptide
  MOD_RES (2)..(4)..(36)..(37): Xaa is C or S

SEQ ID NO: 49432 - protein, 37 aa, Artificial Sequence
  GFR-binding peptide
  MOD_RES (32)..(33): Xaa is C or S
GEVVMEVQVEKVVKDYEDVKAMKVSRLETPVXXAKPI

SEQ ID NO: 49433 - protein, 39 aa, Artificial Sequence
  GFR-binding peptide
  MOD_RES (2)..(34)..(35): Xaa is C or S
GXGEVVMDVTAKKVVKENEDIKRMQVPRLETPVXXAKPI

SEQ ID NO: 49434 - protein, 36 aa, Artificial Sequence; identical to SEQ ID NO: 12081
  GFR-binding peptide
  MOD_RES (34)..(35): Xaa is C or S
  MOD_RES (12)..(13)..(14)..(15)..(16): Xaa is A or G
  MOD_RES (17)..(18)..(19)..(20): Xaa is A or G or is absent

SEQ ID NO: 49435 - protein, 41 aa, Artificial Sequence
  GFR-binding peptide
  MOD_RES (2)..(35)..(36): Xaa is C or S
  MOD_RES (13)..(14)..(15)..(16)..(17): Xaa is A or G
  MOD_RES (18)..(19)..(20)..(21): Xaa is A or G or is absent
KXSRVIMSMEGIXXXXXXXXXMIQITINSLAQPVXXPAASA

SEQ ID NO: 49436 - protein, 36 aa, Artificial Sequence; identical to SEQ ID NO: 12084
  GFR-binding peptide
  MOD_RES (31)..(32): Xaa is C or S

SEQ ID NO: 49437 - protein, 36 aa, Artificial Sequence
  GFR-binding peptide
  MOD_RES (31)..(31): Xaa is C or S
RVVMNVTAKKIVNSSDDIKRVQVPRLKTPAXTPKTV

SEQ ID NO: 49438 - protein, 38 aa, Artificial Sequence
  GFR-binding peptide
  MOD_RES (36)..(36): Xaa is C or S
LHDELTNSLQEFIPKKRVIEYYVVPLPELQVQTPRXQV

SEQ ID NO: 49439 - protein, 36 aa, Artificial Sequence
  GFR-binding peptide
  MOD_RES (36)..(36): Xaa is C or S
LHEELRNSLQELKPKKRVYEYYVVPLPEHHVRSPQX

SEQ ID NO: 49440 - protein, 35 aa, Artificial Sequence
  GFR-binding peptide
LHEELRNSLQELKPKKRVYEYYVVPLPEHHVRSPQ

SEQ ID NO: 49441 - protein, 39 aa, Artificial Sequence; identical to SEQ ID NO: 17401
  GFR-binding peptide
  MOD_RES (33)..(33): Xaa is C or S

SEQ ID NO: 49442 - protein, 36 aa, Artificial Sequence
  GFR-binding peptide
  MOD_RES (1)..(35)..(36): Xaa is C or S
  MOD_RES (13)..(14)..(15)..(16)..(17): Xaa is A or G
  MOD_RES (18)..(19)..(20)..(21): Xaa is A or G or is absent
XGEVVMDVQVEKXXXXXXXXXVKAMKVSRLETPVXX

SEQ ID NO: 49443 - protein, 34 aa, Artificial Sequence
  GFR-binding peptide
  MOD_RES (31)..(32): Xaa is C or S
EVVMESMEGIVVKDYEDMIQMTINSLETPVXXAK

SEQ ID NO: 49444 - protein, 36 aa, Artificial Sequence; identical to SEQ ID NO: 12086
  GFR-binding peptide
  MOD_RES (31)..(32): Xaa is C or S

SEQ ID NO: 49445 - protein, 33 aa, Artificial Sequence; identical to SEQ ID NO: 17402
  GFR-binding peptide
  MOD_RES (11)..(12)..(13)..(14)..(15): Xaa is A or G
  MOD_RES (16)..(17)..(18)..(19): Xaa is A or G or is absent

SEQ ID NO: 49446 - protein, 39 aa, Artificial Sequence
  GFR-binding peptide
  MOD_RES (2)..(4)..(38)..(39): Xaa is C or S
  MOD_RES (16)..(17)..(18)..(19)..(20): Xaa is A or G
  MOD_RES (21)..(22)..(23)..(24): Xaa is A or G or is absent
RXGXGEVVMEVTAKKXXXXXXXXXIKRMQVPRLETPVXX

SEQ ID NO: 49447 - protein, 40 aa, Artificial Sequence
  GFR-binding peptide
  MOD_RES (1)..(3)..(35)..(36): Xaa is C or S
XGXARVVMNSMEGIIVNSSDDMIQVTINSLQTPAXXPKPV

SEQ ID NO: 49448 - protein, 33 aa, Artificial Sequence
  GFR-binding peptide
  MOD_RES (1)..(33): Xaa is C or S
XGEVVMEVTAKKVVKDYEDIKRMQVPRLETPVX

SEQ ID NO: 49449 - protein, 38 aa, Artificial Sequence; identical to SEQ ID NO: 17406
  GFR-binding peptide
  MOD_RES (36)..(36): Xaa is C or S
  MOD_RES (12)..(13)..(14)..(15)..(16): Xaa is A or G
  MOD_RES (17)..(18)..(19)..(20): Xaa is A or G or is absent

SEQ ID NO: 49450 - protein, 39 aa, Artificial Sequence; identical to SEQ ID NO: 17407
  GFR-binding peptide
  MOD_RES (33)..(33): Xaa is C or S

SEQ ID NO: 49451 - protein, 39 aa, Artificial Sequence; identical to SEQ ID NO: 17408
  GFR-binding peptide
  MOD_RES (1)..(3): Xaa is C or S

SEQ ID NO: 49452 - protein, 36 aa, Artificial Sequence; identical to SEQ ID NO: 17409
  GFR-binding peptide
  MOD_RES (34)..(34): Xaa is C or S

SEQ ID NO: 49453 - protein, 37 aa, Artificial Sequence; identical to SEQ ID NO: 17410
  GFR-binding peptide
  MOD_RES (37)..(37): Xaa is C or S
  MOD_RES (13)..(14)..(15)..(16)..(17): Xaa is A or G
  MOD_RES (18)..(19)..(20)..(21): Xaa is A or G or is absent

SEQ ID NO: 49454 - protein, 43 aa, Artificial Sequence
  GFR-binding peptide
  MOD_RES (2)..(4)..(37)..(38): Xaa is C or S
  MOD_RES (15)..(16)..(17)..(18)..(19): Xaa is A or G
  MOD_RES (20)..(21)..(22)..(23): Xaa is A or G or is absent
SXKXSRVIMSMEGIXXXXXXXXXMIQITINSLAQPVXXPAASA

SEQ ID NO: 49455 - protein, 36 aa, Artificial Sequence
  GFR-binding peptide
  MOD_RES (1)..(3)..(34)..(35): Xaa is C or S
XKXSKVIMVTAKKIKPTKGIIKRIQVPRLDQSVXXP

SEQ ID NO: 49456 - protein, 34 aa, Artificial Sequence; identical to SEQ ID NO: 12090
  GFR-binding peptide
  MOD_RES (2)..(34): Xaa is C or S

SEQ ID NO: 49457 - protein, 43 aa, Artificial Sequence
  GFR-binding peptide
  MOD_RES (1)..(3)..(37): Xaa is C or S
  MOD_RES (15)..(16)..(17)..(18)..(19): Xaa is A or G
  MOD_RES (20)..(21)..(22)..(23): Xaa is A or G or is absent
XEXKNHQLFNSLQEXXXXXXXXXYYLMTLPEEETPVXELGEDN

SEQ ID NO: 49458 - protein, 36 aa, Artificial Sequence
  GFR-binding peptide
  MOD_RES (1)..(1): Xaa is C or S
  MOD_RES (14)..(15)..(16)..(17)..(18): Xaa is A or G
  MOD_RES (19)..(20)..(21)..(22): Xaa is A or G or is absent
XELHEELRNSLQEXXXXXXXXXYYVVPLPEHHVRSP

SEQ ID NO: 49459 - protein, 36 aa, Artificial Sequence
  GFR-binding peptide
  MOD_RES (32)..(33): Xaa is C or S
ARVVMNSMEGIIVNSSDDMIQVTINSLQTPAXXPKP

SEQ ID NO: 49460 - protein, 40 aa, Artificial Sequence
  GFR-binding peptide
  MOD_RES (1)..(3)..(40): Xaa is C or S
  MOD_RES (16)..(17)..(18)..(19)..(20): Xaa is A or G
  MOD_RES (21)..(22)..(23)..(24): Xaa is A or G or is absent
XKXALHDELTNSLQEXXXXXXXXXYYVVPLPELQVQTPRX

SEQ ID NO: 49461 - protein, 40 aa, Artificial Sequence; identical to SEQ ID NO: 12095
  GFR-binding peptide
  MOD_RES (2)..(4)..(38)..(39): Xaa is C or S
  MOD_RES (16)..(17)..(18)..(19)..(20): Xaa is A or G
  MOD_RES (21)..(22)..(23)..(24): Xaa is A or G or is absent

SEQ ID NO: 49462 - protein, 33 aa, Artificial Sequence; identical to SEQ ID NO: 17413
  GFR-binding peptide
  MOD_RES (11)..(12)..(13)..(14)..(15): Xaa is A or G
  MOD_RES (16)..(17)..(18)..(19): Xaa is A or G or is absent

SEQ ID NO: 49463 - protein, 43 aa, Artificial Sequence; identical to SEQ ID NO: 17414
  GFR-binding peptide
  MOD_RES (1)..(3)..(40): Xaa is C or S
  MOD_RES (16)..(17)..(18)..(19)..(20): Xaa is A or G
  MOD_RES (21)..(22)..(23)..(24): Xaa is A or G or is absent

SEQ ID NO: 49464 - protein, 38 aa, Artificial Sequence; identical to SEQ ID NO: 17416
  GFR-binding peptide
  MOD_RES (2)..(36): Xaa is C or S
  MOD_RES (14)..(15)..(16)..(17)..(18): Xaa is A or G
  MOD_RES (19)..(20)..(21)..(22): Xaa is A or G or is absent

SEQ ID NO: 49465 - protein, 32 aa, Artificial Sequence
  GFR-binding peptide
  MOD_RES (11)..(12)..(13)..(14)..(15): Xaa is A or G
  MOD_RES (16)..(17)..(18)..(19): Xaa is A or G or is absent
HDELTNSLQEXXXXXXXXXYYLVTLPELQVQT

SEQ ID NO: 49466 - protein, 36 aa, Artificial Sequence; identical to SEQ ID NO: 17417
  GFR-binding peptide
  MOD_RES (13)..(14)..(15)..(16)..(17): Xaa is A or G
  MOD_RES (18)..(19)..(20)..(21): Xaa is A or G or is absent

SEQ ID NO: 49467 - protein, 36 aa, Artificial Sequence; identical to SEQ ID NO: 17419
  GFR-binding peptide
  MOD_RES (2)..(2): Xaa is C or S
  MOD_RES (15)..(16)..(17)..(18)..(19): Xaa is A or G
  MOD_RES (20)..(21)..(22)..(23): Xaa is A or G or is absent

SEQ ID NO: 49468 - protein, 35 aa, Artificial Sequence
  GFR-binding peptide
  MOD_RES (1)..(3): Xaa is C or S
  MOD_RES (14)..(15)..(16)..(17)..(18): Xaa is A or G
  MOD_RES (19)..(20)..(21)..(22): Xaa is A or G or is absent
XKXSRVIMVQVEKXXXXXXXXXVKAIKVSRLAQPV

SEQ ID NO: 49469 - protein, 40 aa, Artificial Sequence; identical to SEQ ID NO: 17422
  GFR-binding peptide
  MOD_RES (2)..(4): Xaa is C or S

SEQ ID NO: 49470 - protein, 34 aa, Artificial Sequence; identical to SEQ ID NO: 12100
  GFR-binding peptide
  MOD_RES (31)..(32): Xaa is C or S

SEQ ID NO: 49471 - protein, 37 aa, Artificial Sequence; identical to SEQ ID NO: 12101
  GFR-binding peptide
  MOD_RES (33)..(34): Xaa is C or S
  MOD_RES (11)..(12)..(13)..(14)..(15): Xaa is A or G
  MOD_RES (16)..(17)..(18)..(19): Xaa is A or G or is absent

SEQ ID NO: 49472 - protein, 36 aa, Artificial Sequence
  GFR-binding peptide
  MOD_RES (1)..(3)..(34)..(35): Xaa is C or S
XKXSKVVMVTAKKVKPTRGVIKRIQVPRLDQPVXXP

SEQ ID NO: 49473 - protein, 34 aa, Artificial Sequence
  GFR-binding peptide
  MOD_RES (33)..(34): Xaa is C or S
  MOD_RES (11)..(12)..(13)..(14)..(15): Xaa is A or G
  MOD_RES (16)..(17)..(18)..(19): Xaa is A or G or is absent
SRVIMVTAKKXXXXXXXXXIKRIQVPRLAQPVXX

SEQ ID NO: 49474 - protein, 38 aa, Artificial Sequence
  GFR-binding peptide
  MOD_RES (1)..(32)..(33): Xaa is C or S
XSRVIMSMEGIVKPKRGVMIQITINSLAQPVXXPAASA

SEQ ID NO: 49475 - protein, 38 aa, Artificial Sequence; identical to SEQ ID NO: 12103
  GFR-binding peptide
  MOD_RES (2)..(35)..(36): Xaa is C or S
  MOD_RES (13)..(14)..(15)..(16)..(17): Xaa is A or G
  MOD_RES (18)..(19)..(20)..(21): Xaa is A or G or is absent

SEQ ID NO: 49476 - protein, 32 aa, Artificial Sequence
  GFR-binding peptide
  MOD_RES (11)..(12)..(13)..(14)..(15): Xaa is A or G
  MOD_RES (16)..(17)..(18)..(19): Xaa is A or G or is absent
HDELTNSLQEXXXXXXXXXYYVVPLPELQVQT

SEQ ID NO: 49477 - protein, 35 aa, Artificial Sequence
  GFR-binding peptide
  MOD_RES (2)..(2): Xaa is C or S
  MOD_RES (14)..(15)..(16)..(17)..(18): Xaa is A or G
  MOD_RES (19)..(20)..(21)..(22): Xaa is A or G or is absent
GXGEVVMDVQVEKXXXXXXXXXVKAMKVSRLETPV

SEQ ID NO: 49478 - protein, 39 aa, Artificial Sequence; identical to SEQ ID NO: 12105
  GFR-binding peptide
  MOD_RES (2)..(34)..(35): Xaa is C or S

SEQ ID NO: 49479 - protein, 40 aa, Artificial Sequence; identical to SEQ ID NO: 12107
  GFR-binding peptide
  MOD_RES (1)..(35): Xaa is C or S
  MOD_RES (13)..(14)..(15)..(16)..(17): Xaa is A or G
  MOD_RES (18)..(19)..(20)..(21): Xaa is A or G or is absent

SEQ ID NO: 49480 - protein, 41 aa, Artificial Sequence
  GFR-binding peptide
  MOD_RES (2)..(4)..(38)..(39): Xaa is C or S
  MOD_RES (16)..(17)..(18)..(19)..(20): Xaa is A or G
  MOD_RES (21)..(22)..(23)..(24): Xaa is A or G or is absent
HXGXSRVVMNVQVEKXXXXXXXXXVKAVKVSRLKTPAXXPK

SEQ ID NO: 49481 - protein, 36 aa, Artificial Sequence
  GFR-binding peptide
  MOD_RES (1)..(3)..(35)..(36): Xaa is C or S
XGXGEVVMDVQVEKVVKENEDVKAMKVSRLETPVXX

SEQ ID NO: 49482 - protein, 36 aa, Artificial Sequence
  GFR-binding peptide
  MOD_RES (1)..(3): Xaa is C or S
  MOD_RES (15)..(16)..(17)..(18)..(19): Xaa is A or G
  MOD_RES (20)..(21)..(22)..(23): Xaa is A or G or is absent
XGXARVVMNVTAKKXXXXXXXXXIKRVQVPRLQTPA

SEQ ID NO: 49483 - protein, 34 aa, Artificial Sequence; identical to SEQ ID NO: 12108
  GFR-binding peptide
  MOD_RES (2)..(33)..(34): Xaa is C or S

SEQ ID NO: 49484 - protein, 33 aa, Artificial Sequence
  GFR-binding peptide
  MOD_RES (31)..(32): Xaa is C or S
SKVVMVTAKKVKPTRGVIKRIQVPRLDQPVXXP

SEQ ID NO: 49485 - protein, 38 aa, Artificial Sequence
  GFR-binding peptide
  MOD_RES (1)..(35)..(36): Xaa is C or S
  MOD_RES (13)..(14)..(15)..(16)..(17): Xaa is A or G
  MOD_RES (18)..(19)..(20)..(21): Xaa is A or G or is absent
XARVVMNVQVEKXXXXXXXXXVKAVKVSRLQTPAXXPK

SEQ ID NO: 49486 - protein, 34 aa, Artificial Sequence
  GFR-binding peptide
  MOD_RES (32)..(32): Xaa is C or S
SRVVMNSMEGIIVNSSDDMIQVTINSLKTPAXTP

SEQ ID NO: 49487 - protein, 39 aa, Artificial Sequence; identical to SEQ ID NO: 12111
  GFR-binding peptide
  MOD_RES (34)..(35): Xaa is C or S
  MOD_RES (12)..(13)..(14)..(15)..(16): Xaa is A or G
  MOD_RES (17)..(18)..(19)..(20): Xaa is A or G or is absent

SEQ ID NO: 49488 - protein, 37 aa, Artificial Sequence
  GFR-binding peptide
  MOD_RES (33)..(34): Xaa is C or S
  MOD_RES (11)..(12)..(13)..(14)..(15): Xaa is A or G
  MOD_RES (16)..(17)..(18)..(19): Xaa is A or G or is absent
SRVIMVTAKKXXXXXXXXXIKRIQVPRLAQPVXXPAA

SEQ ID NO: 49489 - protein, 39 aa, Artificial Sequence; identical to SEQ ID NO: 12115
  GFR-binding peptide
  MOD_RES (2)..(35)..(36): Xaa is C or S
  MOD_RES (13)..(14)..(15)..(16)..(17): Xaa is A or G
  MOD_RES (18)..(19)..(20)..(21): Xaa is A or G or is absent

SEQ ID NO: 49490 - protein, 37 aa, Artificial Sequence; identical to SEQ ID NO: 12116
  GFR-binding peptide
  MOD_RES (1)..(3)..(37): Xaa is C or S
  MOD_RES (15)..(16)..(17)..(18)..(19): Xaa is A or G
  MOD_RES (20)..(21)..(22)..(23): Xaa is A or G or is absent

SEQ ID NO: 49491 - protein, 36 aa, Artificial Sequence
  GFR-binding peptide
  MOD_RES (2)..(4)..(36): Xaa is C or S
RXGXGEVVMDVTAKKVVKENEDIKRMQVPRLETPVX

SEQ ID NO: 49492 - protein, 39 aa, Artificial Sequence; identical to SEQ ID NO: 17435
  GFR-binding peptide
  MOD_RES (1)..(35): Xaa is C or S

SEQ ID NO: 49493 - protein, 39 aa, Artificial Sequence
  GFR-binding peptide
  MOD_RES (2)..(4)..(38): Xaa is C or S
  MOD_RES (16)..(17)..(18)..(19)..(20): Xaa is A or G
  MOD_RES (21)..(22)..(23)..(24): Xaa is A or G or is absent
RXEXKNHQLFNSLQEXXXXXXXXXYYLMTLPEEETPVXE

SEQ ID NO: 49494 - protein, 41 aa, Artificial Sequence
  GFR-binding peptide
  MOD_RES (2)..(35)..(36): Xaa is C or S
  MOD_RES (13)..(14)..(15)..(16)..(17): Xaa is A or G
  MOD_RES (18)..(19)..(20)..(21): Xaa is A or G or is absent
KXSKVIMSMEGIXXXXXXXXXMIQITINSLDQSVXXPSASA

SEQ ID NO: 49495 - protein, 33 aa, Artificial Sequence
  GFR-binding peptide
  MOD_RES (31)..(31): Xaa is C or S
RVVMNSMEGIIVNSSDDMIQVTINSLKTPAXTP

SEQ ID NO: 49496 - protein, 38 aa, Artificial Sequence; identical to SEQ ID NO: 17440
  GFR-binding peptide
  MOD_RES (1)..(3): Xaa is C or S

SEQ ID NO: 49497 - protein, 34 aa, Artificial Sequence
  GFR-binding peptide
  MOD_RES (1)..(1): Xaa is C or S
  MOD_RES (13)..(14)..(15)..(16)..(17): Xaa is A or G
  MOD_RES (18)..(19)..(20)..(21): Xaa is A or G or is absent
XGEVVMDVQVEKXXXXXXXXXVKAMKVSRLETPV

SEQ ID NO: 49498 - protein, 38 aa, Artificial Sequence; identical to SEQ ID NO: 12123
  GFR-binding peptide
  MOD_RES (2)..(4)..(36): Xaa is C or S

SEQ ID NO: 49499 - protein, 35 aa, Artificial Sequence; identical to SEQ ID NO: 12124
  GFR-binding peptide
  MOD_RES (32)..(32): Xaa is C or S

SEQ ID NO: 49500 - protein, 39 aa, Artificial Sequence
  GFR-binding peptide
  MOD_RES (2)..(4)..(37)..(38): Xaa is C or S
  MOD_RES (15)..(16)..(17)..(18)..(19): Xaa is A or G
  MOD_RES (20)..(21)..(22)..(23): Xaa is A or G or is absent
SXKXSKVIMVQVEKXXXXXXXXXVKAIKVSRLDQSVXXP

SEQ ID NO: 49501 - protein, 35 aa, Artificial Sequence; identical to SEQ ID NO: 12126
  GFR-binding peptide
  MOD_RES (1)..(3)..(35): Xaa is C or S

SEQ ID NO: 49502 - protein, 40 aa, Artificial Sequence; identical to SEQ ID NO: 17446
  GFR-binding peptide
  MOD_RES (1)..(35): Xaa is C or S

SEQ ID NO: 49503 - protein, 37 aa, Artificial Sequence; identical to SEQ ID NO: 12132
  GFR-binding peptide
  MOD_RES (2)..(35)..(36): Xaa is C or S
  MOD_RES (13)..(14)..(15)..(16)..(17): Xaa is A or G
  MOD_RES (18)..(19)..(20)..(21): Xaa is A or G or is absent

SEQ ID NO: 49504 - protein, 30 aa, Artificial Sequence
  GFR-binding peptide
SRVIMVTAKKVKPKRGVIKRIQVPRLAQPV

SEQ ID NO: 49505 - protein, 33 aa, Artificial Sequence
  GFR-binding peptide
HEELRNSLQELKPKKRVYEYYVVPLPEHHVRSP

SEQ ID NO: 49506 - protein, 36 aa, Artificial Sequence
  GFR-binding peptide
  MOD_RES (1)..(35): Xaa is C or S
  MOD_RES (13)..(14)..(15)..(16)..(17): Xaa is A or G
  MOD_RES (18)..(19)..(20)..(21): Xaa is A or G or is absent
XSRVVMNVQVEKXXXXXXXXXVKAVKVSRLKTPAXT

SEQ ID NO: 49507 - protein, 38 aa, Artificial Sequence; identical to SEQ ID NO: 12136
  GFR-binding peptide
  MOD_RES (2)..(33)..(34): Xaa is C or S

SEQ ID NO: 49508 - protein, 36 aa, Artificial Sequence
  GFR-binding peptide
  MOD_RES (1)..(35): Xaa is C or S
XKNHQLFNSLQEHQGQHPKIRYYVMPLPEEETPVXE

SEQ ID NO: 49509 - protein, 32 aa, Artificial Sequence
  GFR-binding peptide
  MOD_RES (1)..(32): Xaa is C or S
XSKVVMVTAKKVKPTRGVIKRIQVPRLDQPVX

SEQ ID NO: 49510 - protein, 32 aa, Artificial Sequence; identical to SEQ ID NO: 17450
  GFR-binding peptide
  MOD_RES (11)..(12)..(13)..(14)..(15): Xaa is A or G
  MOD_RES (16)..(17)..(18)..(19): Xaa is A or G or is absent

SEQ ID NO: 49511 - protein, 33 aa, Artificial Sequence
  GFR-binding peptide
LHEELRNSLQELKPKKRVYEYYLVTLPEHHVRS

SEQ ID NO: 49512 - protein, 33 aa, Artificial Sequence
  GFR-binding peptide
  MOD_RES (31)..(32): Xaa is C or S
RVVMNSMEGIIVNSSDDMIQVTINSLKTPAXXP

SEQ ID NO: 49513 - protein, 37 aa, Artificial Sequence
  GFR-binding peptide
  MOD_RES (2)..(4)..(37): Xaa is C or S
  MOD_RES (15)..(16)..(17)..(18)..(19): Xaa is A or G
  MOD_RES (20)..(21)..(22)..(23): Xaa is A or G or is absent
SXKXSKVVMVTAKKXXXXXXXXXIKRIQVPRLDQPVX

SEQ ID NO: 49514 - protein, 41 aa, Artificial Sequence
  GFR-binding peptide
  MOD_RES (2)..(4)..(37)..(38): Xaa is C or S
  MOD_RES (15)..(16)..(17)..(18)..(19): Xaa is A or G
  MOD_RES (20)..(21)..(22)..(23): Xaa is A or G or is absent
SXKXSKVIMVTAKKXXXXXXXXXIKRIQVPRLDQSVXXPSA

SEQ ID NO: 49515 - protein, 42 aa, Artificial Sequence
  GFR-binding peptide
  MOD_RES (1)..(3)..(37)..(38): Xaa is C or S
  MOD_RES (15)..(16)..(17)..(18)..(19): Xaa is A or G
  MOD_RES (20)..(21)..(22)..(23): Xaa is A or G or is absent
XGXGEVVMESMEGIXXXXXXXXXMIQMTINSLETPVXXAKPI

SEQ ID NO: 49516 - protein, 34 aa, Artificial Sequence
  GFR-binding peptide
  MOD_RES (2)..(34): Xaa is C or S
GXSRVVMNVTAKKIVNSSDDIKRVQVPRLKTPAX

SEQ ID NO: 49517 - protein, 33 aa, Artificial Sequence
  GFR-binding peptide
  MOD_RES (2)..(33): Xaa is C or S
KXSKVVMVTAKKVKPTRGVIKRIQVPRLDQPVX

SEQ ID NO: 49518 - protein, 37 aa, Artificial Sequence; identical to SEQ ID NO: 17453
  GFR-binding peptide
  MOD_RES (1)..(35): Xaa is C or S

SEQ ID NO: 49519 - protein, 38 aa, Artificial Sequence
  GFR-binding peptide
  MOD_RES (2)..(4)..(37)..(38): Xaa is C or S
  MOD_RES (15)..(16)..(17)..(18)..(19): Xaa is A or G
  MOD_RES (20)..(21)..(22)..(23): Xaa is A or G or is absent
SXKXSKVVMSMEGIXXXXXXXXXMIQITINSLDQPVXX

SEQ ID NO: 49520 - protein, 43 aa, Artificial Sequence; identical to SEQ ID NO: 12143
  GFR-binding peptide
  MOD_RES (1)..(3)..(37): Xaa is C or S
  MOD_RES (15)..(16)..(17)..(18)..(19): Xaa is A or G
  MOD_RES (20)..(21)..(22)..(23): Xaa is A or G or is absent

SEQ ID NO: 49521 - protein, 41 aa, Artificial Sequence; identical to SEQ ID NO: 17455
  GFR-binding peptide
  MOD_RES (37)..(37): Xaa is C or S
  MOD_RES (13)..(14)..(15)..(16)..(17): Xaa is A or G
  MOD_RES (18)..(19)..(20)..(21): Xaa is A or G or is absent

SEQ ID NO: 49522 - protein, 41 aa, Artificial Sequence
  GFR-binding peptide
  MOD_RES (2)..(4)..(36)..(37): Xaa is C or S
RXGXGEVVMDVTAKKVVKENEDIKRMQVPRLETPVXXAKPI

SEQ ID NO: 49523 - protein, 40 aa, Artificial Sequence
  GFR-binding peptide
  MOD_RES (2)..(4)..(37)..(38): Xaa is C or S
  MOD_RES (15)..(16)..(17)..(18)..(19): Xaa is A or G
  MOD_RES (20)..(21)..(22)..(23): Xaa is A or G or is absent
SXKXSKVIMVTAKKXXXXXXXXXIKRIQVPRLDQSVXXPS

SEQ ID NO: 49524 - protein, 36 aa, Artificial Sequence; identical to SEQ ID NO: 12145
  GFR-binding peptide
  MOD_RES (33)..(34): Xaa is C or S
  MOD_RES (11)..(12)..(13)..(14)..(15): Xaa is A or G
  MOD_RES (16)..(17)..(18)..(19): Xaa is A or G or is absent

SEQ ID NO: 49525 - protein, 34 aa, Artificial Sequence
  GFR-binding peptide
  MOD_RES (32)..(33): Xaa is C or S
SRVVMNVQVEKIVNSSDDVKAVKVSRLKTPAXXP

SEQ ID NO: 49526 - protein, 41 aa, Artificial Sequence; identical to SEQ ID NO: 12146
  GFR-binding peptide
  MOD_RES (2)..(36)..(37): Xaa is C or S
  MOD_RES (14)..(15)..(16)..(17)..(18): Xaa is A or G
  MOD_RES (19)..(20)..(21)..(22): Xaa is A or G or is absent

SEQ ID NO: 49527 - protein, 45 aa, Artificial Sequence; identical to SEQ ID NO: 17458
  GFR-binding peptide
  MOD_RES (2)..(4)..(41): Xaa is C or S
  MOD_RES (17)..(18)..(19)..(20)..(21): Xaa is A or G
  MOD_RES (22)..(23)..(24)..(25): Xaa is A or G or is absent

SEQ ID NO: 49528 - protein, 35 aa, Artificial Sequence; identical to SEQ ID NO: 12149
  GFR-binding peptide
  MOD_RES (1)..(35): Xaa is C or S
  MOD_RES (13)..(14)..(15)..(16)..(17): Xaa is A or G
  MOD_RES (18)..(19)..(20)..(21): Xaa is A or G or is absent

SEQ ID NO: 49529 - protein, 34 aa, Artificial Sequence
  GFR-binding peptide
  MOD_RES (11)..(12)..(13)..(14)..(15): Xaa is A or G
  MOD_RES (16)..(17)..(18)..(19): Xaa is A or G or is absent
HEELRNSLQEXXXXXXXXXYYLVTLPEHHVRSPQ

SEQ ID NO: 49530 - protein, 38 aa, Artificial Sequence; identical to SEQ ID NO: 17459
  GFR-binding peptide
  MOD_RES (2)..(4): Xaa is C or S
  MOD_RES (17)..(18)..(19)..(20)..(21): Xaa is A or G
  MOD_RES (22)..(23)..(24)..(25): Xaa is A or G or is absent

SEQ ID NO: 49531 - protein, 36 aa, Artificial Sequence
  GFR-binding peptide
  MOD_RES (1)..(3): Xaa is C or S
  MOD_RES (15)..(16)..(17)..(18)..(19): Xaa is A or G
  MOD_RES (20)..(21)..(22)..(23): Xaa is A or G or is absent
XGXGEVVMEVQVEKXXXXXXXXXVKAMKVSRLETPV

SEQ ID NO: 49532 - protein, 40 aa, Artificial Sequence
  GFR-binding peptide
  MOD_RES (1)..(3)..(37)..(38): Xaa is C or S
  MOD_RES (15)..(16)..(17)..(18)..(19): Xaa is A or G
  MOD_RES (20)..(21)..(22)..(23): Xaa is A or G or is absent
XGXSRVVMNVQVEKXXXXXXXXXVKAVKVSRLKTPAXXPK

SEQ ID NO: 49533 - protein, 35 aa, Artificial Sequence; identical to SEQ ID NO: 17462
  GFR-binding peptide
  MOD_RES (33)..(33): Xaa is C or S

SEQ ID NO: 49534 - protein, 41 aa, Artificial Sequence
  GFR-binding peptide
  MOD_RES (2)..(4)..(36)..(37): Xaa is C or S
HXGXARVVMNVTAKKIVNSSDDIKRVQVPRLQTPAXXPKPV

SEQ ID NO: 49535 - protein, 38 aa, Artificial Sequence; identical to SEQ ID NO: 17463
  GFR-binding peptide
  MOD_RES (2)..(2): Xaa is C or S

SEQ ID NO: 49536 - protein, 37 aa, Artificial Sequence; identical to SEQ ID NO: 12154
  GFR-binding peptide
  MOD_RES (31)..(32): Xaa is C or S

SEQ ID NO: 49537 - protein, 35 aa, Artificial Sequence; identical to SEQ ID NO: 12155
  GFR-binding peptide
  MOD_RES (31)..(32): Xaa is C or S

SEQ ID NO: 49538 - protein, 36 aa, Artificial Sequence
  GFR-binding peptide
  MOD_RES (2)..(33)..(34): Xaa is C or S
KXSRVIMSMEGIVKPKRGVMIQITINSLAQPVXXPA

SEQ ID NO: 49539 - protein, 35 aa, Artificial Sequence
  GFR-binding peptide
  MOD_RES (31)..(32): Xaa is C or S
RVVMNVQVEKIVNSSDDVKAVKVSRLQTPAXXPKP

SEQ ID NO: 49540 - protein, 40 aa, Artificial Sequence
  GFR-binding peptide
  MOD_RES (2)..(35)..(36): Xaa is C or S
  MOD_RES (13)..(14)..(15)..(16)..(17): Xaa is A or G
  MOD_RES (18)..(19)..(20)..(21): Xaa is A or G or is absent
KXSKVVMVQVEKXXXXXXXXXVKAIKVSRLDQPVXXPSAS

SEQ ID NO: 49541 - protein, 42 aa, Artificial Sequence; identical to SEQ ID NO: 17465
  GFR-binding peptide
  MOD_RES (2)..(36): Xaa is C or S

SEQ ID NO: 49542 - protein, 38 aa, Artificial Sequence
  GFR-binding peptide
  MOD_RES (1)..(35)..(36): Xaa is C or S
  MOD_RES (13)..(14)..(15)..(16)..(17): Xaa is A or G
  MOD_RES (18)..(19)..(20)..(21): Xaa is A or G or is absent
XSRVVMNVTAKKXXXXXXXXXIKRVQVPRLKTPAXXPK

SEQ ID NO: 49543 - protein, 32 aa, Artificial Sequence; identical to SEQ ID NO: 36299
  GFR-binding peptide
  MOD_RES (2)..(2): Xaa is C or S

SEQ ID NO: 49544 - protein, 41 aa, Artificial Sequence; identical to SEQ ID NO: 12164
  GFR-binding peptide
  MOD_RES (1)..(3)..(37)..(38): Xaa is C or S
  MOD_RES (15)..(16)..(17)..(18)..(19): Xaa is A or G
  MOD_RES (20)..(21)..(22)..(23): Xaa is A or G or is absent

SEQ ID NO: 49545 - protein, 41 aa, Artificial Sequence
  GFR-binding peptide
  MOD_RES (1)..(3)..(36)..(37): Xaa is C or S
  MOD_RES (14)..(15)..(16)..(17)..(18): Xaa is A or G
  MOD_RES (19)..(20)..(21)..(22): Xaa is A or G or is absent
XKXSKVIMVQVEKXXXXXXXXXVKAIKVSRLDQSVXXPSAS

SEQ ID NO: 49546 - protein, 37 aa, Artificial Sequence; identical to SEQ ID NO: 17466
  GFR-binding peptide
  MOD_RES (1)..(35): Xaa is C or S
  MOD_RES (13)..(14)..(15)..(16)..(17): Xaa is A or G
  MOD_RES (18)..(19)..(20)..(21): Xaa is A or G or is absent

SEQ ID NO: 49547 - protein, 34 aa, Artificial Sequence
  GFR-binding peptide
  MOD_RES (33)..(34): Xaa is C or S
  MOD_RES (11)..(12)..(13)..(14)..(15): Xaa is A or G
  MOD_RES (16)..(17)..(18)..(19): Xaa is A or G or is absent
EVVMEVQVEKXXXXXXXXXVKAMKVSRLETPVXX

SEQ ID NO: 49548 - protein, 38 aa, Artificial Sequence; identical to SEQ ID NO: 17470
  GFR-binding peptide
  MOD_RES (1)..(3): Xaa is C or S

SEQ ID NO: 49549 - protein, 36 aa, Artificial Sequence
  GFR-binding peptide
  MOD_RES (32)..(33): Xaa is C or S
ARVVMNVTAKKIVNSSDDIKRVQVPRLQTPAXXPKP

SEQ ID NO: 49550 - protein, 39 aa, Artificial Sequence
  GFR-binding peptide
  MOD_RES (1)..(3): Xaa is C or S
  MOD_RES (16)..(17)..(18)..(19)..(20): Xaa is A or G
  MOD_RES (21)..(22)..(23)..(24): Xaa is A or G or is absent
XKXALHDELTNSLQEXXXXXXXXXYYLVTLPELQVQTPR

SEQ ID NO: 49551 - protein, 36 aa, Artificial Sequence; identical to SEQ ID NO: 12167
  GFR-binding peptide
  MOD_RES (32)..(33): Xaa is C or S

SEQ ID NO: 49552 - protein, 33 aa, Artificial Sequence
  GFR-binding peptide
  MOD_RES (1)..(1): Xaa is C or S
  MOD_RES (12)..(13)..(14)..(15)..(16): Xaa is A or G
  MOD_RES (17)..(18)..(19)..(20): Xaa is A or G or is absent
XSRVIMVTAKKXXXXXXXXXIKRIQVPRLAQPV

SEQ ID NO: 49553 - protein, 38 aa, Artificial Sequence
  GFR-binding peptide
  MOD_RES (37)..(37): Xaa is C or S
ELHEELRNSLQELKPKKRVYEYYVVPLPEHHVRSPQXK

SEQ ID NO: 49554 - protein, 39 aa, Artificial Sequence
  GFR-binding peptide
  MOD_RES (2)..(4)..(37)..(38): Xaa is C or S
  MOD_RES (15)..(16)..(17)..(18)..(19): Xaa is A or G
  MOD_RES (20)..(21)..(22)..(23): Xaa is A or G or is absent
SXKXSKVVMVTAKKXXXXXXXXXIKRIQVPRLDQPVXXP

SEQ ID NO: 49555 - protein, 37 aa, Artificial Sequence
  GFR-binding peptide
  MOD_RES (1)..(34)..(35): Xaa is C or S
  MOD_RES (12)..(13)..(14)..(15)..(16): Xaa is A or G
  MOD_RES (17)..(18)..(19)..(20): Xaa is A or G or is absent
XSKVIMVQVEKXXXXXXXXXVKAIKVSRLDQSVXXPS

SEQ ID NO: 49556 - protein, 38 aa, Artificial Sequence
  GFR-binding peptide
  MOD_RES (1)..(3)..(35)..(36): Xaa is C or S
XGXGEVVMDSMEGIVVKENEDMIQMTINSLETPVXXAK

SEQ ID NO: 49557 - protein, 34 aa, Artificial Sequence
  GFR-binding peptide
  MOD_RES (33)..(33): Xaa is C or S
  MOD_RES (11)..(12)..(13)..(14)..(15): Xaa is A or G
  MOD_RES (16)..(17)..(18)..(19): Xaa is A or G or is absent
NHQLFNSLQEXXXXXXXXXYYVMPLPEEETPVXE

SEQ ID NO: 49558 - protein, 38 aa, Artificial Sequence; identical to SEQ ID NO: 12172
  GFR-binding peptide
  MOD_RES (2)..(36)..(37): Xaa is C or S
  MOD_RES (14)..(15)..(16)..(17)..(18): Xaa is A or G
  MOD_RES (19)..(20)..(21)..(22): Xaa is A or G or is absent

SEQ ID NO: 49559 - protein, 39 aa, Artificial Sequence; identical to SEQ ID NO: 12174
  GFR-binding peptide
  MOD_RES (2)..(36)..(37): Xaa is C or S
  MOD_RES (14)..(15)..(16)..(17)..(18): Xaa is A or G
  MOD_RES (19)..(20)..(21)..(22): Xaa is A or G or is absent

SEQ ID NO: 49560 - protein, 39 aa, Artificial Sequence
  GFR-binding peptide
  MOD_RES (2)..(34)..(35): Xaa is C or S
GXGEVVMEVTAKKVVKDYEDIKRMQVPRLETPVXXAKPI

SEQ ID NO: 49561 - protein, 41 aa, Artificial Sequence; identical to SEQ ID NO: 12176
  GFR-binding peptide
  MOD_RES (2)..(35)..(36): Xaa is C or S
  MOD_RES (13)..(14)..(15)..(16)..(17): Xaa is A or G
  MOD_RES (18)..(19)..(20)..(21): Xaa is A or G or is absent

SEQ ID NO: 49562 - protein, 34 aa, Artificial Sequence
  GFR-binding peptide
  MOD_RES (31)..(32): Xaa is C or S
EVVMDSMEGIVVKENEDMIQMTINSLETPVXXAK

SEQ ID NO: 49563 - protein, 32 aa, Artificial Sequence; identical to SEQ ID NO: 12179
  GFR-binding peptide
  MOD_RES (1)..(1): Xaa is C or S

SEQ ID NO: 49564 - protein, 39 aa, Artificial Sequence; identical to SEQ ID NO: 17476
  GFR-binding peptide
  MOD_RES (2)..(4): Xaa is C or S

SEQ ID NO: 49565 - protein, 33 aa, Artificial Sequence; identical to SEQ ID NO: 17477
  GFR-binding peptide

SEQ ID NO: 49566 - protein, 36 aa, Artificial Sequence
  GFR-binding peptide
  MOD_RES (1)..(3)..(34)..(35): Xaa is C or S
XKXSKVIMVQVEKIKPTKGIVKAIKVSRLDQSVXXP

SEQ ID NO: 49567 - protein, 39 aa, Artificial Sequence; identical to SEQ ID NO: 17478
  GFR-binding peptide
  MOD_RES (2)..(39): Xaa is C or S

SEQ ID NO: 49568 - protein, 42 aa, Artificial Sequence
  GFR-binding peptide
  MOD_RES (2)..(4)..(37)..(38): Xaa is C or S
  MOD_RES (15)..(16)..(17)..(18)..(19): Xaa is A or G
  MOD_RES (20)..(21)..(22)..(23): Xaa is A or G or is absent
SXKXSKVIMVQVEKXXXXXXXXXVKAIKVSRLDQSVXXPSAS

SEQ ID NO: 49569 - protein, 44 aa, Artificial Sequence
  GFR-binding peptide
  MOD_RES (2)..(4)..(38): Xaa is C or S
RXEXKNHQLFNSLQEHQGQHPKIRYYLMTLPEEETPVXELGEDN

SEQ ID NO: 49570 - protein, 41 aa, Artificial Sequence; identical to SEQ ID NO: 12182
  GFR-binding peptide
  MOD_RES (1)..(35)..(36): Xaa is C or S
  MOD_RES (13)..(14)..(15)..(16)..(17): Xaa is A or G
  MOD_RES (18)..(19)..(20)..(21): Xaa is A or G or is absent

SEQ ID NO: 49571 - protein, 40 aa, Artificial Sequence
  GFR-binding peptide
  MOD_RES (1)..(3)..(40): Xaa is C or S
  MOD_RES (16)..(17)..(18)..(19)..(20): Xaa is A or G
  MOD_RES (21)..(22)..(23)..(24): Xaa is A or G or is absent
XAXELHEELRNSLQEXXXXXXXXXYYLVTLPEHHVRSPQX

SEQ ID NO: 49572 - protein, 37 aa, Artificial Sequence; identical to SEQ ID NO: 17481
  GFR-binding peptide
  MOD_RES (1)..(1): Xaa is C or S
  MOD_RES (14)..(15)..(16)..(17)..(18): Xaa is A or G
  MOD_RES (19)..(20)..(21)..(22): Xaa is A or G or is absent

SEQ ID NO: 49573 - protein, 40 aa, Artificial Sequence
  GFR-binding peptide
  MOD_RES (2)..(36): Xaa is C or S
  MOD_RES (14)..(15)..(16)..(17)..(18): Xaa is A or G
  MOD_RES (19)..(20)..(21)..(22): Xaa is A or G or is absent
EXKNHQLFNSLQEXXXXXXXXXYYVMPLPEEETPVXELGE

SEQ ID NO: 49574 - protein, 33 aa, Artificial Sequence; identical to SEQ ID NO: 17482
  GFR-binding peptide
  MOD_RES (12)..(13)..(14)..(15)..(16): Xaa is A or G
  MOD_RES (17)..(18)..(19)..(20): Xaa is A or G or is absent

SEQ ID NO: 49575 - protein, 39 aa, Artificial Sequence
  GFR-binding peptide
  MOD_RES (2)..(4)..(38)..(39): Xaa is C or S
  MOD_RES (16)..(17)..(18)..(19)..(20): Xaa is A or G
  MOD_RES (21)..(22)..(23)..(24): Xaa is A or G or is absent
RXGXGEVVMEVQVEKXXXXXXXXXVKAMKVSRLETPVXX

SEQ ID NO: 49576 - protein, 36 aa, Artificial Sequence
  GFR-binding peptide
  MOD_RES (1)..(3)..(34)..(35): Xaa is C or S
XKXSRVIMVQVEKVKPKRGVVKAIKVSRLAQPVXXP

SEQ ID NO: 49577 - protein, 39 aa, Artificial Sequence; identical to SEQ ID NO: 17484
  GFR-binding peptide
  MOD_RES (1)..(35): Xaa is C or S

SEQ ID NO: 49578 - protein, 36 aa, Artificial Sequence
  GFR-binding peptide
  MOD_RES (2)..(4)..(36): Xaa is C or S
RXGXGEVVMESMEGIVVKDYEDMIQMTINSLETPVX

SEQ ID NO: 49579 - protein, 42 aa, Artificial Sequence
  GFR-binding peptide
  MOD_RES (2)..(4)..(38)..(39): Xaa is C or S
  MOD_RES (16)..(17)..(18)..(19)..(20): Xaa is A or G
  MOD_RES (21)..(22)..(23)..(24): Xaa is A or G or is absent
RXGXGEVVMDVQVEKXXXXXXXXXVKAMKVSRLETPVXXAKP

SEQ ID NO: 49580 - protein, 39 aa, Artificial Sequence; identical to SEQ ID NO: 12184
  GFR-binding peptide
  MOD_RES (33)..(34): Xaa is C or S
  MOD_RES (11)..(12)..(13)..(14)..(15): Xaa is A or G
  MOD_RES (16)..(17)..(18)..(19): Xaa is A or G or is absent

SEQ ID NO: 49581 - protein, 39 aa, Artificial Sequence; identical to SEQ ID NO: 12185
  GFR-binding peptide
  MOD_RES (2)..(4)..(36)..(37): Xaa is C or S

SEQ ID NO: 49582 - protein, 38 aa, Artificial Sequence
  GFR-binding peptide
  MOD_RES (32)..(33): Xaa is C or S
ARVVMNVQVEKIVNSSDDVKAVKVSRLQTPAXXPKPVT

SEQ ID NO: 49583 - protein, 36 aa, Artificial Sequence; identical to SEQ ID NO: 12187
  GFR-binding peptide
  MOD_RES (1)..(33)..(34): Xaa is C or S

SEQ ID NO: 49584 - protein, 39 aa, Artificial Sequence
  GFR-binding peptide
  MOD_RES (1)..(38): Xaa is C or S
  MOD_RES (14)..(15)..(16)..(17)..(18): Xaa is A or G
  MOD_RES (19)..(20)..(21)..(22): Xaa is A or G or is absent
XELHEELRNSLQEXXXXXXXXXYYVVPLPEHHVRSPQXK

SEQ ID NO: 49585 - protein, 35 aa, Artificial Sequence
  GFR-binding peptide
  MOD_RES (1)..(35): Xaa is C or S
  MOD_RES (13)..(14)..(15)..(16)..(17): Xaa is A or G
  MOD_RES (18)..(19)..(20)..(21): Xaa is A or G or is absent
XSRVVMNSMEGIXXXXXXXXXMIQVTINSLKTPAX

SEQ ID NO: 49586 - protein, 31 aa, Artificial Sequence; identical to SEQ ID NO: 12193
  GFR-binding peptide
  MOD_RES (1)..(1): Xaa is C or S

SEQ ID NO: 49587 - protein, 38 aa, Artificial Sequence; identical to SEQ ID NO: 17489
  GFR-binding peptide
  MOD_RES (1)..(3)..(37): Xaa is C or S

SEQ ID NO: 49588 - protein, 31 aa, Artificial Sequence; identical to SEQ ID NO: 12195
  GFR-binding peptide
  MOD_RES (31)..(31): Xaa is C or S

SEQ ID NO: 49589 - protein, 34 aa, Artificial Sequence
  GFR-binding peptide
  MOD_RES (32)..(32): Xaa is C or S
SRVVMNVTAKKIVNSSDDIKRVQVPRLKTPAXTP

SEQ ID NO: 49590 - protein, 35 aa, Artificial Sequence; identical to SEQ ID NO: 12198
  GFR-binding peptide
  MOD_RES (1)..(33)..(34): Xaa is C or S

SEQ ID NO: 49591 - protein, 36 aa, Artificial Sequence
  GFR-binding peptide
  MOD_RES (34)..(35): Xaa is C or S
  MOD_RES (12)..(13)..(14)..(15)..(16): Xaa is A or G
  MOD_RES (17)..(18)..(19)..(20): Xaa is A or G or is absent
ARVVMNVTAKKXXXXXXXXXIKRVQVPRLQTPAXXP

SEQ ID NO: 49592 - protein, 39 aa, Artificial Sequence; identical to SEQ ID NO: 12202
  GFR-binding peptide
  MOD_RES (1)..(3)..(35)..(36): Xaa is C or S

SEQ ID NO: 49593 - protein, 38 aa, Artificial Sequence; identical to SEQ ID NO: 17494
  GFR-binding peptide
  MOD_RES (2)..(4): Xaa is C or S

SEQ ID NO: 49594 - protein, 31 aa, Artificial Sequence
  GFR-binding peptide
  MOD_RES (31)..(31): Xaa is C or S
RVVMNVQVEKIVNSSDDVKAVKVSRLQTPAX

SEQ ID NO: 49595 - protein, 32 aa, Artificial Sequence
  GFR-binding peptide
  MOD_RES (31)..(32): Xaa is C or S
RVVMNSMEGIIVNSSDDMIQVTINSLKTPAXX

SEQ ID NO: 49596 - protein, 38 aa, Artificial Sequence
  GFR-binding peptide
  MOD_RES (37)..(37): Xaa is C or S
  MOD_RES (13)..(14)..(15)..(16)..(17): Xaa is A or G
  MOD_RES (18)..(19)..(20)..(21): Xaa is A or G or is absent
ALHDELTNSLQEXXXXXXXXXYYVVPLPELQVQTPRXQ

SEQ ID NO: 49597 - protein, 36 aa, Artificial Sequence
  GFR-binding peptide
  MOD_RES (32)..(33): Xaa is C or S
SRVVMNSMEGIIVNSSDDMIQVTINSLKTPAXXPKP

SEQ ID NO: 49598 - protein, 38 aa, Artificial Sequence
  GFR-binding peptide
  MOD_RES (2)..(4)..(37)..(38): Xaa is C or S
  MOD_RES (15)..(16)..(17)..(18)..(19): Xaa is A or G
  MOD_RES (20)..(21)..(22)..(23): Xaa is A or G or is absent
SXKXSKVVMVTAKKXXXXXXXXXIKRIQVPRLDQPVXX

SEQ ID NO: 49599 - protein, 32 aa, Artificial Sequence
  GFR-binding peptide
  MOD_RES (11)..(12)..(13)..(14)..(15): Xaa is A or G
  MOD_RES (16)..(17)..(18)..(19): Xaa is A or G or is absent
EVVMDSMEGIXXXXXXXXXMIQMTINSLETPV

SEQ ID NO: 49600 - protein, 40 aa, Artificial Sequence; identical to SEQ ID NO: 12207
  GFR-binding peptide
  MOD_RES (34)..(35): Xaa is C or S
  MOD_RES (12)..(13)..(14)..(15)..(16): Xaa is A or G
  MOD_RES (17)..(18)..(19)..(20): Xaa is A or G or is absent

SEQ ID NO: 49601 - protein, 34 aa, Artificial Sequence
  GFR-binding peptide
LHDELTNSLQEFIPKKRVIEYYVVPLPELQVQTP

SEQ ID NO: 49602 - protein, 37 aa, Artificial Sequence
  GFR-binding peptide
  MOD_RES (2)..(4)..(36)..(37): Xaa is C or S
RXGXGEVVMDVTAKKVVKENEDIKRMQVPRLETPVXX

SEQ ID NO: 49603 - protein, 38 aa, Artificial Sequence; identical to SEQ ID NO: 12208
  GFR-binding peptide
  MOD_RES (1)..(3)..(37): Xaa is C or S
  MOD_RES (15)..(16)..(17)..(18)..(19): Xaa is A or G
  MOD_RES (20)..(21)..(22)..(23): Xaa is A or G or is absent

SEQ ID NO: 49604 - protein, 33 aa, Artificial Sequence
  GFR-binding peptide
  MOD_RES (31)..(32): Xaa is C or S
SKVIMSMEGIIKPTKGIMIQITINSLDQSVXXP

SEQ ID NO: 49605 - protein, 34 aa, Artificial Sequence
  GFR-binding peptide
  MOD_RES (1)..(33)..(34): Xaa is C or S
XGEVVMDVTAKKVVKENEDIKRMQVPRLETPVXX

SEQ ID NO: 49606 - protein, 39 aa, Artificial Sequence
  GFR-binding peptide
  MOD_RES (2)..(4)..(38)..(39): Xaa is C or S
  MOD_RES (16)..(17)..(18)..(19)..(20): Xaa is A or G
  MOD_RES (21)..(22)..(23)..(24): Xaa is A or G or is absent
RXGXGEVVMDSMEGIXXXXXXXXXMIQMTINSLETPVXX

SEQ ID NO: 49607 - protein, 39 aa, Artificial Sequence
  GFR-binding peptide
  MOD_RES (1)..(35)..(36): Xaa is C or S
  MOD_RES (13)..(14)..(15)..(16)..(17): Xaa is A or G
  MOD_RES (18)..(19)..(20)..(21): Xaa is A or G or is absent
XSRVVMNVQVEKXXXXXXXXXVKAVKVSRLKTPAXXPKP

SEQ ID NO: 49608 - protein, 39 aa, Artificial Sequence
  GFR-binding peptide
  MOD_RES (2)..(33)..(34): Xaa is C or S
KXSRVIMSMEGIVKPKRGVMIQITINSLAQPVXXPAASA

SEQ ID NO: 49609 - protein, 42 aa, Artificial Sequence; identical to SEQ ID NO: 17502
  GFR-binding peptide
  MOD_RES (1)..(38): Xaa is C or S
  MOD_RES (14)..(15)..(16)..(17)..(18): Xaa is A or G
  MOD_RES (19)..(20)..(21)..(22): Xaa is A or G or is absent

SEQ ID NO: 49610 - protein, 39 aa, Artificial Sequence; identical to SEQ ID NO: 17503
  GFR-binding peptide
  MOD_RES (1)..(3): Xaa is C or S

SEQ ID NO: 49611 - protein, 35 aa, Artificial Sequence
  GFR-binding peptide
  MOD_RES (34)..(35): Xaa is C or S
  MOD_RES (12)..(13)..(14)..(15)..(16): Xaa is A or G
  MOD_RES (17)..(18)..(19)..(20): Xaa is A or G or is absent
ARVVMNVTAKKXXXXXXXXXIKRVQVPRLQTPAXX

SEQ ID NO: 49612 - protein, 39 aa, Artificial Sequence
  GFR-binding peptide
  MOD_RES (1)..(3)..(35)..(36): Xaa is C or S
XGXGEVVMDSMEGIVVKENEDMIQMTINSLETPVXXAKP

SEQ ID NO: 49613 - protein, 36 aa, Artificial Sequence; identical to SEQ ID NO: 12215
  GFR-binding peptide
  MOD_RES (1)..(32)..(33): Xaa is C or S

SEQ ID NO: 49614 - protein, 42 aa, Artificial Sequence
  GFR-binding peptide
  MOD_RES (1)..(3)..(37): Xaa is C or S
XEXKNHQLFNSLQEHQGQHPKIRYYLMTLPEEETPVXELGED

SEQ ID NO: 49615 - protein, 39 aa, Artificial Sequence
  GFR-binding peptide
  MOD_RES (2)..(36)..(37): Xaa is C or S
  MOD_RES (14)..(15)..(16)..(17)..(18): Xaa is A or G
  MOD_RES (19)..(20)..(21)..(22): Xaa is A or G or is absent
GXGEVVMEVQVEKXXXXXXXXXVKAMKVSRLETPVXXAK

SEQ ID NO: 49616 - protein, 36 aa, Artificial Sequence
  GFR-binding peptide
  MOD_RES (33)..(34): Xaa is C or S
  MOD_RES (11)..(12)..(13)..(14)..(15): Xaa is A or G
  MOD_RES (16)..(17)..(18)..(19): Xaa is A or G or is absent
RVVMNVQVEKXXXXXXXXXVKAVKVSRLKTPAXXPK

SEQ ID NO: 49617 - protein, 40 aa, Artificial Sequence; identical to SEQ ID NO: 17513
  GFR-binding peptide
  MOD_RES (1)..(35): Xaa is C or S
  MOD_RES (13)..(14)..(15)..(16)..(17): Xaa is A or G
  MOD_RES (18)..(19)..(20)..(21): Xaa is A or G or is absent

SEQ ID NO: 49618 - protein, 38 aa, Artificial Sequence
  GFR-binding peptide
  MOD_RES (2)..(4)..(36)..(37): Xaa is C or S
HXGXARVVMNVQVEKIVNSSDDVKAVKVSRLQTPAXXP

SEQ ID NO: 49619 - protein, 34 aa, Artificial Sequence
  GFR-binding peptide
  MOD_RES (33)..(34): Xaa is C or S
  MOD_RES (11)..(12)..(13)..(14)..(15): Xaa is A or G
  MOD_RES (16)..(17)..(18)..(19): Xaa is A or G or is absent
RVVMNSMEGIXXXXXXXXXMIQVTINSLKTPAXX

SEQ ID NO: 49620 - protein, 36 aa, Artificial Sequence
  GFR-binding peptide
  MOD_RES (1)..(3): Xaa is C or S
  MOD_RES (15)..(16)..(17)..(18)..(19): Xaa is A or G
  MOD_RES (20)..(21)..(22)..(23): Xaa is A or G or is absent
XGXARVVMNVQVEKXXXXXXXXXVKAVKVSRLQTPA

SEQ ID NO: 49621 - protein, 38 aa, Artificial Sequence
  GFR-binding peptide
  MOD_RES (2)..(36)..(37): Xaa is C or S
  MOD_RES (14)..(15)..(16)..(17)..(18): Xaa is A or G
  MOD_RES (19)..(20)..(21)..(22): Xaa is A or G or is absent
GXGEVVMDVQVEKXXXXXXXXXVKAMKVSRLETPVXXA

SEQ ID NO: 49622 - protein, 31 aa, Artificial Sequence
  GFR-binding peptide
  MOD_RES (1)..(1): Xaa is C or S
XSKVVMSMEGIVKPTRGVMIQITINSLDQPV

SEQ ID NO: 49623 - protein, 36 aa, Artificial Sequence; identical to SEQ ID NO: 12220
  GFR-binding peptide
  MOD_RES (32)..(33): Xaa is C or S

SEQ ID NO: 49624 - protein, 42 aa, Artificial Sequence
  GFR-binding peptide
  MOD_RES (1)..(3)..(37)..(38): Xaa is C or S
  MOD_RES (15)..(16)..(17)..(18)..(19): Xaa is A or G
  MOD_RES (20)..(21)..(22)..(23): Xaa is A or G or is absent
XGXGEVVMEVQVEKXXXXXXXXXVKAMKVSRLETPVXXAKPI

SEQ ID NO: 49625 - protein, 39 aa, Artificial Sequence; identical to SEQ ID NO: 17517
  GFR-binding peptide
  MOD_RES (2)..(4): Xaa is C or S

SEQ ID NO: 49626 - protein, 34 aa, Artificial Sequence; identical to SEQ ID NO: 12221
  GFR-binding peptide
  MOD_RES (31)..(32): Xaa is C or S

SEQ ID NO: 49627 - protein, 35 aa, Artificial Sequence
  GFR-binding peptide
  MOD_RES (1)..(3)..(35): Xaa is C or S
XGXGEVVMESMEGIVVKDYEDMIQMTINSLETPVX

SEQ ID NO: 49628 - protein, 40 aa, Artificial Sequence
  GFR-binding peptide
  MOD_RES (2)..(39): Xaa is C or S
AXELHEELRNSLQELKPKKRVYEYYVVPLPEHHVRSPQXK

SEQ ID NO: 49629 - protein, 43 aa, Artificial Sequence; identical to SEQ ID NO: 17518
  GFR-binding peptide
  MOD_RES (2)..(39): Xaa is C or S
  MOD_RES (15)..(16)..(17)..(18)..(19): Xaa is A or G
  MOD_RES (20)..(21)..(22)..(23): Xaa is A or G or is absent

SEQ ID NO: 49630 - protein, 37 aa, Artificial Sequence
  GFR-binding peptide
  MOD_RES (2)..(4)..(37): Xaa is C or S
  MOD_RES (15)..(16)..(17)..(18)..(19): Xaa is A or G
  MOD_RES (20)..(21)..(22)..(23): Xaa is A or G or is absent
SXKXSKVIMVTAKKXXXXXXXXXIKRIQVPRLDQSVX

SEQ ID NO: 49631 - protein, 41 aa, Artificial Sequence
  GFR-binding peptide
  MOD_RES (2)..(4)..(35)..(36): Xaa is C or S
SXKXSRVIMVTAKKVKPKRGVIKRIQVPRLAQPVXXPAASA

SEQ ID NO: 49632 - protein, 41 aa, Artificial Sequence
  GFR-binding peptide
  MOD_RES (1)..(35): Xaa is C or S
  MOD_RES (13)..(14)..(15)..(16)..(17): Xaa is A or G
  MOD_RES (18)..(19)..(20)..(21): Xaa is A or G or is absent
XSRVVMNVQVEKXXXXXXXXXVKAVKVSRLKTPAXTPKTVH

SEQ ID NO: 49633 - protein, 34 aa, Artificial Sequence
  GFR-binding peptide
  MOD_RES (1)..(34): Xaa is C or S
  MOD_RES (12)..(13)..(14)..(15)..(16): Xaa is A or G
  MOD_RES (17)..(18)..(19)..(20): Xaa is A or G or is absent
XSKVVMVQVEKXXXXXXXXXVKAIKVSRLDQPVX

SEQ ID NO: 49634 - protein, 33 aa, Artificial Sequence; identical to SEQ ID NO: 17521
  GFR-binding peptide
  MOD_RES (33)..(33): Xaa is C or S
  MOD_RES (11)..(12)..(13)..(14)..(15): Xaa is A or G
  MOD_RES (16)..(17)..(18)..(19): Xaa is A or G or is absent

SEQ ID NO: 49635 - protein, 33 aa, Artificial Sequence; identical to SEQ ID NO: 17523
  GFR-binding peptide
  MOD_RES (11)..(12)..(13)..(14)..(15): Xaa is A or G
  MOD_RES (16)..(17)..(18)..(19): Xaa is A or G or is absent

SEQ ID NO: 49636 - protein, 37 aa, Artificial Sequence
  GFR-binding peptide
  MOD_RES (36)..(36): Xaa is C or S
  MOD_RES (12)..(13)..(14)..(15)..(16): Xaa is A or G
  MOD_RES (17)..(18)..(19)..(20): Xaa is A or G or is absent
LHDELTNSLQEXXXXXXXXXYYVVPLPELQVQTPRXQ

SEQ ID NO: 49637 - protein, 33 aa, Artificial Sequence; identical to SEQ ID NO: 12228
  GFR-binding peptide
  MOD_RES (1)..(33): Xaa is C or S

SEQ ID NO: 49638 - protein, 43 aa, Artificial Sequence; identical to SEQ ID NO: 12229
  GFR-binding peptide
  MOD_RES (2)..(4)..(37)..(38): Xaa is C or S
  MOD_RES (15)..(16)..(17)..(18)..(19): Xaa is A or G
  MOD_RES (20)..(21)..(22)..(23): Xaa is A or G or is absent

SEQ ID NO: 49639 - protein, 36 aa, Artificial Sequence; identical to SEQ ID NO: 12230
  GFR-binding peptide
  MOD_RES (1)..(33)..(34): Xaa is C or S

SEQ ID NO: 49640 - protein, 34 aa, Artificial Sequence; identical to SEQ ID NO: 12231
  GFR-binding peptide
  MOD_RES (31)..(32): Xaa is C or S

SEQ ID NO: 49641 - protein, 36 aa, Artificial Sequence
  GFR-binding peptide
  MOD_RES (1)..(32)..(33): Xaa is C or S
XSKVIMSMEGIIKPTKGIMIQITINSLDQSVXXPSA

SEQ ID NO: 49642 - protein, 39 aa, Artificial Sequence
  GFR-binding peptide
  MOD_RES (2)..(4)..(35)..(36): Xaa is C or S
SXKXSKVVMSMEGIVKPTRGVMIQITINSLDQPVXXPSA

SEQ ID NO: 49643 - protein, 36 aa, Artificial Sequence; identical to SEQ ID NO: 12233
  GFR-binding peptide
  MOD_RES (31)..(32): Xaa is C or S

SEQ ID NO: 49644 - protein, 40 aa, Artificial Sequence
  GFR-binding peptide
  MOD_RES (1)..(34)..(35): Xaa is C or S
  MOD_RES (12)..(13)..(14)..(15)..(16): Xaa is A or G
  MOD_RES (17)..(18)..(19)..(20): Xaa is A or G or is absent
XSKVVMVTAKKXXXXXXXXXIKRIQVPRLDQPVXXPSASA

SEQ ID NO: 49645 - protein, 36 aa, Artificial Sequence
  GFR-binding peptide
  MOD_RES (2)..(34)..(35): Xaa is C or S
GXSRVVMNSMEGIIVNSSDDMIQVTINSLKTPAXXP

SEQ ID NO: 49646 - protein, 36 aa, Artificial Sequence; identical to SEQ ID NO: 12236
  GFR-binding peptide
  MOD_RES (2)..(34)..(35): Xaa is C or S

SEQ ID NO: 49647 - protein, 40 aa, Artificial Sequence; identical to SEQ ID NO: 12237
  GFR-binding peptide
  MOD_RES (1)..(35)..(36): Xaa is C or S
  MOD_RES (13)..(14)..(15)..(16)..(17): Xaa is A or G
  MOD_RES (18)..(19)..(20)..(21): Xaa is A or G or is absent

SEQ ID NO: 49648 - protein, 32 aa, Artificial Sequence
  GFR-binding peptide
  MOD_RES (32)..(32): Xaa is C or S
GEVVMDVQVEKVVKENEDVKAMKVSRLETPVX

SEQ ID NO: 49649 - protein, 40 aa, Artificial Sequence; identical to SEQ ID NO: 12238
  GFR-binding peptide
  MOD_RES (2)..(36)..(37): Xaa is C or S
  MOD_RES (14)..(15)..(16)..(17)..(18): Xaa is A or G
  MOD_RES (19)..(20)..(21)..(22): Xaa is A or G or is absent

SEQ ID NO: 49650 - protein, 38 aa, Artificial Sequence; identical to SEQ ID NO: 12239
  GFR-binding peptide
  MOD_RES (1)..(3)..(36)..(37): Xaa is C or S
  MOD_RES (14)..(15)..(16)..(17)..(18): Xaa is A or G
  MOD_RES (19)..(20)..(21)..(22): Xaa is A or G or is absent

SEQ ID NO: 49651 - protein, 40 aa, Artificial Sequence
  GFR-binding peptide
  MOD_RES (2)..(4)..(38)..(39): Xaa is C or S
  MOD_RES (16)..(17)..(18)..(19)..(20): Xaa is A or G
  MOD_RES (21)..(22)..(23)..(24): Xaa is A or G or is absent
RXGXGEVVMESMEGIXXXXXXXXXMIQMTINSLETPVXXA

SEQ ID NO: 49652 - protein, 36 aa, Artificial Sequence; identical to SEQ ID NO: 17535
  GFR-binding peptide
  MOD_RES (33)..(33): Xaa is C or S

SEQ ID NO: 49653 - protein, 39 aa, Artificial Sequence; identical to SEQ ID NO: 12242
  GFR-binding peptide
  MOD_RES (2)..(4)..(35)..(36): Xaa is C or S

SEQ ID NO: 49654 - protein, 37 aa, Artificial Sequence; identical to SEQ ID NO: 17537
  GFR-binding peptide
  MOD_RES (36)..(36): Xaa is C or S

SEQ ID NO: 49655 - protein, 41 aa, Artificial Sequence
  GFR-binding peptide
  MOD_RES (1)..(35)..(36): Xaa is C or S
  MOD_RES (13)..(14)..(15)..(16)..(17): Xaa is A or G
  MOD_RES (18)..(19)..(20)..(21): Xaa is A or G or is absent
XARVVMNVQVEKXXXXXXXXXVKAVKVSRLQTPAXXPKPVT

SEQ ID NO: 49656 - protein, 38 aa, Artificial Sequence; identical to SEQ ID NO: 12245
  GFR-binding peptide
  MOD_RES (1)..(3)..(34)..(35): Xaa is C or S

SEQ ID NO: 49657 - protein, 37 aa, Artificial Sequence; identical to SEQ ID NO: 12246
  GFR-binding peptide
  MOD_RES (1)..(3)..(36)..(37): Xaa is C or S
  MOD_RES (14)..(15)..(16)..(17)..(18): Xaa is A or G
  MOD_RES (19)..(20)..(21)..(22): Xaa is A or G or is absent

SEQ ID NO: 49658 - protein, 37 aa, Artificial Sequence
  GFR-binding peptide
  MOD_RES (35)..(35): Xaa is C or S
  MOD_RES (11)..(12)..(13)..(14)..(15): Xaa is A or G
  MOD_RES (16)..(17)..(18)..(19): Xaa is A or G or is absent
HDELTNSLQEXXXXXXXXXYYLVTLPELQVQTPRXQV

SEQ ID NO: 49659 - protein, 37 aa, Artificial Sequence; identical to SEQ ID NO: 12247
  GFR-binding peptide
  MOD_RES (2)..(34)..(35): Xaa is C or S

SEQ ID NO: 49660 - protein, 37 aa, Artificial Sequence; identical to SEQ ID NO: 12248
  GFR-binding peptide
  MOD_RES (31)..(32): Xaa is C or S

SEQ ID NO: 49661 - protein, 39 aa, Artificial Sequence; identical to SEQ ID NO: 12252
  GFR-binding peptide
  MOD_RES (1)..(3)..(35)..(36): Xaa is C or S

SEQ ID NO: 49662 - protein, 39 aa, Artificial Sequence
  GFR-binding peptide
  MOD_RES (2)..(4)..(37)..(38): Xaa is C or S
  MOD_RES (15)..(16)..(17)..(18)..(19): Xaa is A or G
  MOD_RES (20)..(21)..(22)..(23): Xaa is A or G or is absent
SXKXSKVVMVQVEKXXXXXXXXXVKAIKVSRLDQPVXXP

SEQ ID NO: 49663 - protein, 42 aa, Artificial Sequence
  GFR-binding peptide
  MOD_RES (1)..(3)..(40): Xaa is C or S
  MOD_RES (16)..(17)..(18)..(19)..(20): Xaa is A or G
  MOD_RES (21)..(22)..(23)..(24): Xaa is A or G or is absent
XAXELHEELRNSLQEXXXXXXXXXYYLVTLPEHHVRSPQXKV

SEQ ID NO: 49664 - protein, 35 aa, Artificial Sequence
  GFR-binding peptide
  MOD_RES (2)..(4)..(35): Xaa is C or S
SXKXSKVIMVTAKKIKPTKGIIKRIQVPRLDQSVX

SEQ ID NO: 49665 - protein, 37 aa, Artificial Sequence; identical to SEQ ID NO: 36432
  GFR-binding peptide
  MOD_RES (1)..(3)..(34)..(35): Xaa is C or S

SEQ ID NO: 49666 - protein, 38 aa, Artificial Sequence
  GFR-binding peptide
  MOD_RES (33)..(34): Xaa is C or S
  MOD_RES (11)..(12)..(13)..(14)..(15): Xaa is A or G
  MOD_RES (16)..(17)..(18)..(19): Xaa is A or G or is absent
SRVIMVTAKKXXXXXXXXXIKRIQVPRLAQPVXXPAAS

SEQ ID NO: 49667 - protein, 35 aa, Artificial Sequence
  GFR-binding peptide
  MOD_RES (33)..(34): Xaa is C or S
  MOD_RES (11)..(12)..(13)..(14)..(15): Xaa is A or G
  MOD_RES (16)..(17)..(18)..(19): Xaa is A or G or is absent
RVVMNVQVEKXXXXXXXXXVKAVKVSRLKTPAXXP

SEQ ID NO: 49668 - protein, 36 aa, Artificial Sequence
  GFR-binding peptide
  MOD_RES (2)..(36): Xaa is C or S
  MOD_RES (14)..(15)..(16)..(17)..(18): Xaa is A or G
  MOD_RES (19)..(20)..(21)..(22): Xaa is A or G or is absent
GXGEVVMEVTAKKXXXXXXXXXIKRMQVPRLETPVX

SEQ ID NO: 49669 - protein, 43 aa, Artificial Sequence
  GFR-binding peptide
  MOD_RES (2)..(39): Xaa is C or S
  MOD_RES (15)..(16)..(17)..(18)..(19): Xaa is A or G
  MOD_RES (20)..(21)..(22)..(23): Xaa is A or G or is absent
KXALHDELTNSLQEXXXXXXXXXYYLVTLPELQVQTPRXQVNR

SEQ ID NO: 49670 - protein, 33 aa, Artificial Sequence
  GFR-binding peptide
  MOD_RES (33)..(33): Xaa is C or S
  MOD_RES (11)..(12)..(13)..(14)..(15): Xaa is A or G
  MOD_RES (16)..(17)..(18)..(19): Xaa is A or G or is absent
EVVMDVTAKKXXXXXXXXXIKRMQVPRLETPVX

SEQ ID NO: 49671 - protein, 36 aa, Artificial Sequence
  GFR-binding peptide
  MOD_RES (1)..(3)..(36): Xaa is C or S
  MOD_RES (14)..(15)..(16)..(17)..(18): Xaa is A or G
  MOD_RES (19)..(20)..(21)..(22): Xaa is A or G or is absent
XKXSKVVMVQVEKXXXXXXXXXVKAIKVSRLDQPVX

SEQ ID NO: 49672 - protein, 42 aa, Artificial Sequence
  GFR-binding peptide
  MOD_RES (2)..(4)..(36)..(37): Xaa is C or S
HXGXSRVVMNSMEGIIVNSSDDMIQVTINSLKTPAXXPKPVY

SEQ ID NO: 49673 - protein, 36 aa, Artificial Sequence; identical to SEQ ID NO: 17545
  GFR-binding peptide
  MOD_RES (33)..(33): Xaa is C or S

SEQ ID NO: 49674 - protein, 39 aa, Artificial Sequence; identical to SEQ ID NO: 12265
  GFR-binding peptide
  MOD_RES (2)..(4)..(38)..(39): Xaa is C or S
  MOD_RES (16)..(17)..(18)..(19)..(20): Xaa is A or G
  MOD_RES (21)..(22)..(23)..(24): Xaa is A or G or is absent

SEQ ID NO: 49675 - protein, 37 aa, Artificial Sequence
  GFR-binding peptide
  MOD_RES (2)..(4)..(35)..(36): Xaa is C or S
SXKXSKVIMSMEGIIKPTKGIMIQITINSLDQSVXXP

SEQ ID NO: 49676 - protein, 34 aa, Artificial Sequence
  GFR-binding peptide
  MOD_RES (2)..(4): Xaa is C or S
SXKXSKVVMVTAKKVKPTRGVIKRIQVPRLDQPV

SEQ ID NO: 49677 - protein, 36 aa, Artificial Sequence
  GFR-binding peptide
  MOD_RES (31)..(32): Xaa is C or S
EVVMESMEGIVVKDYEDMIQMTINSLETPVXXAKPI

SEQ ID NO: 49678 - protein, 41 aa, Artificial Sequence
  GFR-binding peptide
  MOD_RES (2)..(36)..(37): Xaa is C or S
  MOD_RES (14)..(15)..(16)..(17)..(18): Xaa is A or G
  MOD_RES (19)..(20)..(21)..(22): Xaa is A or G or is absent
GXARVVMNVQVEKXXXXXXXXXVKAVKVSRLQTPAXXPKPV

SEQ ID NO: 49679 - protein, 43 aa, Artificial Sequence; identical to SEQ ID NO: 12270
  GFR-binding peptide
  MOD_RES (1)..(3)..(37)..(38): Xaa is C or S
  MOD_RES (15)..(16)..(17)..(18)..(19): Xaa is A or G
  MOD_RES (20)..(21)..(22)..(23): Xaa is A or G or is absent

SEQ ID NO: 49680 - protein, 31 aa, Artificial Sequence
  GFR-binding peptide
  MOD_RES (1)..(1): Xaa is C or S
XSKVVMVQVEKVKPTRGVVKAIKVSRLDQPV

SEQ ID NO: 49681 - protein, 39 aa, Artificial Sequence
  GFR-binding peptide
  MOD_RES (1)..(38): Xaa is C or S
XALHDELTNSLQEFIPKKRVIEYYLVTLPELQVQTPRXQ

SEQ ID NO: 49682 - protein, 34 aa, Artificial Sequence; identical to SEQ ID NO: 12271
  GFR-binding peptide
  MOD_RES (33)..(34): Xaa is C or S
  MOD_RES (11)..(12)..(13)..(14)..(15): Xaa is A or G
  MOD_RES (16)..(17)..(18)..(19): Xaa is A or G or is absent

SEQ ID NO: 49683 - protein, 35 aa, Artificial Sequence; identical to SEQ ID NO: 12273
  GFR-binding peptide
  MOD_RES (2)..(34)..(35): Xaa is C or S

SEQ ID NO: 49684 - protein, 40 aa, Artificial Sequence; identical to SEQ ID NO: 17552
  GFR-binding peptide
  MOD_RES (2)..(39): Xaa is C or S
  MOD_RES (15)..(16)..(17)..(18)..(19): Xaa is A or G
  MOD_RES (20)..(21)..(22)..(23): Xaa is A or G or is absent

SEQ ID NO: 49685 - protein, 38 aa, Artificial Sequence
  GFR-binding peptide
  MOD_RES (2)..(4)..(36): Xaa is C or S
HXGXSRVVMNVTAKKIVNSSDDIKRVQVPRLKTPAXTP

SEQ ID NO: 49686 - protein, 33 aa, Artificial Sequence; identical to SEQ ID NO: 12276
  GFR-binding peptide
  MOD_RES (32)..(32): Xaa is C or S

SEQ ID NO: 49687 - protein, 35 aa, Artificial Sequence
  GFR-binding peptide
  MOD_RES (33)..(34): Xaa is C or S
  MOD_RES (11)..(12)..(13)..(14)..(15): Xaa is A or G
  MOD_RES (16)..(17)..(18)..(19): Xaa is A or G or is absent
SKVVMSMEGIXXXXXXXXXMIQITINSLDQPVXXP

SEQ ID NO: 49688 - protein, 37 aa, Artificial Sequence; identical to SEQ ID NO: 12277
  GFR-binding peptide
  MOD_RES (1)..(3)..(36)..(37): Xaa is C or S
  MOD_RES (14)..(15)..(16)..(17)..(18): Xaa is A or G
  MOD_RES (19)..(20)..(21)..(22): Xaa is A or G or is absent

SEQ ID NO: 49689 - protein, 37 aa, Artificial Sequence; identical to SEQ ID NO: 17554
  GFR-binding peptide
  MOD_RES (34)..(34): Xaa is C or S

SEQ ID NO: 49690 - protein, 39 aa, Artificial Sequence; identical to SEQ ID NO: 12279
  GFR-binding peptide
  MOD_RES (2)..(33)..(34): Xaa is C or S

SEQ ID NO: 49691 - protein, 35 aa, Artificial Sequence
  GFR-binding peptide
  MOD_RES (33)..(33): Xaa is C or S
  MOD_RES (11)..(12)..(13)..(14)..(15): Xaa is A or G
  MOD_RES (16)..(17)..(18)..(19): Xaa is A or G or is absent
RVVMNSMEGIXXXXXXXXXMIQVTINSLKTPAXTP

SEQ ID NO: 49692 - protein, 39 aa, Artificial Sequence
  GFR-binding peptide
  MOD_RES (35)..(35): Xaa is C or S
HEELRNSLQELKPKKRVYEYYVVPLPEHHVRSPQXKVSS

SEQ ID NO: 49693 - protein, 41 aa, Artificial Sequence; identical to SEQ ID NO: 17557
  GFR-binding peptide
  MOD_RES (2)..(4)..(41): Xaa is C or S

SEQ ID NO: 49694 - protein, 39 aa, Artificial Sequence
  GFR-binding peptide
  MOD_RES (36)..(36): Xaa is C or S
LHDELTNSLQEFIPKKRVIEYYLVTLPELQVQTPRXQVN

SEQ ID NO: 49695 - protein, 41 aa, Artificial Sequence; identical to SEQ ID NO: 36463
  GFR-binding peptide
  MOD_RES (1)..(3)..(36)..(37): Xaa is C or S
  MOD_RES (14)..(15)..(16)..(17)..(18): Xaa is A or G
  MOD_RES (19)..(20)..(21)..(22): Xaa is A or G or is absent

SEQ ID NO: 49696 - protein, 33 aa, Artificial Sequence
  GFR-binding peptide
  MOD_RES (1)..(3): Xaa is C or S
XKXSKVIMVQVEKIKPTKGIVKAIKVSRLDQSV

SEQ ID NO: 49697 - protein, 37 aa, Artificial Sequence
  GFR-binding peptide
  MOD_RES (2)..(4)..(36)..(37): Xaa is C or S
HXGXSRVVMNVQVEKIVNSSDDVKAVKVSRLKTPAXX

SEQ ID NO: 49698 - protein, 39 aa, Artificial Sequence; identical to SEQ ID NO: 17564
  GFR-binding peptide
  MOD_RES (2)..(4)..(38): Xaa is C or S
  MOD_RES (16)..(17)..(18)..(19)..(20): Xaa is A or G
  MOD_RES (21)..(22)..(23)..(24): Xaa is A or G or is absent

SEQ ID NO: 49699 - protein, 39 aa, Artificial Sequence; identical to SEQ ID NO: 12286
  GFR-binding peptide
  MOD_RES (1)..(3)..(37)..(38): Xaa is C or S
  MOD_RES (15)..(16)..(17)..(18)..(19): Xaa is A or G
  MOD_RES (20)..(21)..(22)..(23): Xaa is A or G or is absent

SEQ ID NO: 49700 - protein, 37 aa, Artificial Sequence
  GFR-binding peptide
  MOD_RES (34)..(35): Xaa is C or S
  MOD_RES (12)..(13)..(14)..(15)..(16): Xaa is A or G
  MOD_RES (17)..(18)..(19)..(20): Xaa is A or G or is absent
ARVVMNSMEGIXXXXXXXXXMIQVTINSLQTPAXXPK

SEQ ID NO: 49701 - protein, 36 aa, Artificial Sequence; identical to SEQ ID NO: 12289
  GFR-binding peptide
  MOD_RES (1)..(3)..(34)..(35): Xaa is C or S

SEQ ID NO: 49702 - protein, 45 aa, Artificial Sequence; identical to SEQ ID NO: 17570
  GFR-binding peptide
  MOD_RES (2)..(4)..(41): Xaa is C or S

SEQ ID NO: 49703 - protein, 37 aa, Artificial Sequence
  GFR-binding peptide
  MOD_RES (1)..(3)..(35)..(36): Xaa is C or S
XGXSRVVMNSMEGIIVNSSDDMIQVTINSLKTPAXXP

SEQ ID NO: 49704 - protein, 34 aa, Artificial Sequence
  GFR-binding peptide
  MOD_RES (1)..(1): Xaa is C or S
  MOD_RES (13)..(14)..(15)..(16)..(17): Xaa is A or G
  MOD_RES (18)..(19)..(20)..(21): Xaa is A or G or is absent
XKNHQLFNSLQEXXXXXXXXXYYVMPLPEEETPV

SEQ ID NO: 49705 - protein, 40 aa, Artificial Sequence; identical to SEQ ID NO: 17572
  GFR-binding peptide
  MOD_RES (1)..(38): Xaa is C or S
  MOD_RES (14)..(15)..(16)..(17)..(18): Xaa is A or G
  MOD_RES (19)..(20)..(21)..(22): Xaa is A or G or is absent

SEQ ID NO: 49706 - protein, 40 aa, Artificial Sequence; identical to SEQ ID NO: 17573
  GFR-binding peptide
  MOD_RES (1)..(3)..(40): Xaa is C or S

SEQ ID NO: 49707 - protein, 35 aa, Artificial Sequence
  GFR-binding peptide
  MOD_RES (2)..(35): Xaa is C or S
  MOD_RES (13)..(14)..(15)..(16)..(17): Xaa is A or G
  MOD_RES (18)..(19)..(20)..(21): Xaa is A or G or is absent
KXSKVVMSMEGIXXXXXXXXXMIQITINSLDQPVX

SEQ ID NO: 49708 - protein, 33 aa, Artificial Sequence
  GFR-binding peptide
  MOD_RES (32)..(33): Xaa is C or S
ARVVMNSMEGIIVNSSDDMIQVTINSLQTPAXX

SEQ ID NO: 49709 - protein, 35 aa, Artificial Sequence
  GFR-binding peptide
  MOD_RES (31)..(32): Xaa is C or S
EVVMEVTAKKVVKDYEDIKRMQVPRLETPVXXAKP

SEQ ID NO: 49710 - protein, 34 aa, Artificial Sequence; identical to SEQ ID NO: 12298
  GFR-binding peptide
  MOD_RES (2)..(2): Xaa is C or S
  MOD_RES (13)..(14)..(15)..(16)..(17): Xaa is A or G
  MOD_RES (18)..(19)..(20)..(21): Xaa is A or G or is absent

SEQ ID NO: 49711 - protein, 38 aa, Artificial Sequence; identical to SEQ ID NO: 12299
  GFR-binding peptide
  MOD_RES (1)..(33)..(34): Xaa is C or S

SEQ ID NO: 49712 - protein, 38 aa, Artificial Sequence; identical to SEQ ID NO: 12300
  GFR-binding peptide
  MOD_RES (2)..(4)..(37)..(38): Xaa is C or S
  MOD_RES (15)..(16)..(17)..(18)..(19): Xaa is A or G
  MOD_RES (20)..(21)..(22)..(23): Xaa is A or G or is absent

SEQ ID NO: 49713 - protein, 45 aa, Artificial Sequence; identical to SEQ ID NO: 17577
  GFR-binding peptide
  MOD_RES (2)..(4)..(41): Xaa is C or S
  MOD_RES (17)..(18)..(19)..(20)..(21): Xaa is A or G
  MOD_RES (22)..(23)..(24)..(25): Xaa is A or G or is absent

SEQ ID NO: 49714 - protein, 44 aa, Artificial Sequence
  GFR-binding peptide
  MOD_RES (2)..(4)..(41): Xaa is C or S
  MOD_RES (17)..(18)..(19)..(20)..(21): Xaa is A or G
  MOD_RES (22)..(23)..(24)..(25): Xaa is A or G or is absent
AXAXELHEELRNSLQEXXXXXXXXXYYLVTLPEHHVRSPQXKVS

SEQ ID NO: 49715 - protein, 37 aa, Artificial Sequence
  GFR-binding peptide
  MOD_RES (32)..(33): Xaa is C or S
GEVVMEVTAKKVVKDYEDIKRMQVPRLETPVXXAKPI

SEQ ID NO: 49716 - protein, 35 aa, Artificial Sequence; identical to SEQ ID NO: 12302
  GFR-binding peptide
  MOD_RES (1)..(32)..(33): Xaa is C or S

SEQ ID NO: 49717 - protein, 32 aa, Artificial Sequence; identical to SEQ ID NO: 12304
  GFR-binding peptide
  MOD_RES (1)..(32): Xaa is C or S

SEQ ID NO: 49718 - protein, 39 aa, Artificial Sequence
  GFR-binding peptide
  MOD_RES (33)..(34): Xaa is C or S
  MOD_RES (11)..(12)..(13)..(14)..(15): Xaa is A or G
  MOD_RES (16)..(17)..(18)..(19): Xaa is A or G or is absent
SKVVMSMEGIXXXXXXXXXMIQITINSLDQPVXXPSASA

SEQ ID NO: 49719 - protein, 42 aa, Artificial Sequence
  GFR-binding peptide
  MOD_RES (2)..(4)..(37)..(38): Xaa is C or S
  MOD_RES (15)..(16)..(17)..(18)..(19): Xaa is A or G
  MOD_RES (20)..(21)..(22)..(23): Xaa is A or G or is absent
SXKXSKVVMVQVEKXXXXXXXXXVKAIKVSRLDQPVXXPSAS

SEQ ID NO: 49720 - protein, 36 aa, Artificial Sequence; identical to SEQ ID NO: 12305
  GFR-binding peptide
  MOD_RES (1)..(3)..(34)..(35): Xaa is C or S

SEQ ID NO: 49721 - protein, 38 aa, Artificial Sequence; identical to SEQ ID NO: 17585
  GFR-binding peptide
  MOD_RES (35)..(35): Xaa is C or S

SEQ ID NO: 49722 - protein, 31 aa, Artificial Sequence; identical to SEQ ID NO: 12307
  GFR-binding peptide
  MOD_RES (1)..(1): Xaa is C or S

SEQ ID NO: 49723 - protein, 31 aa, Artificial Sequence
  GFR-binding peptide
GEVVMDVQVEKVVKENEDVKAMKVSRLETPV

SEQ ID NO: 49724 - protein, 40 aa, Artificial Sequence; identical to SEQ ID NO: 17589
  GFR-binding peptide
  MOD_RES (2)..(4)..(38): Xaa is C or S

SEQ ID NO: 49725 - protein, 40 aa, Artificial Sequence; identical to SEQ ID NO: 12309
  GFR-binding peptide
  MOD_RES (2)..(4)..(36)..(37): Xaa is C or S

SEQ ID NO: 49726 - protein, 39 aa, Artificial Sequence
  GFR-binding peptide
  MOD_RES (2)..(4)..(36)..(37): Xaa is C or S
HXGXARVVMNVQVEKIVNSSDDVKAVKVSRLQTPAXXPK

SEQ ID NO: 49727 - protein, 38 aa, Artificial Sequence
  GFR-binding peptide
  MOD_RES (1)..(3): Xaa is C or S
  MOD_RES (16)..(17)..(18)..(19)..(20): Xaa is A or G
  MOD_RES (21)..(22)..(23)..(24): Xaa is A or G or is absent
XAXELHEELRNSLQEXXXXXXXXXYYLVTLPEHHVRSP

SEQ ID NO: 49728 - protein, 41 aa, Artificial Sequence; identical to SEQ ID NO: 12310
  GFR-binding peptide
  MOD_RES (2)..(4)..(36)..(37): Xaa is C or S

SEQ ID NO: 49729 - protein, 35 aa, Artificial Sequence
  GFR-binding peptide
  MOD_RES (33)..(33): Xaa is C or S
  MOD_RES (11)..(12)..(13)..(14)..(15): Xaa is A or G
  MOD_RES (16)..(17)..(18)..(19): Xaa is A or G or is absent
NHQLFNSLQEXXXXXXXXXYYVMPLPEEETPVXEL

SEQ ID NO: 49730 - protein, 36 aa, Artificial Sequence; identical to SEQ ID NO: 17593
  GFR-binding peptide
  MOD_RES (1)..(1): Xaa is C or S

SEQ ID NO: 49731 - protein, 37 aa, Artificial Sequence
  GFR-binding peptide
  MOD_RES (34)..(35): Xaa is C or S
  MOD_RES (12)..(13)..(14)..(15)..(16): Xaa is A or G
  MOD_RES (17)..(18)..(19)..(20): Xaa is A or G or is absent
GEVVMDVTAKKXXXXXXXXXIKRMQVPRLETPVXXAK

SEQ ID NO: 49732 - protein, 42 aa, Artificial Sequence
  GFR-binding peptide
  MOD_RES (2)..(4)..(37)..(38): Xaa is C or S
  MOD_RES (15)..(16)..(17)..(18)..(19): Xaa is A or G
  MOD_RES (20)..(21)..(22)..(23): Xaa is A or G or is absent
SXKXSKVIMSMEGIXXXXXXXXXMIQITINSLDQSVXXPSAS

SEQ ID NO: 49733 - protein, 40 aa, Artificial Sequence; identical to SEQ ID NO: 17594
  GFR-binding peptide
  MOD_RES (2)..(36): Xaa is C or S
  MOD_RES (14)..(15)..(16)..(17)..(18): Xaa is A or G
  MOD_RES (19)..(20)..(21)..(22): Xaa is A or G or is absent

SEQ ID NO: 49734 - protein, 39 aa, Artificial Sequence; identical to SEQ ID NO: 17595
  GFR-binding peptide
  MOD_RES (2)..(4): Xaa is C or S

SEQ ID NO: 49735 - protein, 35 aa, Artificial Sequence
  GFR-binding peptide
  MOD_RES (34)..(35): Xaa is C or S
  MOD_RES (12)..(13)..(14)..(15)..(16): Xaa is A or G
  MOD_RES (17)..(18)..(19)..(20): Xaa is A or G or is absent
GEVVMDVQVEKXXXXXXXXXVKAMKVSRLETPVXX

SEQ ID NO: 49736 - protein, 41 aa, Artificial Sequence
  GFR-binding peptide
  MOD_RES (1)..(3)..(37): Xaa is C or S
XEXKNHQLFNSLQEHQGQHPKIRYYVMPLPEEETPVXELGE

SEQ ID NO: 49737 - protein, 36 aa, Artificial Sequence
  GFR-binding peptide
  MOD_RES (1)..(3)..(34)..(35): Xaa is C or S
XKXSKVIMSMEGIIKPTKGIMIQITINSLDQSVXXP

SEQ ID NO: 49738 - protein, 35 aa, Artificial Sequence; identical to SEQ ID NO: 17596
  GFR-binding peptide
  MOD_RES (1)..(1): Xaa is C or S

SEQ ID NO: 49739 - protein, 37 aa, Artificial Sequence; identical to SEQ ID NO: 12318
  GFR-binding peptide
  MOD_RES (2)..(36)..(37): Xaa is C or S
  MOD_RES (14)..(15)..(16)..(17)..(18): Xaa is A or G
  MOD_RES (19)..(20)..(21)..(22): Xaa is A or G or is absent

SEQ ID NO: 49740 - protein, 42 aa, Artificial Sequence; identical to SEQ ID NO: 17598
  GFR-binding peptide
  MOD_RES (2)..(4)..(38): Xaa is C or S

SEQ ID NO: 49741 - protein, 41 aa, Artificial Sequence
  GFR-binding peptide
  MOD_RES (1)..(38): Xaa is C or S
  MOD_RES (14)..(15)..(16)..(17)..(18): Xaa is A or G
  MOD_RES (19)..(20)..(21)..(22): Xaa is A or G or is absent
XALHDELTNSLQEXXXXXXXXXYYLVTLPELQVQTPRXQVN

SEQ ID NO: 49742 - protein, 33 aa, Artificial Sequence
  GFR-binding peptide
  MOD_RES (31)..(32): Xaa is C or S
SRVIMSMEGIVKPKRGVMIQITINSLAQPVXXP

SEQ ID NO: 49743 - protein, 41 aa, Artificial Sequence
  GFR-binding peptide
  MOD_RES (1)..(35): Xaa is C or S
XKNHQLFNSLQEHQGQHPKIRYYLMTLPEEETPVXELGEDN

SEQ ID NO: 49744 - protein, 35 aa, Artificial Sequence
  GFR-binding peptide
  MOD_RES (1)..(3)..(35): Xaa is C or S
XGXARVVMNSMEGIIVNSSDDMIQVTINSLQTPAX

SEQ ID NO: 49745 - protein, 35 aa, Artificial Sequence; identical to SEQ ID NO: 12320
  GFR-binding peptide
  MOD_RES (1)..(32)..(33): Xaa is C or S

SEQ ID NO: 49746 - protein, 40 aa, Artificial Sequence; identical to SEQ ID NO: 12321
  GFR-binding peptide
  MOD_RES (2)..(4)..(36)..(37): Xaa is C or S

SEQ ID NO: 49747 - protein, 33 aa, Artificial Sequence
  GFR-binding peptide
  MOD_RES (1)..(1): Xaa is C or S
  MOD_RES (12)..(13)..(14)..(15)..(16): Xaa is A or G
  MOD_RES (17)..(18)..(19)..(20): Xaa is A or G or is absent
XSKVIMVQVEKXXXXXXXXXVKAIKVSRLDQSV

SEQ ID NO: 49748 - protein, 41 aa, Artificial Sequence
  GFR-binding peptide
  MOD_RES (1)..(3)..(36)..(37): Xaa is C or S
  MOD_RES (14)..(15)..(16)..(17)..(18): Xaa is A or G
  MOD_RES (19)..(20)..(21)..(22): Xaa is A or G or is absent
XKXSKVVMSMEGIXXXXXXXXXMIQITINSLDQPVXXPSAS

SEQ ID NO: 49749 - protein, 36 aa, Artificial Sequence; identical to SEQ ID NO: 17602
  GFR-binding peptide
  MOD_RES (2)..(2): Xaa is C or S

SEQ ID NO: 49750 - protein, 39 aa, Artificial Sequence
  GFR-binding peptide
  MOD_RES (34)..(34): Xaa is C or S
  MOD_RES (12)..(13)..(14)..(15)..(16): Xaa is A or G
  MOD_RES (17)..(18)..(19)..(20): Xaa is A or G or is absent
SRVVMNVQVEKXXXXXXXXXVKAVKVSRLKTPAXTPKTV

SEQ ID NO: 49751 - protein, 39 aa, Artificial Sequence; identical to SEQ ID NO: 17604
  GFR-binding peptide
  MOD_RES (2)..(39): Xaa is C or S
  MOD_RES (15)..(16)..(17)..(18)..(19): Xaa is A or G
  MOD_RES (20)..(21)..(22)..(23): Xaa is A or G or is absent

SEQ ID NO: 49752 - protein, 40 aa, Artificial Sequence; identical to SEQ ID NO: 12325
  GFR-binding peptide
  MOD_RES (1)..(34)..(35): Xaa is C or S
  MOD_RES (12)..(13)..(14)..(15)..(16): Xaa is A or G
  MOD_RES (17)..(18)..(19)..(20): Xaa is A or G or is absent

SEQ ID NO: 49753 - protein, 32 aa, Artificial Sequence
  GFR-binding peptide
  MOD_RES (31)..(32): Xaa is C or S
RVVMNVTAKKIVNSSDDIKRVQVPRLKTPAXX

SEQ ID NO: 49754 - protein, 37 aa, Artificial Sequence; identical to SEQ ID NO: 12329
  GFR-binding peptide
  MOD_RES (1)..(35)..(36): Xaa is C or S
  MOD_RES (13)..(14)..(15)..(16)..(17): Xaa is A or G
  MOD_RES (18)..(19)..(20)..(21): Xaa is A or G or is absent

SEQ ID NO: 49755 - protein, 31 aa, Artificial Sequence
  GFR-binding peptide
GEVVMEVQVEKVVKDYEDVKAMKVSRLETPV

SEQ ID NO: 49756 - protein, 37 aa, Artificial Sequence; identical to SEQ ID NO: 12332
  GFR-binding peptide
  MOD_RES (34)..(34): Xaa is C or S
  MOD_RES (12)..(13)..(14)..(15)..(16): Xaa is A or G
  MOD_RES (17)..(18)..(19)..(20): Xaa is A or G or is absent

SEQ ID NO: 49757 - protein, 42 aa, Artificial Sequence
  GFR-binding peptide
  MOD_RES (1)..(3)..(37)..(38): Xaa is C or S
  MOD_RES (15)..(16)..(17)..(18)..(19): Xaa is A or G
  MOD_RES (20)..(21)..(22)..(23): Xaa is A or G or is absent
XGXGEVVMEVTAKKXXXXXXXXXIKRMQVPRLETPVXXAKPI

SEQ ID NO: 49758 - protein, 33 aa, Artificial Sequence
  GFR-binding peptide
KNHQLFNSLQEHQGQHPKIRYYVMPLPEEETPV

SEQ ID NO: 49759 - protein, 32 aa, Artificial Sequence; identical to SEQ ID NO: 17608
  GFR-binding peptide

SEQ ID NO: 49760 - protein, 36 aa, Artificial Sequence; identical to SEQ ID NO: 12335
  GFR-binding peptide
  MOD_RES (31)..(32): Xaa is C or S

SEQ ID NO: 49761 - protein, 37 aa, Artificial Sequence
  GFR-binding peptide
  MOD_RES (2)..(4)..(37): Xaa is C or S
  MOD_RES (15)..(16)..(17)..(18)..(19): Xaa is A or G
  MOD_RES (20)..(21)..(22)..(23): Xaa is A or G or is absent
SXKXSRVIMVQVEKXXXXXXXXXVKAIKVSRLAQPVX

SEQ ID NO: 49762 - protein, 35 aa, Artificial Sequence; identical to SEQ ID NO: 12336
  GFR-binding peptide
  MOD_RES (2)..(34)..(35): Xaa is C or S

SEQ ID NO: 49763 - protein, 39 aa, Artificial Sequence
  GFR-binding peptide
  MOD_RES (1)..(35)..(36): Xaa is C or S
  MOD_RES (13)..(14)..(15)..(16)..(17): Xaa is A or G
  MOD_RES (18)..(19)..(20)..(21): Xaa is A or G or is absent
XGEVVMEVTAKKXXXXXXXXXIKRMQVPRLETPVXXAKP

SEQ ID NO: 49764 - protein, 37 aa, Artificial Sequence
  GFR-binding peptide
  MOD_RES (31)..(32): Xaa is C or S
SKVVMSMEGIVKPTRGVMIQITINSLDQPVXXPSASA

SEQ ID NO: 49765 - protein, 34 aa, Artificial Sequence
  GFR-binding peptide
  MOD_RES (1)..(1): Xaa is C or S
XKNHQLFNSLQEHQGQHPKIRYYVMPLPEEETPV

SEQ ID NO: 49766 - protein, 35 aa, Artificial Sequence
  GFR-binding peptide
LHDELTNSLQEFIPKKRVIEYYLVTLPELQVQTPR

SEQ ID NO: 49767 - protein, 34 aa, Artificial Sequence
  GFR-binding peptide
  MOD_RES (34)..(34): Xaa is C or S
  MOD_RES (12)..(13)..(14)..(15)..(16): Xaa is A or G
  MOD_RES (17)..(18)..(19)..(20): Xaa is A or G or is absent
GEVVMEVTAKKXXXXXXXXXIKRMQVPRLETPVX

SEQ ID NO: 49768 - protein, 38 aa, Artificial Sequence
  GFR-binding peptide
  MOD_RES (34)..(35): Xaa is C or S
  MOD_RES (12)..(13)..(14)..(15)..(16): Xaa is A or G
  MOD_RES (17)..(18)..(19)..(20): Xaa is A or G or is absent
GEVVMDVQVEKXXXXXXXXXVKAMKVSRLETPVXXAKP

SEQ ID NO: 49769 - protein, 34 aa, Artificial Sequence; identical to SEQ ID NO: 12346
  GFR-binding peptide
  MOD_RES (34)..(34): Xaa is C or S
  MOD_RES (12)..(13)..(14)..(15)..(16): Xaa is A or G
  MOD_RES (17)..(18)..(19)..(20): Xaa is A or G or is absent

SEQ ID NO: 49770 - protein, 40 aa, Artificial Sequence
  GFR-binding peptide
  MOD_RES (1)..(3)..(37): Xaa is C or S
XEXKNHQLFNSLQEHQGQHPKIRYYVMPLPEEETPVXELG

SEQ ID NO: 49771 - protein, 32 aa, Artificial Sequence; identical to SEQ ID NO: 12347
  GFR-binding peptide
  MOD_RES (31)..(32): Xaa is C or S

SEQ ID NO: 49772 - protein, 38 aa, Artificial Sequence
  GFR-binding peptide
  MOD_RES (2)..(4)..(37)..(38): Xaa is C or S
  MOD_RES (15)..(16)..(17)..(18)..(19): Xaa is A or G
  MOD_RES (20)..(21)..(22)..(23): Xaa is A or G or is absent
SXKXSKVVMVQVEKXXXXXXXXXVKAIKVSRLDQPVXX

SEQ ID NO: 49773 - protein, 32 aa, Artificial Sequence; identical to SEQ ID NO: 12348
  GFR-binding peptide
  MOD_RES (2)..(2): Xaa is C or S

SEQ ID NO: 49774 - protein, 38 aa, Artificial Sequence; identical to SEQ ID NO: 17623
  GFR-binding peptide
  MOD_RES (2)..(4): Xaa is C or S

SEQ ID NO: 49775 - protein, 36 aa, Artificial Sequence
  GFR-binding peptide
  MOD_RES (34)..(35): Xaa is C or S
  MOD_RES (12)..(13)..(14)..(15)..(16): Xaa is A or G
  MOD_RES (17)..(18)..(19)..(20): Xaa is A or G or is absent
GEVVMDSMEGIXXXXXXXXXMIQMTINSLETPVXXA

SEQ ID NO: 49776 - protein, 32 aa, Artificial Sequence
  GFR-binding peptide
  MOD_RES (2)..(2): Xaa is C or S
KXSRVIMVQVEKVKPKRGVVKAIKVSRLAQPV

SEQ ID NO: 49777 - protein, 41 aa, Artificial Sequence
  GFR-binding peptide
  MOD_RES (2)..(35)..(36): Xaa is C or S
  MOD_RES (13)..(14)..(15)..(16)..(17): Xaa is A or G
  MOD_RES (18)..(19)..(20)..(21): Xaa is A or G or is absent
KXSKVVMSMEGIXXXXXXXXXMIQITINSLDQPVXXPSASA

SEQ ID NO: 49778 - protein, 36 aa, Artificial Sequence
  GFR-binding peptide
  MOD_RES (2)..(35)..(36): Xaa is C or S
  MOD_RES (13)..(14)..(15)..(16)..(17): Xaa is A or G
  MOD_RES (18)..(19)..(20)..(21): Xaa is A or G or is absent
KXSKVIMSMEGIXXXXXXXXXMIQITINSLDQSVXX

SEQ ID NO: 49779 - protein, 39 aa, Artificial Sequence; identical to SEQ ID NO: 12351
  GFR-binding peptide
  MOD_RES (1)..(33)..(34): Xaa is C or S

SEQ ID NO: 49780 - protein, 41 aa, Artificial Sequence
  GFR-binding peptide
  MOD_RES (2)..(4)..(38): Xaa is C or S
  MOD_RES (16)..(17)..(18)..(19)..(20): Xaa is A or G
  MOD_RES (21)..(22)..(23)..(24): Xaa is A or G or is absent
HXGXSRVVMNVTAKKXXXXXXXXXIKRVQVPRLKTPAXTPK

SEQ ID NO: 49781 - protein, 43 aa, Artificial Sequence; identical to SEQ ID NO: 17627
  GFR-binding peptide
  MOD_RES (2)..(39): Xaa is C or S
  MOD_RES (15)..(16)..(17)..(18)..(19): Xaa is A or G
  MOD_RES (20)..(21)..(22)..(23): Xaa is A or G or is absent

SEQ ID NO: 49782 - protein, 38 aa, Artificial Sequence; identical to SEQ ID NO: 12361
  GFR-binding peptide
  MOD_RES (1)..(35)..(36): Xaa is C or S
  MOD_RES (13)..(14)..(15)..(16)..(17): Xaa is A or G
  MOD_RES (18)..(19)..(20)..(21): Xaa is A or G or is absent

SEQ ID NO: 49783 - protein, 37 aa, Artificial Sequence
  GFR-binding peptide
  MOD_RES (36)..(36): Xaa is C or S
LHEELRNSLQELKPKKRVYEYYVVPLPEHHVRSPQXK

SEQ ID NO: 49784 - protein, 37 aa, Artificial Sequence
  GFR-binding peptide
  MOD_RES (31)..(32): Xaa is C or S
SRVIMVTAKKVKPKRGVIKRIQVPRLAQPVXXPAASA

SEQ ID NO: 49785 - protein, 40 aa, Artificial Sequence
  GFR-binding peptide
  MOD_RES (2)..(34)..(35): Xaa is C or S
GXARVVMNSMEGIIVNSSDDMIQVTINSLQTPAXXPKPVT

SEQ ID NO: 49786 - protein, 36 aa, Artificial Sequence; identical to SEQ ID NO: 12363
  GFR-binding peptide
  MOD_RES (2)..(35)..(36): Xaa is C or S
  MOD_RES (13)..(14)..(15)..(16)..(17): Xaa is A or G
  MOD_RES (18)..(19)..(20)..(21): Xaa is A or G or is absent

SEQ ID NO: 49787 - protein, 41 aa, Artificial Sequence; identical to SEQ ID NO: 17635
  GFR-binding peptide
  MOD_RES (2)..(4)..(41): Xaa is C or S
  MOD_RES (17)..(18)..(19)..(20)..(21): Xaa is A or G
  MOD_RES (22)..(23)..(24)..(25): Xaa is A or G or is absent

SEQ ID NO: 49788 - protein, 36 aa, Artificial Sequence
  GFR-binding peptide
  MOD_RES (31)..(32): Xaa is C or S
SKVVMVTAKKVKPTRGVIKRIQVPRLDQPVXXPSAS

SEQ ID NO: 49789 - protein, 44 aa, Artificial Sequence; identical to SEQ ID NO: 12364
  GFR-binding peptide
  MOD_RES (2)..(4)..(38)..(39): Xaa is C or S
  MOD_RES (16)..(17)..(18)..(19)..(20): Xaa is A or G
  MOD_RES (21)..(22)..(23)..(24): Xaa is A or G or is absent

SEQ ID NO: 49790 - protein, 36 aa, Artificial Sequence; identical to SEQ ID NO: 12365
  GFR-binding peptide
  MOD_RES (1)..(35)..(36): Xaa is C or S
  MOD_RES (13)..(14)..(15)..(16)..(17): Xaa is A or G
  MOD_RES (18)..(19)..(20)..(21): Xaa is A or G or is absent

SEQ ID NO: 49791 - protein, 43 aa, Artificial Sequence; identical to SEQ ID NO: 17638
  GFR-binding peptide
  MOD_RES (2)..(4)..(38): Xaa is C or S

SEQ ID NO: 49792 - protein, 36 aa, Artificial Sequence; identical to SEQ ID NO: 17639
  GFR-binding peptide
  MOD_RES (34)..(34): Xaa is C or S

SEQ ID NO: 49793 - protein, 34 aa, Artificial Sequence
  GFR-binding peptide
  MOD_RES (1)..(32)..(33): Xaa is C or S
XSRVIMVTAKKVKPKRGVIKRIQVPRLAQPVXXP

SEQ ID NO: 49794 - protein, 34 aa, Artificial Sequence
  GFR-binding peptide
  MOD_RES (1)..(3)..(34): Xaa is C or S
XKXSKVVMVQVEKVKPTRGVVKAIKVSRLDQPVX

SEQ ID NO: 49795 - protein, 37 aa, Artificial Sequence
  GFR-binding peptide
  MOD_RES (2)..(34)..(35): Xaa is C or S
GXGEVVMESMEGIVVKDYEDMIQMTINSLETPVXXAK

SEQ ID NO: 49796 - protein, 45 aa, Artificial Sequence; identical to SEQ ID NO: 17644
  GFR-binding peptide
  MOD_RES (2)..(4)..(41): Xaa is C or S
  MOD_RES (17)..(18)..(19)..(20)..(21): Xaa is A or G
  MOD_RES (22)..(23)..(24)..(25): Xaa is A or G or is absent

SEQ ID NO: 49797 - protein, 33 aa, Artificial Sequence
  GFR-binding peptide
  MOD_RES (33)..(33): Xaa is C or S
  MOD_RES (11)..(12)..(13)..(14)..(15): Xaa is A or G
  MOD_RES (16)..(17)..(18)..(19): Xaa is A or G or is absent
EVVMDVQVEKXXXXXXXXXVKAMKVSRLETPVX

SEQ ID NO: 49798 - protein, 38 aa, Artificial Sequence; identical to SEQ ID NO: 17647
  GFR-binding peptide
  MOD_RES (37)..(37): Xaa is C or S

SEQ ID NO: 49799 - protein, 39 aa, Artificial Sequence
  GFR-binding peptide
  MOD_RES (1)..(33): Xaa is C or S
XSRVVMNSMEGIIVNSSDDMIQVTINSLKTPAXTPKTVH

SEQ ID NO: 49800 - protein, 32 aa, Artificial Sequence; identical to SEQ ID NO: 17653
  GFR-binding peptide
  MOD_RES (11)..(12)..(13)..(14)..(15): Xaa is A or G
  MOD_RES (16)..(17)..(18)..(19): Xaa is A or G or is absent

SEQ ID NO: 49801 - protein, 37 aa, Artificial Sequence
  GFR-binding peptide
  MOD_RES (2)..(2): Xaa is C or S
  MOD_RES (15)..(16)..(17)..(18)..(19): Xaa is A or G
  MOD_RES (20)..(21)..(22)..(23): Xaa is A or G or is absent
KXALHDELTNSLQEXXXXXXXXXYYVVPLPELQVQTP

SEQ ID NO: 49802 - protein, 31 aa, Artificial Sequence
  GFR-binding peptide
SRVVMNVQVEKIVNSSDDVKAVKVSRLKTPA

SEQ ID NO: 49803 - protein, 40 aa, Artificial Sequence
  GFR-binding peptide
  MOD_RES (2)..(4): Xaa is C or S
  MOD_RES (17)..(18)..(19)..(20)..(21): Xaa is A or G
  MOD_RES (22)..(23)..(24)..(25): Xaa is A or G or is absent
EXKXALHDELTNSLQEXXXXXXXXXYYLVTLPELQVQTPR

SEQ ID NO: 49804 - protein, 38 aa, Artificial Sequence
  GFR-binding peptide
  MOD_RES (34)..(34): Xaa is C or S
  MOD_RES (12)..(13)..(14)..(15)..(16): Xaa is A or G
  MOD_RES (17)..(18)..(19)..(20): Xaa is A or G or is absent
KNHQLFNSLQEXXXXXXXXXYYLMTLPEEETPVXELGE

SEQ ID NO: 49805 - protein, 35 aa, Artificial Sequence; identical to SEQ ID NO: 36601
  GFR-binding peptide
  MOD_RES (2)..(35): Xaa is C or S
  MOD_RES (13)..(14)..(15)..(16)..(17): Xaa is A or G
  MOD_RES (18)..(19)..(20)..(21): Xaa is A or G or is absent

SEQ ID NO: 49806 - protein, 38 aa, Artificial Sequence
  GFR-binding peptide
  MOD_RES (2)..(33)..(34): Xaa is C or S
KXSKVVMVTAKKVKPTRGVIKRIQVPRLDQPVXXPSAS

SEQ ID NO: 49807 - protein, 37 aa, Artificial Sequence; identical to SEQ ID NO: 12373
  GFR-binding peptide
  MOD_RES (2)..(36)..(37): Xaa is C or S
  MOD_RES (14)..(15)..(16)..(17)..(18): Xaa is A or G
  MOD_RES (19)..(20)..(21)..(22): Xaa is A or G or is absent

SEQ ID NO: 49808 - protein, 35 aa, Artificial Sequence; identical to SEQ ID NO: 12374
  GFR-binding peptide
  MOD_RES (33)..(34): Xaa is C or S
  MOD_RES (11)..(12)..(13)..(14)..(15): Xaa is A or G
  MOD_RES (16)..(17)..(18)..(19): Xaa is A or G or is absent

SEQ ID NO: 49809 - protein, 39 aa, Artificial Sequence
  GFR-binding peptide
  MOD_RES (2)..(39): Xaa is C or S
KXALHDELTNSLQEFIPKKRVIEYYVVPLPELQVQTPRX

SEQ ID NO: 49810 - protein, 44 aa, Artificial Sequence
  GFR-binding peptide
  MOD_RES (2)..(4)..(38)..(39): Xaa is C or S
  MOD_RES (16)..(17)..(18)..(19)..(20): Xaa is A or G
  MOD_RES (21)..(22)..(23)..(24): Xaa is A or G or is absent
HXGXSRVVMNVQVEKXXXXXXXXXVKAVKVSRLKTPAXXPKPVY

SEQ ID NO: 49811 - protein, 38 aa, Artificial Sequence
  GFR-binding peptide
  MOD_RES (2)..(33)..(34): Xaa is C or S
KXSKVIMVTAKKIKPTKGIIKRIQVPRLDQSVXXPSAS

SEQ ID NO: 49812 - protein, 34 aa, Artificial Sequence
  GFR-binding peptide
  MOD_RES (2)..(2): Xaa is C or S
  MOD_RES (13)..(14)..(15)..(16)..(17): Xaa is A or G
  MOD_RES (18)..(19)..(20)..(21): Xaa is A or G or is absent
KXSKVVMSMEGIXXXXXXXXXMIQITINSLDQPV

SEQ ID NO: 49813 - protein, 35 aa, Artificial Sequence; identical to SEQ ID NO: 17662
  GFR-binding peptide
  MOD_RES (35)..(35): Xaa is C or S
  MOD_RES (11)..(12)..(13)..(14)..(15): Xaa is A or G
  MOD_RES (16)..(17)..(18)..(19): Xaa is A or G or is absent

SEQ ID NO: 49814 - protein, 38 aa, Artificial Sequence
  GFR-binding peptide
  MOD_RES (2)..(4): Xaa is C or S
  MOD_RES (17)..(18)..(19)..(20)..(21): Xaa is A or G
  MOD_RES (22)..(23)..(24)..(25): Xaa is A or G or is absent
AXAXELHEELRNSLQEXXXXXXXXXYYLVTLPEHHVRS

SEQ ID NO: 49815 - protein, 34 aa, Artificial Sequence; identical to SEQ ID NO: 12380
  GFR-binding peptide
  MOD_RES (32)..(33): Xaa is C or S

SEQ ID NO: 49816 - protein, 40 aa, Artificial Sequence; identical to SEQ ID NO: 12381
  GFR-binding peptide
  MOD_RES (1)..(3)..(36)..(37): Xaa is C or S
  MOD_RES (14)..(15)..(16)..(17)..(18): Xaa is A or G
  MOD_RES (19)..(20)..(21)..(22): Xaa is A or G or is absent

SEQ ID NO: 49817 - protein, 39 aa, Artificial Sequence
  GFR-binding peptide
  MOD_RES (1)..(3)..(34)..(35): Xaa is C or S
XKXSRVIMSMEGIVKPKRGVMIQITINSLAQPVXXPAAS

SEQ ID NO: 49818 - protein, 37 aa, Artificial Sequence; identical to SEQ ID NO: 12385
  GFR-binding peptide
  MOD_RES (1)..(35)..(36): Xaa is C or S
  MOD_RES (13)..(14)..(15)..(16)..(17): Xaa is A or G
  MOD_RES (18)..(19)..(20)..(21): Xaa is A or G or is absent

SEQ ID NO: 49819 - protein, 39 aa, Artificial Sequence
  GFR-binding peptide
  MOD_RES (34)..(35): Xaa is C or S
  MOD_RES (12)..(13)..(14)..(15)..(16): Xaa is A or G
  MOD_RES (17)..(18)..(19)..(20): Xaa is A or G or is absent
ARVVMNSMEGIXXXXXXXXXMIQVTINSLQTPAXXPKPV

SEQ ID NO: 49820 - protein, 39 aa, Artificial Sequence
  GFR-binding peptide
  MOD_RES (37)..(37): Xaa is C or S
  MOD_RES (13)..(14)..(15)..(16)..(17): Xaa is A or G
  MOD_RES (18)..(19)..(20)..(21): Xaa is A or G or is absent
ELHEELRNSLQEXXXXXXXXXYYLVTLPEHHVRSPQXKV

SEQ ID NO: 49821 - protein, 30 aa, Artificial Sequence; identical to SEQ ID NO: 12388
  GFR-binding peptide

SEQ ID NO: 49822 - protein, 31 aa, Artificial Sequence; identical to SEQ ID NO: 12389
  GFR-binding peptide
  MOD_RES (1)..(1): Xaa is C or S

SEQ ID NO: 49823 - protein, 33 aa, Artificial Sequence; identical to SEQ ID NO: 17669
  GFR-binding peptide

SEQ ID NO: 49824 - protein, 34 aa, Artificial Sequence
  GFR-binding peptide
ELHEELRNSLQELKPKKRVYEYYVVPLPEHHVRS

SEQ ID NO: 49825 - protein, 35 aa, Artificial Sequence; identical to SEQ ID NO: 12394
  GFR-binding peptide
  MOD_RES (2)..(34)..(35): Xaa is C or S

SEQ ID NO: 49826 - protein, 39 aa, Artificial Sequence; identical to SEQ ID NO: 17673
  GFR-binding peptide
  MOD_RES (34)..(34): Xaa is C or S

SEQ ID NO: 49827 - protein, 38 aa, Artificial Sequence
  GFR-binding peptide
  MOD_RES (1)..(33)..(34): Xaa is C or S
XSRVVMNSMEGIIVNSSDDMIQVTINSLKTPAXXPKPV

SEQ ID NO: 49828 - protein, 39 aa, Artificial Sequence; identical to SEQ ID NO: 12396
  GFR-binding peptide
  MOD_RES (1)..(33): Xaa is C or S

SEQ ID NO: 49829 - protein, 39 aa, Artificial Sequence
  GFR-binding peptide
  MOD_RES (2)..(34)..(35): Xaa is C or S
GXGEVVMEVQVEKVVKDYEDVKAMKVSRLETPVXXAKPI

SEQ ID NO: 49830 - protein, 36 aa, Artificial Sequence
  GFR-binding peptide
  MOD_RES (31)..(32): Xaa is C or S
SRVIMVTAKKVKPKRGVIKRIQVPRLAQPVXXPAAS

SEQ ID NO: 49831 - protein, 38 aa, Artificial Sequence
  GFR-binding peptide
  MOD_RES (2)..(34)..(35): Xaa is C or S
GXGEVVMESMEGIVVKDYEDMIQMTINSLETPVXXAKP

SEQ ID NO: 49832 - protein, 37 aa, Artificial Sequence
  GFR-binding peptide
  MOD_RES (1)..(32)..(33): Xaa is C or S
XSRVIMVTAKKVKPKRGVIKRIQVPRLAQPVXXPAAS

SEQ ID NO: 49833 - protein, 32 aa, Artificial Sequence; identical to SEQ ID NO: 12402
  GFR-binding peptide
  MOD_RES (1)..(1): Xaa is C or S

SEQ ID NO: 49834 - protein, 40 aa, Artificial Sequence; identical to SEQ ID NO: 17680
  GFR-binding peptide
  MOD_RES (2)..(39): Xaa is C or S
  MOD_RES (15)..(16)..(17)..(18)..(19): Xaa is A or G
  MOD_RES (20)..(21)..(22)..(23): Xaa is A or G or is absent

SEQ ID NO: 49835 - protein, 36 aa, Artificial Sequence
  GFR-binding peptide
  MOD_RES (2)..(34)..(35): Xaa is C or S
GXGEVVMDSMEGIVVKENEDMIQMTINSLETPVXXA

SEQ ID NO: 49836 - protein, 38 aa, Artificial Sequence; identical to SEQ ID NO: 12405
  GFR-binding peptide
  MOD_RES (1)..(34)..(35): Xaa is C or S
  MOD_RES (12)..(13)..(14)..(15)..(16): Xaa is A or G
  MOD_RES (17)..(18)..(19)..(20): Xaa is A or G or is absent

SEQ ID NO: 49837 - protein, 35 aa, Artificial Sequence
  GFR-binding peptide
  MOD_RES (33)..(33): Xaa is C or S
NHQLFNSLQEHQGQHPKIRYYLMTLPEEETPVXEL

SEQ ID NO: 49838 - protein, 41 aa, Artificial Sequence; identical to SEQ ID NO: 12407
  GFR-binding peptide
  MOD_RES (2)..(36): Xaa is C or S
  MOD_RES (14)..(15)..(16)..(17)..(18): Xaa is A or G
  MOD_RES (19)..(20)..(21)..(22): Xaa is A or G or is absent

SEQ ID NO: 49839 - protein, 33 aa, Artificial Sequence; identical to SEQ ID NO: 12408
  GFR-binding peptide
  MOD_RES (1)..(1): Xaa is C or S
  MOD_RES (12)..(13)..(14)..(15)..(16): Xaa is A or G
  MOD_RES (17)..(18)..(19)..(20): Xaa is A or G or is absent

SEQ ID NO: 49840 - protein, 39 aa, Artificial Sequence
  GFR-binding peptide
  MOD_RES (1)..(33)..(34): Xaa is C or S
XGEVVMDVTAKKVVKENEDIKRMQVPRLETPVXXAKPIK

SEQ ID NO: 49841 - protein, 35 aa, Artificial Sequence; identical to SEQ ID NO: 17686
  GFR-binding peptide
  MOD_RES (13)..(14)..(15)..(16)..(17): Xaa is A or G
  MOD_RES (18)..(19)..(20)..(21): Xaa is A or G or is absent

SEQ ID NO: 49842 - protein, 39 aa, Artificial Sequence
  GFR-binding peptide
  MOD_RES (2)..(4)..(38): Xaa is C or S
  MOD_RES (16)..(17)..(18)..(19)..(20): Xaa is A or G
  MOD_RES (21)..(22)..(23)..(24): Xaa is A or G or is absent
HXGXSRVVMNSMEGIXXXXXXXXXMIQVTINSLKTPAXT

SEQ ID NO: 49843 - protein, 35 aa, Artificial Sequence
  GFR-binding peptide
  MOD_RES (2)..(4): Xaa is C or S
RXGXGEVVMEVQVEKVVKDYEDVKAMKVSRLETPV

SEQ ID NO: 49844 - protein, 36 aa, Artificial Sequence; identical to SEQ ID NO: 12411
  GFR-binding peptide
  MOD_RES (34)..(35): Xaa is C or S
  MOD_RES (12)..(13)..(14)..(15)..(16): Xaa is A or G
  MOD_RES (17)..(18)..(19)..(20): Xaa is A or G or is absent

SEQ ID NO: 49845 - protein, 35 aa, Artificial Sequence
  GFR-binding peptide
  MOD_RES (35)..(35): Xaa is C or S
  MOD_RES (11)..(12)..(13)..(14)..(15): Xaa is A or G
  MOD_RES (16)..(17)..(18)..(19): Xaa is A or G or is absent
HDELTNSLQEXXXXXXXXXYYVVPLPELQVQTPRX

SEQ ID NO: 49846 - protein, 38 aa, Artificial Sequence
  GFR-binding peptide
  MOD_RES (32)..(33): Xaa is C or S
SRVVMNSMEGIIVNSSDDMIQVTINSLKTPAXXPKPVY

SEQ ID NO: 49847 - protein, 38 aa, Artificial Sequence
  GFR-binding peptide
  MOD_RES (1)..(3)..(35): Xaa is C or S
XGXSRVVMNVTAKKIVNSSDDIKRVQVPRLKTPAXTPK

SEQ ID NO: 49848 - protein, 33 aa, Artificial Sequence
  GFR-binding peptide
  MOD_RES (2)..(2): Xaa is C or S
GXGEVVMEVQVEKVVKDYEDVKAMKVSRLETPV

SEQ ID NO: 49849 - protein, 39 aa, Artificial Sequence; identical to SEQ ID NO: 17689
  GFR-binding peptide
  MOD_RES (2)..(4): Xaa is C or S

SEQ ID NO: 49850 - protein, 37 aa, Artificial Sequence; identical to SEQ ID NO: 12413
  GFR-binding peptide
  MOD_RES (1)..(3)..(35)..(36): Xaa is C or S

SEQ ID NO: 49851 - protein, 34 aa, Artificial Sequence; identical to SEQ ID NO: 12414
  GFR-binding peptide
  MOD_RES (1)..(34): Xaa is C or S
  MOD_RES (12)..(13)..(14)..(15)..(16): Xaa is A or G
  MOD_RES (17)..(18)..(19)..(20): Xaa is A or G or is absent

SEQ ID NO: 49852 - protein, 34 aa, Artificial Sequence; identical to SEQ ID NO: 12415
  GFR-binding peptide
  MOD_RES (33)..(34): Xaa is C or S
  MOD_RES (11)..(12)..(13)..(14)..(15): Xaa is A or G
  MOD_RES (16)..(17)..(18)..(19): Xaa is A or G or is absent

SEQ ID NO: 49853 - protein, 38 aa, Artificial Sequence; identical to SEQ ID NO: 17691
  GFR-binding peptide
  MOD_RES (2)..(4): Xaa is C or S

SEQ ID NO: 49854 - protein, 41 aa, Artificial Sequence
  GFR-binding peptide
  MOD_RES (37)..(37): Xaa is C or S
  MOD_RES (13)..(14)..(15)..(16)..(17): Xaa is A or G
  MOD_RES (18)..(19)..(20)..(21): Xaa is A or G or is absent
ELHEELRNSLQEXXXXXXXXXYYVVPLPEHHVRSPQXKVSS

SEQ ID NO: 49855 - protein, 38 aa, Artificial Sequence
  GFR-binding peptide
  MOD_RES (1)..(35): Xaa is C or S
  MOD_RES (13)..(14)..(15)..(16)..(17): Xaa is A or G
  MOD_RES (18)..(19)..(20)..(21): Xaa is A or G or is absent
XSRVVMNVTAKKXXXXXXXXXIKRVQVPRLKTPAXTPK

SEQ ID NO: 49856 - protein, 37 aa, Artificial Sequence; identical to SEQ ID NO: 12422
  GFR-binding peptide
  MOD_RES (34)..(35): Xaa is C or S
  MOD_RES (12)..(13)..(14)..(15)..(16): Xaa is A or G
  MOD_RES (17)..(18)..(19)..(20): Xaa is A or G or is absent

SEQ ID NO: 49857 - protein, 37 aa, Artificial Sequence
  GFR-binding peptide
  MOD_RES (2)..(4)..(36)..(37): Xaa is C or S
HXGXSRVVMNSMEGIIVNSSDDMIQVTINSLKTPAXX

SEQ ID NO: 49858 - protein, 35 aa, Artificial Sequence
  GFR-binding peptide
  MOD_RES (1)..(3)..(35): Xaa is C or S
XGXSRVVMNVTAKKIVNSSDDIKRVQVPRLKTPAX

SEQ ID NO: 49859 - protein, 44 aa, Artificial Sequence
  GFR-binding peptide
  MOD_RES (2)..(4)..(38)..(39): Xaa is C or S
  MOD_RES (16)..(17)..(18)..(19)..(20): Xaa is A or G
  MOD_RES (21)..(22)..(23)..(24): Xaa is A or G or is absent
HXGXSRVVMNSMEGIXXXXXXXXXMIQVTINSLKTPAXXPKPVY

SEQ ID NO: 49860 - protein, 36 aa, Artificial Sequence; identical to SEQ ID NO: 12428
  GFR-binding peptide
  MOD_RES (1)..(34)..(35): Xaa is C or S
  MOD_RES (12)..(13)..(14)..(15)..(16): Xaa is A or G
  MOD_RES (17)..(18)..(19)..(20): Xaa is A or G or is absent

SEQ ID NO: 49861 - protein, 41 aa, Artificial Sequence; identical to SEQ ID NO: 12429
  GFR-binding peptide
  MOD_RES (2)..(36)..(37): Xaa is C or S
  MOD_RES (14)..(15)..(16)..(17)..(18): Xaa is A or G
  MOD_RES (19)..(20)..(21)..(22): Xaa is A or G or is absent

SEQ ID NO: 49862 - protein, 33 aa, Artificial Sequence; identical to SEQ ID NO: 17695
  GFR-binding peptide
  MOD_RES (33)..(33): Xaa is C or S

SEQ ID NO: 49863 - protein, 42 aa, Artificial Sequence
  GFR-binding peptide
  MOD_RES (2)..(4)..(38)..(39): Xaa is C or S
  MOD_RES (16)..(17)..(18)..(19)..(20): Xaa is A or G
  MOD_RES (21)..(22)..(23)..(24): Xaa is A or G or is absent
RXGXGEVVMEVQVEKXXXXXXXXXVKAMKVSRLETPVXXAKP

SEQ ID NO: 49864 - protein, 37 aa, Artificial Sequence
  GFR-binding peptide
  MOD_RES (2)..(33)..(34): Xaa is C or S
KXSKVIMVQVEKIKPTKGIVKAIKVSRLDQSVXXPSA

SEQ ID NO: 49865 - protein, 36 aa, Artificial Sequence
  GFR-binding peptide
  MOD_RES (2)..(35)..(36): Xaa is C or S
  MOD_RES (13)..(14)..(15)..(16)..(17): Xaa is A or G
  MOD_RES (18)..(19)..(20)..(21): Xaa is A or G or is absent
KXSKVVMSMEGIXXXXXXXXXMIQITINSLDQPVXX

SEQ ID NO: 49866 - protein, 38 aa, Artificial Sequence; identical to SEQ ID NO: 12432
  GFR-binding peptide
  MOD_RES (1)..(3)..(35)..(36): Xaa is C or S

SEQ ID NO: 49867 - protein, 36 aa, Artificial Sequence
  GFR-binding peptide
  MOD_RES (2)..(4): Xaa is C or S
  MOD_RES (15)..(16)..(17)..(18)..(19): Xaa is A or G
  MOD_RES (20)..(21)..(22)..(23): Xaa is A or G or is absent
SXKXSKVVMVQVEKXXXXXXXXXVKAIKVSRLDQPV

SEQ ID NO: 49868 - protein, 38 aa, Artificial Sequence
  GFR-binding peptide
  MOD_RES (32)..(32): Xaa is C or S
SRVVMNSMEGIIVNSSDDMIQVTINSLKTPAXTPKTVH

SEQ ID NO: 49869 - protein, 32 aa, Artificial Sequence; identical to SEQ ID NO: 12437
  GFR-binding peptide
  MOD_RES (32)..(32): Xaa is C or S

SEQ ID NO: 49870 - protein, 42 aa, Artificial Sequence
  GFR-binding peptide
  MOD_RES (2)..(4)..(41): Xaa is C or S
EXKXALHDELTNSLQEFIPKKRVIEYYLVTLPELQVQTPRXQ

SEQ ID NO: 49871 - protein, 41 aa, Artificial Sequence; identical to SEQ ID NO: 12439
  GFR-binding peptide
  MOD_RES (2)..(4)..(38)..(39): Xaa is C or S
  MOD_RES (16)..(17)..(18)..(19)..(20): Xaa is A or G
  MOD_RES (21)..(22)..(23)..(24): Xaa is A or G or is absent

SEQ ID NO: 49872 - protein, 41 aa, Artificial Sequence; identical to SEQ ID NO: 17700
  GFR-binding peptide
  MOD_RES (1)..(35): Xaa is C or S

SEQ ID NO: 49873 - protein, 36 aa, Artificial Sequence; identical to SEQ ID NO: 12440
  GFR-binding peptide
  MOD_RES (1)..(34)..(35): Xaa is C or S
  MOD_RES (12)..(13)..(14)..(15)..(16): Xaa is A or G
  MOD_RES (17)..(18)..(19)..(20): Xaa is A or G or is absent

SEQ ID NO: 49874 - protein, 41 aa, Artificial Sequence; identical to SEQ ID NO: 17701
  GFR-binding peptide
  MOD_RES (1)..(35): Xaa is C or S
  MOD_RES (13)..(14)..(15)..(16)..(17): Xaa is A or G
  MOD_RES (18)..(19)..(20)..(21): Xaa is A or G or is absent

SEQ ID NO: 49875 - protein, 39 aa, Artificial Sequence
  GFR-binding peptide
  MOD_RES (1)..(34)..(35): Xaa is C or S
  MOD_RES (12)..(13)..(14)..(15)..(16): Xaa is A or G
  MOD_RES (17)..(18)..(19)..(20): Xaa is A or G or is absent
XSKVVMSMEGIXXXXXXXXXMIQITINSLDQPVXXPSAS

SEQ ID NO: 49876 - protein, 34 aa, Artificial Sequence; identical to SEQ ID NO: 12442
  GFR-binding peptide
  MOD_RES (1)..(1): Xaa is C or S
  MOD_RES (13)..(14)..(15)..(16)..(17): Xaa is A or G
  MOD_RES (18)..(19)..(20)..(21): Xaa is A or G or is absent

SEQ ID NO: 49877 - protein, 35 aa, Artificial Sequence
  GFR-binding peptide
  MOD_RES (2)..(33)..(34): Xaa is C or S
KXSRVIMSMEGIVKPKRGVMIQITINSLAQPVXXP

SEQ ID NO: 49878 - protein, 40 aa, Artificial Sequence
  GFR-binding peptide
  MOD_RES (2)..(35)..(36): Xaa is C or S
  MOD_RES (13)..(14)..(15)..(16)..(17): Xaa is A or G
  MOD_RES (18)..(19)..(20)..(21): Xaa is A or G or is absent
KXSKVIMVQVEKXXXXXXXXXVKAIKVSRLDQSVXXPSAS

SEQ ID NO: 49879 - protein, 42 aa, Artificial Sequence
  GFR-binding peptide
  MOD_RES (1)..(3)..(37): Xaa is C or S
XEXKNHQLFNSLQEHQGQHPKIRYYVMPLPEEETPVXELGED

SEQ ID NO: 49880 - protein, 45 aa, Artificial Sequence
  GFR-binding peptide
  MOD_RES (2)..(4)..(41): Xaa is C or S
EXKXALHDELTNSLQEFIPKKRVIEYYLVTLPELQVQTPRXQVNR

SEQ ID NO: 49881 - protein, 33 aa, Artificial Sequence; identical to SEQ ID NO: 12445
  GFR-binding peptide
  MOD_RES (31)..(32): Xaa is C or S

SEQ ID NO: 49882 - protein, 37 aa, Artificial Sequence; identical to SEQ ID NO: 12447
  GFR-binding peptide
  MOD_RES (1)..(35)..(36): Xaa is C or S
  MOD_RES (13)..(14)..(15)..(16)..(17): Xaa is A or G
  MOD_RES (18)..(19)..(20)..(21): Xaa is A or G or is absent

SEQ ID NO: 49883 - protein, 31 aa, Artificial Sequence
  GFR-binding peptide
  MOD_RES (31)..(31): Xaa is C or S
RVVMNVTAKKIVNSSDDIKRVQVPRLQTPAX

SEQ ID NO: 49884 - protein, 32 aa, Artificial Sequence
  GFR-binding peptide
  MOD_RES (31)..(32): Xaa is C or S
SRVIMSMEGIVKPKRGVMIQITINSLAQPVXX

SEQ ID NO: 49885 - protein, 37 aa, Artificial Sequence; identical to SEQ ID NO: 12450
  GFR-binding peptide
  MOD_RES (1)..(3)..(35)..(36): Xaa is C or S

SEQ ID NO: 49886 - protein, 39 aa, Artificial Sequence; identical to SEQ ID NO: 17708
  GFR-binding peptide
  MOD_RES (1)..(3)..(37): Xaa is C or S
  MOD_RES (15)..(16)..(17)..(18)..(19): Xaa is A or G
  MOD_RES (20)..(21)..(22)..(23): Xaa is A or G or is absent

SEQ ID NO: 49887 - protein, 40 aa, Artificial Sequence
  GFR-binding peptide
  MOD_RES (1)..(38): Xaa is C or S
  MOD_RES (14)..(15)..(16)..(17)..(18): Xaa is A or G
  MOD_RES (19)..(20)..(21)..(22): Xaa is A or G or is absent
XELHEELRNSLQEXXXXXXXXXYYLVTLPEHHVRSPQXKV

SEQ ID NO: 49888 - protein, 35 aa, Artificial Sequence
  GFR-binding peptide
  MOD_RES (2)..(4): Xaa is C or S
HXGXARVVMNVTAKKIVNSSDDIKRVQVPRLQTPA

SEQ ID NO: 49889 - protein, 38 aa, Artificial Sequence; identical to SEQ ID NO: 17709
  GFR-binding peptide
  MOD_RES (2)..(2): Xaa is C or S

SEQ ID NO: 49890 - protein, 38 aa, Artificial Sequence
  GFR-binding peptide
  MOD_RES (34)..(35): Xaa is C or S
  MOD_RES (12)..(13)..(14)..(15)..(16): Xaa is A or G
  MOD_RES (17)..(18)..(19)..(20): Xaa is A or G or is absent
ARVVMNVTAKKXXXXXXXXXIKRVQVPRLQTPAXXPKP

SEQ ID NO: 49891 - protein, 37 aa, Artificial Sequence; identical to SEQ ID NO: 17711
  GFR-binding peptide
  MOD_RES (36)..(36): Xaa is C or S
  MOD_RES (12)..(13)..(14)..(15)..(16): Xaa is A or G
  MOD_RES (17)..(18)..(19)..(20): Xaa is A or G or is absent

SEQ ID NO: 49892 - protein, 37 aa, Artificial Sequence; identical to SEQ ID NO: 12452
  GFR-binding peptide
  MOD_RES (2)..(35)..(36): Xaa is C or S
  MOD_RES (13)..(14)..(15)..(16)..(17): Xaa is A or G
  MOD_RES (18)..(19)..(20)..(21): Xaa is A or G or is absent

SEQ ID NO: 49893 - protein, 35 aa, Artificial Sequence
  GFR-binding peptide
  MOD_RES (31)..(32): Xaa is C or S
SKVVMVQVEKVKPTRGVVKAIKVSRLDQPVXXPSA

SEQ ID NO: 49894 - protein, 35 aa, Artificial Sequence
  GFR-binding peptide
ELHEELRNSLQELKPKKRVYEYYVVPLPEHHVRSP

SEQ ID NO: 49895 - protein, 33 aa, Artificial Sequence
  GFR-binding peptide
  MOD_RES (12)..(13)..(14)..(15)..(16): Xaa is A or G
  MOD_RES (17)..(18)..(19)..(20): Xaa is A or G or is absent
GEVVMDVQVEKXXXXXXXXXVKAMKVSRLETPV

SEQ ID NO: 49896 - protein, 38 aa, Artificial Sequence
  GFR-binding peptide
  MOD_RES (34)..(35): Xaa is C or S
  MOD_RES (12)..(13)..(14)..(15)..(16): Xaa is A or G
  MOD_RES (17)..(18)..(19)..(20): Xaa is A or G or is absent
GEVVMDSMEGIXXXXXXXXXMIQMTINSLETPVXXAKP

SEQ ID NO: 49897 - protein, 38 aa, Artificial Sequence
  GFR-binding peptide
  MOD_RES (33)..(34): Xaa is C or S
  MOD_RES (11)..(12)..(13)..(14)..(15): Xaa is A or G
  MOD_RES (16)..(17)..(18)..(19): Xaa is A or G or is absent
SKVVMVQVEKXXXXXXXXXVKAIKVSRLDQPVXXPSAS

SEQ ID NO: 49898 - protein, 38 aa, Artificial Sequence; identical to SEQ ID NO: 12454
  GFR-binding peptide
  MOD_RES (2)..(4)..(36)..(37): Xaa is C or S

SEQ ID NO: 49899 - protein, 44 aa, Artificial Sequence
  GFR-binding peptide
  MOD_RES (2)..(4)..(38)..(39): Xaa is C or S
  MOD_RES (16)..(17)..(18)..(19)..(20): Xaa is A or G
  MOD_RES (21)..(22)..(23)..(24): Xaa is A or G or is absent
HXGXARVVMNVQVEKXXXXXXXXXVKAVKVSRLQTPAXXPKPVT

SEQ ID NO: 49900 - protein, 41 aa, Artificial Sequence
  GFR-binding peptide
  MOD_RES (2)..(4)..(35)..(36): Xaa is C or S
SXKXSKVVMVTAKKVKPTRGVIKRIQVPRLDQPVXXPSASA

SEQ ID NO: 49901 - protein, 35 aa, Artificial Sequence; identical to SEQ ID NO: 12455
  GFR-binding peptide
  MOD_RES (2)..(2): Xaa is C or S
  MOD_RES (14)..(15)..(16)..(17)..(18): Xaa is A or G
  MOD_RES (19)..(20)..(21)..(22): Xaa is A or G or is absent

SEQ ID NO: 49902 - protein, 34 aa, Artificial Sequence; identical to SEQ ID NO: 17721
  GFR-binding peptide
  MOD_RES (11)..(12)..(13)..(14)..(15): Xaa is A or G
  MOD_RES (16)..(17)..(18)..(19): Xaa is A or G or is absent

SEQ ID NO: 49903 - protein, 40 aa, Artificial Sequence; identical to SEQ ID NO: 12459
  GFR-binding peptide
  MOD_RES (2)..(4)..(38)..(39): Xaa is C or S
  MOD_RES (16)..(17)..(18)..(19)..(20): Xaa is A or G
  MOD_RES (21)..(22)..(23)..(24): Xaa is A or G or is absent

SEQ ID NO: 49904 - protein, 38 aa, Artificial Sequence
  GFR-binding peptide
  MOD_RES (32)..(33): Xaa is C or S
GEVVMESMEGIVVKDYEDMIQMTINSLETPVXXAKPIS

SEQ ID NO: 49905 - protein, 40 aa, Artificial Sequence
  GFR-binding peptide
  MOD_RES (1)..(35)..(36): Xaa is C or S
  MOD_RES (13)..(14)..(15)..(16)..(17): Xaa is A or G
  MOD_RES (18)..(19)..(20)..(21): Xaa is A or G or is absent
XARVVMNVTAKKXXXXXXXXXIKRVQVPRLQTPAXXPKPV

SEQ ID NO: 49906 - protein, 35 aa, Artificial Sequence
  GFR-binding peptide
  MOD_RES (1)..(33)..(34): Xaa is C or S
XGEVVMEVQVEKVVKDYEDVKAMKVSRLETPVXXA

SEQ ID NO: 49907 - protein, 41 aa, Artificial Sequence
  GFR-binding peptide
  MOD_RES (1)..(3)..(35): Xaa is C or S
XGXSRVVMNVQVEKIVNSSDDVKAVKVSRLKTPAXTPKTVH

SEQ ID NO: 49908 - protein, 38 aa, Artificial Sequence; identical to SEQ ID NO: 17725
  GFR-binding peptide
  MOD_RES (35)..(35): Xaa is C or S

SEQ ID NO: 49909 - protein, 38 aa, Artificial Sequence; identical to SEQ ID NO: 12463
  GFR-binding peptide
  MOD_RES (2)..(34): Xaa is C or S

SEQ ID NO: 49910 - protein, 31 aa, Artificial Sequence
  GFR-binding peptide
  MOD_RES (31)..(31): Xaa is C or S
SKVIMSMEGIIKPTKGIMIQITINSLDQSVX

SEQ ID NO: 49911 - protein, 34 aa, Artificial Sequence
  GFR-binding peptide
  MOD_RES (34)..(34): Xaa is C or S
  MOD_RES (12)..(13)..(14)..(15)..(16): Xaa is A or G
  MOD_RES (17)..(18)..(19)..(20): Xaa is A or G or is absent
ARVVMNVQVEKXXXXXXXXXVKAVKVSRLQTPAX

SEQ ID NO: 49912 - protein, 39 aa, Artificial Sequence
  GFR-binding peptide
  MOD_RES (2)..(33)..(34): Xaa is C or S
KXSRVIMVQVEKVKPKRGVVKAIKVSRLAQPVXXPAASA

SEQ ID NO: 49913 - protein, 36 aa, Artificial Sequence
  GFR-binding peptide
  MOD_RES (2)..(4)..(35)..(36): Xaa is C or S
SXKXSKVIMVQVEKIKPTKGIVKAIKVSRLDQSVXX

SEQ ID NO: 49914 - protein, 40 aa, Artificial Sequence
  GFR-binding peptide
  MOD_RES (1)..(3)..(35)..(36): Xaa is C or S
XGXSRVVMNVQVEKIVNSSDDVKAVKVSRLKTPAXXPKPV

SEQ ID NO: 49915 - protein, 34 aa, Artificial Sequence
  GFR-binding peptide
  MOD_RES (2)..(34): Xaa is C or S
GXSRVVMNVQVEKIVNSSDDVKAVKVSRLKTPAX

SEQ ID NO: 49916 - protein, 35 aa, Artificial Sequence; identical to SEQ ID NO: 17729
  GFR-binding peptide
  MOD_RES (35)..(35): Xaa is C or S

SEQ ID NO: 49917 - protein, 37 aa, Artificial Sequence
  GFR-binding peptide
  MOD_RES (2)..(4)..(35)..(36): Xaa is C or S
SXKXSRVIMVQVEKVKPKRGVVKAIKVSRLAQPVXXP

SEQ ID NO: 49918 - protein, 40 aa, Artificial Sequence
  GFR-binding peptide
  MOD_RES (1)..(3)..(36)..(37): Xaa is C or S
  MOD_RES (14)..(15)..(16)..(17)..(18): Xaa is A or G
  MOD_RES (19)..(20)..(21)..(22): Xaa is A or G or is absent
XKXSKVVMVQVEKXXXXXXXXXVKAIKVSRLDQPVXXPSA

SEQ ID NO: 49919 - protein, 38 aa, Artificial Sequence; identical to SEQ ID NO: 12470
  GFR-binding peptide
  MOD_RES (2)..(34)..(35): Xaa is C or S

SEQ ID NO: 49920 - protein, 35 aa, Artificial Sequence; identical to SEQ ID NO: 36770
  GFR-binding peptide
  MOD_RES (1)..(34)..(35): Xaa is C or S
  MOD_RES (12)..(13)..(14)..(15)..(16): Xaa is A or G
  MOD_RES (17)..(18)..(19)..(20): Xaa is A or G or is absent

SEQ ID NO: 49921 - protein, 36 aa, Artificial Sequence
  GFR-binding peptide
  MOD_RES (31)..(32): Xaa is C or S
SKVIMSMEGIIKPTKGIMIQITINSLDQSVXXPSAS

SEQ ID NO: 49922 - protein, 38 aa, Artificial Sequence; identical to SEQ ID NO: 12471
  GFR-binding peptide
  MOD_RES (2)..(36): Xaa is C or S
  MOD_RES (14)..(15)..(16)..(17)..(18): Xaa is A or G
  MOD_RES (19)..(20)..(21)..(22): Xaa is A or G or is absent

SEQ ID NO: 49923 - protein, 35 aa, Artificial Sequence; identical to SEQ ID NO: 12472
  GFR-binding peptide
  MOD_RES (1)..(33): Xaa is C or S

SEQ ID NO: 49924 - protein, 37 aa, Artificial Sequence
  GFR-binding peptide
  MOD_RES (31)..(32): Xaa is C or S
EVVMEVQVEKVVKDYEDVKAMKVSRLETPVXXAKPIS

SEQ ID NO: 49925 - protein, 33 aa, Artificial Sequence
  GFR-binding peptide
  MOD_RES (12)..(13)..(14)..(15)..(16): Xaa is A or G
  MOD_RES (17)..(18)..(19)..(20): Xaa is A or G or is absent
ARVVMNVTAKKXXXXXXXXXIKRVQVPRLQTPA

SEQ ID NO: 49926 - protein, 35 aa, Artificial Sequence
  GFR-binding peptide
  MOD_RES (33)..(34): Xaa is C or S
  MOD_RES (11)..(12)..(13)..(14)..(15): Xaa is A or G
  MOD_RES (16)..(17)..(18)..(19): Xaa is A or G or is absent
SKVIMVQVEKXXXXXXXXXVKAIKVSRLDQSVXXP

SEQ ID NO: 49927 - protein, 32 aa, Artificial Sequence; identical to SEQ ID NO: 12475
  GFR-binding peptide
  MOD_RES (11)..(12)..(13)..(14)..(15): Xaa is A or G
  MOD_RES (16)..(17)..(18)..(19): Xaa is A or G or is absent

SEQ ID NO: 49928 - protein, 35 aa, Artificial Sequence
  GFR-binding peptide
  MOD_RES (1)..(3)..(35): Xaa is C or S
XGXGEVVMEVQVEKVVKDYEDVKAMKVSRLETPVX

SEQ ID NO: 49929 - protein, 38 aa, Artificial Sequence; identical to SEQ ID NO: 12476
  GFR-binding peptide
  MOD_RES (32)..(32): Xaa is C or S

SEQ ID NO: 49930 - protein, 34 aa, Artificial Sequence
  GFR-binding peptide
  MOD_RES (32)..(33): Xaa is C or S
GEVVMDSMEGIVVKENEDMIQMTINSLETPVXXA

SEQ ID NO: 49931 - protein, 38 aa, Artificial Sequence
  GFR-binding peptide
  MOD_RES (1)..(33)..(34): Xaa is C or S
XGEVVMDSMEGIVVKENEDMIQMTINSLETPVXXAKPI

SEQ ID NO: 49932 - protein, 35 aa, Artificial Sequence; identical to SEQ ID NO: 12478
  GFR-binding peptide
  MOD_RES (32)..(33): Xaa is C or S

SEQ ID NO: 49933 - protein, 37 aa, Artificial Sequence
  GFR-binding peptide
  MOD_RES (1)..(3): Xaa is C or S
XKXALHDELTNSLQEFIPKKRVIEYYVVPLPELQVQT

SEQ ID NO: 49934 - protein, 36 aa, Artificial Sequence
  GFR-binding peptide
  MOD_RES (2)..(36): Xaa is C or S
EXKNHQLFNSLQEHQGQHPKIRYYLMTLPEEETPVX

SEQ ID NO: 49935 - protein, 32 aa, Artificial Sequence
  GFR-binding peptide
  MOD_RES (32)..(32): Xaa is C or S
GEVVMEVQVEKVVKDYEDVKAMKVSRLETPVX

SEQ ID NO: 49936 - protein, 44 aa, Artificial Sequence; identical to SEQ ID NO: 17748
  GFR-binding peptide
  MOD_RES (2)..(4)..(41): Xaa is C or S

SEQ ID NO: 49937 - protein, 33 aa, Artificial Sequence; identical to SEQ ID NO: 17749
  GFR-binding peptide
  MOD_RES (33)..(33): Xaa is C or S
  MOD_RES (11)..(12)..(13)..(14)..(15): Xaa is A or G
  MOD_RES (16)..(17)..(18)..(19): Xaa is A or G or is absent

SEQ ID NO: 49938 - protein, 35 aa, Artificial Sequence; identical to SEQ ID NO: 12481
  GFR-binding peptide
  MOD_RES (31)..(32): Xaa is C or S

SEQ ID NO: 49939 - protein, 39 aa, Artificial Sequence
  GFR-binding peptide
  MOD_RES (1)..(35)..(36): Xaa is C or S
  MOD_RES (13)..(14)..(15)..(16)..(17): Xaa is A or G
  MOD_RES (18)..(19)..(20)..(21): Xaa is A or G or is absent
XGEVVMDVQVEKXXXXXXXXXVKAMKVSRLETPVXXAKP

SEQ ID NO: 49940 - protein, 36 aa, Artificial Sequence
  GFR-binding peptide
  MOD_RES (1)..(3)..(34)..(35): Xaa is C or S
XKXSKVVMVQVEKVKPTRGVVKAIKVSRLDQPVXXP

SEQ ID NO: 49941 - protein, 34 aa, Artificial Sequence
  GFR-binding peptide
  MOD_RES (1)..(3): Xaa is C or S
XGXGEVVMEVTAKKVVKDYEDIKRMQVPRLETPV

SEQ ID NO: 49942 - protein, 35 aa, Artificial Sequence; identical to SEQ ID NO: 12483
  GFR-binding peptide
  MOD_RES (2)..(33)..(34): Xaa is C or S

SEQ ID NO: 49943 - protein, 44 aa, Artificial Sequence; identical to SEQ ID NO: 12486
  GFR-binding peptide
  MOD_RES (2)..(4)..(38): Xaa is C or S
  MOD_RES (16)..(17)..(18)..(19)..(20): Xaa is A or G
  MOD_RES (21)..(22)..(23)..(24): Xaa is A or G or is absent

SEQ ID NO: 49944 - protein, 38 aa, Artificial Sequence
  GFR-binding peptide
  MOD_RES (2)..(36)..(37): Xaa is C or S
  MOD_RES (14)..(15)..(16)..(17)..(18): Xaa is A or G
  MOD_RES (19)..(20)..(21)..(22): Xaa is A or G or is absent
GXSRVVMNSMEGIXXXXXXXXXMIQVTINSLKTPAXXP

SEQ ID NO: 49945 - protein, 39 aa, Artificial Sequence; identical to SEQ ID NO: 17750
  GFR-binding peptide
  MOD_RES (35)..(35): Xaa is C or S
  MOD_RES (11)..(12)..(13)..(14)..(15): Xaa is A or G
  MOD_RES (16)..(17)..(18)..(19): Xaa is A or G or is absent

SEQ ID NO: 49946 - protein, 33 aa, Artificial Sequence
  GFR-binding peptide
  MOD_RES (1)..(33): Xaa is C or S
XSRVVMNVQVEKIVNSSDDVKAVKVSRLKTPAX

SEQ ID NO: 49947 - protein, 35 aa, Artificial Sequence
  GFR-binding peptide
  MOD_RES (1)..(3): Xaa is C or S
  MOD_RES (14)..(15)..(16)..(17)..(18): Xaa is A or G
  MOD_RES (19)..(20)..(21)..(22): Xaa is A or G or is absent
XKXSKVVMVQVEKXXXXXXXXXVKAIKVSRLDQPV

SEQ ID NO: 49948 - protein, 34 aa, Artificial Sequence
  GFR-binding peptide
  MOD_RES (2)..(34): Xaa is C or S
GXARVVMNVTAKKIVNSSDDIKRVQVPRLQTPAX

SEQ ID NO: 49949 - protein, 38 aa, Artificial Sequence; identical to SEQ ID NO: 17757
  GFR-binding peptide
  MOD_RES (1)..(3): Xaa is C or S

SEQ ID NO: 49950 - protein, 35 aa, Artificial Sequence
  GFR-binding peptide
  MOD_RES (1)..(33)..(34): Xaa is C or S
XGEVVMDVQVEKVVKENEDVKAMKVSRLETPVXXA

SEQ ID NO: 49951 - protein, 35 aa, Artificial Sequence
  GFR-binding peptide
  MOD_RES (1)..(32)..(33): Xaa is C or S
XSKVVMVTAKKVKPTRGVIKRIQVPRLDQPVXXPS

SEQ ID NO: 49952 - protein, 37 aa, Artificial Sequence
  GFR-binding peptide
  MOD_RES (2)..(36): Xaa is C or S
  MOD_RES (14)..(15)..(16)..(17)..(18): Xaa is A or G
  MOD_RES (19)..(20)..(21)..(22): Xaa is A or G or is absent
GXSRVVMNVQVEKXXXXXXXXXVKAVKVSRLKTPAXT

SEQ ID NO: 49953 - protein, 40 aa, Artificial Sequence
  GFR-binding peptide
  MOD_RES (2)..(4)..(36)..(37): Xaa is C or S
HXGXSRVVMNVTAKKIVNSSDDIKRVQVPRLKTPAXXPKP

SEQ ID NO: 49954 - protein, 35 aa, Artificial Sequence; identical to SEQ ID NO: 12494
  GFR-binding peptide
  MOD_RES (2)..(33)..(34): Xaa is C or S

SEQ ID NO: 49955 - protein, 36 aa, Artificial Sequence; identical to SEQ ID NO: 12496
  GFR-binding peptide
  MOD_RES (31)..(31): Xaa is C or S

SEQ ID NO: 49956 - protein, 39 aa, Artificial Sequence
  GFR-binding peptide
  MOD_RES (2)..(4)..(37)..(38): Xaa is C or S
  MOD_RES (15)..(16)..(17)..(18)..(19): Xaa is A or G
  MOD_RES (20)..(21)..(22)..(23): Xaa is A or G or is absent
SXKXSKVIMVTAKKXXXXXXXXXIKRIQVPRLDQSVXXP

SEQ ID NO: 49957 - protein, 37 aa, Artificial Sequence; identical to SEQ ID NO: 17759
  GFR-binding peptide
  MOD_RES (36)..(36): Xaa is C or S

SEQ ID NO: 49958 - protein, 37 aa, Artificial Sequence; identical to SEQ ID NO: 12500
  GFR-binding peptide
  MOD_RES (31)..(32): Xaa is C or S

SEQ ID NO: 49959 - protein, 36 aa, Artificial Sequence
  GFR-binding peptide
  MOD_RES (1)..(1): Xaa is C or S
XELHEELRNSLQELKPKKRVYEYYLVTLPEHHVRSP

SEQ ID NO: 49960 - protein, 42 aa, Artificial Sequence; identical to SEQ ID NO: 12501
  GFR-binding peptide
  MOD_RES (2)..(36)..(37): Xaa is C or S
  MOD_RES (14)..(15)..(16)..(17)..(18): Xaa is A or G
  MOD_RES (19)..(20)..(21)..(22): Xaa is A or G or is absent

SEQ ID NO: 49961 - protein, 35 aa, Artificial Sequence; identical to SEQ ID NO: 12503
  GFR-binding peptide
  MOD_RES (33)..(34): Xaa is C or S
  MOD_RES (11)..(12)..(13)..(14)..(15): Xaa is A or G
  MOD_RES (16)..(17)..(18)..(19): Xaa is A or G or is absent

SEQ ID NO: 49962 - protein, 35 aa, Artificial Sequence; identical to SEQ ID NO: 17766
  GFR-binding peptide
  MOD_RES (2)..(2): Xaa is C or S
  MOD_RES (14)..(15)..(16)..(17)..(18): Xaa is A or G
  MOD_RES (19)..(20)..(21)..(22): Xaa is A or G or is absent

SEQ ID NO: 49963 - protein, 39 aa, Artificial Sequence
  GFR-binding peptide
  MOD_RES (1)..(34)..(35): Xaa is C or S
  MOD_RES (12)..(13)..(14)..(15)..(16): Xaa is A or G
  MOD_RES (17)..(18)..(19)..(20): Xaa is A or G or is absent
XSRVIMSMEGIXXXXXXXXXMIQITINSLAQPVXXPAAS

SEQ ID NO: 49964 - protein, 39 aa, Artificial Sequence; identical to SEQ ID NO: 12506
  GFR-binding peptide
  MOD_RES (2)..(36)..(37): Xaa is C or S
  MOD_RES (14)..(15)..(16)..(17)..(18): Xaa is A or G
  MOD_RES (19)..(20)..(21)..(22): Xaa is A or G or is absent

SEQ ID NO: 49965 - protein, 41 aa, Artificial Sequence; identical to SEQ ID NO: 12508
  GFR-binding peptide
  MOD_RES (1)..(3)..(36)..(37): Xaa is C or S
  MOD_RES (14)..(15)..(16)..(17)..(18): Xaa is A or G
  MOD_RES (19)..(20)..(21)..(22): Xaa is A or G or is absent

SEQ ID NO: 49966 - protein, 35 aa, Artificial Sequence; identical to SEQ ID NO: 12509
  GFR-binding peptide
  MOD_RES (33)..(33): Xaa is C or S
  MOD_RES (11)..(12)..(13)..(14)..(15): Xaa is A or G
  MOD_RES (16)..(17)..(18)..(19): Xaa is A or G or is absent

SEQ ID NO: 49967 - protein, 40 aa, Artificial Sequence; identical to SEQ ID NO: 12510
  GFR-binding peptide
  MOD_RES (2)..(36)..(37): Xaa is C or S
  MOD_RES (14)..(15)..(16)..(17)..(18): Xaa is A or G
  MOD_RES (19)..(20)..(21)..(22): Xaa is A or G or is absent

SEQ ID NO: 49968 - protein, 36 aa, Artificial Sequence
  GFR-binding peptide
  MOD_RES (31)..(32): Xaa is C or S
EVVMDVQVEKVVKENEDVKAMKVSRLETPVXXAKPI

SEQ ID NO: 49969 - protein, 42 aa, Artificial Sequence
  GFR-binding peptide
  MOD_RES (2)..(36): Xaa is C or S
EXKNHQLFNSLQEHQGQHPKIRYYVMPLPEEETPVXELGEDN

SEQ ID NO: 49970 - protein, 39 aa, Artificial Sequence
  GFR-binding peptide
  MOD_RES (1)..(38): Xaa is C or S
XELHEELRNSLQELKPKKRVYEYYLVTLPEHHVRSPQXK

SEQ ID NO: 49971 - protein, 38 aa, Artificial Sequence
  GFR-binding peptide
  MOD_RES (1)..(3)..(36)..(37): Xaa is C or S
  MOD_RES (14)..(15)..(16)..(17)..(18): Xaa is A or G
  MOD_RES (19)..(20)..(21)..(22): Xaa is A or G or is absent
XKXSRVIMVTAKKXXXXXXXXXIKRIQVPRLAQPVXXP

SEQ ID NO: 49972 - protein, 35 aa, Artificial Sequence
  GFR-binding peptide
  MOD_RES (2)..(35): Xaa is C or S
  MOD_RES (13)..(14)..(15)..(16)..(17): Xaa is A or G
  MOD_RES (18)..(19)..(20)..(21): Xaa is A or G or is absent
KXSKVIMSMEGIXXXXXXXXXMIQITINSLDQSVX

SEQ ID NO: 49973 - protein, 33 aa, Artificial Sequence; identical to SEQ ID NO: 12513
  GFR-binding peptide
  MOD_RES (33)..(33): Xaa is C or S
  MOD_RES (11)..(12)..(13)..(14)..(15): Xaa is A or G
  MOD_RES (16)..(17)..(18)..(19): Xaa is A or G or is absent

SEQ ID NO: 49974 - protein, 36 aa, Artificial Sequence; identical to SEQ ID NO: 12515
  GFR-binding peptide
  MOD_RES (31)..(32): Xaa is C or S

SEQ ID NO: 49975 - protein, 38 aa, Artificial Sequence; identical to SEQ ID NO: 17770
  GFR-binding peptide
  MOD_RES (37)..(37): Xaa is C or S
  MOD_RES (13)..(14)..(15)..(16)..(17): Xaa is A or G
  MOD_RES (18)..(19)..(20)..(21): Xaa is A or G or is absent

SEQ ID NO: 49976 - protein, 39 aa, Artificial Sequence
  GFR-binding peptide
  MOD_RES (33)..(34): Xaa is C or S
  MOD_RES (11)..(12)..(13)..(14)..(15): Xaa is A or G
  MOD_RES (16)..(17)..(18)..(19): Xaa is A or G or is absent
SKVVMVQVEKXXXXXXXXXVKAIKVSRLDQPVXXPSASA

SEQ ID NO: 49977 - protein, 36 aa, Artificial Sequence
  GFR-binding peptide
  MOD_RES (2)..(33)..(34): Xaa is C or S
KXSRVIMVQVEKVKPKRGVVKAIKVSRLAQPVXXPA

SEQ ID NO: 49978 - protein, 42 aa, Artificial Sequence
  GFR-binding peptide
  MOD_RES (2)..(4)..(37)..(38): Xaa is C or S
  MOD_RES (15)..(16)..(17)..(18)..(19): Xaa is A or G
  MOD_RES (20)..(21)..(22)..(23): Xaa is A or G or is absent
SXKXSKVIMVTAKKXXXXXXXXXIKRIQVPRLDQSVXXPSAS

SEQ ID NO: 49979 - protein, 39 aa, Artificial Sequence
  GFR-binding peptide
  MOD_RES (33)..(34): Xaa is C or S
  MOD_RES (11)..(12)..(13)..(14)..(15): Xaa is A or G
  MOD_RES (16)..(17)..(18)..(19): Xaa is A or G or is absent
EVVMEVTAKKXXXXXXXXXIKRMQVPRLETPVXXAKPIS

SEQ ID NO: 49980 - protein, 34 aa, Artificial Sequence
  GFR-binding peptide
  MOD_RES (32)..(33): Xaa is C or S
ARVVMNSMEGIIVNSSDDMIQVTINSLQTPAXXP

SEQ ID NO: 49981 - protein, 37 aa, Artificial Sequence
  GFR-binding peptide
  MOD_RES (1)..(1): Xaa is C or S
  MOD_RES (14)..(15)..(16)..(17)..(18): Xaa is A or G
  MOD_RES (19)..(20)..(21)..(22): Xaa is A or G or is absent
XALHDELTNSLQEXXXXXXXXXYYVVPLPELQVQTPR

SEQ ID NO: 49982 - protein, 41 aa, Artificial Sequence
  GFR-binding peptide
  MOD_RES (2)..(39): Xaa is C or S
  MOD_RES (15)..(16)..(17)..(18)..(19): Xaa is A or G
  MOD_RES (20)..(21)..(22)..(23): Xaa is A or G or is absent
KXALHDELTNSLQEXXXXXXXXXYYLVTLPELQVQTPRXQV

SEQ ID NO: 49983 - protein, 41 aa, Artificial Sequence
  GFR-binding peptide
  MOD_RES (2)..(4)..(37)..(38): Xaa is C or S
  MOD_RES (15)..(16)..(17)..(18)..(19): Xaa is A or G
  MOD_RES (20)..(21)..(22)..(23): Xaa is A or G or is absent
SXKXSKVIMVQVEKXXXXXXXXXVKAIKVSRLDQSVXXPSA

SEQ ID NO: 49984 - protein, 39 aa, Artificial Sequence; identical to SEQ ID NO: 12521
  GFR-binding peptide
  MOD_RES (1)..(35): Xaa is C or S
  MOD_RES (13)..(14)..(15)..(16)..(17): Xaa is A or G
  MOD_RES (18)..(19)..(20)..(21): Xaa is A or G or is absent

SEQ ID NO: 49985 - protein, 38 aa, Artificial Sequence; identical to SEQ ID NO: 12522
  GFR-binding peptide
  MOD_RES (1)..(34)..(35): Xaa is C or S
  MOD_RES (12)..(13)..(14)..(15)..(16): Xaa is A or G
  MOD_RES (17)..(18)..(19)..(20): Xaa is A or G or is absent

SEQ ID NO: 49986 - protein, 34 aa, Artificial Sequence; identical to SEQ ID NO: 17777
  GFR-binding peptide
  MOD_RES (13)..(14)..(15)..(16)..(17): Xaa is A or G
  MOD_RES (18)..(19)..(20)..(21): Xaa is A or G or is absent

SEQ ID NO: 49987 - protein, 35 aa, Artificial Sequence; identical to SEQ ID NO: 12528
  GFR-binding peptide
  MOD_RES (2)..(2): Xaa is C or S
  MOD_RES (14)..(15)..(16)..(17)..(18): Xaa is A or G
  MOD_RES (19)..(20)..(21)..(22): Xaa is A or G or is absent

SEQ ID NO: 49988 - protein, 37 aa, Artificial Sequence
  GFR-binding peptide
  MOD_RES (1)..(35)..(36): Xaa is C or S
  MOD_RES (13)..(14)..(15)..(16)..(17): Xaa is A or G
  MOD_RES (18)..(19)..(20)..(21): Xaa is A or G or is absent
XGEVVMDSMEGIXXXXXXXXXMIQMTINSLETPVXXA

SEQ ID NO: 49989 - protein, 43 aa, Artificial Sequence
  GFR-binding peptide
  MOD_RES (2)..(4)..(38): Xaa is C or S
  MOD_RES (16)..(17)..(18)..(19)..(20): Xaa is A or G
  MOD_RES (21)..(22)..(23)..(24): Xaa is A or G or is absent
RXEXKNHQLFNSLQEXXXXXXXXXYYVMPLPEEETPVXELGED

SEQ ID NO: 49990 - protein, 36 aa, Artificial Sequence
  GFR-binding peptide
  MOD_RES (1)..(33)..(34): Xaa is C or S
XSRVVMNSMEGIIVNSSDDMIQVTINSLKTPAXXPK

SEQ ID NO: 49991 - protein, 36 aa, Artificial Sequence
  GFR-binding peptide
  MOD_RES (1)..(32)..(33): Xaa is C or S
XSKVVMVTAKKVKPTRGVIKRIQVPRLDQPVXXPSA

SEQ ID NO: 49992 - protein, 41 aa, Artificial Sequence
  GFR-binding peptide
  MOD_RES (2)..(35)..(36): Xaa is C or S
  MOD_RES (13)..(14)..(15)..(16)..(17): Xaa is A or G
  MOD_RES (18)..(19)..(20)..(21): Xaa is A or G or is absent
KXSRVIMVQVEKXXXXXXXXXVKAIKVSRLAQPVXXPAASA

SEQ ID NO: 49993 - protein, 36 aa, Artificial Sequence; identical to SEQ ID NO: 17781
  GFR-binding peptide

SEQ ID NO: 49994 - protein, 38 aa, Artificial Sequence
  GFR-binding peptide
  MOD_RES (2)..(4)..(36)..(37): Xaa is C or S
RXGXGEVVMDVTAKKVVKENEDIKRMQVPRLETPVXXA

SEQ ID NO: 49995 - protein, 36 aa, Artificial Sequence; identical to SEQ ID NO: 12530
  GFR-binding peptide
  MOD_RES (1)..(3): Xaa is C or S
  MOD_RES (15)..(16)..(17)..(18)..(19): Xaa is A or G
  MOD_RES (20)..(21)..(22)..(23): Xaa is A or G or is absent

SEQ ID NO: 49996 - protein, 35 aa, Artificial Sequence; identical to SEQ ID NO: 17782
  GFR-binding peptide
  MOD_RES (1)..(1): Xaa is C or S
  MOD_RES (14)..(15)..(16)..(17)..(18): Xaa is A or G
  MOD_RES (19)..(20)..(21)..(22): Xaa is A or G or is absent

SEQ ID NO: 49997 - protein, 40 aa, Artificial Sequence
  GFR-binding peptide
  MOD_RES (2)..(4)..(38)..(39): Xaa is C or S
  MOD_RES (16)..(17)..(18)..(19)..(20): Xaa is A or G
  MOD_RES (21)..(22)..(23)..(24): Xaa is A or G or is absent
RXGXGEVVMEVQVEKXXXXXXXXXVKAMKVSRLETPVXXA

SEQ ID NO: 49998 - protein, 36 aa, Artificial Sequence
  GFR-binding peptide
  MOD_RES (1)..(35)..(36): Xaa is C or S
  MOD_RES (13)..(14)..(15)..(16)..(17): Xaa is A or G
  MOD_RES (18)..(19)..(20)..(21): Xaa is A or G or is absent
XSRVVMNSMEGIXXXXXXXXXMIQVTINSLKTPAXX

SEQ ID NO: 49999 - protein, 44 aa, Artificial Sequence
  GFR-binding peptide
  MOD_RES (2)..(4)..(38)..(39): Xaa is C or S
  MOD_RES (16)..(17)..(18)..(19)..(20): Xaa is A or G
  MOD_RES (21)..(22)..(23)..(24): Xaa is A or G or is absent
RXGXGEVVMESMEGIXXXXXXXXXMIQMTINSLETPVXXAKPIS

SEQ ID NO: 50000 - protein, 40 aa, Artificial Sequence; identical to SEQ ID NO: 17785
  GFR-binding peptide
  MOD_RES (2)..(4)..(38): Xaa is C or S

SEQ ID NO: 50001 - protein, 39 aa, Artificial Sequence
  GFR-binding peptide
  MOD_RES (2)..(33)..(34): Xaa is C or S
KXSKVVMVTAKKVKPTRGVIKRIQVPRLDQPVXXPSASA

SEQ ID NO: 50002 - protein, 39 aa, Artificial Sequence
  GFR-binding peptide
  MOD_RES (33)..(34): Xaa is C or S
  MOD_RES (11)..(12)..(13)..(14)..(15): Xaa is A or G
  MOD_RES (16)..(17)..(18)..(19): Xaa is A or G or is absent
EVVMEVQVEKXXXXXXXXXVKAMKVSRLETPVXXAKPIS

SEQ ID NO: 50003 - protein, 39 aa, Artificial Sequence
  GFR-binding peptide
  MOD_RES (1)..(3)..(37)..(38): Xaa is C or S
  MOD_RES (15)..(16)..(17)..(18)..(19): Xaa is A or G
  MOD_RES (20)..(21)..(22)..(23): Xaa is A or G or is absent
XGXGEVVMDSMEGIXXXXXXXXXMIQMTINSLETPVXXA

SEQ ID NO: 50004 - protein, 36 aa, Artificial Sequence
  GFR-binding peptide
  MOD_RES (35)..(35): Xaa is C or S
  MOD_RES (11)..(12)..(13)..(14)..(15): Xaa is A or G
  MOD_RES (16)..(17)..(18)..(19): Xaa is A or G or is absent
HEELRNSLQEXXXXXXXXXYYVVPLPEHHVRSPQXK

SEQ ID NO: 50005 - protein, 36 aa, Artificial Sequence
  GFR-binding peptide
  MOD_RES (2)..(4)..(36): Xaa is C or S
HXGXARVVMNVTAKKIVNSSDDIKRVQVPRLQTPAX

SEQ ID NO: 50006 - protein, 33 aa, Artificial Sequence; identical to SEQ ID NO: 12543
  GFR-binding peptide
  MOD_RES (1)..(33): Xaa is C or S

SEQ ID NO: 50007 - protein, 37 aa, Artificial Sequence; identical to SEQ ID NO: 17788
  GFR-binding peptide
  MOD_RES (36)..(36): Xaa is C or S

SEQ ID NO: 50008 - protein, 37 aa, Artificial Sequence; identical to SEQ ID NO: 17789
  GFR-binding peptide
  MOD_RES (2)..(2): Xaa is C or S

SEQ ID NO: 50009 - protein, 35 aa, Artificial Sequence; identical to SEQ ID NO: 12549
  GFR-binding peptide
  MOD_RES (33)..(34): Xaa is C or S
  MOD_RES (11)..(12)..(13)..(14)..(15): Xaa is A or G
  MOD_RES (16)..(17)..(18)..(19): Xaa is A or G or is absent

SEQ ID NO: 50010 - protein, 38 aa, Artificial Sequence
  GFR-binding peptide
  MOD_RES (1)..(3)..(37)..(38): Xaa is C or S
  MOD_RES (15)..(16)..(17)..(18)..(19): Xaa is A or G
  MOD_RES (20)..(21)..(22)..(23): Xaa is A or G or is absent
XGXGEVVMEVQVEKXXXXXXXXXVKAMKVSRLETPVXX

SEQ ID NO: 50011 - protein, 30 aa, Artificial Sequence
  GFR-binding peptide
RVVMNSMEGIIVNSSDDMIQVTINSLQTPA

SEQ ID NO: 50012 - protein, 38 aa, Artificial Sequence; identical to SEQ ID NO: 12550
  GFR-binding peptide
  MOD_RES (2)..(34)..(35): Xaa is C or S

SEQ ID NO: 50013 - protein, 34 aa, Artificial Sequence; identical to SEQ ID NO: 12552
  GFR-binding peptide
  MOD_RES (2)..(2): Xaa is C or S
  MOD_RES (13)..(14)..(15)..(16)..(17): Xaa is A or G
  MOD_RES (18)..(19)..(20)..(21): Xaa is A or G or is absent

SEQ ID NO: 50014 - protein, 35 aa, Artificial Sequence; identical to SEQ ID NO: 12553
  GFR-binding peptide
  MOD_RES (33)..(33): Xaa is C or S
  MOD_RES (11)..(12)..(13)..(14)..(15): Xaa is A or G
  MOD_RES (16)..(17)..(18)..(19): Xaa is A or G or is absent

SEQ ID NO: 50015 - protein, 38 aa, Artificial Sequence
  GFR-binding peptide
  MOD_RES (2)..(4)..(37)..(38): Xaa is C or S
  MOD_RES (15)..(16)..(17)..(18)..(19): Xaa is A or G
  MOD_RES (20)..(21)..(22)..(23): Xaa is A or G or is absent
SXKXSKVIMSMEGIXXXXXXXXXMIQITINSLDQSVXX

SEQ ID NO: 50016 - protein, 35 aa, Artificial Sequence; identical to SEQ ID NO: 17795
  GFR-binding peptide
  MOD_RES (2)..(2): Xaa is C or S
  MOD_RES (14)..(15)..(16)..(17)..(18): Xaa is A or G
  MOD_RES (19)..(20)..(21)..(22): Xaa is A or G or is absent

SEQ ID NO: 50017 - protein, 44 aa, Artificial Sequence; identical to SEQ ID NO: 12554
  GFR-binding peptide
  MOD_RES (2)..(4)..(38)..(39): Xaa is C or S
  MOD_RES (16)..(17)..(18)..(19)..(20): Xaa is A or G
  MOD_RES (21)..(22)..(23)..(24): Xaa is A or G or is absent

SEQ ID NO: 50018 - protein, 42 aa, Artificial Sequence
  GFR-binding peptide
  MOD_RES (1)..(3)..(40): Xaa is C or S
XKXALHDELTNSLQEFIPKKRVIEYYLVTLPELQVQTPRXQV

SEQ ID NO: 50019 - protein, 38 aa, Artificial Sequence
  GFR-binding peptide
  MOD_RES (33)..(34): Xaa is C or S
  MOD_RES (11)..(12)..(13)..(14)..(15): Xaa is A or G
  MOD_RES (16)..(17)..(18)..(19): Xaa is A or G or is absent
SKVVMVTAKKXXXXXXXXXIKRIQVPRLDQPVXXPSAS

SEQ ID NO: 50020 - protein, 39 aa, Artificial Sequence
  GFR-binding peptide
  MOD_RES (1)..(33)..(34): Xaa is C or S
XSRVVMNVTAKKIVNSSDDIKRVQVPRLKTPAXXPKPVY

SEQ ID NO: 50021 - protein, 39 aa, Artificial Sequence; identical to SEQ ID NO: 12557
  GFR-binding peptide
  MOD_RES (1)..(35)..(36): Xaa is C or S
  MOD_RES (13)..(14)..(15)..(16)..(17): Xaa is A or G
  MOD_RES (18)..(19)..(20)..(21): Xaa is A or G or is absent

SEQ ID NO: 50022 - protein, 35 aa, Artificial Sequence; identical to SEQ ID NO: 12558
  GFR-binding peptide
  MOD_RES (1)..(3)..(35): Xaa is C or S

SEQ ID NO: 50023 - protein, 38 aa, Artificial Sequence
  GFR-binding peptide
  MOD_RES (2)..(4)..(38): Xaa is C or S
  MOD_RES (16)..(17)..(18)..(19)..(20): Xaa is A or G
  MOD_RES (21)..(22)..(23)..(24): Xaa is A or G or is absent
RXGXGEVVMDVTAKKXXXXXXXXXIKRMQVPRLETPVX

SEQ ID NO: 50024 - protein, 43 aa, Artificial Sequence
  GFR-binding peptide
  MOD_RES (1)..(3)..(37)..(38): Xaa is C or S
  MOD_RES (15)..(16)..(17)..(18)..(19): Xaa is A or G
  MOD_RES (20)..(21)..(22)..(23): Xaa is A or G or is absent
XGXSRVVMNSMEGIXXXXXXXXXMIQVTINSLKTPAXXPKPVY

SEQ ID NO: 50025 - protein, 38 aa, Artificial Sequence; identical to SEQ ID NO: 12561
  GFR-binding peptide
  MOD_RES (1)..(33)..(34): Xaa is C or S

SEQ ID NO: 50026 - protein, 40 aa, Artificial Sequence; identical to SEQ ID NO: 12562
  GFR-binding peptide
  MOD_RES (1)..(35): Xaa is C or S
  MOD_RES (13)..(14)..(15)..(16)..(17): Xaa is A or G
  MOD_RES (18)..(19)..(20)..(21): Xaa is A or G or is absent

SEQ ID NO: 50027 - protein, 37 aa, Artificial Sequence; identical to SEQ ID NO: 12563
  GFR-binding peptide
  MOD_RES (2)..(4)..(36)..(37): Xaa is C or S

SEQ ID NO: 50028 - protein, 35 aa, Artificial Sequence
  GFR-binding peptide
  MOD_RES (2)..(4): Xaa is C or S
RXGXGEVVMESMEGIVVKDYEDMIQMTINSLETPV

SEQ ID NO: 50029 - protein, 38 aa, Artificial Sequence
  GFR-binding peptide
  MOD_RES (1)..(32)..(33): Xaa is C or S
XSRVIMVTAKKVKPKRGVIKRIQVPRLAQPVXXPAASA

SEQ ID NO: 50030 - protein, 35 aa, Artificial Sequence
  GFR-binding peptide
  MOD_RES (1)..(3)..(34)..(35): Xaa is C or S
XKXSKVVMVQVEKVKPTRGVVKAIKVSRLDQPVXX

SEQ ID NO: 50031 - protein, 36 aa, Artificial Sequence
  GFR-binding peptide
  MOD_RES (1)..(1): Xaa is C or S
XELHEELRNSLQELKPKKRVYEYYVVPLPEHHVRSP

SEQ ID NO: 50032 - protein, 41 aa, Artificial Sequence
  GFR-binding peptide
  MOD_RES (2)..(36): Xaa is C or S
EXKNHQLFNSLQEHQGQHPKIRYYLMTLPEEETPVXELGED

SEQ ID NO: 50033 - protein, 39 aa, Artificial Sequence; identical to SEQ ID NO: 12571
  GFR-binding peptide
  MOD_RES (2)..(36)..(37): Xaa is C or S
  MOD_RES (14)..(15)..(16)..(17)..(18): Xaa is A or G
  MOD_RES (19)..(20)..(21)..(22): Xaa is A or G or is absent

SEQ ID NO: 50034 - protein, 43 aa, Artificial Sequence
  GFR-binding peptide
  MOD_RES (2)..(39): Xaa is C or S
  MOD_RES (15)..(16)..(17)..(18)..(19): Xaa is A or G
  MOD_RES (20)..(21)..(22)..(23): Xaa is A or G or is absent
KXALHDELTNSLQEXXXXXXXXXYYVVPLPELQVQTPRXQVNR

SEQ ID NO: 50035 - protein, 37 aa, Artificial Sequence; identical to SEQ ID NO: 17799
  GFR-binding peptide
  MOD_RES (1)..(1): Xaa is C or S

SEQ ID NO: 50036 - protein, 39 aa, Artificial Sequence
  GFR-binding peptide
  MOD_RES (2)..(36): Xaa is C or S
EXKNHQLFNSLQEHQGQHPKIRYYLMTLPEEETPVXELG

SEQ ID NO: 50037 - protein, 35 aa, Artificial Sequence; identical to SEQ ID NO: 12580
  GFR-binding peptide
  MOD_RES (1)..(33)..(34): Xaa is C or S

SEQ ID NO: 50038 - protein, 38 aa, Artificial Sequence
  GFR-binding peptide
  MOD_RES (37)..(37): Xaa is C or S
ALHDELTNSLQEFIPKKRVIEYYVVPLPELQVQTPRXQ

SEQ ID NO: 50039 - protein, 35 aa, Artificial Sequence
  GFR-binding peptide
  MOD_RES (33)..(34): Xaa is C or S
  MOD_RES (11)..(12)..(13)..(14)..(15): Xaa is A or G
  MOD_RES (16)..(17)..(18)..(19): Xaa is A or G or is absent
SRVIMSMEGIXXXXXXXXXMIQITINSLAQPVXXP

SEQ ID NO: 50040 - protein, 41 aa, Artificial Sequence
  GFR-binding peptide
  MOD_RES (2)..(4)..(41): Xaa is C or S
  MOD_RES (17)..(18)..(19)..(20)..(21): Xaa is A or G
  MOD_RES (22)..(23)..(24)..(25): Xaa is A or G or is absent
AXAXELHEELRNSLQEXXXXXXXXXYYVVPLPEHHVRSPQX

SEQ ID NO: 50041 - protein, 41 aa, Artificial Sequence
  GFR-binding peptide
  MOD_RES (2)..(35)..(36): Xaa is C or S
  MOD_RES (13)..(14)..(15)..(16)..(17): Xaa is A or G
  MOD_RES (18)..(19)..(20)..(21): Xaa is A or G or is absent
KXSKVIMVQVEKXXXXXXXXXVKAIKVSRLDQSVXXPSASA

SEQ ID NO: 50042 - protein, 35 aa, Artificial Sequence
  GFR-binding peptide
  MOD_RES (13)..(14)..(15)..(16)..(17): Xaa is A or G
  MOD_RES (18)..(19)..(20)..(21): Xaa is A or G or is absent
ALHDELTNSLQEXXXXXXXXXYYLVTLPELQVQTP

SEQ ID NO: 50043 - protein, 44 aa, Artificial Sequence
  GFR-binding peptide
  MOD_RES (1)..(3)..(40): Xaa is C or S
XKXALHDELTNSLQEFIPKKRVIEYYVVPLPELQVQTPRXQVNR

SEQ ID NO: 50044 - protein, 40 aa, Artificial Sequence
  GFR-binding peptide
  MOD_RES (2)..(35)..(36): Xaa is C or S
  MOD_RES (13)..(14)..(15)..(16)..(17): Xaa is A or G
  MOD_RES (18)..(19)..(20)..(21): Xaa is A or G or is absent
KXSRVIMVQVEKXXXXXXXXXVKAIKVSRLAQPVXXPAAS

SEQ ID NO: 50045 - protein, 38 aa, Artificial Sequence
  GFR-binding peptide
  MOD_RES (1)..(33)..(34): Xaa is C or S
XGEVVMDVQVEKVVKENEDVKAMKVSRLETPVXXAKPI

SEQ ID NO: 50046 - protein, 39 aa, Artificial Sequence
  GFR-binding peptide
  MOD_RES (1)..(3)..(36)..(37): Xaa is C or S
  MOD_RES (14)..(15)..(16)..(17)..(18): Xaa is A or G
  MOD_RES (19)..(20)..(21)..(22): Xaa is A or G or is absent
XKXSKVVMVQVEKXXXXXXXXXVKAIKVSRLDQPVXXPS

SEQ ID NO: 50047 - protein, 37 aa, Artificial Sequence
  GFR-binding peptide
  MOD_RES (36)..(36): Xaa is C or S
  MOD_RES (12)..(13)..(14)..(15)..(16): Xaa is A or G
  MOD_RES (17)..(18)..(19)..(20): Xaa is A or G or is absent
LHEELRNSLQEXXXXXXXXXYYVVPLPEHHVRSPQXK

SEQ ID NO: 50048 - protein, 38 aa, Artificial Sequence; identical to SEQ ID NO: 12588
  GFR-binding peptide
  MOD_RES (1)..(33)..(34): Xaa is C or S

SEQ ID NO: 50049 - protein, 38 aa, Artificial Sequence
  GFR-binding peptide
  MOD_RES (1)..(38): Xaa is C or S
  MOD_RES (14)..(15)..(16)..(17)..(18): Xaa is A or G
  MOD_RES (19)..(20)..(21)..(22): Xaa is A or G or is absent
XELHEELRNSLQEXXXXXXXXXYYLVTLPEHHVRSPQX

SEQ ID NO: 50050 - protein, 43 aa, Artificial Sequence
  GFR-binding peptide
  MOD_RES (2)..(4)..(41): Xaa is C or S
  MOD_RES (17)..(18)..(19)..(20)..(21): Xaa is A or G
  MOD_RES (22)..(23)..(24)..(25): Xaa is A or G or is absent
EXKXALHDELTNSLQEXXXXXXXXXYYVVPLPELQVQTPRXQV

SEQ ID NO: 50051 - protein, 36 aa, Artificial Sequence
  GFR-binding peptide
  MOD_RES (2)..(2): Xaa is C or S
  MOD_RES (15)..(16)..(17)..(18)..(19): Xaa is A or G
  MOD_RES (20)..(21)..(22)..(23): Xaa is A or G or is absent
AXELHEELRNSLQEXXXXXXXXXYYVVPLPEHHVRS

SEQ ID NO: 50052 - protein, 39 aa, Artificial Sequence
  GFR-binding peptide
  MOD_RES (2)..(4)..(37)..(38): Xaa is C or S
  MOD_RES (15)..(16)..(17)..(18)..(19): Xaa is A or G
  MOD_RES (20)..(21)..(22)..(23): Xaa is A or G or is absent
SXKXSKVIMSMEGIXXXXXXXXXMIQITINSLDQSVXXP

SEQ ID NO: 50053 - protein, 34 aa, Artificial Sequence
  GFR-binding peptide
  MOD_RES (31)..(32): Xaa is C or S
RVVMNSMEGIIVNSSDDMIQVTINSLKTPAXXPK

SEQ ID NO: 50054 - protein, 34 aa, Artificial Sequence; identical to SEQ ID NO: 17812
  GFR-binding peptide
  MOD_RES (11)..(12)..(13)..(14)..(15): Xaa is A or G
  MOD_RES (16)..(17)..(18)..(19): Xaa is A or G or is absent

SEQ ID NO: 50055 - protein, 33 aa, Artificial Sequence
  GFR-binding peptide
HEELRNSLQELKPKKRVYEYYLVTLPEHHVRSP

SEQ ID NO: 50056 - protein, 38 aa, Artificial Sequence; identical to SEQ ID NO: 12595
  GFR-binding peptide
  MOD_RES (34)..(35): Xaa is C or S
  MOD_RES (12)..(13)..(14)..(15)..(16): Xaa is A or G
  MOD_RES (17)..(18)..(19)..(20): Xaa is A or G or is absent

SEQ ID NO: 50057 - protein, 37 aa, Artificial Sequence
  GFR-binding peptide
  MOD_RES (34)..(34): Xaa is C or S
  MOD_RES (12)..(13)..(14)..(15)..(16): Xaa is A or G
  MOD_RES (17)..(18)..(19)..(20): Xaa is A or G or is absent
KNHQLFNSLQEXXXXXXXXXYYLMTLPEEETPVXELG

SEQ ID NO: 50058 - protein, 38 aa, Artificial Sequence; identical to SEQ ID NO: 12598
  GFR-binding peptide
  MOD_RES (1)..(3)..(35): Xaa is C or S

SEQ ID NO: 50059 - protein, 42 aa, Artificial Sequence; identical to SEQ ID NO: 17816
  GFR-binding peptide
  MOD_RES (2)..(4)..(41): Xaa is C or S
  MOD_RES (17)..(18)..(19)..(20)..(21): Xaa is A or G
  MOD_RES (22)..(23)..(24)..(25): Xaa is A or G or is absent

SEQ ID NO: 50060 - protein, 40 aa, Artificial Sequence
  GFR-binding peptide
  MOD_RES (1)..(34)..(35): Xaa is C or S
  MOD_RES (12)..(13)..(14)..(15)..(16): Xaa is A or G
  MOD_RES (17)..(18)..(19)..(20): Xaa is A or G or is absent
XSRVIMVTAKKXXXXXXXXXIKRIQVPRLAQPVXXPAASA

SEQ ID NO: 50061 - protein, 39 aa, Artificial Sequence; identical to SEQ ID NO: 12604
  GFR-binding peptide
  MOD_RES (34)..(35): Xaa is C or S
  MOD_RES (12)..(13)..(14)..(15)..(16): Xaa is A or G
  MOD_RES (17)..(18)..(19)..(20): Xaa is A or G or is absent

SEQ ID NO: 50062 - protein, 36 aa, Artificial Sequence
  GFR-binding peptide
  MOD_RES (1)..(3)..(34)..(35): Xaa is C or S
XKXSRVIMVTAKKVKPKRGVIKRIQVPRLAQPVXXP

SEQ ID NO: 50063 - protein, 37 aa, Artificial Sequence
  GFR-binding peptide
  MOD_RES (1)..(3)..(37): Xaa is C or S
  MOD_RES (15)..(16)..(17)..(18)..(19): Xaa is A or G
  MOD_RES (20)..(21)..(22)..(23): Xaa is A or G or is absent
XGXGEVVMEVTAKKXXXXXXXXXIKRMQVPRLETPVX

SEQ ID NO: 50064 - protein, 41 aa, Artificial Sequence; identical to SEQ ID NO: 17825
  GFR-binding peptide
  MOD_RES (2)..(4)..(41): Xaa is C or S

SEQ ID NO: 50065 - protein, 44 aa, Artificial Sequence; identical to SEQ ID NO: 17826
  GFR-binding peptide
  MOD_RES (2)..(4)..(41): Xaa is C or S
  MOD_RES (17)..(18)..(19)..(20)..(21): Xaa is A or G
  MOD_RES (22)..(23)..(24)..(25): Xaa is A or G or is absent

SEQ ID NO: 50066 - protein, 36 aa, Artificial Sequence
  GFR-binding peptide
  MOD_RES (1)..(34)..(35): Xaa is C or S
  MOD_RES (12)..(13)..(14)..(15)..(16): Xaa is A or G
  MOD_RES (17)..(18)..(19)..(20): Xaa is A or G or is absent
XSRVIMVQVEKXXXXXXXXXVKAIKVSRLAQPVXXP

SEQ ID NO: 50067 - protein, 37 aa, Artificial Sequence
  GFR-binding peptide
  MOD_RES (34)..(34): Xaa is C or S
  MOD_RES (12)..(13)..(14)..(15)..(16): Xaa is A or G
  MOD_RES (17)..(18)..(19)..(20): Xaa is A or G or is absent
SRVVMNSMEGIXXXXXXXXXMIQVTINSLKTPAXTPK

SEQ ID NO: 50068 - protein, 35 aa, Artificial Sequence; identical to SEQ ID NO: 12607
  GFR-binding peptide
  MOD_RES (32)..(33): Xaa is C or S

SEQ ID NO: 50069 - protein, 39 aa, Artificial Sequence; identical to SEQ ID NO: 12608
  GFR-binding peptide
  MOD_RES (33)..(34): Xaa is C or S
  MOD_RES (11)..(12)..(13)..(14)..(15): Xaa is A or G
  MOD_RES (16)..(17)..(18)..(19): Xaa is A or G or is absent

SEQ ID NO: 50070 - protein, 39 aa, Artificial Sequence
  GFR-binding peptide
  MOD_RES (2)..(4)..(38)..(39): Xaa is C or S
  MOD_RES (16)..(17)..(18)..(19)..(20): Xaa is A or G
  MOD_RES (21)..(22)..(23)..(24): Xaa is A or G or is absent
RXGXGEVVMESMEGIXXXXXXXXXMIQMTINSLETPVXX

SEQ ID NO: 50071 - protein, 36 aa, Artificial Sequence; identical to SEQ ID NO: 12609
  GFR-binding peptide
  MOD_RES (2)..(33)..(34): Xaa is C or S

SEQ ID NO: 50072 - protein, 40 aa, Artificial Sequence; identical to SEQ ID NO: 12610
  GFR-binding peptide
  MOD_RES (1)..(35)..(36): Xaa is C or S
  MOD_RES (13)..(14)..(15)..(16)..(17): Xaa is A or G
  MOD_RES (18)..(19)..(20)..(21): Xaa is A or G or is absent

SEQ ID NO: 50073 - protein, 34 aa, Artificial Sequence; identical to SEQ ID NO: 12613
  GFR-binding peptide
  MOD_RES (33)..(34): Xaa is C or S
  MOD_RES (11)..(12)..(13)..(14)..(15): Xaa is A or G
  MOD_RES (16)..(17)..(18)..(19): Xaa is A or G or is absent

SEQ ID NO: 50074 - protein, 33 aa, Artificial Sequence
  GFR-binding peptide
  MOD_RES (12)..(13)..(14)..(15)..(16): Xaa is A or G
  MOD_RES (17)..(18)..(19)..(20): Xaa is A or G or is absent
LHEELRNSLQEXXXXXXXXXYYVVPLPEHHVRS

SEQ ID NO: 50075 - protein, 35 aa, Artificial Sequence
  GFR-binding peptide
  MOD_RES (33)..(34): Xaa is C or S
  MOD_RES (11)..(12)..(13)..(14)..(15): Xaa is A or G
  MOD_RES (16)..(17)..(18)..(19): Xaa is A or G or is absent
RVVMNVQVEKXXXXXXXXXVKAVKVSRLQTPAXXP

SEQ ID NO: 50076 - protein, 42 aa, Artificial Sequence; identical to SEQ ID NO: 17830
  GFR-binding peptide
  MOD_RES (2)..(39): Xaa is C or S

SEQ ID NO: 50077 - protein, 34 aa, Artificial Sequence
  GFR-binding peptide
  MOD_RES (33)..(33): Xaa is C or S
  MOD_RES (11)..(12)..(13)..(14)..(15): Xaa is A or G
  MOD_RES (16)..(17)..(18)..(19): Xaa is A or G or is absent
RVVMNSMEGIXXXXXXXXXMIQVTINSLKTPAXT

SEQ ID NO: 50078 - protein, 36 aa, Artificial Sequence; identical to SEQ ID NO: 36963
  GFR-binding peptide
  MOD_RES (2)..(35)..(36): Xaa is C or S
  MOD_RES (13)..(14)..(15)..(16)..(17): Xaa is A or G
  MOD_RES (18)..(19)..(20)..(21): Xaa is A or G or is absent

SEQ ID NO: 50079 - protein, 42 aa, Artificial Sequence; identical to SEQ ID NO: 17832
  GFR-binding peptide
  MOD_RES (2)..(4)..(38): Xaa is C or S

SEQ ID NO: 50080 - protein, 35 aa, Artificial Sequence
  GFR-binding peptide
  MOD_RES (35)..(35): Xaa is C or S
  MOD_RES (11)..(12)..(13)..(14)..(15): Xaa is A or G
  MOD_RES (16)..(17)..(18)..(19): Xaa is A or G or is absent
HDELTNSLQEXXXXXXXXXYYLVTLPELQVQTPRX

SEQ ID NO: 50081 - protein, 38 aa, Artificial Sequence
  GFR-binding peptide
  MOD_RES (1)..(3)..(37)..(38): Xaa is C or S
  MOD_RES (15)..(16)..(17)..(18)..(19): Xaa is A or G
  MOD_RES (20)..(21)..(22)..(23): Xaa is A or G or is absent
XGXARVVMNVQVEKXXXXXXXXXVKAVKVSRLQTPAXX

SEQ ID NO: 50082 - protein, 35 aa, Artificial Sequence
  GFR-binding peptide
  MOD_RES (1)..(34)..(35): Xaa is C or S
  MOD_RES (12)..(13)..(14)..(15)..(16): Xaa is A or G
  MOD_RES (17)..(18)..(19)..(20): Xaa is A or G or is absent
XSKVVMVTAKKXXXXXXXXXIKRIQVPRLDQPVXX

SEQ ID NO: 50083 - protein, 40 aa, Artificial Sequence
  GFR-binding peptide
  MOD_RES (2)..(34)..(35): Xaa is C or S
GXSRVVMNVQVEKIVNSSDDVKAVKVSRLKTPAXXPKPVY

SEQ ID NO: 50084 - protein, 40 aa, Artificial Sequence
  GFR-binding peptide
  MOD_RES (2)..(4)..(38): Xaa is C or S
  MOD_RES (16)..(17)..(18)..(19)..(20): Xaa is A or G
  MOD_RES (21)..(22)..(23)..(24): Xaa is A or G or is absent
HXGXSRVVMNSMEGIXXXXXXXXXMIQVTINSLKTPAXTP

SEQ ID NO: 50085 - protein, 35 aa, Artificial Sequence
  GFR-binding peptide
  MOD_RES (2)..(34)..(35): Xaa is C or S
GXGEVVMDSMEGIVVKENEDMIQMTINSLETPVXX

SEQ ID NO: 50086 - protein, 40 aa, Artificial Sequence
  GFR-binding peptide
  MOD_RES (1)..(3)..(37)..(38): Xaa is C or S
  MOD_RES (15)..(16)..(17)..(18)..(19): Xaa is A or G
  MOD_RES (20)..(21)..(22)..(23): Xaa is A or G or is absent
XGXSRVVMNVTAKKXXXXXXXXXIKRVQVPRLKTPAXXPK

SEQ ID NO: 50087 - protein, 35 aa, Artificial Sequence
  GFR-binding peptide
  MOD_RES (2)..(2): Xaa is C or S
  MOD_RES (14)..(15)..(16)..(17)..(18): Xaa is A or G
  MOD_RES (19)..(20)..(21)..(22): Xaa is A or G or is absent
GXSRVVMNVQVEKXXXXXXXXXVKAVKVSRLKTPA

SEQ ID NO: 50088 - protein, 42 aa, Artificial Sequence
  GFR-binding peptide
  MOD_RES (2)..(4)..(37)..(38): Xaa is C or S
  MOD_RES (15)..(16)..(17)..(18)..(19): Xaa is A or G
  MOD_RES (20)..(21)..(22)..(23): Xaa is A or G or is absent
SXKXSKVVMVTAKKXXXXXXXXXIKRIQVPRLDQPVXXPSAS

SEQ ID NO: 50089 - protein, 37 aa, Artificial Sequence
  GFR-binding peptide
  MOD_RES (1)..(35): Xaa is C or S
XKNHQLFNSLQEHQGQHPKIRYYLMTLPEEETPVXEL

SEQ ID NO: 50090 - protein, 40 aa, Artificial Sequence; identical to SEQ ID NO: 36988
  GFR-binding peptide
  MOD_RES (1)..(34)..(35): Xaa is C or S
  MOD_RES (12)..(13)..(14)..(15)..(16): Xaa is A or G
  MOD_RES (17)..(18)..(19)..(20): Xaa is A or G or is absent

SEQ ID NO: 50091 - protein, 39 aa, Artificial Sequence; identical to SEQ ID NO: 12626
  GFR-binding peptide
  MOD_RES (1)..(3)..(37)..(38): Xaa is C or S
  MOD_RES (15)..(16)..(17)..(18)..(19): Xaa is A or G
  MOD_RES (20)..(21)..(22)..(23): Xaa is A or G or is absent

SEQ ID NO: 50092 - protein, 35 aa, Artificial Sequence
  GFR-binding peptide
  MOD_RES (33)..(34): Xaa is C or S
  MOD_RES (11)..(12)..(13)..(14)..(15): Xaa is A or G
  MOD_RES (16)..(17)..(18)..(19): Xaa is A or G or is absent
RVVMNVTAKKXXXXXXXXXIKRVQVPRLQTPAXXP

SEQ ID NO: 50093 - protein, 35 aa, Artificial Sequence; identical to SEQ ID NO: 36991
  GFR-binding peptide
  MOD_RES (2)..(4)..(35): Xaa is C or S

SEQ ID NO: 50094 - protein, 36 aa, Artificial Sequence
  GFR-binding peptide
  MOD_RES (34)..(34): Xaa is C or S
  MOD_RES (12)..(13)..(14)..(15)..(16): Xaa is A or G
  MOD_RES (17)..(18)..(19)..(20): Xaa is A or G or is absent
KNHQLFNSLQEXXXXXXXXXYYVMPLPEEETPVXEL

SEQ ID NO: 50095 - protein, 40 aa, Artificial Sequence
  GFR-binding peptide
  MOD_RES (1)..(3)..(34)..(35): Xaa is C or S
XKXSRVIMSMEGIVKPKRGVMIQITINSLAQPVXXPAASA

SEQ ID NO: 50096 - protein, 38 aa, Artificial Sequence
  GFR-binding peptide
  MOD_RES (1)..(33)..(34): Xaa is C or S
XGEVVMEVQVEKVVKDYEDVKAMKVSRLETPVXXAKPI

SEQ ID NO: 50097 - protein, 33 aa, Artificial Sequence
  GFR-binding peptide
  MOD_RES (31)..(32): Xaa is C or S
EVVMDSMEGIVVKENEDMIQMTINSLETPVXXA

SEQ ID NO: 50098 - protein, 38 aa, Artificial Sequence; identical to SEQ ID NO: 12631
  GFR-binding peptide
  MOD_RES (33)..(34): Xaa is C or S
  MOD_RES (11)..(12)..(13)..(14)..(15): Xaa is A or G
  MOD_RES (16)..(17)..(18)..(19): Xaa is A or G or is absent

SEQ ID NO: 50099 - protein, 39 aa, Artificial Sequence; identical to SEQ ID NO: 12633
  GFR-binding peptide
  MOD_RES (33)..(34): Xaa is C or S
  MOD_RES (11)..(12)..(13)..(14)..(15): Xaa is A or G
  MOD_RES (16)..(17)..(18)..(19): Xaa is A or G or is absent

SEQ ID NO: 50100 - protein, 40 aa, Artificial Sequence
  GFR-binding peptide
  MOD_RES (2)..(36)..(37): Xaa is C or S
  MOD_RES (14)..(15)..(16)..(17)..(18): Xaa is A or G
  MOD_RES (19)..(20)..(21)..(22): Xaa is A or G or is absent
GXGEVVMEVQVEKXXXXXXXXXVKAMKVSRLETPVXXAKP

SEQ ID NO: 50101 - protein, 34 aa, Artificial Sequence; identical to SEQ ID NO: 17846
  GFR-binding peptide
  MOD_RES (13)..(14)..(15)..(16)..(17): Xaa is A or G
  MOD_RES (18)..(19)..(20)..(21): Xaa is A or G or is absent

SEQ ID NO: 50102 - protein, 41 aa, Artificial Sequence
  GFR-binding peptide
  MOD_RES (2)..(4)..(35)..(36): Xaa is C or S
SXKXSKVVMVQVEKVKPTRGVVKAIKVSRLDQPVXXPSASA

SEQ ID NO: 50103 - protein, 39 aa, Artificial Sequence
  GFR-binding peptide
  MOD_RES (1)..(33): Xaa is C or S
XSRVVMNVTAKKIVNSSDDIKRVQVPRLKTPAXTPKTVH

SEQ ID NO: 50104 - protein, 37 aa, Artificial Sequence
  GFR-binding peptide
  MOD_RES (1)..(34)..(35): Xaa is C or S
  MOD_RES (12)..(13)..(14)..(15)..(16): Xaa is A or G
  MOD_RES (17)..(18)..(19)..(20): Xaa is A or G or is absent
XSKVVMSMEGIXXXXXXXXXMIQITINSLDQPVXXPS

SEQ ID NO: 50105 - protein, 36 aa, Artificial Sequence; identical to SEQ ID NO: 17847
  GFR-binding peptide
  MOD_RES (13)..(14)..(15)..(16)..(17): Xaa is A or G
  MOD_RES (18)..(19)..(20)..(21): Xaa is A or G or is absent

SEQ ID NO: 50106 - protein, 34 aa, Artificial Sequence; identical to SEQ ID NO: 17848
  GFR-binding peptide
  MOD_RES (34)..(34): Xaa is C or S
  MOD_RES (12)..(13)..(14)..(15)..(16): Xaa is A or G
  MOD_RES (17)..(18)..(19)..(20): Xaa is A or G or is absent

SEQ ID NO: 50107 - protein, 41 aa, Artificial Sequence
  GFR-binding peptide
  MOD_RES (2)..(4)..(36)..(37): Xaa is C or S
RXGXGEVVMEVQVEKVVKDYEDVKAMKVSRLETPVXXAKPI

SEQ ID NO: 50108 - protein, 40 aa, Artificial Sequence; identical to SEQ ID NO: 17849
  GFR-binding peptide
  MOD_RES (1)..(3)..(40): Xaa is C or S
  MOD_RES (16)..(17)..(18)..(19)..(20): Xaa is A or G
  MOD_RES (21)..(22)..(23)..(24): Xaa is A or G or is absent

SEQ ID NO: 50109 - protein, 35 aa, Artificial Sequence
  GFR-binding peptide
  MOD_RES (33)..(34): Xaa is C or S
  MOD_RES (11)..(12)..(13)..(14)..(15): Xaa is A or G
  MOD_RES (16)..(17)..(18)..(19): Xaa is A or G or is absent
EVVMEVTAKKXXXXXXXXXIKRMQVPRLETPVXXA

SEQ ID NO: 50110 - protein, 39 aa, Artificial Sequence; identical to SEQ ID NO: 12636
  GFR-binding peptide
  MOD_RES (1)..(33)..(34): Xaa is C or S

SEQ ID NO: 50111 - protein, 38 aa, Artificial Sequence
  GFR-binding peptide
  MOD_RES (2)..(34)..(35): Xaa is C or S
GXGEVVMDSMEGIVVKENEDMIQMTINSLETPVXXAKP

SEQ ID NO: 50112 - protein, 43 aa, Artificial Sequence; identical to SEQ ID NO: 12638
  GFR-binding peptide
  MOD_RES (1)..(3)..(37)..(38): Xaa is C or S
  MOD_RES (15)..(16)..(17)..(18)..(19): Xaa is A or G
  MOD_RES (20)..(21)..(22)..(23): Xaa is A or G or is absent

SEQ ID NO: 50113 - protein, 34 aa, Artificial Sequence
  GFR-binding peptide
  MOD_RES (32)..(33): Xaa is C or S
GEVVMESMEGIVVKDYEDMIQMTINSLETPVXXA

SEQ ID NO: 50114 - protein, 36 aa, Artificial Sequence
  GFR-binding peptide
  MOD_RES (2)..(34)..(35): Xaa is C or S
GXGEVVMEVTAKKVVKDYEDIKRMQVPRLETPVXXA

SEQ ID NO: 50115 - protein, 37 aa, Artificial Sequence
  GFR-binding peptide
  MOD_RES (34)..(35): Xaa is C or S
  MOD_RES (12)..(13)..(14)..(15)..(16): Xaa is A or G
  MOD_RES (17)..(18)..(19)..(20): Xaa is A or G or is absent
GEVVMESMEGIXXXXXXXXXMIQMTINSLETPVXXAK

SEQ ID NO: 50116 - protein, 36 aa, Artificial Sequence
  GFR-binding peptide
  MOD_RES (2)..(35)..(36): Xaa is C or S
  MOD_RES (13)..(14)..(15)..(16)..(17): Xaa is A or G
  MOD_RES (18)..(19)..(20)..(21): Xaa is A or G or is absent
KXSKVIMVQVEKXXXXXXXXXVKAIKVSRLDQSVXX

SEQ ID NO: 50117 - protein, 39 aa, Artificial Sequence
  GFR-binding peptide
  MOD_RES (2)..(4)..(36)..(37): Xaa is C or S
RXGXGEVVMESMEGIVVKDYEDMIQMTINSLETPVXXAK

SEQ ID NO: 50118 - protein, 41 aa, Artificial Sequence
  GFR-binding peptide
  MOD_RES (2)..(4)..(41): Xaa is C or S
EXKXALHDELTNSLQEFIPKKRVIEYYLVTLPELQVQTPRX

SEQ ID NO: 50119 - protein, 40 aa, Artificial Sequence; identical to SEQ ID NO: 12644
  GFR-binding peptide
  MOD_RES (2)..(4)..(36)..(37): Xaa is C or S

SEQ ID NO: 50120 - protein, 36 aa, Artificial Sequence
  GFR-binding peptide
  MOD_RES (1)..(35)..(36): Xaa is C or S
  MOD_RES (13)..(14)..(15)..(16)..(17): Xaa is A or G
  MOD_RES (18)..(19)..(20)..(21): Xaa is A or G or is absent
XGEVVMEVTAKKXXXXXXXXXIKRMQVPRLETPVXX

SEQ ID NO: 50121 - protein, 34 aa, Artificial Sequence
  GFR-binding peptide
  MOD_RES (1)..(3): Xaa is C or S
XGXARVVMNSMEGIIVNSSDDMIQVTINSLQTPA

SEQ ID NO: 50122 - protein, 35 aa, Artificial Sequence; identical to SEQ ID NO: 12646
  GFR-binding peptide
  MOD_RES (2)..(35): Xaa is C or S
  MOD_RES (13)..(14)..(15)..(16)..(17): Xaa is A or G
  MOD_RES (18)..(19)..(20)..(21): Xaa is A or G or is absent

SEQ ID NO: 50123 - protein, 32 aa, Artificial Sequence
  GFR-binding peptide
  MOD_RES (32)..(32): Xaa is C or S
SRVVMNVTAKKIVNSSDDIKRVQVPRLKTPAX

SEQ ID NO: 50124 - protein, 40 aa, Artificial Sequence; identical to SEQ ID NO: 12648
  GFR-binding peptide
  MOD_RES (2)..(4)..(38)..(39): Xaa is C or S
  MOD_RES (16)..(17)..(18)..(19)..(20): Xaa is A or G
  MOD_RES (21)..(22)..(23)..(24): Xaa is A or G or is absent

SEQ ID NO: 50125 - protein, 41 aa, Artificial Sequence
  GFR-binding peptide
  MOD_RES (1)..(3)..(36)..(37): Xaa is C or S
  MOD_RES (14)..(15)..(16)..(17)..(18): Xaa is A or G
  MOD_RES (19)..(20)..(21)..(22): Xaa is A or G or is absent
XKXSKVVMVTAKKXXXXXXXXXIKRIQVPRLDQPVXXPSAS

SEQ ID NO: 50126 - protein, 40 aa, Artificial Sequence; identical to SEQ ID NO: 12649
  GFR-binding peptide
  MOD_RES (1)..(3)..(37): Xaa is C or S
  MOD_RES (15)..(16)..(17)..(18)..(19): Xaa is A or G
  MOD_RES (20)..(21)..(22)..(23): Xaa is A or G or is absent

SEQ ID NO: 50127 - protein, 37 aa, Artificial Sequence
  GFR-binding peptide
  MOD_RES (2)..(4): Xaa is C or S
  MOD_RES (16)..(17)..(18)..(19)..(20): Xaa is A or G
  MOD_RES (21)..(22)..(23)..(24): Xaa is A or G or is absent
HXGXSRVVMNVTAKKXXXXXXXXXIKRVQVPRLKTPA

SEQ ID NO: 50128 - protein, 36 aa, Artificial Sequence; identical to SEQ ID NO: 17860
  GFR-binding peptide
  MOD_RES (2)..(36): Xaa is C or S
  MOD_RES (14)..(15)..(16)..(17)..(18): Xaa is A or G
  MOD_RES (19)..(20)..(21)..(22): Xaa is A or G or is absent

SEQ ID NO: 50129 - protein, 32 aa, Artificial Sequence
  GFR-binding peptide
  MOD_RES (31)..(32): Xaa is C or S
EVVMESMEGIVVKDYEDMIQMTINSLETPVXX

SEQ ID NO: 50130 - protein, 34 aa, Artificial Sequence; identical to SEQ ID NO: 12652
  GFR-binding peptide
  MOD_RES (33)..(34): Xaa is C or S
  MOD_RES (11)..(12)..(13)..(14)..(15): Xaa is A or G
  MOD_RES (16)..(17)..(18)..(19): Xaa is A or G or is absent

SEQ ID NO: 50131 - protein, 33 aa, Artificial Sequence; identical to SEQ ID NO: 12653
  GFR-binding peptide
  MOD_RES (33)..(33): Xaa is C or S
  MOD_RES (11)..(12)..(13)..(14)..(15): Xaa is A or G
  MOD_RES (16)..(17)..(18)..(19): Xaa is A or G or is absent

SEQ ID NO: 50132 - protein, 37 aa, Artificial Sequence; identical to SEQ ID NO: 12654
  GFR-binding peptide
  MOD_RES (1)..(35)..(36): Xaa is C or S
  MOD_RES (13)..(14)..(15)..(16)..(17): Xaa is A or G
  MOD_RES (18)..(19)..(20)..(21): Xaa is A or G or is absent

SEQ ID NO: 50133 - protein, 37 aa, Artificial Sequence
  GFR-binding peptide
  MOD_RES (37)..(37): Xaa is C or S
ELHEELRNSLQELKPKKRVYEYYLVTLPEHHVRSPQX

SEQ ID NO: 50134 - protein, 36 aa, Artificial Sequence; identical to SEQ ID NO: 12656
  GFR-binding peptide
  MOD_RES (1)..(32)..(33): Xaa is C or S

SEQ ID NO: 50135 - protein, 37 aa, Artificial Sequence; identical to SEQ ID NO: 12658
  GFR-binding peptide
  MOD_RES (2)..(36): Xaa is C or S
  MOD_RES (14)..(15)..(16)..(17)..(18): Xaa is A or G
  MOD_RES (19)..(20)..(21)..(22): Xaa is A or G or is absent

SEQ ID NO: 50136 - protein, 36 aa, Artificial Sequence
  GFR-binding peptide
  MOD_RES (2)..(36): Xaa is C or S
  MOD_RES (14)..(15)..(16)..(17)..(18): Xaa is A or G
  MOD_RES (19)..(20)..(21)..(22): Xaa is A or G or is absent
GXGEVVMDVQVEKXXXXXXXXXVKAMKVSRLETPVX

SEQ ID NO: 50137 - protein, 40 aa, Artificial Sequence
  GFR-binding peptide
  MOD_RES (1)..(3)..(34)..(35): Xaa is C or S
XKXSKVIMSMEGIIKPTKGIMIQITINSLDQSVXXPSASA

SEQ ID NO: 50138 - protein, 32 aa, Artificial Sequence; identical to SEQ ID NO: 12662
  GFR-binding peptide
  MOD_RES (11)..(12)..(13)..(14)..(15): Xaa is A or G
  MOD_RES (16)..(17)..(18)..(19): Xaa is A or G or is absent

SEQ ID NO: 50139 - protein, 40 aa, Artificial Sequence
  GFR-binding peptide
  MOD_RES (2)..(36): Xaa is C or S
EXKNHQLFNSLQEHQGQHPKIRYYVMPLPEEETPVXELGE

SEQ ID NO: 50140 - protein, 40 aa, Artificial Sequence; identical to SEQ ID NO: 17868
  GFR-binding peptide
  MOD_RES (1)..(3)..(40): Xaa is C or S
  MOD_RES (16)..(17)..(18)..(19)..(20): Xaa is A or G
  MOD_RES (21)..(22)..(23)..(24): Xaa is A or G or is absent

SEQ ID NO: 50141 - protein, 38 aa, Artificial Sequence
  GFR-binding peptide
  MOD_RES (1)..(3)..(35)..(36): Xaa is C or S
XGXGEVVMDVTAKKVVKENEDIKRMQVPRLETPVXXAK

SEQ ID NO: 50142 - protein, 31 aa, Artificial Sequence; identical to SEQ ID NO: 12667
  GFR-binding peptide

SEQ ID NO: 50143 - protein, 37 aa, Artificial Sequence
  GFR-binding peptide
  MOD_RES (2)..(4): Xaa is C or S
  MOD_RES (16)..(17)..(18)..(19)..(20): Xaa is A or G
  MOD_RES (21)..(22)..(23)..(24): Xaa is A or G or is absent
HXGXSRVVMNVQVEKXXXXXXXXXVKAVKVSRLKTPA

SEQ ID NO: 50144 - protein, 42 aa, Artificial Sequence; identical to SEQ ID NO: 17874
  GFR-binding peptide
  MOD_RES (1)..(38): Xaa is C or S

SEQ ID NO: 50145 - protein, 35 aa, Artificial Sequence
  GFR-binding peptide
  MOD_RES (34)..(34): Xaa is C or S
KNHQLFNSLQEHQGQHPKIRYYVMPLPEEETPVXE

SEQ ID NO: 50146 - protein, 33 aa, Artificial Sequence
  GFR-binding peptide
  MOD_RES (1)..(33): Xaa is C or S
XGEVVMESMEGIVVKDYEDMIQMTINSLETPVX

SEQ ID NO: 50147 - protein, 36 aa, Artificial Sequence
  GFR-binding peptide
  MOD_RES (2)..(4): Xaa is C or S
  MOD_RES (15)..(16)..(17)..(18)..(19): Xaa is A or G
  MOD_RES (20)..(21)..(22)..(23): Xaa is A or G or is absent
SXKXSRVIMVQVEKXXXXXXXXXVKAIKVSRLAQPV

SEQ ID NO: 50148 - protein, 38 aa, Artificial Sequence; identical to SEQ ID NO: 17876
  GFR-binding peptide
  MOD_RES (2)..(4)..(38): Xaa is C or S
  MOD_RES (16)..(17)..(18)..(19)..(20): Xaa is A or G
  MOD_RES (21)..(22)..(23)..(24): Xaa is A or G or is absent

SEQ ID NO: 50149 - protein, 34 aa, Artificial Sequence; identical to SEQ ID NO: 12668
  GFR-binding peptide
  MOD_RES (1)..(3): Xaa is C or S

SEQ ID NO: 50150 - protein, 34 aa, Artificial Sequence
  GFR-binding peptide
  MOD_RES (34)..(34): Xaa is C or S
KNHQLFNSLQEHQGQHPKIRYYLMTLPEEETPVX

SEQ ID NO: 50151 - protein, 34 aa, Artificial Sequence
  GFR-binding peptide
  MOD_RES (2)..(33)..(34): Xaa is C or S
KXSKVVMVQVEKVKPTRGVVKAIKVSRLDQPVXX

SEQ ID NO: 50152 - protein, 39 aa, Artificial Sequence
  GFR-binding peptide
  MOD_RES (1)..(33): Xaa is C or S
XSRVVMNVQVEKIVNSSDDVKAVKVSRLKTPAXTPKTVH

SEQ ID NO: 50153 - protein, 36 aa, Artificial Sequence; identical to SEQ ID NO: 17878
  GFR-binding peptide
  MOD_RES (35)..(35): Xaa is C or S

SEQ ID NO: 50154 - protein, 36 aa, Artificial Sequence
  GFR-binding peptide
  MOD_RES (2)..(4): Xaa is C or S
  MOD_RES (15)..(16)..(17)..(18)..(19): Xaa is A or G
  MOD_RES (20)..(21)..(22)..(23): Xaa is A or G or is absent
SXKXSKVIMSMEGIXXXXXXXXXMIQITINSLDQSV

SEQ ID NO: 50155 - protein, 35 aa, Artificial Sequence
  GFR-binding peptide
  MOD_RES (1)..(32)..(33): Xaa is C or S
XSKVVMVQVEKVKPTRGVVKAIKVSRLDQPVXXPS

SEQ ID NO: 50156 - protein, 36 aa, Artificial Sequence
  GFR-binding peptide
  MOD_RES (35)..(35): Xaa is C or S
  MOD_RES (11)..(12)..(13)..(14)..(15): Xaa is A or G
  MOD_RES (16)..(17)..(18)..(19): Xaa is A or G or is absent
HEELRNSLQEXXXXXXXXXYYLVTLPEHHVRSPQXK

SEQ ID NO: 50157 - protein, 37 aa, Artificial Sequence; identical to SEQ ID NO: 37062
  GFR-binding peptide
  MOD_RES (1)..(34)..(35): Xaa is C or S
  MOD_RES (12)..(13)..(14)..(15)..(16): Xaa is A or G
  MOD_RES (17)..(18)..(19)..(20): Xaa is A or G or is absent

SEQ ID NO: 50158 - protein, 35 aa, Artificial Sequence; identical to SEQ ID NO: 17882
  GFR-binding peptide

SEQ ID NO: 50159 - protein, 37 aa, Artificial Sequence
  GFR-binding peptide
  MOD_RES (2)..(2): Xaa is C or S
AXELHEELRNSLQELKPKKRVYEYYLVTLPEHHVRSP

SEQ ID NO: 50160 - protein, 33 aa, Artificial Sequence
  GFR-binding peptide
  MOD_RES (1)..(32)..(33): Xaa is C or S
XSRVIMVTAKKVKPKRGVIKRIQVPRLAQPVXX

SEQ ID NO: 50161 - protein, 40 aa, Artificial Sequence; identical to SEQ ID NO: 12673
  GFR-binding peptide
  MOD_RES (2)..(4)..(37)..(38): Xaa is C or S
  MOD_RES (15)..(16)..(17)..(18)..(19): Xaa is A or G
  MOD_RES (20)..(21)..(22)..(23): Xaa is A or G or is absent

SEQ ID NO: 50162 - protein, 35 aa, Artificial Sequence
  GFR-binding peptide
  MOD_RES (1)..(35): Xaa is C or S
  MOD_RES (13)..(14)..(15)..(16)..(17): Xaa is A or G
  MOD_RES (18)..(19)..(20)..(21): Xaa is A or G or is absent
XGEVVMEVTAKKXXXXXXXXXIKRMQVPRLETPVX

SEQ ID NO: 50163 - protein, 37 aa, Artificial Sequence; identical to SEQ ID NO: 17886
  GFR-binding peptide
  MOD_RES (1)..(3): Xaa is C or S

SEQ ID NO: 50164 - protein, 39 aa, Artificial Sequence; identical to SEQ ID NO: 17888
  GFR-binding peptide
  MOD_RES (2)..(39): Xaa is C or S
  MOD_RES (15)..(16)..(17)..(18)..(19): Xaa is A or G
  MOD_RES (20)..(21)..(22)..(23): Xaa is A or G or is absent

SEQ ID NO: 50165 - protein, 37 aa, Artificial Sequence; identical to SEQ ID NO: 17889
  GFR-binding peptide
  MOD_RES (2)..(2): Xaa is C or S
  MOD_RES (15)..(16)..(17)..(18)..(19): Xaa is A or G
  MOD_RES (20)..(21)..(22)..(23): Xaa is A or G or is absent

SEQ ID NO: 50166 - protein, 39 aa, Artificial Sequence; identical to SEQ ID NO: 12675
  GFR-binding peptide
  MOD_RES (33)..(34): Xaa is C or S
  MOD_RES (11)..(12)..(13)..(14)..(15): Xaa is A or G
  MOD_RES (16)..(17)..(18)..(19): Xaa is A or G or is absent

SEQ ID NO: 50167 - protein, 41 aa, Artificial Sequence
  GFR-binding peptide
  MOD_RES (37)..(37): Xaa is C or S
ELHEELRNSLQELKPKKRVYEYYLVTLPEHHVRSPQXKVSS

SEQ ID NO: 50168 - protein, 39 aa, Artificial Sequence; identical to SEQ ID NO: 17890
  GFR-binding peptide
  MOD_RES (1)..(38): Xaa is C or S

SEQ ID NO: 50169 - protein, 41 aa, Artificial Sequence
  GFR-binding peptide
  MOD_RES (1)..(35): Xaa is C or S
  MOD_RES (13)..(14)..(15)..(16)..(17): Xaa is A or G
  MOD_RES (18)..(19)..(20)..(21): Xaa is A or G or is absent
XSRVVMNSMEGIXXXXXXXXXMIQVTINSLKTPAXTPKTVH

SEQ ID NO: 50170 - protein, 37 aa, Artificial Sequence; identical to SEQ ID NO: 17893
  GFR-binding peptide
  MOD_RES (1)..(3): Xaa is C or S

SEQ ID NO: 50171 - protein, 34 aa, Artificial Sequence
  GFR-binding peptide
  MOD_RES (1)..(3)..(34): Xaa is C or S
XKXSKVIMVQVEKIKPTKGIVKAIKVSRLDQSVX

SEQ ID NO: 50172 - protein, 42 aa, Artificial Sequence
  GFR-binding peptide
  MOD_RES (2)..(4)..(38)..(39): Xaa is C or S
  MOD_RES (16)..(17)..(18)..(19)..(20): Xaa is A or G
  MOD_RES (21)..(22)..(23)..(24): Xaa is A or G or is absent
HXGXSRVVMNSMEGIXXXXXXXXXMIQVTINSLKTPAXXPKP

SEQ ID NO: 50173 - protein, 32 aa, Artificial Sequence
  GFR-binding peptide
  MOD_RES (1)..(32): Xaa is C or S
XSRVIMVTAKKVKPKRGVIKRIQVPRLAQPVX

SEQ ID NO: 50174 - protein, 42 aa, Artificial Sequence; identical to SEQ ID NO: 17898
  GFR-binding peptide
  MOD_RES (1)..(38): Xaa is C or S
  MOD_RES (14)..(15)..(16)..(17)..(18): Xaa is A or G
  MOD_RES (19)..(20)..(21)..(22): Xaa is A or G or is absent

SEQ ID NO: 50175 - protein, 39 aa, Artificial Sequence
  GFR-binding peptide
  MOD_RES (1)..(3)..(34)..(35): Xaa is C or S
XKXSKVVMSMEGIVKPTRGVMIQITINSLDQPVXXPSAS

SEQ ID NO: 50176 - protein, 38 aa, Artificial Sequence; identical to SEQ ID NO: 37078
  GFR-binding peptide
  MOD_RES (1)..(3)..(34)..(35): Xaa is C or S

SEQ ID NO: 50177 - protein, 36 aa, Artificial Sequence
  GFR-binding peptide
  MOD_RES (2)..(35)..(36): Xaa is C or S
  MOD_RES (13)..(14)..(15)..(16)..(17): Xaa is A or G
  MOD_RES (18)..(19)..(20)..(21): Xaa is A or G or is absent
KXSKVVMVTAKKXXXXXXXXXIKRIQVPRLDQPVXX

SEQ ID NO: 50178 - protein, 38 aa, Artificial Sequence; identical to SEQ ID NO: 12683
  GFR-binding peptide
  MOD_RES (34)..(35): Xaa is C or S
  MOD_RES (12)..(13)..(14)..(15)..(16): Xaa is A or G
  MOD_RES (17)..(18)..(19)..(20): Xaa is A or G or is absent

SEQ ID NO: 50179 - protein, 33 aa, Artificial Sequence
  GFR-binding peptide
  MOD_RES (1)..(3): Xaa is C or S
XKXSKVIMVTAKKIKPTKGIIKRIQVPRLDQSV

SEQ ID NO: 50180 - protein, 38 aa, Artificial Sequence
  GFR-binding peptide
  MOD_RES (1)..(35): Xaa is C or S
  MOD_RES (13)..(14)..(15)..(16)..(17): Xaa is A or G
  MOD_RES (18)..(19)..(20)..(21): Xaa is A or G or is absent
XSRVVMNSMEGIXXXXXXXXXMIQVTINSLKTPAXTPK

SEQ ID NO: 50181 - protein, 41 aa, Artificial Sequence
  GFR-binding peptide
  MOD_RES (2)..(4)..(38)..(39): Xaa is C or S
  MOD_RES (16)..(17)..(18)..(19)..(20): Xaa is A or G
  MOD_RES (21)..(22)..(23)..(24): Xaa is A or G or is absent
RXGXGEVVMDVQVEKXXXXXXXXXVKAMKVSRLETPVXXAK

SEQ ID NO: 50182 - protein, 33 aa, Artificial Sequence; identical to SEQ ID NO: 12685
  GFR-binding peptide
  MOD_RES (1)..(33): Xaa is C or S

SEQ ID NO: 50183 - protein, 33 aa, Artificial Sequence; identical to SEQ ID NO: 12688
  GFR-binding peptide
  MOD_RES (1)..(3): Xaa is C or S

SEQ ID NO: 50184 - protein, 33 aa, Artificial Sequence; identical to SEQ ID NO: 12690
  GFR-binding peptide
  MOD_RES (31)..(32): Xaa is C or S

SEQ ID NO: 50185 - protein, 39 aa, Artificial Sequence
  GFR-binding peptide
  MOD_RES (2)..(34)..(35): Xaa is C or S
GXSRVVMNVQVEKIVNSSDDVKAVKVSRLKTPAXXPKPV

SEQ ID NO: 50186 - protein, 43 aa, Artificial Sequence; identical to SEQ ID NO: 17905
  GFR-binding peptide
  MOD_RES (2)..(39): Xaa is C or S

SEQ ID NO: 50187 - protein, 40 aa, Artificial Sequence
  GFR-binding peptide
  MOD_RES (2)..(34): Xaa is C or S
GXSRVVMNSMEGIIVNSSDDMIQVTINSLKTPAXTPKTVH

SEQ ID NO: 50188 - protein, 33 aa, Artificial Sequence; identical to SEQ ID NO: 12693
  GFR-binding peptide
  MOD_RES (31)..(32): Xaa is C or S

SEQ ID NO: 50189 - protein, 34 aa, Artificial Sequence; identical to SEQ ID NO: 12694
  GFR-binding peptide
  MOD_RES (33)..(34): Xaa is C or S
  MOD_RES (11)..(12)..(13)..(14)..(15): Xaa is A or G
  MOD_RES (16)..(17)..(18)..(19): Xaa is A or G or is absent

SEQ ID NO: 50190 - protein, 38 aa, Artificial Sequence; identical to SEQ ID NO: 17906
  GFR-binding peptide
  MOD_RES (36)..(36): Xaa is C or S

SEQ ID NO: 50191 - protein, 43 aa, Artificial Sequence; identical to SEQ ID NO: 12695
  GFR-binding peptide
  MOD_RES (2)..(4)..(38)..(39): Xaa is C or S
  MOD_RES (16)..(17)..(18)..(19)..(20): Xaa is A or G
  MOD_RES (21)..(22)..(23)..(24): Xaa is A or G or is absent

SEQ ID NO: 50192 - protein, 33 aa, Artificial Sequence
  GFR-binding peptide
  MOD_RES (2)..(2): Xaa is C or S
GXARVVMNVQVEKIVNSSDDVKAVKVSRLQTPA

SEQ ID NO: 50193 - protein, 38 aa, Artificial Sequence
  GFR-binding peptide
  MOD_RES (2)..(4)..(35)..(36): Xaa is C or S
SXKXSKVVMVQVEKVKPTRGVVKAIKVSRLDQPVXXPS

SEQ ID NO: 50194 - protein, 39 aa, Artificial Sequence; identical to SEQ ID NO: 12698
  GFR-binding peptide
  MOD_RES (1)..(35)..(36): Xaa is C or S
  MOD_RES (13)..(14)..(15)..(16)..(17): Xaa is A or G
  MOD_RES (18)..(19)..(20)..(21): Xaa is A or G or is absent

SEQ ID NO: 50195 - protein, 44 aa, Artificial Sequence; identical to SEQ ID NO: 17911
  GFR-binding peptide
  MOD_RES (2)..(4)..(41): Xaa is C or S
  MOD_RES (17)..(18)..(19)..(20)..(21): Xaa is A or G
  MOD_RES (22)..(23)..(24)..(25): Xaa is A or G or is absent

SEQ ID NO: 50196 - protein, 38 aa, Artificial Sequence; identical to SEQ ID NO: 12699
  GFR-binding peptide
  MOD_RES (2)..(4)..(38): Xaa is C or S
  MOD_RES (16)..(17)..(18)..(19)..(20): Xaa is A or G
  MOD_RES (21)..(22)..(23)..(24): Xaa is A or G or is absent

SEQ ID NO: 50197 - protein, 40 aa, Artificial Sequence; identical to SEQ ID NO: 17913
  GFR-binding peptide
  MOD_RES (34)..(34): Xaa is C or S
  MOD_RES (12)..(13)..(14)..(15)..(16): Xaa is A or G
  MOD_RES (17)..(18)..(19)..(20): Xaa is A or G or is absent

SEQ ID NO: 50198 - protein, 37 aa, Artificial Sequence
  GFR-binding peptide
  MOD_RES (33)..(34): Xaa is C or S
  MOD_RES (11)..(12)..(13)..(14)..(15): Xaa is A or G
  MOD_RES (16)..(17)..(18)..(19): Xaa is A or G or is absent
RVVMNVQVEKXXXXXXXXXVKAVKVSRLKTPAXXPKP

SEQ ID NO: 50199 - protein, 36 aa, Artificial Sequence; identical to SEQ ID NO: 12701
  GFR-binding peptide
  MOD_RES (32)..(33): Xaa is C or S

SEQ ID NO: 50200 - protein, 34 aa, Artificial Sequence; identical to SEQ ID NO: 17914
  GFR-binding peptide
  MOD_RES (12)..(13)..(14)..(15)..(16): Xaa is A or G
  MOD_RES (17)..(18)..(19)..(20): Xaa is A or G or is absent

SEQ ID NO: 50201 - protein, 40 aa, Artificial Sequence
  GFR-binding peptide
  MOD_RES (2)..(4)..(37)..(38): Xaa is C or S
  MOD_RES (15)..(16)..(17)..(18)..(19): Xaa is A or G
  MOD_RES (20)..(21)..(22)..(23): Xaa is A or G or is absent
SXKXSRVIMSMEGIXXXXXXXXXMIQITINSLAQPVXXPA

SEQ ID NO: 50202 - protein, 42 aa, Artificial Sequence; identical to SEQ ID NO: 17916
  GFR-binding peptide
  MOD_RES (2)..(39): Xaa is C or S
  MOD_RES (15)..(16)..(17)..(18)..(19): Xaa is A or G
  MOD_RES (20)..(21)..(22)..(23): Xaa is A or G or is absent

SEQ ID NO: 50203 - protein, 35 aa, Artificial Sequence; identical to SEQ ID NO: 12704
  GFR-binding peptide
  MOD_RES (1)..(33): Xaa is C or S

SEQ ID NO: 50204 - protein, 41 aa, Artificial Sequence
  GFR-binding peptide
  MOD_RES (1)..(38): Xaa is C or S
XELHEELRNSLQELKPKKRVYEYYVVPLPEHHVRSPQXKVS

SEQ ID NO: 50205 - protein, 37 aa, Artificial Sequence
  GFR-binding peptide
  MOD_RES (2)..(4)..(35)..(36): Xaa is C or S
SXKXSKVIMVQVEKIKPTKGIVKAIKVSRLDQSVXXP

SEQ ID NO: 50206 - protein, 42 aa, Artificial Sequence; identical to SEQ ID NO: 12706
  GFR-binding peptide
  MOD_RES (2)..(4)..(36)..(37): Xaa is C or S

SEQ ID NO: 50207 - protein, 33 aa, Artificial Sequence
  GFR-binding peptide
  MOD_RES (12)..(13)..(14)..(15)..(16): Xaa is A or G
  MOD_RES (17)..(18)..(19)..(20): Xaa is A or G or is absent
SRVVMNVTAKKXXXXXXXXXIKRVQVPRLKTPA

SEQ ID NO: 50208 - protein, 34 aa, Artificial Sequence
  GFR-binding peptide
  MOD_RES (31)..(32): Xaa is C or S
EVVMEVTAKKVVKDYEDIKRMQVPRLETPVXXAK

SEQ ID NO: 50209 - protein, 38 aa, Artificial Sequence; identical to SEQ ID NO: 17926
  GFR-binding peptide
  MOD_RES (2)..(2): Xaa is C or S
  MOD_RES (15)..(16)..(17)..(18)..(19): Xaa is A or G
  MOD_RES (20)..(21)..(22)..(23): Xaa is A or G or is absent

SEQ ID NO: 50210 - protein, 38 aa, Artificial Sequence; identical to SEQ ID NO: 17927
  GFR-binding peptide
  MOD_RES (1)..(3): Xaa is C or S
  MOD_RES (16)..(17)..(18)..(19)..(20): Xaa is A or G
  MOD_RES (21)..(22)..(23)..(24): Xaa is A or G or is absent

SEQ ID NO: 50211 - protein, 36 aa, Artificial Sequence
  GFR-binding peptide
  MOD_RES (2)..(34): Xaa is C or S
GXSRVVMNSMEGIIVNSSDDMIQVTINSLKTPAXTP

SEQ ID NO: 50212 - protein, 37 aa, Artificial Sequence; identical to SEQ ID NO: 17930
  GFR-binding peptide
  MOD_RES (34)..(34): Xaa is C or S
  MOD_RES (12)..(13)..(14)..(15)..(16): Xaa is A or G
  MOD_RES (17)..(18)..(19)..(20): Xaa is A or G or is absent

SEQ ID NO: 50213 - protein, 36 aa, Artificial Sequence
  GFR-binding peptide
  MOD_RES (33)..(34): Xaa is C or S
  MOD_RES (11)..(12)..(13)..(14)..(15): Xaa is A or G
  MOD_RES (16)..(17)..(18)..(19): Xaa is A or G or is absent
EVVMEVTAKKXXXXXXXXXIKRMQVPRLETPVXXAK

SEQ ID NO: 50214 - protein, 36 aa, Artificial Sequence; identical to SEQ ID NO: 17932
  GFR-binding peptide
  MOD_RES (1)..(1): Xaa is C or S

SEQ ID NO: 50215 - protein, 36 aa, Artificial Sequence
  GFR-binding peptide
  MOD_RES (1)..(32)..(33): Xaa is C or S
XSRVIMVTAKKVKPKRGVIKRIQVPRLAQPVXXPAA

SEQ ID NO: 50216 - protein, 41 aa, Artificial Sequence
  GFR-binding peptide
  MOD_RES (2)..(4)..(35)..(36): Xaa is C or S
SXKXSRVIMSMEGIVKPKRGVMIQITINSLAQPVXXPAASA

SEQ ID NO: 50217 - protein, 39 aa, Artificial Sequence; identical to SEQ ID NO: 12714
  GFR-binding peptide
  MOD_RES (2)..(4)..(36)..(37): Xaa is C or S

SEQ ID NO: 50218 - protein, 38 aa, Artificial Sequence; identical to SEQ ID NO: 17936
  GFR-binding peptide
  MOD_RES (33)..(33): Xaa is C or S

SEQ ID NO: 50219 - protein, 36 aa, Artificial Sequence
  GFR-binding peptide
  MOD_RES (1)..(34)..(35): Xaa is C or S
  MOD_RES (12)..(13)..(14)..(15)..(16): Xaa is A or G
  MOD_RES (17)..(18)..(19)..(20): Xaa is A or G or is absent
XSKVVMVTAKKXXXXXXXXXIKRIQVPRLDQPVXXP

SEQ ID NO: 50220 - protein, 38 aa, Artificial Sequence; identical to SEQ ID NO: 12721
  GFR-binding peptide
  MOD_RES (1)..(32)..(33): Xaa is C or S

SEQ ID NO: 50221 - protein, 41 aa, Artificial Sequence; identical to SEQ ID NO: 17941
  GFR-binding peptide
  MOD_RES (2)..(4)..(41): Xaa is C or S
  MOD_RES (17)..(18)..(19)..(20)..(21): Xaa is A or G
  MOD_RES (22)..(23)..(24)..(25): Xaa is A or G or is absent

SEQ ID NO: 50222 - protein, 40 aa, Artificial Sequence; identical to SEQ ID NO: 17944
  GFR-binding peptide
  MOD_RES (1)..(38): Xaa is C or S
  MOD_RES (14)..(15)..(16)..(17)..(18): Xaa is A or G
  MOD_RES (19)..(20)..(21)..(22): Xaa is A or G or is absent

SEQ ID NO: 50223 - protein, 38 aa, Artificial Sequence
  GFR-binding peptide
  MOD_RES (2)..(36): Xaa is C or S
EXKNHQLFNSLQEHQGQHPKIRYYVMPLPEEETPVXEL

SEQ ID NO: 50224 - protein, 35 aa, Artificial Sequence
  GFR-binding peptide
  MOD_RES (2)..(4)..(35): Xaa is C or S
SXKXSRVIMSMEGIVKPKRGVMIQITINSLAQPVX

SEQ ID NO: 50225 - protein, 34 aa, Artificial Sequence
  GFR-binding peptide
  MOD_RES (1)..(3)..(34): Xaa is C or S
XKXSKVVMVTAKKVKPTRGVIKRIQVPRLDQPVX

SEQ ID NO: 50226 - protein, 35 aa, Artificial Sequence
  GFR-binding peptide
  MOD_RES (2)..(2): Xaa is C or S
  MOD_RES (14)..(15)..(16)..(17)..(18): Xaa is A or G
  MOD_RES (19)..(20)..(21)..(22): Xaa is A or G or is absent
GXSRVVMNSMEGIXXXXXXXXXMIQVTINSLKTPA

SEQ ID NO: 50227 - protein, 43 aa, Artificial Sequence
  GFR-binding peptide
  MOD_RES (2)..(4)..(41): Xaa is C or S
AXAXELHEELRNSLQELKPKKRVYEYYVVPLPEHHVRSPQXKV

SEQ ID NO: 50228 - protein, 40 aa, Artificial Sequence
  GFR-binding peptide
  MOD_RES (2)..(4)..(36)..(37): Xaa is C or S
RXGXGEVVMDVQVEKVVKENEDVKAMKVSRLETPVXXAKP

SEQ ID NO: 50229 - protein, 36 aa, Artificial Sequence
  GFR-binding peptide
  MOD_RES (2)..(4): Xaa is C or S
  MOD_RES (15)..(16)..(17)..(18)..(19): Xaa is A or G
  MOD_RES (20)..(21)..(22)..(23): Xaa is A or G or is absent
SXKXSRVIMVTAKKXXXXXXXXXIKRIQVPRLAQPV

SEQ ID NO: 50230 - protein, 34 aa, Artificial Sequence; identical to SEQ ID NO: 37139
  GFR-binding peptide
  MOD_RES (1)..(32)..(33): Xaa is C or S

SEQ ID NO: 50231 - protein, 35 aa, Artificial Sequence
  GFR-binding peptide
  MOD_RES (32)..(33): Xaa is C or S
ARVVMNVQVEKIVNSSDDVKAVKVSRLQTPAXXPK

SEQ ID NO: 50232 - protein, 39 aa, Artificial Sequence; identical to SEQ ID NO: 17945
  GFR-binding peptide
  MOD_RES (36)..(36): Xaa is C or S
  MOD_RES (12)..(13)..(14)..(15)..(16): Xaa is A or G
  MOD_RES (17)..(18)..(19)..(20): Xaa is A or G or is absent

SEQ ID NO: 50233 - protein, 40 aa, Artificial Sequence; identical to SEQ ID NO: 12726
  GFR-binding peptide
  MOD_RES (2)..(4)..(36): Xaa is C or S

SEQ ID NO: 50234 - protein, 41 aa, Artificial Sequence; identical to SEQ ID NO: 12727
  GFR-binding peptide
  MOD_RES (2)..(4)..(37)..(38): Xaa is C or S
  MOD_RES (15)..(16)..(17)..(18)..(19): Xaa is A or G
  MOD_RES (20)..(21)..(22)..(23): Xaa is A or G or is absent

SEQ ID NO: 50235 - protein, 34 aa, Artificial Sequence; identical to SEQ ID NO: 12728
  GFR-binding peptide
  MOD_RES (2)..(4): Xaa is C or S

SEQ ID NO: 50236 - protein, 35 aa, Artificial Sequence
  GFR-binding peptide
  MOD_RES (34)..(34): Xaa is C or S
  MOD_RES (12)..(13)..(14)..(15)..(16): Xaa is A or G
  MOD_RES (17)..(18)..(19)..(20): Xaa is A or G or is absent
SRVVMNVTAKKXXXXXXXXXIKRVQVPRLKTPAXT

SEQ ID NO: 50237 - protein, 32 aa, Artificial Sequence; identical to SEQ ID NO: 17946
  GFR-binding peptide
  MOD_RES (11)..(12)..(13)..(14)..(15): Xaa is A or G
  MOD_RES (16)..(17)..(18)..(19): Xaa is A or G or is absent

SEQ ID NO: 50238 - protein, 33 aa, Artificial Sequence
  GFR-binding peptide
  MOD_RES (32)..(33): Xaa is C or S
GEVVMEVQVEKVVKDYEDVKAMKVSRLETPVXX

SEQ ID NO: 50239 - protein, 37 aa, Artificial Sequence; identical to SEQ ID NO: 17947
  GFR-binding peptide
  MOD_RES (36)..(36): Xaa is C or S

SEQ ID NO: 50240 - protein, 41 aa, Artificial Sequence; identical to SEQ ID NO: 12733
  GFR-binding peptide
  MOD_RES (1)..(3)..(35)..(36): Xaa is C or S

SEQ ID NO: 50241 - protein, 33 aa, Artificial Sequence
  GFR-binding peptide
  MOD_RES (31)..(32): Xaa is C or S
SKVVMSMEGIVKPTRGVMIQITINSLDQPVXXP

SEQ ID NO: 50242 - protein, 42 aa, Artificial Sequence; identical to SEQ ID NO: 17951
  GFR-binding peptide
  MOD_RES (2)..(39): Xaa is C or S

SEQ ID NO: 50243 - protein, 44 aa, Artificial Sequence
  GFR-binding peptide
  MOD_RES (2)..(4)..(41): Xaa is C or S
AXAXELHEELRNSLQELKPKKRVYEYYVVPLPEHHVRSPQXKVS

SEQ ID NO: 50244 - protein, 40 aa, Artificial Sequence; identical to SEQ ID NO: 17952
  GFR-binding peptide
  MOD_RES (2)..(36): Xaa is C or S

SEQ ID NO: 50245 - protein, 36 aa, Artificial Sequence
  GFR-binding peptide
  MOD_RES (2)..(33)..(34): Xaa is C or S
KXSRVIMVTAKKVKPKRGVIKRIQVPRLAQPVXXPA

SEQ ID NO: 50246 - protein, 42 aa, Artificial Sequence; identical to SEQ ID NO: 17954
  GFR-binding peptide
  MOD_RES (2)..(4)..(41): Xaa is C or S

SEQ ID NO: 50247 - protein, 44 aa, Artificial Sequence
  GFR-binding peptide
  MOD_RES (2)..(4)..(38)..(39): Xaa is C or S
  MOD_RES (16)..(17)..(18)..(19)..(20): Xaa is A or G
  MOD_RES (21)..(22)..(23)..(24): Xaa is A or G or is absent
RXGXGEVVMDSMEGIXXXXXXXXXMIQMTINSLETPVXXAKPIK

SEQ ID NO: 50248 - protein, 41 aa, Artificial Sequence
  GFR-binding peptide
  MOD_RES (2)..(4)..(37)..(38): Xaa is C or S
  MOD_RES (15)..(16)..(17)..(18)..(19): Xaa is A or G
  MOD_RES (20)..(21)..(22)..(23): Xaa is A or G or is absent
SXKXSRVIMSMEGIXXXXXXXXXMIQITINSLAQPVXXPAA

SEQ ID NO: 50249 - protein, 37 aa, Artificial Sequence
  GFR-binding peptide
  MOD_RES (32)..(32): Xaa is C or S
SRVVMNSMEGIIVNSSDDMIQVTINSLKTPAXTPKTV

SEQ ID NO: 50250 - protein, 38 aa, Artificial Sequence; identical to SEQ ID NO: 12740
  GFR-binding peptide
  MOD_RES (1)..(3)..(36)..(37): Xaa is C or S
  MOD_RES (14)..(15)..(16)..(17)..(18): Xaa is A or G
  MOD_RES (19)..(20)..(21)..(22): Xaa is A or G or is absent

SEQ ID NO: 50251 - protein, 39 aa, Artificial Sequence
  GFR-binding peptide
  MOD_RES (2)..(36)..(37): Xaa is C or S
  MOD_RES (14)..(15)..(16)..(17)..(18): Xaa is A or G
  MOD_RES (19)..(20)..(21)..(22): Xaa is A or G or is absent
GXARVVMNVQVEKXXXXXXXXXVKAVKVSRLQTPAXXPK

SEQ ID NO: 50252 - protein, 36 aa, Artificial Sequence
  GFR-binding peptide
  MOD_RES (34)..(34): Xaa is C or S
KNHQLFNSLQEHQGQHPKIRYYLMTLPEEETPVXEL

SEQ ID NO: 50253 - protein, 40 aa, Artificial Sequence
  GFR-binding peptide
  MOD_RES (1)..(3)..(35)..(36): Xaa is C or S
XGXSRVVMNVTAKKIVNSSDDIKRVQVPRLKTPAXXPKPV

SEQ ID NO: 50254 - protein, 37 aa, Artificial Sequence; identical to SEQ ID NO: 12741
  GFR-binding peptide
  MOD_RES (2)..(4)..(37): Xaa is C or S
  MOD_RES (15)..(16)..(17)..(18)..(19): Xaa is A or G
  MOD_RES (20)..(21)..(22)..(23): Xaa is A or G or is absent

SEQ ID NO: 50255 - protein, 37 aa, Artificial Sequence
  GFR-binding peptide
  MOD_RES (1)..(34)..(35): Xaa is C or S
  MOD_RES (12)..(13)..(14)..(15)..(16): Xaa is A or G
  MOD_RES (17)..(18)..(19)..(20): Xaa is A or G or is absent
XSKVIMSMEGIXXXXXXXXXMIQITINSLDQSVXXPS

SEQ ID NO: 50256 - protein, 39 aa, Artificial Sequence; identical to SEQ ID NO: 17957
  GFR-binding peptide
  MOD_RES (2)..(4): Xaa is C or S
  MOD_RES (17)..(18)..(19)..(20)..(21): Xaa is A or G
  MOD_RES (22)..(23)..(24)..(25): Xaa is A or G or is absent

SEQ ID NO: 50257 - protein, 44 aa, Artificial Sequence; identical to SEQ ID NO: 17960
  GFR-binding peptide
  MOD_RES (1)..(3)..(40): Xaa is C or S
  MOD_RES (16)..(17)..(18)..(19)..(20): Xaa is A or G
  MOD_RES (21)..(22)..(23)..(24): Xaa is A or G or is absent

SEQ ID NO: 50258 - protein, 34 aa, Artificial Sequence
  GFR-binding peptide
  MOD_RES (34)..(34): Xaa is C or S
  MOD_RES (12)..(13)..(14)..(15)..(16): Xaa is A or G
  MOD_RES (17)..(18)..(19)..(20): Xaa is A or G or is absent
SRVVMNVQVEKXXXXXXXXXVKAVKVSRLKTPAX

SEQ ID NO: 50259 - protein, 34 aa, Artificial Sequence
  GFR-binding peptide
  MOD_RES (1)..(1): Xaa is C or S
  MOD_RES (13)..(14)..(15)..(16)..(17): Xaa is A or G
  MOD_RES (18)..(19)..(20)..(21): Xaa is A or G or is absent
XARVVMNVTAKKXXXXXXXXXIKRVQVPRLQTPA

SEQ ID NO: 50260 - protein, 39 aa, Artificial Sequence
  GFR-binding peptide
  MOD_RES (2)..(4)..(38): Xaa is C or S
  MOD_RES (16)..(17)..(18)..(19)..(20): Xaa is A or G
  MOD_RES (21)..(22)..(23)..(24): Xaa is A or G or is absent
HXGXSRVVMNVTAKKXXXXXXXXXIKRVQVPRLKTPAXT

SEQ ID NO: 50261 - protein, 34 aa, Artificial Sequence
  GFR-binding peptide
  MOD_RES (33)..(34): Xaa is C or S
  MOD_RES (11)..(12)..(13)..(14)..(15): Xaa is A or G
  MOD_RES (16)..(17)..(18)..(19): Xaa is A or G or is absent
EVVMDSMEGIXXXXXXXXXMIQMTINSLETPVXX

SEQ ID NO: 50262 - protein, 44 aa, Artificial Sequence
  GFR-binding peptide
  MOD_RES (2)..(4)..(38)..(39): Xaa is C or S
  MOD_RES (16)..(17)..(18)..(19)..(20): Xaa is A or G
  MOD_RES (21)..(22)..(23)..(24): Xaa is A or G or is absent
HXGXARVVMNSMEGIXXXXXXXXXMIQVTINSLQTPAXXPKPVT

SEQ ID NO: 50263 - protein, 44 aa, Artificial Sequence; identical to SEQ ID NO: 17961
  GFR-binding peptide
  MOD_RES (1)..(3)..(40): Xaa is C or S

SEQ ID NO: 50264 - protein, 34 aa, Artificial Sequence
  GFR-binding peptide
LHDELTNSLQEFIPKKRVIEYYLVTLPELQVQTP

SEQ ID NO: 50265 - protein, 39 aa, Artificial Sequence; identical to SEQ ID NO: 12747
  GFR-binding peptide
  MOD_RES (1)..(3)..(34)..(35): Xaa is C or S

SEQ ID NO: 50266 - protein, 41 aa, Artificial Sequence; identical to SEQ ID NO: 17965
  GFR-binding peptide
  MOD_RES (37)..(37): Xaa is C or S

SEQ ID NO: 50267 - protein, 39 aa, Artificial Sequence; identical to SEQ ID NO: 12749
  GFR-binding peptide
  MOD_RES (2)..(4)..(37)..(38): Xaa is C or S
  MOD_RES (15)..(16)..(17)..(18)..(19): Xaa is A or G
  MOD_RES (20)..(21)..(22)..(23): Xaa is A or G or is absent

SEQ ID NO: 50268 - protein, 37 aa, Artificial Sequence
  GFR-binding peptide
  MOD_RES (1)..(3)..(37): Xaa is C or S
  MOD_RES (15)..(16)..(17)..(18)..(19): Xaa is A or G
  MOD_RES (20)..(21)..(22)..(23): Xaa is A or G or is absent
XGXSRVVMNVTAKKXXXXXXXXXIKRVQVPRLKTPAX

SEQ ID NO: 50269 - protein, 37 aa, Artificial Sequence; identical to SEQ ID NO: 17967
  GFR-binding peptide
  MOD_RES (36)..(36): Xaa is C or S
  MOD_RES (12)..(13)..(14)..(15)..(16): Xaa is A or G
  MOD_RES (17)..(18)..(19)..(20): Xaa is A or G or is absent

SEQ ID NO: 50270 - protein, 38 aa, Artificial Sequence; identical to SEQ ID NO: 12751
  GFR-binding peptide
  MOD_RES (1)..(35)..(36): Xaa is C or S
  MOD_RES (13)..(14)..(15)..(16)..(17): Xaa is A or G
  MOD_RES (18)..(19)..(20)..(21): Xaa is A or G or is absent

SEQ ID NO: 50271 - protein, 37 aa, Artificial Sequence
  GFR-binding peptide
  MOD_RES (1)..(3): Xaa is C or S
  MOD_RES (16)..(17)..(18)..(19)..(20): Xaa is A or G
  MOD_RES (21)..(22)..(23)..(24): Xaa is A or G or is absent
XKXALHDELTNSLQEXXXXXXXXXYYVVPLPELQVQT

SEQ ID NO: 50272 - protein, 34 aa, Artificial Sequence
  GFR-binding peptide
  MOD_RES (1)..(1): Xaa is C or S
  MOD_RES (13)..(14)..(15)..(16)..(17): Xaa is A or G
  MOD_RES (18)..(19)..(20)..(21): Xaa is A or G or is absent
XSRVVMNSMEGIXXXXXXXXXMIQVTINSLKTPA

SEQ ID NO: 50273 - protein, 35 aa, Artificial Sequence; identical to SEQ ID NO: 12753
  GFR-binding peptide
  MOD_RES (1)..(3)..(34)..(35): Xaa is C or S

SEQ ID NO: 50274 - protein, 36 aa, Artificial Sequence; identical to SEQ ID NO: 17970
  GFR-binding peptide
  MOD_RES (1)..(3): Xaa is C or S
  MOD_RES (15)..(16)..(17)..(18)..(19): Xaa is A or G
  MOD_RES (20)..(21)..(22)..(23): Xaa is A or G or is absent

SEQ ID NO: 50275 - protein, 34 aa, Artificial Sequence
  GFR-binding peptide
  MOD_RES (1)..(1): Xaa is C or S
  MOD_RES (13)..(14)..(15)..(16)..(17): Xaa is A or G
  MOD_RES (18)..(19)..(20)..(21): Xaa is A or G or is absent
XGEVVMEVQVEKXXXXXXXXXVKAMKVSRLETPV

SEQ ID NO: 50276 - protein, 35 aa, Artificial Sequence; identical to SEQ ID NO: 17971
  GFR-binding peptide
  MOD_RES (2)..(2): Xaa is C or S

SEQ ID NO: 50277 - protein, 36 aa, Artificial Sequence; identical to SEQ ID NO: 17972
  GFR-binding peptide
  MOD_RES (34)..(34): Xaa is C or S
  MOD_RES (12)..(13)..(14)..(15)..(16): Xaa is A or G
  MOD_RES (17)..(18)..(19)..(20): Xaa is A or G or is absent

SEQ ID NO: 50278 - protein, 38 aa, Artificial Sequence; identical to SEQ ID NO: 17973
  GFR-binding peptide
  MOD_RES (35)..(35): Xaa is C or S

SEQ ID NO: 50279 - protein, 38 aa, Artificial Sequence
  GFR-binding peptide
  MOD_RES (1)..(38): Xaa is C or S
XALHDELTNSLQEFIPKKRVIEYYVVPLPELQVQTPRX

SEQ ID NO: 50280 - protein, 35 aa, Artificial Sequence
  GFR-binding peptide
  MOD_RES (34)..(35): Xaa is C or S
  MOD_RES (12)..(13)..(14)..(15)..(16): Xaa is A or G
  MOD_RES (17)..(18)..(19)..(20): Xaa is A or G or is absent
GEVVMEVTAKKXXXXXXXXXIKRMQVPRLETPVXX

SEQ ID NO: 50281 - protein, 41 aa, Artificial Sequence
  GFR-binding peptide
  MOD_RES (1)..(3)..(36)..(37): Xaa is C or S
  MOD_RES (14)..(15)..(16)..(17)..(18): Xaa is A or G
  MOD_RES (19)..(20)..(21)..(22): Xaa is A or G or is absent
XKXSKVIMVTAKKXXXXXXXXXIKRIQVPRLDQSVXXPSAS

SEQ ID NO: 50282 - protein, 35 aa, Artificial Sequence
  GFR-binding peptide
  MOD_RES (2)..(34)..(35): Xaa is C or S
GXSRVVMNVTAKKIVNSSDDIKRVQVPRLKTPAXX

SEQ ID NO: 50283 - protein, 38 aa, Artificial Sequence
  GFR-binding peptide
  MOD_RES (34)..(34): Xaa is C or S
  MOD_RES (12)..(13)..(14)..(15)..(16): Xaa is A or G
  MOD_RES (17)..(18)..(19)..(20): Xaa is A or G or is absent
SRVVMNVTAKKXXXXXXXXXIKRVQVPRLKTPAXTPKT

SEQ ID NO: 50284 - protein, 33 aa, Artificial Sequence
  GFR-binding peptide
  MOD_RES (1)..(32)..(33): Xaa is C or S
XSKVIMVTAKKIKPTKGIIKRIQVPRLDQSVXX

SEQ ID NO: 50285 - protein, 34 aa, Artificial Sequence; identical to SEQ ID NO: 12758
  GFR-binding peptide
  MOD_RES (2)..(2): Xaa is C or S
  MOD_RES (13)..(14)..(15)..(16)..(17): Xaa is A or G
  MOD_RES (18)..(19)..(20)..(21): Xaa is A or G or is absent

SEQ ID NO: 50286 - protein, 35 aa, Artificial Sequence
  GFR-binding peptide
  MOD_RES (32)..(32): Xaa is C or S
SRVVMNSMEGIIVNSSDDMIQVTINSLKTPAXTPK

SEQ ID NO: 50287 - protein, 43 aa, Artificial Sequence; identical to SEQ ID NO: 17977
  GFR-binding peptide
  MOD_RES (1)..(3)..(40): Xaa is C or S

SEQ ID NO: 50288 - protein, 41 aa, Artificial Sequence; identical to SEQ ID NO: 17978
  GFR-binding peptide
  MOD_RES (1)..(3)..(40): Xaa is C or S
  MOD_RES (16)..(17)..(18)..(19)..(20): Xaa is A or G
  MOD_RES (21)..(22)..(23)..(24): Xaa is A or G or is absent

SEQ ID NO: 50289 - protein, 40 aa, Artificial Sequence
  GFR-binding peptide
  MOD_RES (1)..(35)..(36): Xaa is C or S
  MOD_RES (13)..(14)..(15)..(16)..(17): Xaa is A or G
  MOD_RES (18)..(19)..(20)..(21): Xaa is A or G or is absent
XSRVVMNVTAKKXXXXXXXXXIKRVQVPRLKTPAXXPKPV

SEQ ID NO: 50290 - protein, 41 aa, Artificial Sequence; identical to SEQ ID NO: 17980
  GFR-binding peptide
  MOD_RES (2)..(36): Xaa is C or S
  MOD_RES (14)..(15)..(16)..(17)..(18): Xaa is A or G
  MOD_RES (19)..(20)..(21)..(22): Xaa is A or G or is absent

SEQ ID NO: 50291 - protein, 41 aa, Artificial Sequence; identical to SEQ ID NO: 17983
  GFR-binding peptide
  MOD_RES (1)..(38): Xaa is C or S

SEQ ID NO: 50292 - protein, 36 aa, Artificial Sequence
  GFR-binding peptide
  MOD_RES (33)..(34): Xaa is C or S
  MOD_RES (11)..(12)..(13)..(14)..(15): Xaa is A or G
  MOD_RES (16)..(17)..(18)..(19): Xaa is A or G or is absent
SKVVMSMEGIXXXXXXXXXMIQITINSLDQPVXXPS

SEQ ID NO: 50293 - protein, 38 aa, Artificial Sequence
  GFR-binding peptide
  MOD_RES (32)..(33): Xaa is C or S
GEVVMEVTAKKVVKDYEDIKRMQVPRLETPVXXAKPIS

SEQ ID NO: 50294 - protein, 37 aa, Artificial Sequence; identical to SEQ ID NO: 12760
  GFR-binding peptide
  MOD_RES (31)..(32): Xaa is C or S

SEQ ID NO: 50295 - protein, 38 aa, Artificial Sequence
  GFR-binding peptide
  MOD_RES (1)..(38): Xaa is C or S
  MOD_RES (14)..(15)..(16)..(17)..(18): Xaa is A or G
  MOD_RES (19)..(20)..(21)..(22): Xaa is A or G or is absent
XALHDELTNSLQEXXXXXXXXXYYLVTLPELQVQTPRX

SEQ ID NO: 50296 - protein, 33 aa, Artificial Sequence; identical to SEQ ID NO: 12761
  GFR-binding peptide
  MOD_RES (32)..(33): Xaa is C or S

SEQ ID NO: 50297 - protein, 38 aa, Artificial Sequence
  GFR-binding peptide
  MOD_RES (1)..(3)..(35)..(36): Xaa is C or S
XGXGEVVMEVTAKKVVKDYEDIKRMQVPRLETPVXXAK

SEQ ID NO: 50298 - protein, 38 aa, Artificial Sequence; identical to SEQ ID NO: 12762
  GFR-binding peptide
  MOD_RES (34)..(34): Xaa is C or S
  MOD_RES (12)..(13)..(14)..(15)..(16): Xaa is A or G
  MOD_RES (17)..(18)..(19)..(20): Xaa is A or G or is absent

SEQ ID NO: 50299 - protein, 39 aa, Artificial Sequence; identical to SEQ ID NO: 17990
  GFR-binding peptide
  MOD_RES (2)..(39): Xaa is C or S
  MOD_RES (15)..(16)..(17)..(18)..(19): Xaa is A or G
  MOD_RES (20)..(21)..(22)..(23): Xaa is A or G or is absent

SEQ ID NO: 50300 - protein, 40 aa, Artificial Sequence; identical to SEQ ID NO: 17991
  GFR-binding peptide
  MOD_RES (1)..(35): Xaa is C or S
  MOD_RES (13)..(14)..(15)..(16)..(17): Xaa is A or G
  MOD_RES (18)..(19)..(20)..(21): Xaa is A or G or is absent

SEQ ID NO: 50301 - protein, 37 aa, Artificial Sequence
  GFR-binding peptide
  MOD_RES (2)..(35)..(36): Xaa is C or S
  MOD_RES (13)..(14)..(15)..(16)..(17): Xaa is A or G
  MOD_RES (18)..(19)..(20)..(21): Xaa is A or G or is absent
KXSRVIMSMEGIXXXXXXXXXMIQITINSLAQPVXXP

SEQ ID NO: 50302 - protein, 39 aa, Artificial Sequence; identical to SEQ ID NO: 17992
  GFR-binding peptide
  MOD_RES (36)..(36): Xaa is C or S

SEQ ID NO: 50303 - protein, 40 aa, Artificial Sequence
  GFR-binding peptide
  MOD_RES (1)..(3)..(37)..(38): Xaa is C or S
  MOD_RES (15)..(16)..(17)..(18)..(19): Xaa is A or G
  MOD_RES (20)..(21)..(22)..(23): Xaa is A or G or is absent
XGXGEVVMESMEGIXXXXXXXXXMIQMTINSLETPVXXAK

SEQ ID NO: 50304 - protein, 41 aa, Artificial Sequence; identical to SEQ ID NO: 12771
  GFR-binding peptide
  MOD_RES (1)..(35)..(36): Xaa is C or S
  MOD_RES (13)..(14)..(15)..(16)..(17): Xaa is A or G
  MOD_RES (18)..(19)..(20)..(21): Xaa is A or G or is absent

SEQ ID NO: 50305 - protein, 36 aa, Artificial Sequence
  GFR-binding peptide
  MOD_RES (1)..(35): Xaa is C or S
  MOD_RES (13)..(14)..(15)..(16)..(17): Xaa is A or G
  MOD_RES (18)..(19)..(20)..(21): Xaa is A or G or is absent
XSRVVMNSMEGIXXXXXXXXXMIQVTINSLKTPAXT

SEQ ID NO: 50306 - protein, 37 aa, Artificial Sequence
  GFR-binding peptide
  MOD_RES (2)..(4)..(36)..(37): Xaa is C or S
HXGXSRVVMNVTAKKIVNSSDDIKRVQVPRLKTPAXX

SEQ ID NO: 50307 - protein, 37 aa, Artificial Sequence
  GFR-binding peptide
  MOD_RES (33)..(34): Xaa is C or S
  MOD_RES (11)..(12)..(13)..(14)..(15): Xaa is A or G
  MOD_RES (16)..(17)..(18)..(19): Xaa is A or G or is absent
RVVMNSMEGIXXXXXXXXXMIQVTINSLQTPAXXPKP

SEQ ID NO: 50308 - protein, 36 aa, Artificial Sequence; identical to SEQ ID NO: 12774
  GFR-binding peptide
  MOD_RES (2)..(4)..(35)..(36): Xaa is C or S

SEQ ID NO: 50309 - protein, 38 aa, Artificial Sequence
  GFR-binding peptide
  MOD_RES (2)..(4): Xaa is C or S
  MOD_RES (17)..(18)..(19)..(20)..(21): Xaa is A or G
  MOD_RES (22)..(23)..(24)..(25): Xaa is A or G or is absent
AXAXELHEELRNSLQEXXXXXXXXXYYVVPLPEHHVRS

SEQ ID NO: 50310 - protein, 43 aa, Artificial Sequence; identical to SEQ ID NO: 17993
  GFR-binding peptide
  MOD_RES (2)..(4)..(41): Xaa is C or S
  MOD_RES (17)..(18)..(19)..(20)..(21): Xaa is A or G
  MOD_RES (22)..(23)..(24)..(25): Xaa is A or G or is absent

SEQ ID NO: 50311 - protein, 33 aa, Artificial Sequence; identical to SEQ ID NO: 12779
  GFR-binding peptide
  MOD_RES (1)..(33): Xaa is C or S

SEQ ID NO: 50312 - protein, 39 aa, Artificial Sequence; identical to SEQ ID NO: 12780
  GFR-binding peptide
  MOD_RES (1)..(33): Xaa is C or S

SEQ ID NO: 50313 - protein, 36 aa, Artificial Sequence
  GFR-binding peptide
  MOD_RES (2)..(4)..(35)..(36): Xaa is C or S
SXKXSKVIMVTAKKIKPTKGIIKRIQVPRLDQSVXX

SEQ ID NO: 50314 - protein, 36 aa, Artificial Sequence; identical to SEQ ID NO: 12787
  GFR-binding peptide
  MOD_RES (31)..(32): Xaa is C or S

SEQ ID NO: 50315 - protein, 38 aa, Artificial Sequence; identical to SEQ ID NO: 12790
  GFR-binding peptide
  MOD_RES (32)..(33): Xaa is C or S

SEQ ID NO: 50316 - protein, 37 aa, Artificial Sequence; identical to SEQ ID NO: 12792
  GFR-binding peptide
  MOD_RES (1)..(33)..(34): Xaa is C or S

SEQ ID NO: 50317 - protein, 37 aa, Artificial Sequence
  GFR-binding peptide
  MOD_RES (1)..(33)..(34): Xaa is C or S
XARVVMNVQVEKIVNSSDDVKAVKVSRLQTPAXXPKP

SEQ ID NO: 50318 - protein, 40 aa, Artificial Sequence; identical to SEQ ID NO: 12794
  GFR-binding peptide
  MOD_RES (2)..(4)..(35)..(36): Xaa is C or S

SEQ ID NO: 50319 - protein, 41 aa, Artificial Sequence
  GFR-binding peptide
  MOD_RES (1)..(3)..(37): Xaa is C or S
  MOD_RES (15)..(16)..(17)..(18)..(19): Xaa is A or G
  MOD_RES (20)..(21)..(22)..(23): Xaa is A or G or is absent
XEXKNHQLFNSLQEXXXXXXXXXYYVMPLPEEETPVXELGE

SEQ ID NO: 50320 - protein, 37 aa, Artificial Sequence; identical to SEQ ID NO: 12796
  GFR-binding peptide
  MOD_RES (1)..(3)..(34)..(35): Xaa is C or S

SEQ ID NO: 50321 - protein, 44 aa, Artificial Sequence; identical to SEQ ID NO: 17997
  GFR-binding peptide
  MOD_RES (1)..(3)..(40): Xaa is C or S

SEQ ID NO: 50322 - protein, 36 aa, Artificial Sequence
  GFR-binding peptide
  MOD_RES (33)..(34): Xaa is C or S
  MOD_RES (11)..(12)..(13)..(14)..(15): Xaa is A or G
  MOD_RES (16)..(17)..(18)..(19): Xaa is A or G or is absent
EVVMEVQVEKXXXXXXXXXVKAMKVSRLETPVXXAK

SEQ ID NO: 50323 - protein, 42 aa, Artificial Sequence; identical to SEQ ID NO: 17998
  GFR-binding peptide
  MOD_RES (1)..(38): Xaa is C or S
  MOD_RES (14)..(15)..(16)..(17)..(18): Xaa is A or G
  MOD_RES (19)..(20)..(21)..(22): Xaa is A or G or is absent

SEQ ID NO: 50324 - protein, 38 aa, Artificial Sequence; identical to SEQ ID NO: 17999
  GFR-binding peptide
  MOD_RES (36)..(36): Xaa is C or S

SEQ ID NO: 50325 - protein, 38 aa, Artificial Sequence; identical to SEQ ID NO: 18000
  GFR-binding peptide
  MOD_RES (2)..(4): Xaa is C or S
  MOD_RES (17)..(18)..(19)..(20)..(21): Xaa is A or G
  MOD_RES (22)..(23)..(24)..(25): Xaa is A or G or is absent

SEQ ID NO: 50326 - protein, 41 aa, Artificial Sequence
  GFR-binding peptide
  MOD_RES (2)..(4)..(41): Xaa is C or S
  MOD_RES (17)..(18)..(19)..(20)..(21): Xaa is A or G
  MOD_RES (22)..(23)..(24)..(25): Xaa is A or G or is absent
AXAXELHEELRNSLQEXXXXXXXXXYYLVTLPEHHVRSPQX

SEQ ID NO: 50327 - protein, 38 aa, Artificial Sequence; identical to SEQ ID NO: 12797
  GFR-binding peptide
  MOD_RES (2)..(4)..(37)..(38): Xaa is C or S
  MOD_RES (15)..(16)..(17)..(18)..(19): Xaa is A or G
  MOD_RES (20)..(21)..(22)..(23): Xaa is A or G or is absent

SEQ ID NO: 50328 - protein, 41 aa, Artificial Sequence; identical to SEQ ID NO: 12798
  GFR-binding peptide
  MOD_RES (2)..(4)..(38)..(39): Xaa is C or S
  MOD_RES (16)..(17)..(18)..(19)..(20): Xaa is A or G
  MOD_RES (21)..(22)..(23)..(24): Xaa is A or G or is absent

SEQ ID NO: 50329 - protein, 33 aa, Artificial Sequence; identical to SEQ ID NO: 12799
  GFR-binding peptide
  MOD_RES (12)..(13)..(14)..(15)..(16): Xaa is A or G
  MOD_RES (17)..(18)..(19)..(20): Xaa is A or G or is absent

SEQ ID NO: 50330 - protein, 42 aa, Artificial Sequence
  GFR-binding peptide
  MOD_RES (1)..(3)..(37)..(38): Xaa is C or S
  MOD_RES (15)..(16)..(17)..(18)..(19): Xaa is A or G
  MOD_RES (20)..(21)..(22)..(23): Xaa is A or G or is absent
XGXSRVVMNVQVEKXXXXXXXXXVKAVKVSRLKTPAXXPKPV

SEQ ID NO: 50331 - protein, 30 aa, Artificial Sequence
  GFR-binding peptide
SRVIMVQVEKVKPKRGVVKAIKVSRLAQPV

SEQ ID NO: 50332 - protein, 34 aa, Artificial Sequence; identical to SEQ ID NO: 18002
  GFR-binding peptide

SEQ ID NO: 50333 - protein, 37 aa, Artificial Sequence
  GFR-binding peptide
  MOD_RES (34)..(34): Xaa is C or S
  MOD_RES (12)..(13)..(14)..(15)..(16): Xaa is A or G
  MOD_RES (17)..(18)..(19)..(20): Xaa is A or G or is absent
SRVVMNVQVEKXXXXXXXXXVKAVKVSRLKTPAXTPK

SEQ ID NO: 50334 - protein, 33 aa, Artificial Sequence
  GFR-binding peptide
  MOD_RES (32)..(33): Xaa is C or S
ARVVMNVQVEKIVNSSDDVKAVKVSRLQTPAXX

SEQ ID NO: 50335 - protein, 39 aa, Artificial Sequence
  GFR-binding peptide
  MOD_RES (34)..(35): Xaa is C or S
  MOD_RES (12)..(13)..(14)..(15)..(16): Xaa is A or G
  MOD_RES (17)..(18)..(19)..(20): Xaa is A or G or is absent
GEVVMDSMEGIXXXXXXXXXMIQMTINSLETPVXXAKPI

SEQ ID NO: 50336 - protein, 35 aa, Artificial Sequence
  GFR-binding peptide
  MOD_RES (2)..(2): Xaa is C or S
  MOD_RES (14)..(15)..(16)..(17)..(18): Xaa is A or G
  MOD_RES (19)..(20)..(21)..(22): Xaa is A or G or is absent
GXARVVMNVTAKKXXXXXXXXXIKRVQVPRLQTPA

SEQ ID NO: 50337 - protein, 37 aa, Artificial Sequence
  GFR-binding peptide
  MOD_RES (1)..(33)..(34): Xaa is C or S
XSRVVMNVTAKKIVNSSDDIKRVQVPRLKTPAXXPKP

SEQ ID NO: 50338 - protein, 35 aa, Artificial Sequence; identical to SEQ ID NO: 18006
  GFR-binding peptide
  MOD_RES (35)..(35): Xaa is C or S
  MOD_RES (11)..(12)..(13)..(14)..(15): Xaa is A or G
  MOD_RES (16)..(17)..(18)..(19): Xaa is A or G or is absent

SEQ ID NO: 50339 - protein, 41 aa, Artificial Sequence
  GFR-binding peptide
  MOD_RES (1)..(38): Xaa is C or S
  MOD_RES (14)..(15)..(16)..(17)..(18): Xaa is A or G
  MOD_RES (19)..(20)..(21)..(22): Xaa is A or G or is absent
XALHDELTNSLQEXXXXXXXXXYYVVPLPELQVQTPRXQVN

SEQ ID NO: 50340 - protein, 36 aa, Artificial Sequence; identical to SEQ ID NO: 18007
  GFR-binding peptide
  MOD_RES (2)..(2): Xaa is C or S
  MOD_RES (15)..(16)..(17)..(18)..(19): Xaa is A or G
  MOD_RES (20)..(21)..(22)..(23): Xaa is A or G or is absent

SEQ ID NO: 50341 - protein, 31 aa, Artificial Sequence; identical to SEQ ID NO: 37253
  GFR-binding peptide
  MOD_RES (1)..(1): Xaa is C or S

SEQ ID NO: 50342 - protein, 39 aa, Artificial Sequence; identical to SEQ ID NO: 12803
  GFR-binding peptide
  MOD_RES (2)..(4)..(36): Xaa is C or S

SEQ ID NO: 50343 - protein, 41 aa, Artificial Sequence; identical to SEQ ID NO: 18009
  GFR-binding peptide
  MOD_RES (1)..(3)..(40): Xaa is C or S

SEQ ID NO: 50344 - protein, 38 aa, Artificial Sequence
  GFR-binding peptide
  MOD_RES (33)..(33): Xaa is C or S
  MOD_RES (11)..(12)..(13)..(14)..(15): Xaa is A or G
  MOD_RES (16)..(17)..(18)..(19): Xaa is A or G or is absent
NHQLFNSLQEXXXXXXXXXYYVMPLPEEETPVXELGED

SEQ ID NO: 50345 - protein, 33 aa, Artificial Sequence
  GFR-binding peptide
  MOD_RES (31)..(32): Xaa is C or S
SKVVMVQVEKVKPTRGVVKAIKVSRLDQPVXXP

SEQ ID NO: 50346 - protein, 37 aa, Artificial Sequence
  GFR-binding peptide
  MOD_RES (2)..(33)..(34): Xaa is C or S
KXSKVVMVQVEKVKPTRGVVKAIKVSRLDQPVXXPSA

SEQ ID NO: 50347 - protein, 41 aa, Artificial Sequence
  GFR-binding peptide
  MOD_RES (1)..(3)..(36)..(37): Xaa is C or S
  MOD_RES (14)..(15)..(16)..(17)..(18): Xaa is A or G
  MOD_RES (19)..(20)..(21)..(22): Xaa is A or G or is absent
XKXSRVIMVTAKKXXXXXXXXXIKRIQVPRLAQPVXXPAAS

SEQ ID NO: 50348 - protein, 36 aa, Artificial Sequence; identical to SEQ ID NO: 12806
  GFR-binding peptide
  MOD_RES (31)..(32): Xaa is C or S

SEQ ID NO: 50349 - protein, 34 aa, Artificial Sequence; identical to SEQ ID NO: 18010
  GFR-binding peptide
  MOD_RES (12)..(13)..(14)..(15)..(16): Xaa is A or G
  MOD_RES (17)..(18)..(19)..(20): Xaa is A or G or is absent

SEQ ID NO: 50350 - protein, 35 aa, Artificial Sequence; identical to SEQ ID NO: 18011
  GFR-binding peptide
  MOD_RES (35)..(35): Xaa is C or S
  MOD_RES (11)..(12)..(13)..(14)..(15): Xaa is A or G
  MOD_RES (16)..(17)..(18)..(19): Xaa is A or G or is absent

SEQ ID NO: 50351 - protein, 35 aa, Artificial Sequence; identical to SEQ ID NO: 12807
  GFR-binding peptide
  MOD_RES (34)..(35): Xaa is C or S
  MOD_RES (12)..(13)..(14)..(15)..(16): Xaa is A or G
  MOD_RES (17)..(18)..(19)..(20): Xaa is A or G or is absent

SEQ ID NO: 50352 - protein, 41 aa, Artificial Sequence
  GFR-binding peptide
  MOD_RES (2)..(39): Xaa is C or S
  MOD_RES (15)..(16)..(17)..(18)..(19): Xaa is A or G
  MOD_RES (20)..(21)..(22)..(23): Xaa is A or G or is absent
AXELHEELRNSLQEXXXXXXXXXYYLVTLPEHHVRSPQXKV

SEQ ID NO: 50353 - protein, 31 aa, Artificial Sequence
  GFR-binding peptide
ARVVMNVTAKKIVNSSDDIKRVQVPRLQTPA

SEQ ID NO: 50354 - protein, 38 aa, Artificial Sequence; identical to SEQ ID NO: 18013
  GFR-binding peptide
  MOD_RES (1)..(35): Xaa is C or S

SEQ ID NO: 50355 - protein, 33 aa, Artificial Sequence; identical to SEQ ID NO: 18014
  GFR-binding peptide

SEQ ID NO: 50356 - protein, 42 aa, Artificial Sequence; identical to SEQ ID NO: 18015
  GFR-binding peptide
  MOD_RES (1)..(3)..(40): Xaa is C or S
  MOD_RES (16)..(17)..(18)..(19)..(20): Xaa is A or G
  MOD_RES (21)..(22)..(23)..(24): Xaa is A or G or is absent

SEQ ID NO: 50357 - protein, 39 aa, Artificial Sequence
  GFR-binding peptide
  MOD_RES (2)..(4)..(38)..(39): Xaa is C or S
  MOD_RES (16)..(17)..(18)..(19)..(20): Xaa is A or G
  MOD_RES (21)..(22)..(23)..(24): Xaa is A or G or is absent
HXGXSRVVMNSMEGIXXXXXXXXXMIQVTINSLKTPAXX

SEQ ID NO: 50358 - protein, 41 aa, Artificial Sequence
  GFR-binding peptide
  MOD_RES (2)..(36): Xaa is C or S
  MOD_RES (14)..(15)..(16)..(17)..(18): Xaa is A or G
  MOD_RES (19)..(20)..(21)..(22): Xaa is A or G or is absent
EXKNHQLFNSLQEXXXXXXXXXYYLMTLPEEETPVXELGED

SEQ ID NO: 50359 - protein, 39 aa, Artificial Sequence
  GFR-binding peptide
  MOD_RES (33)..(34): Xaa is C or S
  MOD_RES (11)..(12)..(13)..(14)..(15): Xaa is A or G
  MOD_RES (16)..(17)..(18)..(19): Xaa is A or G or is absent
SKVIMVTAKKXXXXXXXXXIKRIQVPRLDQSVXXPSASA

SEQ ID NO: 50360 - protein, 40 aa, Artificial Sequence; identical to SEQ ID NO: 12813
  GFR-binding peptide
  MOD_RES (1)..(3)..(37)..(38): Xaa is C or S
  MOD_RES (15)..(16)..(17)..(18)..(19): Xaa is A or G
  MOD_RES (20)..(21)..(22)..(23): Xaa is A or G or is absent

SEQ ID NO: 50361 - protein, 38 aa, Artificial Sequence; identical to SEQ ID NO: 18018
  GFR-binding peptide
  MOD_RES (1)..(38): Xaa is C or S
  MOD_RES (14)..(15)..(16)..(17)..(18): Xaa is A or G
  MOD_RES (19)..(20)..(21)..(22): Xaa is A or G or is absent

SEQ ID NO: 50362 - protein, 38 aa, Artificial Sequence
  GFR-binding peptide
  MOD_RES (2)..(2): Xaa is C or S
KXALHDELTNSLQEFIPKKRVIEYYLVTLPELQVQTPR

SEQ ID NO: 50363 - protein, 35 aa, Artificial Sequence
  GFR-binding peptide
  MOD_RES (32)..(33): Xaa is C or S
GEVVMEVQVEKVVKDYEDVKAMKVSRLETPVXXAK

SEQ ID NO: 50364 - protein, 32 aa, Artificial Sequence; identical to SEQ ID NO: 12814
  GFR-binding peptide
  MOD_RES (31)..(32): Xaa is C or S

SEQ ID NO: 50365 - protein, 36 aa, Artificial Sequence; identical to SEQ ID NO: 18020
  GFR-binding peptide
  MOD_RES (33)..(33): Xaa is C or S
  MOD_RES (11)..(12)..(13)..(14)..(15): Xaa is A or G
  MOD_RES (16)..(17)..(18)..(19): Xaa is A or G or is absent

SEQ ID NO: 50366 - protein, 39 aa, Artificial Sequence; identical to SEQ ID NO: 18022
  GFR-binding peptide
  MOD_RES (2)..(4)..(38): Xaa is C or S
  MOD_RES (16)..(17)..(18)..(19)..(20): Xaa is A or G
  MOD_RES (21)..(22)..(23)..(24): Xaa is A or G or is absent

SEQ ID NO: 50367 - protein, 37 aa, Artificial Sequence
  GFR-binding peptide
  MOD_RES (1)..(3)..(34)..(35): Xaa is C or S
XKXSRVIMSMEGIVKPKRGVMIQITINSLAQPVXXPA

SEQ ID NO: 50368 - protein, 39 aa, Artificial Sequence; identical to SEQ ID NO: 12817
  GFR-binding peptide
  MOD_RES (2)..(4)..(36)..(37): Xaa is C or S

SEQ ID NO: 50369 - protein, 40 aa, Artificial Sequence
  GFR-binding peptide
  MOD_RES (2)..(4)..(35)..(36): Xaa is C or S
SXKXSKVVMVTAKKVKPTRGVIKRIQVPRLDQPVXXPSAS

SEQ ID NO: 50370 - protein, 41 aa, Artificial Sequence; identical to SEQ ID NO: 18026
  GFR-binding peptide
  MOD_RES (2)..(4)..(38): Xaa is C or S
  MOD_RES (16)..(17)..(18)..(19)..(20): Xaa is A or G
  MOD_RES (21)..(22)..(23)..(24): Xaa is A or G or is absent

SEQ ID NO: 50371 - protein, 35 aa, Artificial Sequence; identical to SEQ ID NO: 12820
  GFR-binding peptide
  MOD_RES (2)..(4): Xaa is C or S

SEQ ID NO: 50372 - protein, 36 aa, Artificial Sequence
  GFR-binding peptide
  MOD_RES (33)..(34): Xaa is C or S
  MOD_RES (11)..(12)..(13)..(14)..(15): Xaa is A or G
  MOD_RES (16)..(17)..(18)..(19): Xaa is A or G or is absent
RVVMNVQVEKXXXXXXXXXVKAVKVSRLQTPAXXPK

SEQ ID NO: 50373 - protein, 38 aa, Artificial Sequence; identical to SEQ ID NO: 18029
  GFR-binding peptide
  MOD_RES (2)..(4)..(38): Xaa is C or S

SEQ ID NO: 50374 - protein, 38 aa, Artificial Sequence; identical to SEQ ID NO: 12822
  GFR-binding peptide
  MOD_RES (1)..(34)..(35): Xaa is C or S
  MOD_RES (12)..(13)..(14)..(15)..(16): Xaa is A or G
  MOD_RES (17)..(18)..(19)..(20): Xaa is A or G or is absent

SEQ ID NO: 50375 - protein, 45 aa, Artificial Sequence
  GFR-binding peptide
  MOD_RES (2)..(4)..(41): Xaa is C or S
AXAXELHEELRNSLQELKPKKRVYEYYLVTLPEHHVRSPQXKVSS

SEQ ID NO: 50376 - protein, 37 aa, Artificial Sequence; identical to SEQ ID NO: 18030
  GFR-binding peptide
  MOD_RES (2)..(2): Xaa is C or S

SEQ ID NO: 50377 - protein, 36 aa, Artificial Sequence; identical to SEQ ID NO: 12823
  GFR-binding peptide
  MOD_RES (2)..(36): Xaa is C or S
  MOD_RES (14)..(15)..(16)..(17)..(18): Xaa is A or G
  MOD_RES (19)..(20)..(21)..(22): Xaa is A or G or is absent

SEQ ID NO: 50378 - protein, 34 aa, Artificial Sequence
  GFR-binding peptide
  MOD_RES (2)..(33)..(34): Xaa is C or S
KXSKVIMVQVEKIKPTKGIVKAIKVSRLDQSVXX

SEQ ID NO: 50379 - protein, 37 aa, Artificial Sequence
  GFR-binding peptide
  MOD_RES (1)..(32)..(33): Xaa is C or S
XSRVIMVQVEKVKPKRGVVKAIKVSRLAQPVXXPAAS

SEQ ID NO: 50380 - protein, 39 aa, Artificial Sequence
  GFR-binding peptide
  MOD_RES (1)..(3)..(37): Xaa is C or S
  MOD_RES (15)..(16)..(17)..(18)..(19): Xaa is A or G
  MOD_RES (20)..(21)..(22)..(23): Xaa is A or G or is absent
XEXKNHQLFNSLQEXXXXXXXXXYYVMPLPEEETPVXEL

SEQ ID NO: 50381 - protein, 36 aa, Artificial Sequence; identical to SEQ ID NO: 12829
  GFR-binding peptide
  MOD_RES (2)..(33)..(34): Xaa is C or S

SEQ ID NO: 50382 - protein, 36 aa, Artificial Sequence; identical to SEQ ID NO: 12831
  GFR-binding peptide
  MOD_RES (2)..(4)..(36): Xaa is C or S

SEQ ID NO: 50383 - protein, 40 aa, Artificial Sequence; identical to SEQ ID NO: 18032
  GFR-binding peptide
  MOD_RES (2)..(4): Xaa is C or S
  MOD_RES (17)..(18)..(19)..(20)..(21): Xaa is A or G
  MOD_RES (22)..(23)..(24)..(25): Xaa is A or G or is absent

SEQ ID NO: 50384 - protein, 41 aa, Artificial Sequence
  GFR-binding peptide
  MOD_RES (1)..(3)..(35)..(36): Xaa is C or S
XGXGEVVMDVQVEKVVKENEDVKAMKVSRLETPVXXAKPIK

SEQ ID NO: 50385 - protein, 43 aa, Artificial Sequence
  GFR-binding peptide
  MOD_RES (1)..(3)..(40): Xaa is C or S
  MOD_RES (16)..(17)..(18)..(19)..(20): Xaa is A or G
  MOD_RES (21)..(22)..(23)..(24): Xaa is A or G or is absent
XKXALHDELTNSLQEXXXXXXXXXYYVVPLPELQVQTPRXQVN

SEQ ID NO: 50386 - protein, 40 aa, Artificial Sequence
  GFR-binding peptide
  MOD_RES (2)..(4)..(35)..(36): Xaa is C or S
SXKXSRVIMSMEGIVKPKRGVMIQITINSLAQPVXXPAAS

SEQ ID NO: 50387 - protein, 37 aa, Artificial Sequence; identical to SEQ ID NO: 12833
  GFR-binding peptide
  MOD_RES (1)..(32)..(33): Xaa is C or S

SEQ ID NO: 50388 - protein, 31 aa, Artificial Sequence
  GFR-binding peptide
  MOD_RES (31)..(31): Xaa is C or S
EVVMDVQVEKVVKENEDVKAMKVSRLETPVX

SEQ ID NO: 50389 - protein, 31 aa, Artificial Sequence; identical to SEQ ID NO: 12834
  GFR-binding peptide
  MOD_RES (31)..(31): Xaa is C or S

SEQ ID NO: 50390 - protein, 37 aa, Artificial Sequence; identical to SEQ ID NO: 12835
  GFR-binding peptide
  MOD_RES (2)..(36)..(37): Xaa is C or S
  MOD_RES (14)..(15)..(16)..(17)..(18): Xaa is A or G
  MOD_RES (19)..(20)..(21)..(22): Xaa is A or G or is absent

SEQ ID NO: 50391 - protein, 34 aa, Artificial Sequence
  GFR-binding peptide
  MOD_RES (1)..(3): Xaa is C or S
XGXGEVVMDSMEGIVVKENEDMIQMTINSLETPV

SEQ ID NO: 50392 - protein, 38 aa, Artificial Sequence; identical to SEQ ID NO: 12837
  GFR-binding peptide
  MOD_RES (33)..(34): Xaa is C or S
  MOD_RES (11)..(12)..(13)..(14)..(15): Xaa is A or G
  MOD_RES (16)..(17)..(18)..(19): Xaa is A or G or is absent

SEQ ID NO: 50393 - protein, 35 aa, Artificial Sequence; identical to SEQ ID NO: 12838
  GFR-binding peptide
  MOD_RES (2)..(4): Xaa is C or S

SEQ ID NO: 50394 - protein, 42 aa, Artificial Sequence
  GFR-binding peptide
  MOD_RES (2)..(4)..(41): Xaa is C or S
  MOD_RES (17)..(18)..(19)..(20)..(21): Xaa is A or G
  MOD_RES (22)..(23)..(24)..(25): Xaa is A or G or is absent
AXAXELHEELRNSLQEXXXXXXXXXYYLVTLPEHHVRSPQXK

SEQ ID NO: 50395 - protein, 39 aa, Artificial Sequence
  GFR-binding peptide
  MOD_RES (33)..(34): Xaa is C or S
  MOD_RES (11)..(12)..(13)..(14)..(15): Xaa is A or G
  MOD_RES (16)..(17)..(18)..(19): Xaa is A or G or is absent
RVVMNVTAKKXXXXXXXXXIKRVQVPRLQTPAXXPKPVT

SEQ ID NO: 50396 - protein, 32 aa, Artificial Sequence; identical to SEQ ID NO: 12840
  GFR-binding peptide
  MOD_RES (31)..(32): Xaa is C or S

SEQ ID NO: 50397 - protein, 37 aa, Artificial Sequence
  GFR-binding peptide
  MOD_RES (33)..(34): Xaa is C or S
  MOD_RES (11)..(12)..(13)..(14)..(15): Xaa is A or G
  MOD_RES (16)..(17)..(18)..(19): Xaa is A or G or is absent
EVVMESMEGIXXXXXXXXXMIQMTINSLETPVXXAKP

SEQ ID NO: 50398 - protein, 37 aa, Artificial Sequence; identical to SEQ ID NO: 37312
  GFR-binding peptide
  MOD_RES (2)..(4)..(37): Xaa is C or S
  MOD_RES (15)..(16)..(17)..(18)..(19): Xaa is A or G
  MOD_RES (20)..(21)..(22)..(23): Xaa is A or G or is absent

SEQ ID NO: 50399 - protein, 34 aa, Artificial Sequence
  GFR-binding peptide
  MOD_RES (1)..(34): Xaa is C or S
  MOD_RES (12)..(13)..(14)..(15)..(16): Xaa is A or G
  MOD_RES (17)..(18)..(19)..(20): Xaa is A or G or is absent
XSKVVMVTAKKXXXXXXXXXIKRIQVPRLDQPVX

SEQ ID NO: 50400 - protein, 38 aa, Artificial Sequence
  GFR-binding peptide
  MOD_RES (2)..(2): Xaa is C or S
  MOD_RES (15)..(16)..(17)..(18)..(19): Xaa is A or G
  MOD_RES (20)..(21)..(22)..(23): Xaa is A or G or is absent
KXALHDELTNSLQEXXXXXXXXXYYLVTLPELQVQTPR

SEQ ID NO: 50401 - protein, 39 aa, Artificial Sequence; identical to SEQ ID NO: 18041
  GFR-binding peptide
  MOD_RES (37)..(37): Xaa is C or S
  MOD_RES (13)..(14)..(15)..(16)..(17): Xaa is A or G
  MOD_RES (18)..(19)..(20)..(21): Xaa is A or G or is absent

SEQ ID NO: 50402 - protein, 35 aa, Artificial Sequence
  GFR-binding peptide
  MOD_RES (33)..(33): Xaa is C or S
NHQLFNSLQEHQGQHPKIRYYVMPLPEEETPVXEL

SEQ ID NO: 50403 - protein, 43 aa, Artificial Sequence
  GFR-binding peptide
  MOD_RES (2)..(4)..(38): Xaa is C or S
  MOD_RES (16)..(17)..(18)..(19)..(20): Xaa is A or G
  MOD_RES (21)..(22)..(23)..(24): Xaa is A or G or is absent
RXEXKNHQLFNSLQEXXXXXXXXXYYLMTLPEEETPVXELGED

SEQ ID NO: 50404 - protein, 40 aa, Artificial Sequence; identical to SEQ ID NO: 18044
  GFR-binding peptide
  MOD_RES (2)..(39): Xaa is C or S

SEQ ID NO: 50405 - protein, 41 aa, Artificial Sequence
  GFR-binding peptide
  MOD_RES (2)..(36)..(37): Xaa is C or S
  MOD_RES (14)..(15)..(16)..(17)..(18): Xaa is A or G
  MOD_RES (19)..(20)..(21)..(22): Xaa is A or G or is absent
GXGEVVMDVQVEKXXXXXXXXXVKAMKVSRLETPVXXAKPI

SEQ ID NO: 50406 - protein, 39 aa, Artificial Sequence; identical to SEQ ID NO: 12847
  GFR-binding peptide
  MOD_RES (1)..(3)..(35)..(36): Xaa is C or S

SEQ ID NO: 50407 - protein, 36 aa, Artificial Sequence
  GFR-binding peptide
  MOD_RES (1)..(3): Xaa is C or S
  MOD_RES (15)..(16)..(17)..(18)..(19): Xaa is A or G
  MOD_RES (20)..(21)..(22)..(23): Xaa is A or G or is absent
XGXGEVVMDVQVEKXXXXXXXXXVKAMKVSRLETPV

SEQ ID NO: 50408 - protein, 38 aa, Artificial Sequence; identical to SEQ ID NO: 18048
  GFR-binding peptide
  MOD_RES (35)..(35): Xaa is C or S
  MOD_RES (11)..(12)..(13)..(14)..(15): Xaa is A or G
  MOD_RES (16)..(17)..(18)..(19): Xaa is A or G or is absent

SEQ ID NO: 50409 - protein, 36 aa, Artificial Sequence; identical to SEQ ID NO: 12849
  GFR-binding peptide
  MOD_RES (32)..(32): Xaa is C or S

SEQ ID NO: 50410 - protein, 36 aa, Artificial Sequence
  GFR-binding peptide
  MOD_RES (1)..(3)..(35): Xaa is C or S
XGXSRVVMNSMEGIIVNSSDDMIQVTINSLKTPAXT

SEQ ID NO: 50411 - protein, 34 aa, Artificial Sequence
  GFR-binding peptide
  MOD_RES (1)..(32)..(33): Xaa is C or S
XSKVVMVTAKKVKPTRGVIKRIQVPRLDQPVXXP

SEQ ID NO: 50412 - protein, 39 aa, Artificial Sequence; identical to SEQ ID NO: 18055
  GFR-binding peptide
  MOD_RES (1)..(38): Xaa is C or S
  MOD_RES (14)..(15)..(16)..(17)..(18): Xaa is A or G
  MOD_RES (19)..(20)..(21)..(22): Xaa is A or G or is absent

SEQ ID NO: 50413 - protein, 34 aa, Artificial Sequence
  GFR-binding peptide
  MOD_RES (2)..(2): Xaa is C or S
  MOD_RES (13)..(14)..(15)..(16)..(17): Xaa is A or G
  MOD_RES (18)..(19)..(20)..(21): Xaa is A or G or is absent
KXSKVVMVQVEKXXXXXXXXXVKAIKVSRLDQPV

SEQ ID NO: 50414 - protein, 44 aa, Artificial Sequence; identical to SEQ ID NO: 18057
  GFR-binding peptide
  MOD_RES (2)..(4)..(41): Xaa is C or S

SEQ ID NO: 50415 - protein, 43 aa, Artificial Sequence
  GFR-binding peptide
  MOD_RES (2)..(4)..(37)..(38): Xaa is C or S
  MOD_RES (15)..(16)..(17)..(18)..(19): Xaa is A or G
  MOD_RES (20)..(21)..(22)..(23): Xaa is A or G or is absent
SXKXSKVVMSMEGIXXXXXXXXXMIQITINSLDQPVXXPSASA

SEQ ID NO: 50416 - protein, 42 aa, Artificial Sequence
  GFR-binding peptide
  MOD_RES (2)..(39): Xaa is C or S
KXALHDELTNSLQEFIPKKRVIEYYLVTLPELQVQTPRXQVN

SEQ ID NO: 50417 - protein, 39 aa, Artificial Sequence
  GFR-binding peptide
  MOD_RES (33)..(34): Xaa is C or S
  MOD_RES (11)..(12)..(13)..(14)..(15): Xaa is A or G
  MOD_RES (16)..(17)..(18)..(19): Xaa is A or G or is absent
RVVMNVQVEKXXXXXXXXXVKAVKVSRLQTPAXXPKPVT

SEQ ID NO: 50418 - protein, 33 aa, Artificial Sequence; identical to SEQ ID NO: 18059
  GFR-binding peptide
  MOD_RES (12)..(13)..(14)..(15)..(16): Xaa is A or G
  MOD_RES (17)..(18)..(19)..(20): Xaa is A or G or is absent

SEQ ID NO: 50419 - protein, 36 aa, Artificial Sequence; identical to SEQ ID NO: 18061
  GFR-binding peptide
  MOD_RES (13)..(14)..(15)..(16)..(17): Xaa is A or G
  MOD_RES (18)..(19)..(20)..(21): Xaa is A or G or is absent

SEQ ID NO: 50420 - protein, 34 aa, Artificial Sequence; identical to SEQ ID NO: 12853
  GFR-binding peptide
  MOD_RES (1)..(33): Xaa is C or S

SEQ ID NO: 50421 - protein, 35 aa, Artificial Sequence; identical to SEQ ID NO: 12854
  GFR-binding peptide
  MOD_RES (31)..(32): Xaa is C or S

SEQ ID NO: 50422 - protein, 37 aa, Artificial Sequence
  GFR-binding peptide
  MOD_RES (34)..(34): Xaa is C or S
  MOD_RES (12)..(13)..(14)..(15)..(16): Xaa is A or G
  MOD_RES (17)..(18)..(19)..(20): Xaa is A or G or is absent
KNHQLFNSLQEXXXXXXXXXYYVMPLPEEETPVXELG

SEQ ID NO: 50423 - protein, 39 aa, Artificial Sequence
  GFR-binding peptide
  MOD_RES (2)..(35)..(36): Xaa is C or S
  MOD_RES (13)..(14)..(15)..(16)..(17): Xaa is A or G
  MOD_RES (18)..(19)..(20)..(21): Xaa is A or G or is absent
KXSKVVMVQVEKXXXXXXXXXVKAIKVSRLDQPVXXPSA

SEQ ID NO: 50424 - protein, 36 aa, Artificial Sequence; identical to SEQ ID NO: 18067
  GFR-binding peptide
  MOD_RES (2)..(2): Xaa is C or S

SEQ ID NO: 50425 - protein, 37 aa, Artificial Sequence
  GFR-binding peptide
  MOD_RES (33)..(34): Xaa is C or S
  MOD_RES (11)..(12)..(13)..(14)..(15): Xaa is A or G
  MOD_RES (16)..(17)..(18)..(19): Xaa is A or G or is absent
SKVIMSMEGIXXXXXXXXXMIQITINSLDQSVXXPSA

SEQ ID NO: 50426 - protein, 42 aa, Artificial Sequence; identical to SEQ ID NO: 18068
  GFR-binding peptide
  MOD_RES (2)..(4)..(41): Xaa is C or S
  MOD_RES (17)..(18)..(19)..(20)..(21): Xaa is A or G
  MOD_RES (22)..(23)..(24)..(25): Xaa is A or G or is absent

SEQ ID NO: 50427 - protein, 31 aa, Artificial Sequence
  GFR-binding peptide
SRVVMNSMEGIIVNSSDDMIQVTINSLKTPA

SEQ ID NO: 50428 - protein, 33 aa, Artificial Sequence; identical to SEQ ID NO: 12858
  GFR-binding peptide
  MOD_RES (12)..(13)..(14)..(15)..(16): Xaa is A or G
  MOD_RES (17)..(18)..(19)..(20): Xaa is A or G or is absent

SEQ ID NO: 50429 - protein, 40 aa, Artificial Sequence
  GFR-binding peptide
  MOD_RES (2)..(4)..(38)..(39): Xaa is C or S
  MOD_RES (16)..(17)..(18)..(19)..(20): Xaa is A or G
  MOD_RES (21)..(22)..(23)..(24): Xaa is A or G or is absent
RXGXGEVVMDSMEGIXXXXXXXXXMIQMTINSLETPVXXA

SEQ ID NO: 50430 - protein, 37 aa, Artificial Sequence; identical to SEQ ID NO: 37348
  GFR-binding peptide
  MOD_RES (2)..(33)..(34): Xaa is C or S

SEQ ID NO: 50431 - protein, 37 aa, Artificial Sequence
  GFR-binding peptide
  MOD_RES (1)..(3)..(36)..(37): Xaa is C or S
  MOD_RES (14)..(15)..(16)..(17)..(18): Xaa is A or G
  MOD_RES (19)..(20)..(21)..(22): Xaa is A or G or is absent
XKXSRVIMSMEGIXXXXXXXXXMIQITINSLAQPVXX

SEQ ID NO: 50432 - protein, 37 aa, Artificial Sequence; identical to SEQ ID NO: 37350
  GFR-binding peptide
  MOD_RES (2)..(4)..(35)..(36): Xaa is C or S

SEQ ID NO: 50433 - protein, 38 aa, Artificial Sequence
  GFR-binding peptide
  MOD_RES (1)..(3)..(37): Xaa is C or S
  MOD_RES (15)..(16)..(17)..(18)..(19): Xaa is A or G
  MOD_RES (20)..(21)..(22)..(23): Xaa is A or G or is absent
XGXSRVVMNSMEGIXXXXXXXXXMIQVTINSLKTPAXT

SEQ ID NO: 50434 - protein, 38 aa, Artificial Sequence
  GFR-binding peptide
  MOD_RES (33)..(34): Xaa is C or S
  MOD_RES (11)..(12)..(13)..(14)..(15): Xaa is A or G
  MOD_RES (16)..(17)..(18)..(19): Xaa is A or G or is absent
SRVIMSMEGIXXXXXXXXXMIQITINSLAQPVXXPAAS

SEQ ID NO: 50435 - protein, 41 aa, Artificial Sequence
  GFR-binding peptide
  MOD_RES (2)..(4)..(36): Xaa is C or S
HXGXSRVVMNVTAKKIVNSSDDIKRVQVPRLKTPAXTPKTV

SEQ ID NO: 50436 - protein, 37 aa, Artificial Sequence
  GFR-binding peptide
  MOD_RES (2)..(34)..(35): Xaa is C or S
GXSRVVMNSMEGIIVNSSDDMIQVTINSLKTPAXXPK

SEQ ID NO: 50437 - protein, 38 aa, Artificial Sequence; identical to SEQ ID NO: 18069
  GFR-binding peptide
  MOD_RES (35)..(35): Xaa is C or S
  MOD_RES (11)..(12)..(13)..(14)..(15): Xaa is A or G
  MOD_RES (16)..(17)..(18)..(19): Xaa is A or G or is absent

SEQ ID NO: 50438 - protein, 39 aa, Artificial Sequence; identical to SEQ ID NO: 12865
  GFR-binding peptide
  MOD_RES (1)..(3)..(37)..(38): Xaa is C or S
  MOD_RES (15)..(16)..(17)..(18)..(19): Xaa is A or G
  MOD_RES (20)..(21)..(22)..(23): Xaa is A or G or is absent

SEQ ID NO: 50439 - protein, 35 aa, Artificial Sequence
  GFR-binding peptide
  MOD_RES (34)..(35): Xaa is C or S
  MOD_RES (12)..(13)..(14)..(15)..(16): Xaa is A or G
  MOD_RES (17)..(18)..(19)..(20): Xaa is A or G or is absent
GEVVMDSMEGIXXXXXXXXXMIQMTINSLETPVXX

SEQ ID NO: 50440 - protein, 39 aa, Artificial Sequence
  GFR-binding peptide
  MOD_RES (2)..(4)..(38)..(39): Xaa is C or S
  MOD_RES (16)..(17)..(18)..(19)..(20): Xaa is A or G
  MOD_RES (21)..(22)..(23)..(24): Xaa is A or G or is absent
RXGXGEVVMDVQVEKXXXXXXXXXVKAMKVSRLETPVXX

SEQ ID NO: 50441 - protein, 36 aa, Artificial Sequence
  GFR-binding peptide
  MOD_RES (2)..(4)..(35)..(36): Xaa is C or S
SXKXSKVVMVQVEKVKPTRGVVKAIKVSRLDQPVXX

SEQ ID NO: 50442 - protein, 32 aa, Artificial Sequence
  GFR-binding peptide
  MOD_RES (31)..(32): Xaa is C or S
EVVMDVQVEKVVKENEDVKAMKVSRLETPVXX

SEQ ID NO: 50443 - protein, 38 aa, Artificial Sequence
  GFR-binding peptide
  MOD_RES (1)..(35)..(36): Xaa is C or S
  MOD_RES (13)..(14)..(15)..(16)..(17): Xaa is A or G
  MOD_RES (18)..(19)..(20)..(21): Xaa is A or G or is absent
XSRVVMNSMEGIXXXXXXXXXMIQVTINSLKTPAXXPK

SEQ ID NO: 50444 - protein, 32 aa, Artificial Sequence
  GFR-binding peptide
  MOD_RES (2)..(2): Xaa is C or S
KXSKVIMVQVEKIKPTKGIVKAIKVSRLDQSV

SEQ ID NO: 50445 - protein, 39 aa, Artificial Sequence; identical to SEQ ID NO: 12876
  GFR-binding peptide
  MOD_RES (2)..(4)..(35)..(36): Xaa is C or S

SEQ ID NO: 50446 - protein, 34 aa, Artificial Sequence
  GFR-binding peptide
  MOD_RES (32)..(33): Xaa is C or S
GEVVMDVQVEKVVKENEDVKAMKVSRLETPVXXA

SEQ ID NO: 50447 - protein, 36 aa, Artificial Sequence; identical to SEQ ID NO: 12877
  GFR-binding peptide
  MOD_RES (1)..(3): Xaa is C or S
  MOD_RES (15)..(16)..(17)..(18)..(19): Xaa is A or G
  MOD_RES (20)..(21)..(22)..(23): Xaa is A or G or is absent

SEQ ID NO: 50448 - protein, 36 aa, Artificial Sequence; identical to SEQ ID NO: 12878
  GFR-binding peptide
  MOD_RES (31)..(32): Xaa is C or S

SEQ ID NO: 50449 - protein, 39 aa, Artificial Sequence
  GFR-binding peptide
  MOD_RES (2)..(4)..(36)..(37): Xaa is C or S
RXGXGEVVMDSMEGIVVKENEDMIQMTINSLETPVXXAK

SEQ ID NO: 50450 - protein, 35 aa, Artificial Sequence
  GFR-binding peptide
  MOD_RES (2)..(35): Xaa is C or S
  MOD_RES (13)..(14)..(15)..(16)..(17): Xaa is A or G
  MOD_RES (18)..(19)..(20)..(21): Xaa is A or G or is absent
KXSKVVMVQVEKXXXXXXXXXVKAIKVSRLDQPVX

SEQ ID NO: 50451 - protein, 39 aa, Artificial Sequence
  GFR-binding peptide
  MOD_RES (1)..(3)..(37)..(38): Xaa is C or S
  MOD_RES (15)..(16)..(17)..(18)..(19): Xaa is A or G
  MOD_RES (20)..(21)..(22)..(23): Xaa is A or G or is absent
XGXARVVMNSMEGIXXXXXXXXXMIQVTINSLQTPAXXP

SEQ ID NO: 50452 - protein, 33 aa, Artificial Sequence; identical to SEQ ID NO: 12881
  GFR-binding peptide
  MOD_RES (32)..(32): Xaa is C or S

SEQ ID NO: 50453 - protein, 40 aa, Artificial Sequence
  GFR-binding peptide
  MOD_RES (2)..(4)..(38)..(39): Xaa is C or S
  MOD_RES (16)..(17)..(18)..(19)..(20): Xaa is A or G
  MOD_RES (21)..(22)..(23)..(24): Xaa is A or G or is absent
HXGXARVVMNVQVEKXXXXXXXXXVKAVKVSRLQTPAXXP

SEQ ID NO: 50454 - protein, 40 aa, Artificial Sequence
  GFR-binding peptide
  MOD_RES (2)..(39): Xaa is C or S
  MOD_RES (15)..(16)..(17)..(18)..(19): Xaa is A or G
  MOD_RES (20)..(21)..(22)..(23): Xaa is A or G or is absent
AXELHEELRNSLQEXXXXXXXXXYYVVPLPEHHVRSPQXK

SEQ ID NO: 50455 - protein, 40 aa, Artificial Sequence; identical to SEQ ID NO: 18077
  GFR-binding peptide
  MOD_RES (1)..(3)..(37): Xaa is C or S

SEQ ID NO: 50456 - protein, 44 aa, Artificial Sequence
  GFR-binding peptide
  MOD_RES (1)..(3)..(40): Xaa is C or S
  MOD_RES (16)..(17)..(18)..(19)..(20): Xaa is A or G
  MOD_RES (21)..(22)..(23)..(24): Xaa is A or G or is absent
XKXALHDELTNSLQEXXXXXXXXXYYVVPLPELQVQTPRXQVNR

SEQ ID NO: 50457 - protein, 32 aa, Artificial Sequence
  GFR-binding peptide
  MOD_RES (31)..(32): Xaa is C or S
EVVMEVQVEKVVKDYEDVKAMKVSRLETPVXX

SEQ ID NO: 50458 - protein, 37 aa, Artificial Sequence
  GFR-binding peptide
  MOD_RES (31)..(31): Xaa is C or S
RVVMNSMEGIIVNSSDDMIQVTINSLKTPAXTPKTVH

SEQ ID NO: 50459 - protein, 36 aa, Artificial Sequence; identical to SEQ ID NO: 12882
  GFR-binding peptide
  MOD_RES (1)..(33): Xaa is C or S

SEQ ID NO: 50460 - protein, 40 aa, Artificial Sequence
  GFR-binding peptide
  MOD_RES (2)..(4)..(36)..(37): Xaa is C or S
RXGXGEVVMDSMEGIVVKENEDMIQMTINSLETPVXXAKP

SEQ ID NO: 50461 - protein, 37 aa, Artificial Sequence; identical to SEQ ID NO: 37381
  GFR-binding peptide
  MOD_RES (1)..(32)..(33): Xaa is C or S

SEQ ID NO: 50462 - protein, 35 aa, Artificial Sequence
  GFR-binding peptide
  MOD_RES (33)..(34): Xaa is C or S
  MOD_RES (11)..(12)..(13)..(14)..(15): Xaa is A or G
  MOD_RES (16)..(17)..(18)..(19): Xaa is A or G or is absent
EVVMEVQVEKXXXXXXXXXVKAMKVSRLETPVXXA

SEQ ID NO: 50463 - protein, 41 aa, Artificial Sequence
  GFR-binding peptide
  MOD_RES (2)..(36)..(37): Xaa is C or S
  MOD_RES (14)..(15)..(16)..(17)..(18): Xaa is A or G
  MOD_RES (19)..(20)..(21)..(22): Xaa is A or G or is absent
GXSRVVMNVTAKKXXXXXXXXXIKRVQVPRLKTPAXXPKPV

SEQ ID NO: 50464 - protein, 34 aa, Artificial Sequence
  GFR-binding peptide
  MOD_RES (33)..(33): Xaa is C or S
  MOD_RES (11)..(12)..(13)..(14)..(15): Xaa is A or G
  MOD_RES (16)..(17)..(18)..(19): Xaa is A or G or is absent
NHQLFNSLQEXXXXXXXXXYYLMTLPEEETPVXE

SEQ ID NO: 50465 - protein, 38 aa, Artificial Sequence; identical to SEQ ID NO: 18082
  GFR-binding peptide
  MOD_RES (2)..(2): Xaa is C or S

SEQ ID NO: 50466 - protein, 34 aa, Artificial Sequence
  GFR-binding peptide
  MOD_RES (31)..(32): Xaa is C or S
SRVIMVTAKKVKPKRGVIKRIQVPRLAQPVXXPA

SEQ ID NO: 50467 - protein, 38 aa, Artificial Sequence; identical to SEQ ID NO: 12887
  GFR-binding peptide
  MOD_RES (2)..(34): Xaa is C or S

SEQ ID NO: 50468 - protein, 36 aa, Artificial Sequence
  GFR-binding peptide
  MOD_RES (33)..(34): Xaa is C or S
  MOD_RES (11)..(12)..(13)..(14)..(15): Xaa is A or G
  MOD_RES (16)..(17)..(18)..(19): Xaa is A or G or is absent
SRVIMVQVEKXXXXXXXXXVKAIKVSRLAQPVXXPA

SEQ ID NO: 50469 - protein, 37 aa, Artificial Sequence
  GFR-binding peptide
  MOD_RES (1)..(35)..(36): Xaa is C or S
  MOD_RES (13)..(14)..(15)..(16)..(17): Xaa is A or G
  MOD_RES (18)..(19)..(20)..(21): Xaa is A or G or is absent
XARVVMNSMEGIXXXXXXXXXMIQVTINSLQTPAXXP

SEQ ID NO: 50470 - protein, 33 aa, Artificial Sequence
  GFR-binding peptide
  MOD_RES (31)..(32): Xaa is C or S
RVVMNVQVEKIVNSSDDVKAVKVSRLKTPAXXP

SEQ ID NO: 50471 - protein, 36 aa, Artificial Sequence
  GFR-binding peptide
  MOD_RES (1)..(3)..(36): Xaa is C or S
  MOD_RES (14)..(15)..(16)..(17)..(18): Xaa is A or G
  MOD_RES (19)..(20)..(21)..(22): Xaa is A or G or is absent
XKXSRVIMSMEGIXXXXXXXXXMIQITINSLAQPVX

SEQ ID NO: 50472 - protein, 34 aa, Artificial Sequence; identical to SEQ ID NO: 18089
  GFR-binding peptide
  MOD_RES (33)..(33): Xaa is C or S

SEQ ID NO: 50473 - protein, 33 aa, Artificial Sequence
  GFR-binding peptide
  MOD_RES (12)..(13)..(14)..(15)..(16): Xaa is A or G
  MOD_RES (17)..(18)..(19)..(20): Xaa is A or G or is absent
LHEELRNSLQEXXXXXXXXXYYLVTLPEHHVRS

SEQ ID NO: 50474 - protein, 38 aa, Artificial Sequence; identical to SEQ ID NO: 18090
  GFR-binding peptide
  MOD_RES (1)..(3): Xaa is C or S
  MOD_RES (16)..(17)..(18)..(19)..(20): Xaa is A or G
  MOD_RES (21)..(22)..(23)..(24): Xaa is A or G or is absent

SEQ ID NO: 50475 - protein, 37 aa, Artificial Sequence
  GFR-binding peptide
  MOD_RES (31)..(32): Xaa is C or S
EVVMDSMEGIVVKENEDMIQMTINSLETPVXXAKPIK

SEQ ID NO: 50476 - protein, 40 aa, Artificial Sequence; identical to SEQ ID NO: 12893
  GFR-binding peptide
  MOD_RES (1)..(3)..(35)..(36): Xaa is C or S

SEQ ID NO: 50477 - protein, 33 aa, Artificial Sequence
  GFR-binding peptide
  MOD_RES (1)..(1): Xaa is C or S
  MOD_RES (12)..(13)..(14)..(15)..(16): Xaa is A or G
  MOD_RES (17)..(18)..(19)..(20): Xaa is A or G or is absent
XSKVIMVTAKKXXXXXXXXXIKRIQVPRLDQSV

SEQ ID NO: 50478 - protein, 33 aa, Artificial Sequence; identical to SEQ ID NO: 12896
  GFR-binding peptide
  MOD_RES (12)..(13)..(14)..(15)..(16): Xaa is A or G
  MOD_RES (17)..(18)..(19)..(20): Xaa is A or G or is absent

SEQ ID NO: 50479 - protein, 33 aa, Artificial Sequence; identical to SEQ ID NO: 18095
  GFR-binding peptide

SEQ ID NO: 50480 - protein, 39 aa, Artificial Sequence; identical to SEQ ID NO: 18096
  GFR-binding peptide
  MOD_RES (34)..(34): Xaa is C or S
  MOD_RES (12)..(13)..(14)..(15)..(16): Xaa is A or G
  MOD_RES (17)..(18)..(19)..(20): Xaa is A or G or is absent

SEQ ID NO: 50481 - protein, 39 aa, Artificial Sequence
  GFR-binding peptide
  MOD_RES (36)..(36): Xaa is C or S
  MOD_RES (12)..(13)..(14)..(15)..(16): Xaa is A or G
  MOD_RES (17)..(18)..(19)..(20): Xaa is A or G or is absent
LHEELRNSLQEXXXXXXXXXYYVVPLPEHHVRSPQXKVS

SEQ ID NO: 50482 - protein, 39 aa, Artificial Sequence; identical to SEQ ID NO: 12899
  GFR-binding peptide
  MOD_RES (1)..(34)..(35): Xaa is C or S
  MOD_RES (12)..(13)..(14)..(15)..(16): Xaa is A or G
  MOD_RES (17)..(18)..(19)..(20): Xaa is A or G or is absent

SEQ ID NO: 50483 - protein, 40 aa, Artificial Sequence
  GFR-binding peptide
  MOD_RES (1)..(3)..(35)..(36): Xaa is C or S
XGXGEVVMDVTAKKVVKENEDIKRMQVPRLETPVXXAKPI

SEQ ID NO: 50484 - protein, 36 aa, Artificial Sequence; identical to SEQ ID NO: 18099
  GFR-binding peptide
  MOD_RES (35)..(35): Xaa is C or S

SEQ ID NO: 50485 - protein, 38 aa, Artificial Sequence; identical to SEQ ID NO: 12902
  GFR-binding peptide
  MOD_RES (1)..(3)..(34)..(35): Xaa is C or S

SEQ ID NO: 50486 - protein, 38 aa, Artificial Sequence
  GFR-binding peptide
  MOD_RES (1)..(3)..(34)..(35): Xaa is C or S
XKXSKVIMVTAKKIKPTKGIIKRIQVPRLDQSVXXPSA

SEQ ID NO: 50487 - protein, 36 aa, Artificial Sequence
  GFR-binding peptide
  MOD_RES (33)..(33): Xaa is C or S
  MOD_RES (11)..(12)..(13)..(14)..(15): Xaa is A or G
  MOD_RES (16)..(17)..(18)..(19): Xaa is A or G or is absent
RVVMNVTAKKXXXXXXXXXIKRVQVPRLKTPAXTPK

SEQ ID NO: 50488 - protein, 39 aa, Artificial Sequence
  GFR-binding peptide
  MOD_RES (2)..(35)..(36): Xaa is C or S
  MOD_RES (13)..(14)..(15)..(16)..(17): Xaa is A or G
  MOD_RES (18)..(19)..(20)..(21): Xaa is A or G or is absent
KXSKVVMVTAKKXXXXXXXXXIKRIQVPRLDQPVXXPSA

SEQ ID NO: 50489 - protein, 38 aa, Artificial Sequence
  GFR-binding peptide
  MOD_RES (1)..(35)..(36): Xaa is C or S
  MOD_RES (13)..(14)..(15)..(16)..(17): Xaa is A or G
  MOD_RES (18)..(19)..(20)..(21): Xaa is A or G or is absent
XGEVVMEVQVEKXXXXXXXXXVKAMKVSRLETPVXXAK

SEQ ID NO: 50490 - protein, 40 aa, Artificial Sequence
  GFR-binding peptide
  MOD_RES (2)..(36)..(37): Xaa is C or S
  MOD_RES (14)..(15)..(16)..(17)..(18): Xaa is A or G
  MOD_RES (19)..(20)..(21)..(22): Xaa is A or G or is absent
GXSRVVMNVQVEKXXXXXXXXXVKAVKVSRLKTPAXXPKP

SEQ ID NO: 50491 - protein, 37 aa, Artificial Sequence; identical to SEQ ID NO: 12907
  GFR-binding peptide
  MOD_RES (1)..(33)..(34): Xaa is C or S

SEQ ID NO: 50492 - protein, 36 aa, Artificial Sequence
  GFR-binding peptide
  MOD_RES (1)..(1): Xaa is C or S
XALHDELTNSLQEFIPKKRVIEYYVVPLPELQVQTP

SEQ ID NO: 50493 - protein, 34 aa, Artificial Sequence
  GFR-binding peptide
  MOD_RES (2)..(33)..(34): Xaa is C or S
KXSKVIMVTAKKIKPTKGIIKRIQVPRLDQSVXX

SEQ ID NO: 50494 - protein, 35 aa, Artificial Sequence; identical to SEQ ID NO: 18101
  GFR-binding peptide
  MOD_RES (1)..(1): Xaa is C or S
  MOD_RES (14)..(15)..(16)..(17)..(18): Xaa is A or G
  MOD_RES (19)..(20)..(21)..(22): Xaa is A or G or is absent

SEQ ID NO: 50495 - protein, 39 aa, Artificial Sequence
  GFR-binding peptide
  MOD_RES (1)..(34)..(35): Xaa is C or S
  MOD_RES (12)..(13)..(14)..(15)..(16): Xaa is A or G
  MOD_RES (17)..(18)..(19)..(20): Xaa is A or G or is absent
XSRVIMVTAKKXXXXXXXXXIKRIQVPRLAQPVXXPAAS

SEQ ID NO: 50496 - protein, 43 aa, Artificial Sequence
  GFR-binding peptide
  MOD_RES (2)..(4)..(41): Xaa is C or S
  MOD_RES (17)..(18)..(19)..(20)..(21): Xaa is A or G
  MOD_RES (22)..(23)..(24)..(25): Xaa is A or G or is absent
EXKXALHDELTNSLQEXXXXXXXXXYYLVTLPELQVQTPRXQV

SEQ ID NO: 50497 - protein, 36 aa, Artificial Sequence; identical to SEQ ID NO: 12910
  GFR-binding peptide
  MOD_RES (34)..(35): Xaa is C or S
  MOD_RES (12)..(13)..(14)..(15)..(16): Xaa is A or G
  MOD_RES (17)..(18)..(19)..(20): Xaa is A or G or is absent

SEQ ID NO: 50498 - protein, 39 aa, Artificial Sequence
  GFR-binding peptide
  MOD_RES (1)..(34)..(35): Xaa is C or S
  MOD_RES (12)..(13)..(14)..(15)..(16): Xaa is A or G
  MOD_RES (17)..(18)..(19)..(20): Xaa is A or G or is absent
XSKVIMVQVEKXXXXXXXXXVKAIKVSRLDQSVXXPSAS

SEQ ID NO: 50499 - protein, 32 aa, Artificial Sequence
  GFR-binding peptide
  MOD_RES (2)..(2): Xaa is C or S
KXSKVIMVTAKKIKPTKGIIKRIQVPRLDQSV

SEQ ID NO: 50500 - protein, 35 aa, Artificial Sequence; identical to SEQ ID NO: 12912
  GFR-binding peptide
  MOD_RES (2)..(2): Xaa is C or S
  MOD_RES (14)..(15)..(16)..(17)..(18): Xaa is A or G
  MOD_RES (19)..(20)..(21)..(22): Xaa is A or G or is absent

SEQ ID NO: 50501 - protein, 36 aa, Artificial Sequence; identical to SEQ ID NO: 37428
  GFR-binding peptide
  MOD_RES (33)..(34): Xaa is C or S
  MOD_RES (11)..(12)..(13)..(14)..(15): Xaa is A or G
  MOD_RES (16)..(17)..(18)..(19): Xaa is A or G or is absent

SEQ ID NO: 50502 - protein, 42 aa, Artificial Sequence; identical to SEQ ID NO: 12914
  GFR-binding peptide
  MOD_RES (2)..(36): Xaa is C or S
  MOD_RES (14)..(15)..(16)..(17)..(18): Xaa is A or G
  MOD_RES (19)..(20)..(21)..(22): Xaa is A or G or is absent

SEQ ID NO: 50503 - protein, 38 aa, Artificial Sequence; identical to SEQ ID NO: 12916
  GFR-binding peptide
  MOD_RES (32)..(33): Xaa is C or S

SEQ ID NO: 50504 - protein, 39 aa, Artificial Sequence; identical to SEQ ID NO: 12917
  GFR-binding peptide
  MOD_RES (33)..(34): Xaa is C or S
  MOD_RES (11)..(12)..(13)..(14)..(15): Xaa is A or G
  MOD_RES (16)..(17)..(18)..(19): Xaa is A or G or is absent

SEQ ID NO: 50505 - protein, 43 aa, Artificial Sequence; identical to SEQ ID NO: 18105
  GFR-binding peptide
  MOD_RES (2)..(39): Xaa is C or S
  MOD_RES (15)..(16)..(17)..(18)..(19): Xaa is A or G
  MOD_RES (20)..(21)..(22)..(23): Xaa is A or G or is absent

SEQ ID NO: 50506 - protein, 40 aa, Artificial Sequence; identical to SEQ ID NO: 12918
  GFR-binding peptide
  MOD_RES (1)..(35)..(36): Xaa is C or S
  MOD_RES (13)..(14)..(15)..(16)..(17): Xaa is A or G
  MOD_RES (18)..(19)..(20)..(21): Xaa is A or G or is absent

SEQ ID NO: 50507 - protein, 35 aa, Artificial Sequence
  GFR-binding peptide
  MOD_RES (1)..(35): Xaa is C or S
  MOD_RES (13)..(14)..(15)..(16)..(17): Xaa is A or G
  MOD_RES (18)..(19)..(20)..(21): Xaa is A or G or is absent
XSRVVMNVTAKKXXXXXXXXXIKRVQVPRLKTPAX

SEQ ID NO: 50508 - protein, 37 aa, Artificial Sequence
  GFR-binding peptide
  MOD_RES (1)..(3)..(35)..(36): Xaa is C or S
XGXARVVMNVTAKKIVNSSDDIKRVQVPRLQTPAXXP

SEQ ID NO: 50509 - protein, 35 aa, Artificial Sequence
  GFR-binding peptide
  MOD_RES (2)..(33)..(34): Xaa is C or S
KXSKVIMSMEGIIKPTKGIMIQITINSLDQSVXXP

SEQ ID NO: 50510 - protein, 39 aa, Artificial Sequence
  GFR-binding peptide
  MOD_RES (1)..(35): Xaa is C or S
  MOD_RES (13)..(14)..(15)..(16)..(17): Xaa is A or G
  MOD_RES (18)..(19)..(20)..(21): Xaa is A or G or is absent
XSRVVMNVTAKKXXXXXXXXXIKRVQVPRLKTPAXTPKT

SEQ ID NO: 50511 - protein, 36 aa, Artificial Sequence; identical to SEQ ID NO: 18112
  GFR-binding peptide
  MOD_RES (1)..(3): Xaa is C or S
  MOD_RES (15)..(16)..(17)..(18)..(19): Xaa is A or G
  MOD_RES (20)..(21)..(22)..(23): Xaa is A or G or is absent

SEQ ID NO: 50512 - protein, 37 aa, Artificial Sequence; identical to SEQ ID NO: 12923
  GFR-binding peptide
  MOD_RES (1)..(33)..(34): Xaa is C or S

SEQ ID NO: 50513 - protein, 38 aa, Artificial Sequence
  GFR-binding peptide
  MOD_RES (2)..(35)..(36): Xaa is C or S
  MOD_RES (13)..(14)..(15)..(16)..(17): Xaa is A or G
  MOD_RES (18)..(19)..(20)..(21): Xaa is A or G or is absent
KXSKVIMSMEGIXXXXXXXXXMIQITINSLDQSVXXPS

SEQ ID NO: 50514 - protein, 38 aa, Artificial Sequence; identical to SEQ ID NO: 12926
  GFR-binding peptide
  MOD_RES (1)..(33)..(34): Xaa is C or S

SEQ ID NO: 50515 - protein, 38 aa, Artificial Sequence
  GFR-binding peptide
  MOD_RES (1)..(35)..(36): Xaa is C or S
  MOD_RES (13)..(14)..(15)..(16)..(17): Xaa is A or G
  MOD_RES (18)..(19)..(20)..(21): Xaa is A or G or is absent
XARVVMNVTAKKXXXXXXXXXIKRVQVPRLQTPAXXPK

SEQ ID NO: 50516 - protein, 38 aa, Artificial Sequence; identical to SEQ ID NO: 12931
  GFR-binding peptide
  MOD_RES (1)..(34)..(35): Xaa is C or S
  MOD_RES (12)..(13)..(14)..(15)..(16): Xaa is A or G
  MOD_RES (17)..(18)..(19)..(20): Xaa is A or G or is absent

SEQ ID NO: 50517 - protein, 42 aa, Artificial Sequence
  GFR-binding peptide
  MOD_RES (1)..(3)..(36)..(37): Xaa is C or S
  MOD_RES (14)..(15)..(16)..(17)..(18): Xaa is A or G
  MOD_RES (19)..(20)..(21)..(22): Xaa is A or G or is absent
XKXSKVVMSMEGIXXXXXXXXXMIQITINSLDQPVXXPSASA

SEQ ID NO: 50518 - protein, 38 aa, Artificial Sequence; identical to SEQ ID NO: 18119
  GFR-binding peptide
  MOD_RES (33)..(33): Xaa is C or S

SEQ ID NO: 50519 - protein, 34 aa, Artificial Sequence
  GFR-binding peptide
  MOD_RES (33)..(34): Xaa is C or S
  MOD_RES (11)..(12)..(13)..(14)..(15): Xaa is A or G
  MOD_RES (16)..(17)..(18)..(19): Xaa is A or G or is absent
SKVIMSMEGIXXXXXXXXXMIQITINSLDQSVXX

SEQ ID NO: 50520 - protein, 39 aa, Artificial Sequence
  GFR-binding peptide
  MOD_RES (1)..(3)..(37)..(38): Xaa is C or S
  MOD_RES (15)..(16)..(17)..(18)..(19): Xaa is A or G
  MOD_RES (20)..(21)..(22)..(23): Xaa is A or G or is absent
XGXGEVVMEVQVEKXXXXXXXXXVKAMKVSRLETPVXXA

SEQ ID NO: 50521 - protein, 36 aa, Artificial Sequence; identical to SEQ ID NO: 12936
  GFR-binding peptide
  MOD_RES (2)..(34)..(35): Xaa is C or S

SEQ ID NO: 50522 - protein, 32 aa, Artificial Sequence
  GFR-binding peptide
  MOD_RES (31)..(31): Xaa is C or S
RVVMNVTAKKIVNSSDDIKRVQVPRLKTPAXT

SEQ ID NO: 50523 - protein, 34 aa, Artificial Sequence
  GFR-binding peptide
  MOD_RES (1)..(3): Xaa is C or S
XGXGEVVMESMEGIVVKDYEDMIQMTINSLETPV

SEQ ID NO: 50524 - protein, 38 aa, Artificial Sequence
  GFR-binding peptide
  MOD_RES (33)..(34): Xaa is C or S
  MOD_RES (11)..(12)..(13)..(14)..(15): Xaa is A or G
  MOD_RES (16)..(17)..(18)..(19): Xaa is A or G or is absent
RVVMNSMEGIXXXXXXXXXMIQVTINSLKTPAXXPKPV

SEQ ID NO: 50525 - protein, 37 aa, Artificial Sequence
  GFR-binding peptide
  MOD_RES (37)..(37): Xaa is C or S
  MOD_RES (13)..(14)..(15)..(16)..(17): Xaa is A or G
  MOD_RES (18)..(19)..(20)..(21): Xaa is A or G or is absent
ELHEELRNSLQEXXXXXXXXXYYLVTLPEHHVRSPQX

SEQ ID NO: 50526 - protein, 42 aa, Artificial Sequence
  GFR-binding peptide
  MOD_RES (1)..(3)..(37): Xaa is C or S
  MOD_RES (15)..(16)..(17)..(18)..(19): Xaa is A or G
  MOD_RES (20)..(21)..(22)..(23): Xaa is A or G or is absent
XEXKNHQLFNSLQEXXXXXXXXXYYLMTLPEEETPVXELGED

SEQ ID NO: 50527 - protein, 38 aa, Artificial Sequence
  GFR-binding peptide
  MOD_RES (33)..(33): Xaa is C or S
  MOD_RES (11)..(12)..(13)..(14)..(15): Xaa is A or G
  MOD_RES (16)..(17)..(18)..(19): Xaa is A or G or is absent
NHQLFNSLQEXXXXXXXXXYYLMTLPEEETPVXELGED

SEQ ID NO: 50528 - protein, 40 aa, Artificial Sequence
  GFR-binding peptide
  MOD_RES (2)..(4)..(36)..(37): Xaa is C or S
HXGXARVVMNVTAKKIVNSSDDIKRVQVPRLQTPAXXPKP

SEQ ID NO: 50529 - protein, 44 aa, Artificial Sequence; identical to SEQ ID NO: 18124
  GFR-binding peptide
  MOD_RES (2)..(4)..(41): Xaa is C or S
  MOD_RES (17)..(18)..(19)..(20)..(21): Xaa is A or G
  MOD_RES (22)..(23)..(24)..(25): Xaa is A or G or is absent

SEQ ID NO: 50530 - protein, 37 aa, Artificial Sequence
  GFR-binding peptide
  MOD_RES (1)..(35)..(36): Xaa is C or S
  MOD_RES (13)..(14)..(15)..(16)..(17): Xaa is A or G
  MOD_RES (18)..(19)..(20)..(21): Xaa is A or G or is absent
XGEVVMDVQVEKXXXXXXXXXVKAMKVSRLETPVXXA

SEQ ID NO: 50531 - protein, 34 aa, Artificial Sequence; identical to SEQ ID NO: 12941
  GFR-binding peptide
  MOD_RES (33)..(34): Xaa is C or S
  MOD_RES (11)..(12)..(13)..(14)..(15): Xaa is A or G
  MOD_RES (16)..(17)..(18)..(19): Xaa is A or G or is absent

SEQ ID NO: 50532 - protein, 38 aa, Artificial Sequence
  GFR-binding peptide
  MOD_RES (1)..(3)..(34)..(35): Xaa is C or S
XKXSKVIMVQVEKIKPTKGIVKAIKVSRLDQSVXXPSA

SEQ ID NO: 50533 - protein, 38 aa, Artificial Sequence
  GFR-binding peptide
  MOD_RES (1)..(3)..(37)..(38): Xaa is C or S
  MOD_RES (15)..(16)..(17)..(18)..(19): Xaa is A or G
  MOD_RES (20)..(21)..(22)..(23): Xaa is A or G or is absent
XGXARVVMNVTAKKXXXXXXXXXIKRVQVPRLQTPAXX

SEQ ID NO: 50534 - protein, 39 aa, Artificial Sequence
  GFR-binding peptide
  MOD_RES (2)..(34)..(35): Xaa is C or S
GXARVVMNVTAKKIVNSSDDIKRVQVPRLQTPAXXPKPV

SEQ ID NO: 50535 - protein, 43 aa, Artificial Sequence
  GFR-binding peptide
  MOD_RES (2)..(4)..(38)..(39): Xaa is C or S
  MOD_RES (16)..(17)..(18)..(19)..(20): Xaa is A or G
  MOD_RES (21)..(22)..(23)..(24): Xaa is A or G or is absent
RXGXGEVVMEVTAKKXXXXXXXXXIKRMQVPRLETPVXXAKPI

SEQ ID NO: 50536 - protein, 36 aa, Artificial Sequence
  GFR-binding peptide
  MOD_RES (32)..(33): Xaa is C or S
GEVVMDSMEGIVVKENEDMIQMTINSLETPVXXAKP

SEQ ID NO: 50537 - protein, 31 aa, Artificial Sequence; identical to SEQ ID NO: 12945
  GFR-binding peptide

SEQ ID NO: 50538 - protein, 43 aa, Artificial Sequence; identical to SEQ ID NO: 12946
  GFR-binding peptide
  MOD_RES (2)..(4)..(37)..(38): Xaa is C or S
  MOD_RES (15)..(16)..(17)..(18)..(19): Xaa is A or G
  MOD_RES (20)..(21)..(22)..(23): Xaa is A or G or is absent

SEQ ID NO: 50539 - protein, 36 aa, Artificial Sequence; identical to SEQ ID NO: 18129
  GFR-binding peptide
  MOD_RES (1)..(1): Xaa is C or S
  MOD_RES (14)..(15)..(16)..(17)..(18): Xaa is A or G
  MOD_RES (19)..(20)..(21)..(22): Xaa is A or G or is absent

SEQ ID NO: 50540 - protein, 36 aa, Artificial Sequence
  GFR-binding peptide
  MOD_RES (1)..(3)..(36): Xaa is C or S
  MOD_RES (14)..(15)..(16)..(17)..(18): Xaa is A or G
  MOD_RES (19)..(20)..(21)..(22): Xaa is A or G or is absent
XKXSKVVMVTAKKXXXXXXXXXIKRIQVPRLDQPVX

SEQ ID NO: 50541 - protein, 39 aa, Artificial Sequence; identical to SEQ ID NO: 12947
  GFR-binding peptide
  MOD_RES (33)..(34): Xaa is C or S
  MOD_RES (11)..(12)..(13)..(14)..(15): Xaa is A or G
  MOD_RES (16)..(17)..(18)..(19): Xaa is A or G or is absent

SEQ ID NO: 50542 - protein, 37 aa, Artificial Sequence
  GFR-binding peptide
  MOD_RES (2)..(33)..(34): Xaa is C or S
KXSKVIMVTAKKIKPTKGIIKRIQVPRLDQSVXXPSA

SEQ ID NO: 50543 - protein, 38 aa, Artificial Sequence
  GFR-binding peptide
  MOD_RES (35)..(35): Xaa is C or S
HDELTNSLQEFIPKKRVIEYYLVTLPELQVQTPRXQVN

SEQ ID NO: 50544 - protein, 36 aa, Artificial Sequence
  GFR-binding peptide
  MOD_RES (2)..(2): Xaa is C or S
  MOD_RES (15)..(16)..(17)..(18)..(19): Xaa is A or G
  MOD_RES (20)..(21)..(22)..(23): Xaa is A or G or is absent
AXELHEELRNSLQEXXXXXXXXXYYLVTLPEHHVRS

SEQ ID NO: 50545 - protein, 44 aa, Artificial Sequence
  GFR-binding peptide
  MOD_RES (2)..(4)..(38)..(39): Xaa is C or S
  MOD_RES (16)..(17)..(18)..(19)..(20): Xaa is A or G
  MOD_RES (21)..(22)..(23)..(24): Xaa is A or G or is absent
HXGXARVVMNVTAKKXXXXXXXXXIKRVQVPRLQTPAXXPKPVT

SEQ ID NO: 50546 - protein, 40 aa, Artificial Sequence; identical to SEQ ID NO: 18131
  GFR-binding peptide
  MOD_RES (2)..(39): Xaa is C or S

SEQ ID NO: 50547 - protein, 36 aa, Artificial Sequence; identical to SEQ ID NO: 18132
  GFR-binding peptide
  MOD_RES (2)..(36): Xaa is C or S
  MOD_RES (14)..(15)..(16)..(17)..(18): Xaa is A or G
  MOD_RES (19)..(20)..(21)..(22): Xaa is A or G or is absent

SEQ ID NO: 50548 - protein, 35 aa, Artificial Sequence
  GFR-binding peptide
  MOD_RES (31)..(32): Xaa is C or S
SKVVMVTAKKVKPTRGVIKRIQVPRLDQPVXXPSA

SEQ ID NO: 50549 - protein, 39 aa, Artificial Sequence
  GFR-binding peptide
  MOD_RES (2)..(4)..(36)..(37): Xaa is C or S
RXGXGEVVMEVQVEKVVKDYEDVKAMKVSRLETPVXXAK

SEQ ID NO: 50550 - protein, 43 aa, Artificial Sequence; identical to SEQ ID NO: 18138
  GFR-binding peptide
  MOD_RES (1)..(3)..(40): Xaa is C or S
  MOD_RES (16)..(17)..(18)..(19)..(20): Xaa is A or G
  MOD_RES (21)..(22)..(23)..(24): Xaa is A or G or is absent

SEQ ID NO: 50551 - protein, 31 aa, Artificial Sequence; identical to SEQ ID NO: 12954
  GFR-binding peptide
  MOD_RES (31)..(31): Xaa is C or S

SEQ ID NO: 50552 - protein, 38 aa, Artificial Sequence; identical to SEQ ID NO: 12955
  GFR-binding peptide
  MOD_RES (1)..(3)..(37)..(38): Xaa is C or S
  MOD_RES (15)..(16)..(17)..(18)..(19): Xaa is A or G
  MOD_RES (20)..(21)..(22)..(23): Xaa is A or G or is absent

SEQ ID NO: 50553 - protein, 36 aa, Artificial Sequence; identical to SEQ ID NO: 12956
  GFR-binding peptide
  MOD_RES (1)..(3)..(35)..(36): Xaa is C or S

SEQ ID NO: 50554 - protein, 41 aa, Artificial Sequence; identical to SEQ ID NO: 12957
  GFR-binding peptide
  MOD_RES (1)..(3)..(37): Xaa is C or S
  MOD_RES (15)..(16)..(17)..(18)..(19): Xaa is A or G
  MOD_RES (20)..(21)..(22)..(23): Xaa is A or G or is absent

SEQ ID NO: 50555 - protein, 36 aa, Artificial Sequence; identical to SEQ ID NO: 18142
  GFR-binding peptide
  MOD_RES (36)..(36): Xaa is C or S
  MOD_RES (12)..(13)..(14)..(15)..(16): Xaa is A or G
  MOD_RES (17)..(18)..(19)..(20): Xaa is A or G or is absent

SEQ ID NO: 50556 - protein, 34 aa, Artificial Sequence; identical to SEQ ID NO: 12958
  GFR-binding peptide
  MOD_RES (2)..(4): Xaa is C or S

SEQ ID NO: 50557 - protein, 39 aa, Artificial Sequence
  GFR-binding peptide
  MOD_RES (2)..(39): Xaa is C or S
AXELHEELRNSLQELKPKKRVYEYYLVTLPEHHVRSPQX

SEQ ID NO: 50558 - protein, 42 aa, Artificial Sequence
  GFR-binding peptide
  MOD_RES (2)..(4)..(38)..(39): Xaa is C or S
  MOD_RES (16)..(17)..(18)..(19)..(20): Xaa is A or G
  MOD_RES (21)..(22)..(23)..(24): Xaa is A or G or is absent
HXGXSRVVMNVQVEKXXXXXXXXXVKAVKVSRLKTPAXXPKP

SEQ ID NO: 50559 - protein, 41 aa, Artificial Sequence
  GFR-binding peptide
  MOD_RES (1)..(35): Xaa is C or S
XKNHQLFNSLQEHQGQHPKIRYYVMPLPEEETPVXELGEDN

SEQ ID NO: 50560 - protein, 44 aa, Artificial Sequence; identical to SEQ ID NO: 18145
  GFR-binding peptide
  MOD_RES (2)..(4)..(38): Xaa is C or S

SEQ ID NO: 50561 - protein, 33 aa, Artificial Sequence
  GFR-binding peptide
  MOD_RES (12)..(13)..(14)..(15)..(16): Xaa is A or G
  MOD_RES (17)..(18)..(19)..(20): Xaa is A or G or is absent
LHDELTNSLQEXXXXXXXXXYYLVTLPELQVQT

SEQ ID NO: 50562 - protein, 45 aa, Artificial Sequence
  GFR-binding peptide
  MOD_RES (2)..(4)..(41): Xaa is C or S
AXAXELHEELRNSLQELKPKKRVYEYYVVPLPEHHVRSPQXKVSS

SEQ ID NO: 50563 - protein, 37 aa, Artificial Sequence
  GFR-binding peptide
  MOD_RES (2)..(4): Xaa is C or S
  MOD_RES (16)..(17)..(18)..(19)..(20): Xaa is A or G
  MOD_RES (21)..(22)..(23)..(24): Xaa is A or G or is absent
HXGXSRVVMNSMEGIXXXXXXXXXMIQVTINSLKTPA

SEQ ID NO: 50564 - protein, 40 aa, Artificial Sequence
  GFR-binding peptide
  MOD_RES (2)..(4)..(38)..(39): Xaa is C or S
  MOD_RES (16)..(17)..(18)..(19)..(20): Xaa is A or G
  MOD_RES (21)..(22)..(23)..(24): Xaa is A or G or is absent
RXGXGEVVMEVTAKKXXXXXXXXXIKRMQVPRLETPVXXA

SEQ ID NO: 50565 - protein, 38 aa, Artificial Sequence
  GFR-binding peptide
  MOD_RES (1)..(32)..(33): Xaa is C or S
XSKVVMSMEGIVKPTRGVMIQITINSLDQPVXXPSASA

SEQ ID NO: 50566 - protein, 32 aa, Artificial Sequence
  GFR-binding peptide
  MOD_RES (32)..(32): Xaa is C or S
GEVVMESMEGIVVKDYEDMIQMTINSLETPVX

SEQ ID NO: 50567 - protein, 35 aa, Artificial Sequence
  GFR-binding peptide
  MOD_RES (2)..(2): Xaa is C or S
  MOD_RES (14)..(15)..(16)..(17)..(18): Xaa is A or G
  MOD_RES (19)..(20)..(21)..(22): Xaa is A or G or is absent
GXGEVVMEVTAKKXXXXXXXXXIKRMQVPRLETPV

SEQ ID NO: 50568 - protein, 34 aa, Artificial Sequence; identical to SEQ ID NO: 12964
  GFR-binding peptide
  MOD_RES (1)..(32)..(33): Xaa is C or S

SEQ ID NO: 50569 - protein, 37 aa, Artificial Sequence
  GFR-binding peptide
  MOD_RES (37)..(37): Xaa is C or S
  MOD_RES (13)..(14)..(15)..(16)..(17): Xaa is A or G
  MOD_RES (18)..(19)..(20)..(21): Xaa is A or G or is absent
ALHDELTNSLQEXXXXXXXXXYYLVTLPELQVQTPRX

SEQ ID NO: 50570 - protein, 37 aa, Artificial Sequence
  GFR-binding peptide
  MOD_RES (1)..(3)..(34)..(35): Xaa is C or S
XKXSKVIMVTAKKIKPTKGIIKRIQVPRLDQSVXXPS

SEQ ID NO: 50571 - protein, 40 aa, Artificial Sequence; identical to SEQ ID NO: 18154
  GFR-binding peptide
  MOD_RES (1)..(3)..(40): Xaa is C or S
  MOD_RES (16)..(17)..(18)..(19)..(20): Xaa is A or G
  MOD_RES (21)..(22)..(23)..(24): Xaa is A or G or is absent

SEQ ID NO: 50572 - protein, 39 aa, Artificial Sequence; identical to SEQ ID NO: 12968
  GFR-binding peptide
  MOD_RES (1)..(34)..(35): Xaa is C or S
  MOD_RES (12)..(13)..(14)..(15)..(16): Xaa is A or G
  MOD_RES (17)..(18)..(19)..(20): Xaa is A or G or is absent

SEQ ID NO: 50573 - protein, 44 aa, Artificial Sequence; identical to SEQ ID NO: 18155
  GFR-binding peptide
  MOD_RES (1)..(3)..(40): Xaa is C or S
  MOD_RES (16)..(17)..(18)..(19)..(20): Xaa is A or G
  MOD_RES (21)..(22)..(23)..(24): Xaa is A or G or is absent

SEQ ID NO: 50574 - protein, 37 aa, Artificial Sequence
  GFR-binding peptide
  MOD_RES (1)..(33): Xaa is C or S
XSRVVMNVQVEKIVNSSDDVKAVKVSRLKTPAXTPKT

SEQ ID NO: 50575 - protein, 41 aa, Artificial Sequence
  GFR-binding peptide
  MOD_RES (2)..(4)..(38)..(39): Xaa is C or S
  MOD_RES (16)..(17)..(18)..(19)..(20): Xaa is A or G
  MOD_RES (21)..(22)..(23)..(24): Xaa is A or G or is absent
RXGXGEVVMDSMEGIXXXXXXXXXMIQMTINSLETPVXXAK

SEQ ID NO: 50576 - protein, 36 aa, Artificial Sequence; identical to SEQ ID NO: 12969
  GFR-binding peptide
  MOD_RES (2)..(36): Xaa is C or S
  MOD_RES (14)..(15)..(16)..(17)..(18): Xaa is A or G
  MOD_RES (19)..(20)..(21)..(22): Xaa is A or G or is absent

SEQ ID NO: 50577 - protein, 33 aa, Artificial Sequence; identical to SEQ ID NO: 12971
  GFR-binding peptide
  MOD_RES (31)..(32): Xaa is C or S

SEQ ID NO: 50578 - protein, 37 aa, Artificial Sequence; identical to SEQ ID NO: 12972
  GFR-binding peptide
  MOD_RES (2)..(4)..(36)..(37): Xaa is C or S

SEQ ID NO: 50579 - protein, 34 aa, Artificial Sequence
  GFR-binding peptide
  MOD_RES (2)..(2): Xaa is C or S
  MOD_RES (13)..(14)..(15)..(16)..(17): Xaa is A or G
  MOD_RES (18)..(19)..(20)..(21): Xaa is A or G or is absent
KXSRVIMVTAKKXXXXXXXXXIKRIQVPRLAQPV

SEQ ID NO: 50580 - protein, 30 aa, Artificial Sequence
  GFR-binding peptide
RVVMNSMEGIIVNSSDDMIQVTINSLKTPA

SEQ ID NO: 50581 - protein, 42 aa, Artificial Sequence
  GFR-binding peptide
  MOD_RES (2)..(4)..(38): Xaa is C or S
  MOD_RES (16)..(17)..(18)..(19)..(20): Xaa is A or G
  MOD_RES (21)..(22)..(23)..(24): Xaa is A or G or is absent
HXGXSRVVMNVTAKKXXXXXXXXXIKRVQVPRLKTPAXTPKT

SEQ ID NO: 50582 - protein, 37 aa, Artificial Sequence; identical to SEQ ID NO: 12976
  GFR-binding peptide
  MOD_RES (2)..(36)..(37): Xaa is C or S
  MOD_RES (14)..(15)..(16)..(17)..(18): Xaa is A or G
  MOD_RES (19)..(20)..(21)..(22): Xaa is A or G or is absent

SEQ ID NO: 50583 - protein, 36 aa, Artificial Sequence
  GFR-binding peptide
  MOD_RES (31)..(32): Xaa is C or S
RVVMNVQVEKIVNSSDDVKAVKVSRLKTPAXXPKPV

SEQ ID NO: 50584 - protein, 38 aa, Artificial Sequence
  GFR-binding peptide
  MOD_RES (1)..(3)..(34)..(35): Xaa is C or S
XKXSKVVMVTAKKVKPTRGVIKRIQVPRLDQPVXXPSA

SEQ ID NO: 50585 - protein, 38 aa, Artificial Sequence; identical to SEQ ID NO: 12978
  GFR-binding peptide
  MOD_RES (1)..(33)..(34): Xaa is C or S

SEQ ID NO: 50586 - protein, 35 aa, Artificial Sequence
  GFR-binding peptide
  MOD_RES (1)..(34)..(35): Xaa is C or S
  MOD_RES (12)..(13)..(14)..(15)..(16): Xaa is A or G
  MOD_RES (17)..(18)..(19)..(20): Xaa is A or G or is absent
XSRVIMSMEGIXXXXXXXXXMIQITINSLAQPVXX

SEQ ID NO: 50587 - protein, 42 aa, Artificial Sequence
  GFR-binding peptide
  MOD_RES (1)..(3)..(40): Xaa is C or S
XAXELHEELRNSLQELKPKKRVYEYYVVPLPEHHVRSPQXKV

SEQ ID NO: 50588 - protein, 41 aa, Artificial Sequence
  GFR-binding peptide
  MOD_RES (1)..(3)..(35)..(36): Xaa is C or S
XGXGEVVMDVTAKKVVKENEDIKRMQVPRLETPVXXAKPIK

SEQ ID NO: 50589 - protein, 34 aa, Artificial Sequence
  GFR-binding peptide
  MOD_RES (34)..(34): Xaa is C or S
  MOD_RES (12)..(13)..(14)..(15)..(16): Xaa is A or G
  MOD_RES (17)..(18)..(19)..(20): Xaa is A or G or is absent
GEVVMEVQVEKXXXXXXXXXVKAMKVSRLETPVX

SEQ ID NO: 50590 - protein, 39 aa, Artificial Sequence
  GFR-binding peptide
  MOD_RES (2)..(4): Xaa is C or S
  MOD_RES (17)..(18)..(19)..(20)..(21): Xaa is A or G
  MOD_RES (22)..(23)..(24)..(25): Xaa is A or G or is absent
AXAXELHEELRNSLQEXXXXXXXXXYYVVPLPEHHVRSP

SEQ ID NO: 50591 - protein, 44 aa, Artificial Sequence
  GFR-binding peptide
  MOD_RES (2)..(4)..(38)..(39): Xaa is C or S
  MOD_RES (16)..(17)..(18)..(19)..(20): Xaa is A or G
  MOD_RES (21)..(22)..(23)..(24): Xaa is A or G or is absent
RXGXGEVVMEVTAKKXXXXXXXXXIKRMQVPRLETPVXXAKPIS

SEQ ID NO: 50592 - protein, 32 aa, Artificial Sequence
  GFR-binding peptide
  MOD_RES (2)..(2): Xaa is C or S
KXSKVIMSMEGIIKPTKGIMIQITINSLDQSV

SEQ ID NO: 50593 - protein, 39 aa, Artificial Sequence; identical to SEQ ID NO: 12980
  GFR-binding peptide
  MOD_RES (2)..(4)..(37)..(38): Xaa is C or S
  MOD_RES (15)..(16)..(17)..(18)..(19): Xaa is A or G
  MOD_RES (20)..(21)..(22)..(23): Xaa is A or G or is absent

SEQ ID NO: 50594 - protein, 34 aa, Artificial Sequence; identical to SEQ ID NO: 12981
  GFR-binding peptide
  MOD_RES (2)..(34): Xaa is C or S

SEQ ID NO: 50595 - protein, 40 aa, Artificial Sequence
  GFR-binding peptide
  MOD_RES (2)..(35)..(36): Xaa is C or S
  MOD_RES (13)..(14)..(15)..(16)..(17): Xaa is A or G
  MOD_RES (18)..(19)..(20)..(21): Xaa is A or G or is absent
KXSKVIMSMEGIXXXXXXXXXMIQITINSLDQSVXXPSAS

SEQ ID NO: 50596 - protein, 36 aa, Artificial Sequence
  GFR-binding peptide
  MOD_RES (1)..(3): Xaa is C or S
  MOD_RES (15)..(16)..(17)..(18)..(19): Xaa is A or G
  MOD_RES (20)..(21)..(22)..(23): Xaa is A or G or is absent
XGXARVVMNSMEGIXXXXXXXXXMIQVTINSLQTPA

SEQ ID NO: 50597 - protein, 37 aa, Artificial Sequence
  GFR-binding peptide
  MOD_RES (1)..(35): Xaa is C or S
XKNHQLFNSLQEHQGQHPKIRYYVMPLPEEETPVXEL

SEQ ID NO: 50598 - protein, 37 aa, Artificial Sequence; identical to SEQ ID NO: 18164
  GFR-binding peptide
  MOD_RES (2)..(36): Xaa is C or S
  MOD_RES (14)..(15)..(16)..(17)..(18): Xaa is A or G
  MOD_RES (19)..(20)..(21)..(22): Xaa is A or G or is absent

SEQ ID NO: 50599 - protein, 37 aa, Artificial Sequence
  GFR-binding peptide
  MOD_RES (2)..(4)..(35)..(36): Xaa is C or S
SXKXSKVIMVTAKKIKPTKGIIKRIQVPRLDQSVXXP

SEQ ID NO: 50600 - protein, 35 aa, Artificial Sequence
  GFR-binding peptide
  MOD_RES (2)..(35): Xaa is C or S
  MOD_RES (13)..(14)..(15)..(16)..(17): Xaa is A or G
  MOD_RES (18)..(19)..(20)..(21): Xaa is A or G or is absent
KXSKVIMVTAKKXXXXXXXXXIKRIQVPRLDQSVX

SEQ ID NO: 50601 - protein, 36 aa, Artificial Sequence; identical to SEQ ID NO: 37560
  GFR-binding peptide
  MOD_RES (2)..(4)..(35)..(36): Xaa is C or S

SEQ ID NO: 50602 - protein, 36 aa, Artificial Sequence
  GFR-binding peptide
  MOD_RES (31)..(32): Xaa is C or S
RVVMNSMEGIIVNSSDDMIQVTINSLKTPAXXPKPV

SEQ ID NO: 50603 - protein, 34 aa, Artificial Sequence
  GFR-binding peptide
  MOD_RES (2)..(34): Xaa is C or S
GXGEVVMDVQVEKVVKENEDVKAMKVSRLETPVX

SEQ ID NO: 50604 - protein, 38 aa, Artificial Sequence
  GFR-binding peptide
  MOD_RES (2)..(36)..(37): Xaa is C or S
  MOD_RES (14)..(15)..(16)..(17)..(18): Xaa is A or G
  MOD_RES (19)..(20)..(21)..(22): Xaa is A or G or is absent
GXGEVVMESMEGIXXXXXXXXXMIQMTINSLETPVXXA

SEQ ID NO: 50605 - protein, 39 aa, Artificial Sequence
  GFR-binding peptide
  MOD_RES (1)..(3)..(35): Xaa is C or S
XGXSRVVMNSMEGIIVNSSDDMIQVTINSLKTPAXTPKT

SEQ ID NO: 50606 - protein, 37 aa, Artificial Sequence; identical to SEQ ID NO: 18168
  GFR-binding peptide
  MOD_RES (1)..(1): Xaa is C or S
  MOD_RES (14)..(15)..(16)..(17)..(18): Xaa is A or G
  MOD_RES (19)..(20)..(21)..(22): Xaa is A or G or is absent

SEQ ID NO: 50607 - protein, 37 aa, Artificial Sequence
  GFR-binding peptide
  MOD_RES (1)..(33)..(34): Xaa is C or S
XARVVMNVTAKKIVNSSDDIKRVQVPRLQTPAXXPKP

SEQ ID NO: 50608 - protein, 36 aa, Artificial Sequence; identical to SEQ ID NO: 12991
  GFR-binding peptide
  MOD_RES (34)..(35): Xaa is C or S
  MOD_RES (12)..(13)..(14)..(15)..(16): Xaa is A or G
  MOD_RES (17)..(18)..(19)..(20): Xaa is A or G or is absent

SEQ ID NO: 50609 - protein, 40 aa, Artificial Sequence
  GFR-binding peptide
  MOD_RES (2)..(4)..(38)..(39): Xaa is C or S
  MOD_RES (16)..(17)..(18)..(19)..(20): Xaa is A or G
  MOD_RES (21)..(22)..(23)..(24): Xaa is A or G or is absent
RXGXGEVVMDVQVEKXXXXXXXXXVKAMKVSRLETPVXXA

SEQ ID NO: 50610 - protein, 39 aa, Artificial Sequence; identical to SEQ ID NO: 12993
  GFR-binding peptide
  MOD_RES (2)..(36)..(37): Xaa is C or S
  MOD_RES (14)..(15)..(16)..(17)..(18): Xaa is A or G
  MOD_RES (19)..(20)..(21)..(22): Xaa is A or G or is absent

SEQ ID NO: 50611 - protein, 40 aa, Artificial Sequence; identical to SEQ ID NO: 18172
  GFR-binding peptide
  MOD_RES (2)..(4)..(38): Xaa is C or S

SEQ ID NO: 50612 - protein, 43 aa, Artificial Sequence; identical to SEQ ID NO: 12994
  GFR-binding peptide
  MOD_RES (2)..(4)..(38): Xaa is C or S
  MOD_RES (16)..(17)..(18)..(19)..(20): Xaa is A or G
  MOD_RES (21)..(22)..(23)..(24): Xaa is A or G or is absent

SEQ ID NO: 50613 - protein, 37 aa, Artificial Sequence
  GFR-binding peptide
  MOD_RES (1)..(32)..(33): Xaa is C or S
XSKVIMSMEGIIKPTKGIMIQITINSLDQSVXXPSAS

SEQ ID NO: 50614 - protein, 40 aa, Artificial Sequence
  GFR-binding peptide
  MOD_RES (37)..(37): Xaa is C or S
ELHEELRNSLQELKPKKRVYEYYLVTLPEHHVRSPQXKVS

SEQ ID NO: 50615 - protein, 39 aa, Artificial Sequence; identical to SEQ ID NO: 18175
  GFR-binding peptide
  MOD_RES (35)..(35): Xaa is C or S

SEQ ID NO: 50616 - protein, 38 aa, Artificial Sequence; identical to SEQ ID NO: 18177
  GFR-binding peptide
  MOD_RES (2)..(2): Xaa is C or S

SEQ ID NO: 50617 - protein, 39 aa, Artificial Sequence; identical to SEQ ID NO: 13000
  GFR-binding peptide
  MOD_RES (2)..(34)..(35): Xaa is C or S

SEQ ID NO: 50618 - protein, 38 aa, Artificial Sequence; identical to SEQ ID NO: 13001
  GFR-binding peptide
  MOD_RES (34)..(35): Xaa is C or S
  MOD_RES (12)..(13)..(14)..(15)..(16): Xaa is A or G
  MOD_RES (17)..(18)..(19)..(20): Xaa is A or G or is absent

SEQ ID NO: 50619 - protein, 39 aa, Artificial Sequence; identical to SEQ ID NO: 18179
  GFR-binding peptide
  MOD_RES (1)..(38): Xaa is C or S
  MOD_RES (14)..(15)..(16)..(17)..(18): Xaa is A or G
  MOD_RES (19)..(20)..(21)..(22): Xaa is A or G or is absent

SEQ ID NO: 50620 - protein, 35 aa, Artificial Sequence; identical to SEQ ID NO: 18181
  GFR-binding peptide
  MOD_RES (1)..(35): Xaa is C or S
  MOD_RES (13)..(14)..(15)..(16)..(17): Xaa is A or G
  MOD_RES (18)..(19)..(20)..(21): Xaa is A or G or is absent

SEQ ID NO: 50621 - protein, 40 aa, Artificial Sequence; identical to SEQ ID NO: 18182
  GFR-binding peptide
  MOD_RES (37)..(37): Xaa is C or S

SEQ ID NO: 50622 - protein, 34 aa, Artificial Sequence
  GFR-binding peptide
  MOD_RES (12)..(13)..(14)..(15)..(16): Xaa is A or G
  MOD_RES (17)..(18)..(19)..(20): Xaa is A or G or is absent
LHDELTNSLQEXXXXXXXXXYYVVPLPELQVQTP

SEQ ID NO: 50623 - protein, 39 aa, Artificial Sequence; identical to SEQ ID NO: 18183
  GFR-binding peptide
  MOD_RES (35)..(35): Xaa is C or S

SEQ ID NO: 50624 - protein, 41 aa, Artificial Sequence
  GFR-binding peptide
  MOD_RES (1)..(35)..(36): Xaa is C or S
  MOD_RES (13)..(14)..(15)..(16)..(17): Xaa is A or G
  MOD_RES (18)..(19)..(20)..(21): Xaa is A or G or is absent
XARVVMNSMEGIXXXXXXXXXMIQVTINSLQTPAXXPKPVT

SEQ ID NO: 50625 - protein, 34 aa, Artificial Sequence
  GFR-binding peptide
  MOD_RES (2)..(4): Xaa is C or S
SXKXSKVIMVQVEKIKPTKGIVKAIKVSRLDQSV

SEQ ID NO: 50626 - protein, 38 aa, Artificial Sequence; identical to SEQ ID NO: 13006
  GFR-binding peptide
  MOD_RES (1)..(3)..(37)..(38): Xaa is C or S
  MOD_RES (15)..(16)..(17)..(18)..(19): Xaa is A or G
  MOD_RES (20)..(21)..(22)..(23): Xaa is A or G or is absent

SEQ ID NO: 50627 - protein, 30 aa, Artificial Sequence
  GFR-binding peptide
SKVVMSMEGIVKPTRGVMIQITINSLDQPV

SEQ ID NO: 50628 - protein, 40 aa, Artificial Sequence
  GFR-binding peptide
  MOD_RES (2)..(4)..(38): Xaa is C or S
  MOD_RES (16)..(17)..(18)..(19)..(20): Xaa is A or G
  MOD_RES (21)..(22)..(23)..(24): Xaa is A or G or is absent
RXEXKNHQLFNSLQEXXXXXXXXXYYLMTLPEEETPVXEL

SEQ ID NO: 50629 - protein, 35 aa, Artificial Sequence; identical to SEQ ID NO: 13012
  GFR-binding peptide
  MOD_RES (2)..(35): Xaa is C or S
  MOD_RES (13)..(14)..(15)..(16)..(17): Xaa is A or G
  MOD_RES (18)..(19)..(20)..(21): Xaa is A or G or is absent

SEQ ID NO: 50630 - protein, 39 aa, Artificial Sequence; identical to SEQ ID NO: 13014
  GFR-binding peptide
  MOD_RES (33)..(34): Xaa is C or S
  MOD_RES (11)..(12)..(13)..(14)..(15): Xaa is A or G
  MOD_RES (16)..(17)..(18)..(19): Xaa is A or G or is absent

SEQ ID NO: 50631 - protein, 41 aa, Artificial Sequence
  GFR-binding peptide
  MOD_RES (1)..(38): Xaa is C or S
XALHDELTNSLQEFIPKKRVIEYYVVPLPELQVQTPRXQVN

SEQ ID NO: 50632 - protein, 42 aa, Artificial Sequence; identical to SEQ ID NO: 18194
  GFR-binding peptide
  MOD_RES (2)..(36): Xaa is C or S

SEQ ID NO: 50633 - protein, 36 aa, Artificial Sequence
  GFR-binding peptide
  MOD_RES (2)..(36): Xaa is C or S
  MOD_RES (14)..(15)..(16)..(17)..(18): Xaa is A or G
  MOD_RES (19)..(20)..(21)..(22): Xaa is A or G or is absent
GXGEVVMDVTAKKXXXXXXXXXIKRMQVPRLETPVX

SEQ ID NO: 50634 - protein, 34 aa, Artificial Sequence
  GFR-binding peptide
  MOD_RES (34)..(34): Xaa is C or S
  MOD_RES (12)..(13)..(14)..(15)..(16): Xaa is A or G
  MOD_RES (17)..(18)..(19)..(20): Xaa is A or G or is absent
GEVVMDSMEGIXXXXXXXXXMIQMTINSLETPVX

SEQ ID NO: 50635 - protein, 41 aa, Artificial Sequence
  GFR-binding peptide
  MOD_RES (1)..(3)..(35)..(36): Xaa is C or S
XGXGEVVMEVQVEKVVKDYEDVKAMKVSRLETPVXXAKPIS

SEQ ID NO: 50636 - protein, 35 aa, Artificial Sequence; identical to SEQ ID NO: 13017
  GFR-binding peptide
  MOD_RES (1)..(35): Xaa is C or S
  MOD_RES (13)..(14)..(15)..(16)..(17): Xaa is A or G
  MOD_RES (18)..(19)..(20)..(21): Xaa is A or G or is absent

SEQ ID NO: 50637 - protein, 34 aa, Artificial Sequence; identical to SEQ ID NO: 13020
  GFR-binding peptide
  MOD_RES (1)..(33)..(34): Xaa is C or S

SEQ ID NO: 50638 - protein, 36 aa, Artificial Sequence
  GFR-binding peptide
  MOD_RES (1)..(3): Xaa is C or S
  MOD_RES (15)..(16)..(17)..(18)..(19): Xaa is A or G
  MOD_RES (20)..(21)..(22)..(23): Xaa is A or G or is absent
XGXGEVVMDVTAKKXXXXXXXXXIKRMQVPRLETPV

SEQ ID NO: 50639 - protein, 35 aa, Artificial Sequence
  GFR-binding peptide
  MOD_RES (1)..(34)..(35): Xaa is C or S
  MOD_RES (12)..(13)..(14)..(15)..(16): Xaa is A or G
  MOD_RES (17)..(18)..(19)..(20): Xaa is A or G or is absent
XSRVIMVQVEKXXXXXXXXXVKAIKVSRLAQPVXX

SEQ ID NO: 50640 - protein, 41 aa, Artificial Sequence
  GFR-binding peptide
  MOD_RES (2)..(4)..(41): Xaa is C or S
  MOD_RES (17)..(18)..(19)..(20)..(21): Xaa is A or G
  MOD_RES (22)..(23)..(24)..(25): Xaa is A or G or is absent
EXKXALHDELTNSLQEXXXXXXXXXYYLVTLPELQVQTPRX

SEQ ID NO: 50641 - protein, 41 aa, Artificial Sequence
  GFR-binding peptide
  MOD_RES (2)..(4)..(41): Xaa is C or S
EXKXALHDELTNSLQEFIPKKRVIEYYVVPLPELQVQTPRX

SEQ ID NO: 50642 - protein, 38 aa, Artificial Sequence
  GFR-binding peptide
  MOD_RES (2)..(33)..(34): Xaa is C or S
KXSKVVMSMEGIVKPTRGVMIQITINSLDQPVXXPSAS

SEQ ID NO: 50643 - protein, 35 aa, Artificial Sequence
  GFR-binding peptide
  MOD_RES (32)..(33): Xaa is C or S
GEVVMEVTAKKVVKDYEDIKRMQVPRLETPVXXAK

SEQ ID NO: 50644 - protein, 43 aa, Artificial Sequence; identical to SEQ ID NO: 13026
  GFR-binding peptide
  MOD_RES (1)..(3)..(37)..(38): Xaa is C or S
  MOD_RES (15)..(16)..(17)..(18)..(19): Xaa is A or G
  MOD_RES (20)..(21)..(22)..(23): Xaa is A or G or is absent

SEQ ID NO: 50645 - protein, 36 aa, Artificial Sequence
  GFR-binding peptide
  MOD_RES (1)..(33)..(34): Xaa is C or S
XARVVMNVTAKKIVNSSDDIKRVQVPRLQTPAXXPK

SEQ ID NO: 50646 - protein, 41 aa, Artificial Sequence; identical to SEQ ID NO: 13030
  GFR-binding peptide
  MOD_RES (1)..(3)..(35)..(36): Xaa is C or S

SEQ ID NO: 50647 - protein, 41 aa, Artificial Sequence; identical to SEQ ID NO: 18203
  GFR-binding peptide
  MOD_RES (2)..(4)..(41): Xaa is C or S

SEQ ID NO: 50648 - protein, 37 aa, Artificial Sequence
  GFR-binding peptide
  MOD_RES (1)..(33)..(34): Xaa is C or S
XGEVVMDVQVEKVVKENEDVKAMKVSRLETPVXXAKP

SEQ ID NO: 50649 - protein, 41 aa, Artificial Sequence; identical to SEQ ID NO: 18204
  GFR-binding peptide
  MOD_RES (1)..(3)..(40): Xaa is C or S

SEQ ID NO: 50650 - protein, 39 aa, Artificial Sequence; identical to SEQ ID NO: 18205
  GFR-binding peptide
  MOD_RES (1)..(38): Xaa is C or S
  MOD_RES (14)..(15)..(16)..(17)..(18): Xaa is A or G
  MOD_RES (19)..(20)..(21)..(22): Xaa is A or G or is absent

SEQ ID NO: 50651 - protein, 37 aa, Artificial Sequence
  GFR-binding peptide
  MOD_RES (1)..(3)..(35)..(36): Xaa is C or S
XGXARVVMNVQVEKIVNSSDDVKAVKVSRLQTPAXXP

SEQ ID NO: 50652 - protein, 33 aa, Artificial Sequence; identical to SEQ ID NO: 18208
  GFR-binding peptide

SEQ ID NO: 50653 - protein, 37 aa, Artificial Sequence
  GFR-binding peptide
  MOD_RES (2)..(35)..(36): Xaa is C or S
  MOD_RES (13)..(14)..(15)..(16)..(17): Xaa is A or G
  MOD_RES (18)..(19)..(20)..(21): Xaa is A or G or is absent
KXSKVVMVTAKKXXXXXXXXXIKRIQVPRLDQPVXXP

SEQ ID NO: 50654 - protein, 34 aa, Artificial Sequence; identical to SEQ ID NO: 18211
  GFR-binding peptide

SEQ ID NO: 50655 - protein, 32 aa, Artificial Sequence; identical to SEQ ID NO: 13035
  GFR-binding peptide
  MOD_RES (31)..(32): Xaa is C or S

SEQ ID NO: 50656 - protein, 42 aa, Artificial Sequence; identical to SEQ ID NO: 18213
  GFR-binding peptide
  MOD_RES (2)..(4)..(41): Xaa is C or S
  MOD_RES (17)..(18)..(19)..(20)..(21): Xaa is A or G
  MOD_RES (22)..(23)..(24)..(25): Xaa is A or G or is absent

SEQ ID NO: 50657 - protein, 38 aa, Artificial Sequence; identical to SEQ ID NO: 13036
  GFR-binding peptide
  MOD_RES (1)..(33): Xaa is C or S

SEQ ID NO: 50658 - protein, 36 aa, Artificial Sequence
  GFR-binding peptide
  MOD_RES (1)..(35): Xaa is C or S
  MOD_RES (13)..(14)..(15)..(16)..(17): Xaa is A or G
  MOD_RES (18)..(19)..(20)..(21): Xaa is A or G or is absent
XKNHQLFNSLQEXXXXXXXXXYYLMTLPEEETPVXE

SEQ ID NO: 50659 - protein, 33 aa, Artificial Sequence
  GFR-binding peptide
  MOD_RES (1)..(1): Xaa is C or S
  MOD_RES (12)..(13)..(14)..(15)..(16): Xaa is A or G
  MOD_RES (17)..(18)..(19)..(20): Xaa is A or G or is absent
XSKVVMVTAKKXXXXXXXXXIKRIQVPRLDQPV

SEQ ID NO: 50660 - protein, 40 aa, Artificial Sequence; identical to SEQ ID NO: 18215
  GFR-binding peptide
  MOD_RES (1)..(3)..(40): Xaa is C or S

SEQ ID NO: 50661 - protein, 36 aa, Artificial Sequence
  GFR-binding peptide
  MOD_RES (2)..(36): Xaa is C or S
  MOD_RES (14)..(15)..(16)..(17)..(18): Xaa is A or G
  MOD_RES (19)..(20)..(21)..(22): Xaa is A or G or is absent
EXKNHQLFNSLQEXXXXXXXXXYYLMTLPEEETPVX

SEQ ID NO: 50662 - protein, 40 aa, Artificial Sequence
  GFR-binding peptide
  MOD_RES (1)..(3)..(35)..(36): Xaa is C or S
XGXGEVVMEVTAKKVVKDYEDIKRMQVPRLETPVXXAKPI

SEQ ID NO: 50663 - protein, 33 aa, Artificial Sequence
  GFR-binding peptide
  MOD_RES (2)..(2): Xaa is C or S
GXGEVVMDVTAKKVVKENEDIKRMQVPRLETPV

SEQ ID NO: 50664 - protein, 34 aa, Artificial Sequence
  GFR-binding peptide
  MOD_RES (12)..(13)..(14)..(15)..(16): Xaa is A or G
  MOD_RES (17)..(18)..(19)..(20): Xaa is A or G or is absent
LHEELRNSLQEXXXXXXXXXYYVVPLPEHHVRSP

SEQ ID NO: 50665 - protein, 40 aa, Artificial Sequence
  GFR-binding peptide
  MOD_RES (1)..(35): Xaa is C or S
  MOD_RES (13)..(14)..(15)..(16)..(17): Xaa is A or G
  MOD_RES (18)..(19)..(20)..(21): Xaa is A or G or is absent
XKNHQLFNSLQEXXXXXXXXXYYVMPLPEEETPVXELGED

SEQ ID NO: 50666 - protein, 40 aa, Artificial Sequence; identical to SEQ ID NO: 13039
  GFR-binding peptide
  MOD_RES (2)..(36)..(37): Xaa is C or S
  MOD_RES (14)..(15)..(16)..(17)..(18): Xaa is A or G
  MOD_RES (19)..(20)..(21)..(22): Xaa is A or G or is absent

SEQ ID NO: 50667 - protein, 38 aa, Artificial Sequence; identical to SEQ ID NO: 18218
  GFR-binding peptide
  MOD_RES (1)..(38): Xaa is C or S

SEQ ID NO: 50668 - protein, 39 aa, Artificial Sequence
  GFR-binding peptide
  MOD_RES (1)..(38): Xaa is C or S
  MOD_RES (14)..(15)..(16)..(17)..(18): Xaa is A or G
  MOD_RES (19)..(20)..(21)..(22): Xaa is A or G or is absent
XELHEELRNSLQEXXXXXXXXXYYLVTLPEHHVRSPQXK

SEQ ID NO: 50669 - protein, 32 aa, Artificial Sequence
  GFR-binding peptide
  MOD_RES (32)..(32): Xaa is C or S
ARVVMNSMEGIIVNSSDDMIQVTINSLQTPAX

SEQ ID NO: 50670 - protein, 36 aa, Artificial Sequence; identical to SEQ ID NO: 13043
  GFR-binding peptide
  MOD_RES (1)..(33)..(34): Xaa is C or S

SEQ ID NO: 50671 - protein, 39 aa, Artificial Sequence; identical to SEQ ID NO: 18222
  GFR-binding peptide
  MOD_RES (2)..(39): Xaa is C or S

SEQ ID NO: 50672 - protein, 30 aa, Artificial Sequence; identical to SEQ ID NO: 13044
  GFR-binding peptide

SEQ ID NO: 50673 - protein, 34 aa, Artificial Sequence
  GFR-binding peptide
HEELRNSLQELKPKKRVYEYYVVPLPEHHVRSPQ

SEQ ID NO: 50674 - protein, 42 aa, Artificial Sequence; identical to SEQ ID NO: 18225
  GFR-binding peptide
  MOD_RES (2)..(4)..(38): Xaa is C or S

SEQ ID NO: 50675 - protein, 44 aa, Artificial Sequence; identical to SEQ ID NO: 13046
  GFR-binding peptide
  MOD_RES (2)..(4)..(38)..(39): Xaa is C or S
  MOD_RES (16)..(17)..(18)..(19)..(20): Xaa is A or G
  MOD_RES (21)..(22)..(23)..(24): Xaa is A or G or is absent

SEQ ID NO: 50676 - protein, 38 aa, Artificial Sequence
  GFR-binding peptide
  MOD_RES (1)..(32)..(33): Xaa is C or S
XSKVIMSMEGIIKPTKGIMIQITINSLDQSVXXPSASA

SEQ ID NO: 50677 - protein, 31 aa, Artificial Sequence
  GFR-binding peptide
  MOD_RES (31)..(31): Xaa is C or S
EVVMESMEGIVVKDYEDMIQMTINSLETPVX

SEQ ID NO: 50678 - protein, 36 aa, Artificial Sequence; identical to SEQ ID NO: 18227
  GFR-binding peptide
  MOD_RES (35)..(35): Xaa is C or S
  MOD_RES (11)..(12)..(13)..(14)..(15): Xaa is A or G
  MOD_RES (16)..(17)..(18)..(19): Xaa is A or G or is absent

SEQ ID NO: 50679 - protein, 40 aa, Artificial Sequence; identical to SEQ ID NO: 13051
  GFR-binding peptide
  MOD_RES (2)..(35)..(36): Xaa is C or S
  MOD_RES (13)..(14)..(15)..(16)..(17): Xaa is A or G
  MOD_RES (18)..(19)..(20)..(21): Xaa is A or G or is absent

SEQ ID NO: 50680 - protein, 40 aa, Artificial Sequence; identical to SEQ ID NO: 18229
  GFR-binding peptide
  MOD_RES (36)..(36): Xaa is C or S
  MOD_RES (12)..(13)..(14)..(15)..(16): Xaa is A or G
  MOD_RES (17)..(18)..(19)..(20): Xaa is A or G or is absent

SEQ ID NO: 50681 - protein, 41 aa, Artificial Sequence; identical to SEQ ID NO: 18231
  GFR-binding peptide
  MOD_RES (1)..(3)..(40): Xaa is C or S

SEQ ID NO: 50682 - protein, 33 aa, Artificial Sequence; identical to SEQ ID NO: 13053
  GFR-binding peptide
  MOD_RES (1)..(33): Xaa is C or S

SEQ ID NO: 50683 - protein, 33 aa, Artificial Sequence; identical to SEQ ID NO: 13056
  GFR-binding peptide
  MOD_RES (1)..(3): Xaa is C or S

SEQ ID NO: 50684 - protein, 31 aa, Artificial Sequence; identical to SEQ ID NO: 13058
  GFR-binding peptide

SEQ ID NO: 50685 - protein, 34 aa, Artificial Sequence; identical to SEQ ID NO: 18237
  GFR-binding peptide
  MOD_RES (1)..(1): Xaa is C or S
  MOD_RES (13)..(14)..(15)..(16)..(17): Xaa is A or G
  MOD_RES (18)..(19)..(20)..(21): Xaa is A or G or is absent

SEQ ID NO: 50686 - protein, 38 aa, Artificial Sequence
  GFR-binding peptide
  MOD_RES (2)..(35)..(36): Xaa is C or S
  MOD_RES (13)..(14)..(15)..(16)..(17): Xaa is A or G
  MOD_RES (18)..(19)..(20)..(21): Xaa is A or G or is absent
KXSKVVMVQVEKXXXXXXXXXVKAIKVSRLDQPVXXPS

SEQ ID NO: 50687 - protein, 34 aa, Artificial Sequence; identical to SEQ ID NO: 13060
  GFR-binding peptide
  MOD_RES (1)..(1): Xaa is C or S
  MOD_RES (13)..(14)..(15)..(16)..(17): Xaa is A or G
  MOD_RES (18)..(19)..(20)..(21): Xaa is A or G or is absent

SEQ ID NO: 50688 - protein, 37 aa, Artificial Sequence; identical to SEQ ID NO: 13061
  GFR-binding peptide
  MOD_RES (2)..(4)..(35)..(36): Xaa is C or S

SEQ ID NO: 50689 - protein, 35 aa, Artificial Sequence
  GFR-binding peptide
  MOD_RES (1)..(34)..(35): Xaa is C or S
  MOD_RES (12)..(13)..(14)..(15)..(16): Xaa is A or G
  MOD_RES (17)..(18)..(19)..(20): Xaa is A or G or is absent
XSKVVMSMEGIXXXXXXXXXMIQITINSLDQPVXX

SEQ ID NO: 50690 - protein, 38 aa, Artificial Sequence; identical to SEQ ID NO: 18240
  GFR-binding peptide
  MOD_RES (1)..(3)..(37): Xaa is C or S

SEQ ID NO: 50691 - protein, 41 aa, Artificial Sequence; identical to SEQ ID NO: 13062
  GFR-binding peptide
  MOD_RES (1)..(3)..(37): Xaa is C or S
  MOD_RES (15)..(16)..(17)..(18)..(19): Xaa is A or G
  MOD_RES (20)..(21)..(22)..(23): Xaa is A or G or is absent

SEQ ID NO: 50692 - protein, 43 aa, Artificial Sequence; identical to SEQ ID NO: 18241
  GFR-binding peptide
  MOD_RES (2)..(39): Xaa is C or S
  MOD_RES (15)..(16)..(17)..(18)..(19): Xaa is A or G
  MOD_RES (20)..(21)..(22)..(23): Xaa is A or G or is absent

SEQ ID NO: 50693 - protein, 35 aa, Artificial Sequence
  GFR-binding peptide
  MOD_RES (1)..(1): Xaa is C or S
XELHEELRNSLQELKPKKRVYEYYVVPLPEHHVRS

SEQ ID NO: 50694 - protein, 41 aa, Artificial Sequence
  GFR-binding peptide
  MOD_RES (1)..(3)..(40): Xaa is C or S
XKXALHDELTNSLQEFIPKKRVIEYYVVPLPELQVQTPRXQ

SEQ ID NO: 50695 - protein, 42 aa, Artificial Sequence; identical to SEQ ID NO: 18244
  GFR-binding peptide
  MOD_RES (1)..(38): Xaa is C or S

SEQ ID NO: 50696 - protein, 34 aa, Artificial Sequence; identical to SEQ ID NO: 13070
  GFR-binding peptide
  MOD_RES (1)..(1): Xaa is C or S
  MOD_RES (13)..(14)..(15)..(16)..(17): Xaa is A or G
  MOD_RES (18)..(19)..(20)..(21): Xaa is A or G or is absent

SEQ ID NO: 50697 - protein, 37 aa, Artificial Sequence; identical to SEQ ID NO: 13071
  GFR-binding peptide
  MOD_RES (2)..(33)..(34): Xaa is C or S

SEQ ID NO: 50698 - protein, 37 aa, Artificial Sequence
  GFR-binding peptide
  MOD_RES (31)..(32): Xaa is C or S
EVVMDVQVEKVVKENEDVKAMKVSRLETPVXXAKPIK

SEQ ID NO: 50699 - protein, 45 aa, Artificial Sequence; identical to SEQ ID NO: 18245
  GFR-binding peptide
  MOD_RES (2)..(4)..(41): Xaa is C or S
  MOD_RES (17)..(18)..(19)..(20)..(21): Xaa is A or G
  MOD_RES (22)..(23)..(24)..(25): Xaa is A or G or is absent

SEQ ID NO: 50700 - protein, 37 aa, Artificial Sequence
  GFR-binding peptide
  MOD_RES (1)..(3)..(34)..(35): Xaa is C or S
XKXSKVIMSMEGIIKPTKGIMIQITINSLDQSVXXPS

SEQ ID NO: 50701 - protein, 37 aa, Artificial Sequence
  GFR-binding peptide
  MOD_RES (36)..(36): Xaa is C or S
LHEELRNSLQELKPKKRVYEYYLVTLPEHHVRSPQXK

SEQ ID NO: 50702 - protein, 37 aa, Artificial Sequence; identical to SEQ ID NO: 18246
  GFR-binding peptide
  MOD_RES (1)..(1): Xaa is C or S
  MOD_RES (14)..(15)..(16)..(17)..(18): Xaa is A or G
  MOD_RES (19)..(20)..(21)..(22): Xaa is A or G or is absent

SEQ ID NO: 50703 - protein, 40 aa, Artificial Sequence; identical to SEQ ID NO: 13080
  GFR-binding peptide
  MOD_RES (1)..(3)..(35)..(36): Xaa is C or S

SEQ ID NO: 50704 - protein, 41 aa, Artificial Sequence
  GFR-binding peptide
  MOD_RES (2)..(4)..(38)..(39): Xaa is C or S
  MOD_RES (16)..(17)..(18)..(19)..(20): Xaa is A or G
  MOD_RES (21)..(22)..(23)..(24): Xaa is A or G or is absent
RXGXGEVVMEVTAKKXXXXXXXXXIKRMQVPRLETPVXXAK

SEQ ID NO: 50705 - protein, 38 aa, Artificial Sequence
  GFR-binding peptide
  MOD_RES (2)..(2): Xaa is C or S
AXELHEELRNSLQELKPKKRVYEYYLVTLPEHHVRSPQ

SEQ ID NO: 50706 - protein, 38 aa, Artificial Sequence
  GFR-binding peptide
  MOD_RES (33)..(33): Xaa is C or S
  MOD_RES (11)..(12)..(13)..(14)..(15): Xaa is A or G
  MOD_RES (16)..(17)..(18)..(19): Xaa is A or G or is absent
RVVMNSMEGIXXXXXXXXXMIQVTINSLKTPAXTPKTV

SEQ ID NO: 50707 - protein, 42 aa, Artificial Sequence
  GFR-binding peptide
  MOD_RES (2)..(36): Xaa is C or S
  MOD_RES (14)..(15)..(16)..(17)..(18): Xaa is A or G
  MOD_RES (19)..(20)..(21)..(22): Xaa is A or G or is absent
GXSRVVMNVQVEKXXXXXXXXXVKAVKVSRLKTPAXTPKTVH

SEQ ID NO: 50708 - protein, 40 aa, Artificial Sequence
  GFR-binding peptide
  MOD_RES (2)..(4)..(36)..(37): Xaa is C or S
RXGXGEVVMEVTAKKVVKDYEDIKRMQVPRLETPVXXAKP

SEQ ID NO: 50709 - protein, 37 aa, Artificial Sequence
  GFR-binding peptide
  MOD_RES (1)..(3)..(34)..(35): Xaa is C or S
XKXSKVVMSMEGIVKPTRGVMIQITINSLDQPVXXPS

SEQ ID NO: 50710 - protein, 38 aa, Artificial Sequence
  GFR-binding peptide
  MOD_RES (2)..(4)..(35)..(36): Xaa is C or S
SXKXSKVIMVTAKKIKPTKGIIKRIQVPRLDQSVXXPS

SEQ ID NO: 50711 - protein, 41 aa, Artificial Sequence; identical to SEQ ID NO: 18249
  GFR-binding peptide
  MOD_RES (1)..(3)..(37): Xaa is C or S
  MOD_RES (15)..(16)..(17)..(18)..(19): Xaa is A or G
  MOD_RES (20)..(21)..(22)..(23): Xaa is A or G or is absent

SEQ ID NO: 50712 - protein, 37 aa, Artificial Sequence; identical to SEQ ID NO: 13089
  GFR-binding peptide
  MOD_RES (1)..(35): Xaa is C or S
  MOD_RES (13)..(14)..(15)..(16)..(17): Xaa is A or G
  MOD_RES (18)..(19)..(20)..(21): Xaa is A or G or is absent

SEQ ID NO: 50713 - protein, 36 aa, Artificial Sequence
  GFR-binding peptide
  MOD_RES (31)..(32): Xaa is C or S
SKVIMVTAKKIKPTKGIIKRIQVPRLDQSVXXPSAS

SEQ ID NO: 50714 - protein, 38 aa, Artificial Sequence; identical to SEQ ID NO: 13091
  GFR-binding peptide
  MOD_RES (33)..(34): Xaa is C or S
  MOD_RES (11)..(12)..(13)..(14)..(15): Xaa is A or G
  MOD_RES (16)..(17)..(18)..(19): Xaa is A or G or is absent

SEQ ID NO: 50715 - protein, 41 aa, Artificial Sequence; identical to SEQ ID NO: 18250
  GFR-binding peptide
  MOD_RES (2)..(39): Xaa is C or S
  MOD_RES (15)..(16)..(17)..(18)..(19): Xaa is A or G
  MOD_RES (20)..(21)..(22)..(23): Xaa is A or G or is absent

SEQ ID NO: 50716 - protein, 35 aa, Artificial Sequence; identical to SEQ ID NO: 18252
  GFR-binding peptide
  MOD_RES (13)..(14)..(15)..(16)..(17): Xaa is A or G
  MOD_RES (18)..(19)..(20)..(21): Xaa is A or G or is absent

SEQ ID NO: 50717 - protein, 41 aa, Artificial Sequence; identical to SEQ ID NO: 18253
  GFR-binding peptide
  MOD_RES (2)..(4)..(38): Xaa is C or S
  MOD_RES (16)..(17)..(18)..(19)..(20): Xaa is A or G
  MOD_RES (21)..(22)..(23)..(24): Xaa is A or G or is absent

SEQ ID NO: 50718 - protein, 36 aa, Artificial Sequence
  GFR-binding peptide
  MOD_RES (2)..(4)..(36): Xaa is C or S
HXGXSRVVMNVQVEKIVNSSDDVKAVKVSRLKTPAX

SEQ ID NO: 50719 - protein, 34 aa, Artificial Sequence; identical to SEQ ID NO: 13093
  GFR-binding peptide
  MOD_RES (1)..(33)..(34): Xaa is C or S

SEQ ID NO: 50720 - protein, 35 aa, Artificial Sequence
  GFR-binding peptide
  MOD_RES (31)..(32): Xaa is C or S
EVVMDVTAKKVVKENEDIKRMQVPRLETPVXXAKP

SEQ ID NO: 50721 - protein, 32 aa, Artificial Sequence
  GFR-binding peptide
HEELRNSLQELKPKKRVYEYYVVPLPEHHVRS

SEQ ID NO: 50722 - protein, 39 aa, Artificial Sequence; identical to SEQ ID NO: 13098
  GFR-binding peptide
  MOD_RES (2)..(34)..(35): Xaa is C or S

SEQ ID NO: 50723 - protein, 38 aa, Artificial Sequence; identical to SEQ ID NO: 13099
  GFR-binding peptide
  MOD_RES (2)..(4)..(36)..(37): Xaa is C or S

SEQ ID NO: 50724 - protein, 36 aa, Artificial Sequence
  GFR-binding peptide
  MOD_RES (34)..(35): Xaa is C or S
  MOD_RES (12)..(13)..(14)..(15)..(16): Xaa is A or G
  MOD_RES (17)..(18)..(19)..(20): Xaa is A or G or is absent
GEVVMDVQVEKXXXXXXXXXVKAMKVSRLETPVXXA

SEQ ID NO: 50725 - protein, 38 aa, Artificial Sequence
  GFR-binding peptide
  MOD_RES (1)..(3)..(36)..(37): Xaa is C or S
  MOD_RES (14)..(15)..(16)..(17)..(18): Xaa is A or G
  MOD_RES (19)..(20)..(21)..(22): Xaa is A or G or is absent
XKXSKVIMSMEGIXXXXXXXXXMIQITINSLDQSVXXP

SEQ ID NO: 50726 - protein, 38 aa, Artificial Sequence; identical to SEQ ID NO: 13102
  GFR-binding peptide
  MOD_RES (33)..(34): Xaa is C or S
  MOD_RES (11)..(12)..(13)..(14)..(15): Xaa is A or G
  MOD_RES (16)..(17)..(18)..(19): Xaa is A or G or is absent

SEQ ID NO: 50727 - protein, 36 aa, Artificial Sequence; identical to SEQ ID NO: 18256
  GFR-binding peptide
  MOD_RES (34)..(34): Xaa is C or S

SEQ ID NO: 50728 - protein, 40 aa, Artificial Sequence
  GFR-binding peptide
  MOD_RES (2)..(36)..(37): Xaa is C or S
  MOD_RES (14)..(15)..(16)..(17)..(18): Xaa is A or G
  MOD_RES (19)..(20)..(21)..(22): Xaa is A or G or is absent
GXGEVVMDSMEGIXXXXXXXXXMIQMTINSLETPVXXAKP

SEQ ID NO: 50729 - protein, 42 aa, Artificial Sequence
  GFR-binding peptide
  MOD_RES (2)..(4)..(41): Xaa is C or S
  MOD_RES (17)..(18)..(19)..(20)..(21): Xaa is A or G
  MOD_RES (22)..(23)..(24)..(25): Xaa is A or G or is absent
EXKXALHDELTNSLQEXXXXXXXXXYYLVTLPELQVQTPRXQ

SEQ ID NO: 50730 - protein, 40 aa, Artificial Sequence
  GFR-binding peptide
  MOD_RES (2)..(4)..(38): Xaa is C or S
RXEXKNHQLFNSLQEHQGQHPKIRYYVMPLPEEETPVXEL

SEQ ID NO: 50731 - protein, 35 aa, Artificial Sequence; identical to SEQ ID NO: 18262
  GFR-binding peptide
  MOD_RES (1)..(1): Xaa is C or S

SEQ ID NO: 50732 - protein, 38 aa, Artificial Sequence; identical to SEQ ID NO: 18263
  GFR-binding peptide
  MOD_RES (34)..(34): Xaa is C or S

SEQ ID NO: 50733 - protein, 36 aa, Artificial Sequence
  GFR-binding peptide
  MOD_RES (1)..(32)..(33): Xaa is C or S
XSKVVMSMEGIVKPTRGVMIQITINSLDQPVXXPSA

SEQ ID NO: 50734 - protein, 41 aa, Artificial Sequence; identical to SEQ ID NO: 18264
  GFR-binding peptide
  MOD_RES (2)..(39): Xaa is C or S

SEQ ID NO: 50735 - protein, 40 aa, Artificial Sequence; identical to SEQ ID NO: 13107
  GFR-binding peptide
  MOD_RES (1)..(3)..(36)..(37): Xaa is C or S
  MOD_RES (14)..(15)..(16)..(17)..(18): Xaa is A or G
  MOD_RES (19)..(20)..(21)..(22): Xaa is A or G or is absent

SEQ ID NO: 50736 - protein, 36 aa, Artificial Sequence
  GFR-binding peptide
  MOD_RES (1)..(35)..(36): Xaa is C or S
  MOD_RES (13)..(14)..(15)..(16)..(17): Xaa is A or G
  MOD_RES (18)..(19)..(20)..(21): Xaa is A or G or is absent
XSRVVMNVQVEKXXXXXXXXXVKAVKVSRLKTPAXX

SEQ ID NO: 50737 - protein, 33 aa, Artificial Sequence
  GFR-binding peptide
  MOD_RES (12)..(13)..(14)..(15)..(16): Xaa is A or G
  MOD_RES (17)..(18)..(19)..(20): Xaa is A or G or is absent
GEVVMEVTAKKXXXXXXXXXIKRMQVPRLETPV

SEQ ID NO: 50738 - protein, 39 aa, Artificial Sequence; identical to SEQ ID NO: 18266
  GFR-binding peptide
  MOD_RES (2)..(4): Xaa is C or S
  MOD_RES (17)..(18)..(19)..(20)..(21): Xaa is A or G
  MOD_RES (22)..(23)..(24)..(25): Xaa is A or G or is absent

SEQ ID NO: 50739 - protein, 39 aa, Artificial Sequence; identical to SEQ ID NO: 13112
  GFR-binding peptide
  MOD_RES (2)..(36): Xaa is C or S
  MOD_RES (14)..(15)..(16)..(17)..(18): Xaa is A or G
  MOD_RES (19)..(20)..(21)..(22): Xaa is A or G or is absent

SEQ ID NO: 50740 - protein, 42 aa, Artificial Sequence
  GFR-binding peptide
  MOD_RES (1)..(3)..(37)..(38): Xaa is C or S
  MOD_RES (15)..(16)..(17)..(18)..(19): Xaa is A or G
  MOD_RES (20)..(21)..(22)..(23): Xaa is A or G or is absent
XGXSRVVMNVTAKKXXXXXXXXXIKRVQVPRLKTPAXXPKPV

SEQ ID NO: 50741 - protein, 42 aa, Artificial Sequence
  GFR-binding peptide
  MOD_RES (1)..(38): Xaa is C or S
XALHDELTNSLQEFIPKKRVIEYYLVTLPELQVQTPRXQVNR

SEQ ID NO: 50742 - protein, 41 aa, Artificial Sequence; identical to SEQ ID NO: 13114
  GFR-binding peptide
  MOD_RES (1)..(3)..(37)..(38): Xaa is C or S
  MOD_RES (15)..(16)..(17)..(18)..(19): Xaa is A or G
  MOD_RES (20)..(21)..(22)..(23): Xaa is A or G or is absent

SEQ ID NO: 50743 - protein, 39 aa, Artificial Sequence; identical to SEQ ID NO: 18270
  GFR-binding peptide
  MOD_RES (2)..(4)..(38): Xaa is C or S
  MOD_RES (16)..(17)..(18)..(19)..(20): Xaa is A or G
  MOD_RES (21)..(22)..(23)..(24): Xaa is A or G or is absent

SEQ ID NO: 50744 - protein, 38 aa, Artificial Sequence
  GFR-binding peptide
  MOD_RES (1)..(3)..(34)..(35): Xaa is C or S
XKXSRVIMSMEGIVKPKRGVMIQITINSLAQPVXXPAA

SEQ ID NO: 50745 - protein, 39 aa, Artificial Sequence
  GFR-binding peptide
  MOD_RES (2)..(36)..(37): Xaa is C or S
  MOD_RES (14)..(15)..(16)..(17)..(18): Xaa is A or G
  MOD_RES (19)..(20)..(21)..(22): Xaa is A or G or is absent
GXGEVVMDVQVEKXXXXXXXXXVKAMKVSRLETPVXXAK

SEQ ID NO: 50746 - protein, 35 aa, Artificial Sequence; identical to SEQ ID NO: 18273
  GFR-binding peptide
  MOD_RES (34)..(34): Xaa is C or S

SEQ ID NO: 50747 - protein, 39 aa, Artificial Sequence
  GFR-binding peptide
  MOD_RES (1)..(3)..(37): Xaa is C or S
  MOD_RES (15)..(16)..(17)..(18)..(19): Xaa is A or G
  MOD_RES (20)..(21)..(22)..(23): Xaa is A or G or is absent
XGXSRVVMNVTAKKXXXXXXXXXIKRVQVPRLKTPAXTP

SEQ ID NO: 50748 - protein, 44 aa, Artificial Sequence
  GFR-binding peptide
  MOD_RES (2)..(4)..(38): Xaa is C or S
RXEXKNHQLFNSLQEHQGQHPKIRYYVMPLPEEETPVXELGEDN

SEQ ID NO: 50749 - protein, 32 aa, Artificial Sequence
  GFR-binding peptide
HEELRNSLQELKPKKRVYEYYLVTLPEHHVRS

SEQ ID NO: 50750 - protein, 33 aa, Artificial Sequence
  GFR-binding peptide
  MOD_RES (32)..(32): Xaa is C or S
SRVVMNSMEGIIVNSSDDMIQVTINSLKTPAXT

SEQ ID NO: 50751 - protein, 41 aa, Artificial Sequence
  GFR-binding peptide
  MOD_RES (2)..(4)..(38)..(39): Xaa is C or S
  MOD_RES (16)..(17)..(18)..(19)..(20): Xaa is A or G
  MOD_RES (21)..(22)..(23)..(24): Xaa is A or G or is absent
HXGXSRVVMNSMEGIXXXXXXXXXMIQVTINSLKTPAXXPK

SEQ ID NO: 50752 - protein, 35 aa, Artificial Sequence; identical to SEQ ID NO: 13121
  GFR-binding peptide
  MOD_RES (1)..(3): Xaa is C or S
  MOD_RES (14)..(15)..(16)..(17)..(18): Xaa is A or G
  MOD_RES (19)..(20)..(21)..(22): Xaa is A or G or is absent

SEQ ID NO: 50753 - protein, 35 aa, Artificial Sequence; identical to SEQ ID NO: 18278
  GFR-binding peptide
  MOD_RES (35)..(35): Xaa is C or S

SEQ ID NO: 50754 - protein, 35 aa, Artificial Sequence; identical to SEQ ID NO: 13123
  GFR-binding peptide
  MOD_RES (33)..(34): Xaa is C or S
  MOD_RES (11)..(12)..(13)..(14)..(15): Xaa is A or G
  MOD_RES (16)..(17)..(18)..(19): Xaa is A or G or is absent

SEQ ID NO: 50755 - protein, 37 aa, Artificial Sequence; identical to SEQ ID NO: 18279
  GFR-binding peptide
  MOD_RES (2)..(2): Xaa is C or S
  MOD_RES (15)..(16)..(17)..(18)..(19): Xaa is A or G
  MOD_RES (20)..(21)..(22)..(23): Xaa is A or G or is absent

SEQ ID NO: 50756 - protein, 44 aa, Artificial Sequence
  GFR-binding peptide
  MOD_RES (2)..(4)..(41): Xaa is C or S
  MOD_RES (17)..(18)..(19)..(20)..(21): Xaa is A or G
  MOD_RES (22)..(23)..(24)..(25): Xaa is A or G or is absent
AXAXELHEELRNSLQEXXXXXXXXXYYVVPLPEHHVRSPQXKVS

SEQ ID NO: 50757 - protein, 36 aa, Artificial Sequence
  GFR-binding peptide
  MOD_RES (31)..(32): Xaa is C or S
EVVMEVTAKKVVKDYEDIKRMQVPRLETPVXXAKPI

SEQ ID NO: 50758 - protein, 38 aa, Artificial Sequence
  GFR-binding peptide
  MOD_RES (1)..(3)..(37)..(38): Xaa is C or S
  MOD_RES (15)..(16)..(17)..(18)..(19): Xaa is A or G
  MOD_RES (20)..(21)..(22)..(23): Xaa is A or G or is absent
XGXGEVVMDSMEGIXXXXXXXXXMIQMTINSLETPVXX

SEQ ID NO: 50759 - protein, 40 aa, Artificial Sequence
  GFR-binding peptide
  MOD_RES (1)..(38): Xaa is C or S
XELHEELRNSLQELKPKKRVYEYYVVPLPEHHVRSPQXKV

SEQ ID NO: 50760 - protein, 37 aa, Artificial Sequence
  GFR-binding peptide
  MOD_RES (2)..(34): Xaa is C or S
GXSRVVMNVTAKKIVNSSDDIKRVQVPRLKTPAXTPK

SEQ ID NO: 50761 - protein, 33 aa, Artificial Sequence
  GFR-binding peptide
  MOD_RES (33)..(33): Xaa is C or S
  MOD_RES (11)..(12)..(13)..(14)..(15): Xaa is A or G
  MOD_RES (16)..(17)..(18)..(19): Xaa is A or G or is absent
RVVMNVQVEKXXXXXXXXXVKAVKVSRLQTPAX

SEQ ID NO: 50762 - protein, 35 aa, Artificial Sequence
  GFR-binding peptide
  MOD_RES (1)..(34)..(35): Xaa is C or S
  MOD_RES (12)..(13)..(14)..(15)..(16): Xaa is A or G
  MOD_RES (17)..(18)..(19)..(20): Xaa is A or G or is absent
XSKVIMVTAKKXXXXXXXXXIKRIQVPRLDQSVXX

SEQ ID NO: 50763 - protein, 33 aa, Artificial Sequence; identical to SEQ ID NO: 13135
  GFR-binding peptide
  MOD_RES (33)..(33): Xaa is C or S
  MOD_RES (11)..(12)..(13)..(14)..(15): Xaa is A or G
  MOD_RES (16)..(17)..(18)..(19): Xaa is A or G or is absent

SEQ ID NO: 50764 - protein, 43 aa, Artificial Sequence
  GFR-binding peptide
  MOD_RES (2)..(4)..(37)..(38): Xaa is C or S
  MOD_RES (15)..(16)..(17)..(18)..(19): Xaa is A or G
  MOD_RES (20)..(21)..(22)..(23): Xaa is A or G or is absent
SXKXSRVIMVTAKKXXXXXXXXXIKRIQVPRLAQPVXXPAASA

SEQ ID NO: 50765 - protein, 39 aa, Artificial Sequence
  GFR-binding peptide
  MOD_RES (2)..(4)..(38)..(39): Xaa is C or S
  MOD_RES (16)..(17)..(18)..(19)..(20): Xaa is A or G
  MOD_RES (21)..(22)..(23)..(24): Xaa is A or G or is absent
HXGXSRVVMNVQVEKXXXXXXXXXVKAVKVSRLKTPAXX

SEQ ID NO: 50766 - protein, 33 aa, Artificial Sequence; identical to SEQ ID NO: 37801
  GFR-binding peptide
  MOD_RES (31)..(32): Xaa is C or S

SEQ ID NO: 50767 - protein, 38 aa, Artificial Sequence; identical to SEQ ID NO: 13139
  GFR-binding peptide
  MOD_RES (2)..(36)..(37): Xaa is C or S
  MOD_RES (14)..(15)..(16)..(17)..(18): Xaa is A or G
  MOD_RES (19)..(20)..(21)..(22): Xaa is A or G or is absent

SEQ ID NO: 50768 - protein, 36 aa, Artificial Sequence
  GFR-binding peptide
  MOD_RES (1)..(3): Xaa is C or S
  MOD_RES (15)..(16)..(17)..(18)..(19): Xaa is A or G
  MOD_RES (20)..(21)..(22)..(23): Xaa is A or G or is absent
XEXKNHQLFNSLQEXXXXXXXXXYYLMTLPEEETPV

SEQ ID NO: 50769 - protein, 36 aa, Artificial Sequence; identical to SEQ ID NO: 18296
  GFR-binding peptide
  MOD_RES (2)..(2): Xaa is C or S
  MOD_RES (15)..(16)..(17)..(18)..(19): Xaa is A or G
  MOD_RES (20)..(21)..(22)..(23): Xaa is A or G or is absent

SEQ ID NO: 50770 - protein, 44 aa, Artificial Sequence; identical to SEQ ID NO: 18297
  GFR-binding peptide
  MOD_RES (2)..(4)..(41): Xaa is C or S
  MOD_RES (17)..(18)..(19)..(20)..(21): Xaa is A or G
  MOD_RES (22)..(23)..(24)..(25): Xaa is A or G or is absent

SEQ ID NO: 50771 - protein, 41 aa, Artificial Sequence; identical to SEQ ID NO: 13140
  GFR-binding peptide
  MOD_RES (1)..(3)..(35)..(36): Xaa is C or S

SEQ ID NO: 50772 - protein, 40 aa, Artificial Sequence; identical to SEQ ID NO: 13141
  GFR-binding peptide
  MOD_RES (1)..(35)..(36): Xaa is C or S
  MOD_RES (13)..(14)..(15)..(16)..(17): Xaa is A or G
  MOD_RES (18)..(19)..(20)..(21): Xaa is A or G or is absent

SEQ ID NO: 50773 - protein, 39 aa, Artificial Sequence; identical to SEQ ID NO: 13143
  GFR-binding peptide
  MOD_RES (2)..(4)..(36)..(37): Xaa is C or S

SEQ ID NO: 50774 - protein, 37 aa, Artificial Sequence
  GFR-binding peptide
  MOD_RES (31)..(32): Xaa is C or S
EVVMESMEGIVVKDYEDMIQMTINSLETPVXXAKPIS

SEQ ID NO: 50775 - protein, 36 aa, Artificial Sequence
  GFR-binding peptide
  MOD_RES (34)..(34): Xaa is C or S
KNHQLFNSLQEHQGQHPKIRYYVMPLPEEETPVXEL

SEQ ID NO: 50776 - protein, 36 aa, Artificial Sequence
  GFR-binding peptide
  MOD_RES (33)..(34): Xaa is C or S
  MOD_RES (11)..(12)..(13)..(14)..(15): Xaa is A or G
  MOD_RES (16)..(17)..(18)..(19): Xaa is A or G or is absent
SRVIMVTAKKXXXXXXXXXIKRIQVPRLAQPVXXPA

SEQ ID NO: 50777 - protein, 38 aa, Artificial Sequence
  GFR-binding peptide
  MOD_RES (2)..(36): Xaa is C or S
  MOD_RES (14)..(15)..(16)..(17)..(18): Xaa is A or G
  MOD_RES (19)..(20)..(21)..(22): Xaa is A or G or is absent
EXKNHQLFNSLQEXXXXXXXXXYYVMPLPEEETPVXEL

SEQ ID NO: 50778 - protein, 41 aa, Artificial Sequence
  GFR-binding peptide
  MOD_RES (2)..(36)..(37): Xaa is C or S
  MOD_RES (14)..(15)..(16)..(17)..(18): Xaa is A or G
  MOD_RES (19)..(20)..(21)..(22): Xaa is A or G or is absent
GXARVVMNSMEGIXXXXXXXXXMIQVTINSLQTPAXXPKPV

SEQ ID NO: 50779 - protein, 35 aa, Artificial Sequence
  GFR-binding peptide
  MOD_RES (13)..(14)..(15)..(16)..(17): Xaa is A or G
  MOD_RES (18)..(19)..(20)..(21): Xaa is A or G or is absent
ALHDELTNSLQEXXXXXXXXXYYVVPLPELQVQTP

SEQ ID NO: 50780 - protein, 39 aa, Artificial Sequence
  GFR-binding peptide
  MOD_RES (2)..(35)..(36): Xaa is C or S
  MOD_RES (13)..(14)..(15)..(16)..(17): Xaa is A or G
  MOD_RES (18)..(19)..(20)..(21): Xaa is A or G or is absent
KXSRVIMSMEGIXXXXXXXXXMIQITINSLAQPVXXPAA

SEQ ID NO: 50781 - protein, 33 aa, Artificial Sequence
  GFR-binding peptide
  MOD_RES (33)..(33): Xaa is C or S
  MOD_RES (11)..(12)..(13)..(14)..(15): Xaa is A or G
  MOD_RES (16)..(17)..(18)..(19): Xaa is A or G or is absent
SKVVMVTAKKXXXXXXXXXIKRIQVPRLDQPVX

SEQ ID NO: 50782 - protein, 33 aa, Artificial Sequence; identical to SEQ ID NO: 13147
  GFR-binding peptide
  MOD_RES (31)..(32): Xaa is C or S

SEQ ID NO: 50783 - protein, 41 aa, Artificial Sequence
  GFR-binding peptide
  MOD_RES (2)..(4)..(38): Xaa is C or S
  MOD_RES (16)..(17)..(18)..(19)..(20): Xaa is A or G
  MOD_RES (21)..(22)..(23)..(24): Xaa is A or G or is absent
HXGXSRVVMNVQVEKXXXXXXXXXVKAVKVSRLKTPAXTPK

SEQ ID NO: 50784 - protein, 36 aa, Artificial Sequence
  GFR-binding peptide
  MOD_RES (33)..(34): Xaa is C or S
  MOD_RES (11)..(12)..(13)..(14)..(15): Xaa is A or G
  MOD_RES (16)..(17)..(18)..(19): Xaa is A or G or is absent
SKVIMVQVEKXXXXXXXXXVKAIKVSRLDQSVXXPS

SEQ ID NO: 50785 - protein, 39 aa, Artificial Sequence; identical to SEQ ID NO: 18301
  GFR-binding peptide
  MOD_RES (36)..(36): Xaa is C or S
  MOD_RES (12)..(13)..(14)..(15)..(16): Xaa is A or G
  MOD_RES (17)..(18)..(19)..(20): Xaa is A or G or is absent

SEQ ID NO: 50786 - protein, 37 aa, Artificial Sequence
  GFR-binding peptide
  MOD_RES (33)..(34): Xaa is C or S
  MOD_RES (11)..(12)..(13)..(14)..(15): Xaa is A or G
  MOD_RES (16)..(17)..(18)..(19): Xaa is A or G or is absent
EVVMDVTAKKXXXXXXXXXIKRMQVPRLETPVXXAKP

SEQ ID NO: 50787 - protein, 38 aa, Artificial Sequence
  GFR-binding peptide
  MOD_RES (2)..(36)..(37): Xaa is C or S
  MOD_RES (14)..(15)..(16)..(17)..(18): Xaa is A or G
  MOD_RES (19)..(20)..(21)..(22): Xaa is A or G or is absent
GXARVVMNSMEGIXXXXXXXXXMIQVTINSLQTPAXXP

SEQ ID NO: 50788 - protein, 40 aa, Artificial Sequence; identical to SEQ ID NO: 13150
  GFR-binding peptide
  MOD_RES (1)..(3)..(35)..(36): Xaa is C or S

SEQ ID NO: 50789 - protein, 37 aa, Artificial Sequence
  GFR-binding peptide
  MOD_RES (2)..(34)..(35): Xaa is C or S
GXARVVMNSMEGIIVNSSDDMIQVTINSLQTPAXXPK

SEQ ID NO: 50790 - protein, 39 aa, Artificial Sequence; identical to SEQ ID NO: 13151
  GFR-binding peptide
  MOD_RES (1)..(33)..(34): Xaa is C or S

SEQ ID NO: 50791 - protein, 34 aa, Artificial Sequence; identical to SEQ ID NO: 18302
  GFR-binding peptide
  MOD_RES (33)..(33): Xaa is C or S
  MOD_RES (11)..(12)..(13)..(14)..(15): Xaa is A or G
  MOD_RES (16)..(17)..(18)..(19): Xaa is A or G or is absent

SEQ ID NO: 50792 - protein, 35 aa, Artificial Sequence
  GFR-binding peptide
  MOD_RES (31)..(32): Xaa is C or S
EVVMESMEGIVVKDYEDMIQMTINSLETPVXXAKP

SEQ ID NO: 50793 - protein, 36 aa, Artificial Sequence; identical to SEQ ID NO: 13155
  GFR-binding peptide
  MOD_RES (2)..(4)..(35)..(36): Xaa is C or S

SEQ ID NO: 50794 - protein, 44 aa, Artificial Sequence
  GFR-binding peptide
  MOD_RES (2)..(4)..(38): Xaa is C or S
  MOD_RES (16)..(17)..(18)..(19)..(20): Xaa is A or G
  MOD_RES (21)..(22)..(23)..(24): Xaa is A or G or is absent
HXGXSRVVMNSMEGIXXXXXXXXXMIQVTINSLKTPAXTPKTVH

SEQ ID NO: 50795 - protein, 38 aa, Artificial Sequence
  GFR-binding peptide
  MOD_RES (1)..(3)..(37)..(38): Xaa is C or S
  MOD_RES (15)..(16)..(17)..(18)..(19): Xaa is A or G
  MOD_RES (20)..(21)..(22)..(23): Xaa is A or G or is absent
XGXGEVVMDVTAKKXXXXXXXXXIKRMQVPRLETPVXX

SEQ ID NO: 50796 - protein, 36 aa, Artificial Sequence; identical to SEQ ID NO: 13157
  GFR-binding peptide
  MOD_RES (2)..(4)..(36): Xaa is C or S

SEQ ID NO: 50797 - protein, 43 aa, Artificial Sequence
  GFR-binding peptide
  MOD_RES (2)..(39): Xaa is C or S
  MOD_RES (15)..(16)..(17)..(18)..(19): Xaa is A or G
  MOD_RES (20)..(21)..(22)..(23): Xaa is A or G or is absent
AXELHEELRNSLQEXXXXXXXXXYYVVPLPEHHVRSPQXKVSS

SEQ ID NO: 50798 - protein, 43 aa, Artificial Sequence; identical to SEQ ID NO: 18304
  GFR-binding peptide
  MOD_RES (2)..(4)..(41): Xaa is C or S
  MOD_RES (17)..(18)..(19)..(20)..(21): Xaa is A or G
  MOD_RES (22)..(23)..(24)..(25): Xaa is A or G or is absent

SEQ ID NO: 50799 - protein, 38 aa, Artificial Sequence
  GFR-binding peptide
  MOD_RES (1)..(3): Xaa is C or S
XKXALHDELTNSLQEFIPKKRVIEYYLVTLPELQVQTP

SEQ ID NO: 50800 - protein, 38 aa, Artificial Sequence
  GFR-binding peptide
  MOD_RES (2)..(4)..(35)..(36): Xaa is C or S
SXKXSRVIMVTAKKVKPKRGVIKRIQVPRLAQPVXXPA

SEQ ID NO: 50801 - protein, 40 aa, Artificial Sequence
  GFR-binding peptide
  MOD_RES (1)..(3)..(35): Xaa is C or S
XGXSRVVMNSMEGIIVNSSDDMIQVTINSLKTPAXTPKTV

SEQ ID NO: 50802 - protein, 42 aa, Artificial Sequence; identical to SEQ ID NO: 13159
  GFR-binding peptide
  MOD_RES (2)..(4)..(38)..(39): Xaa is C or S
  MOD_RES (16)..(17)..(18)..(19)..(20): Xaa is A or G
  MOD_RES (21)..(22)..(23)..(24): Xaa is A or G or is absent

SEQ ID NO: 50803 - protein, 34 aa, Artificial Sequence
  GFR-binding peptide
  MOD_RES (2)..(2): Xaa is C or S
  MOD_RES (13)..(14)..(15)..(16)..(17): Xaa is A or G
  MOD_RES (18)..(19)..(20)..(21): Xaa is A or G or is absent
KXSRVIMVQVEKXXXXXXXXXVKAIKVSRLAQPV

SEQ ID NO: 50804 - protein, 40 aa, Artificial Sequence; identical to SEQ ID NO: 18305
  GFR-binding peptide
  MOD_RES (2)..(36): Xaa is C or S
  MOD_RES (14)..(15)..(16)..(17)..(18): Xaa is A or G
  MOD_RES (19)..(20)..(21)..(22): Xaa is A or G or is absent

SEQ ID NO: 50805 - protein, 38 aa, Artificial Sequence
  GFR-binding peptide
  MOD_RES (2)..(36)..(37): Xaa is C or S
  MOD_RES (14)..(15)..(16)..(17)..(18): Xaa is A or G
  MOD_RES (19)..(20)..(21)..(22): Xaa is A or G or is absent
GXGEVVMDSMEGIXXXXXXXXXMIQMTINSLETPVXXA

SEQ ID NO: 50806 - protein, 36 aa, Artificial Sequence
  GFR-binding peptide
  MOD_RES (1)..(1): Xaa is C or S
  MOD_RES (14)..(15)..(16)..(17)..(18): Xaa is A or G
  MOD_RES (19)..(20)..(21)..(22): Xaa is A or G or is absent
XALHDELTNSLQEXXXXXXXXXYYLVTLPELQVQTP

SEQ ID NO: 50807 - protein, 38 aa, Artificial Sequence; identical to SEQ ID NO: 13163
  GFR-binding peptide
  MOD_RES (33)..(34): Xaa is C or S
  MOD_RES (11)..(12)..(13)..(14)..(15): Xaa is A or G
  MOD_RES (16)..(17)..(18)..(19): Xaa is A or G or is absent

SEQ ID NO: 50808 - protein, 31 aa, Artificial Sequence
  GFR-binding peptide
  MOD_RES (31)..(31): Xaa is C or S
SRVIMVTAKKVKPKRGVIKRIQVPRLAQPVX

SEQ ID NO: 50809 - protein, 33 aa, Artificial Sequence
  GFR-binding peptide
  MOD_RES (2)..(2): Xaa is C or S
GXGEVVMDVQVEKVVKENEDVKAMKVSRLETPV

SEQ ID NO: 50810 - protein, 39 aa, Artificial Sequence
  GFR-binding peptide
  MOD_RES (34)..(34): Xaa is C or S
  MOD_RES (12)..(13)..(14)..(15)..(16): Xaa is A or G
  MOD_RES (17)..(18)..(19)..(20): Xaa is A or G or is absent
SRVVMNSMEGIXXXXXXXXXMIQVTINSLKTPAXTPKTV

SEQ ID NO: 50811 - protein, 41 aa, Artificial Sequence
  GFR-binding peptide
  MOD_RES (1)..(3)..(36)..(37): Xaa is C or S
  MOD_RES (14)..(15)..(16)..(17)..(18): Xaa is A or G
  MOD_RES (19)..(20)..(21)..(22): Xaa is A or G or is absent
XKXSRVIMVQVEKXXXXXXXXXVKAIKVSRLAQPVXXPAAS

SEQ ID NO: 50812 - protein, 41 aa, Artificial Sequence; identical to SEQ ID NO: 18311
  GFR-binding peptide
  MOD_RES (37)..(37): Xaa is C or S

SEQ ID NO: 50813 - protein, 40 aa, Artificial Sequence
  GFR-binding peptide
  MOD_RES (2)..(4)..(38)..(39): Xaa is C or S
  MOD_RES (16)..(17)..(18)..(19)..(20): Xaa is A or G
  MOD_RES (21)..(22)..(23)..(24): Xaa is A or G or is absent
HXGXARVVMNSMEGIXXXXXXXXXMIQVTINSLQTPAXXP

SEQ ID NO: 50814 - protein, 33 aa, Artificial Sequence; identical to SEQ ID NO: 13167
  GFR-binding peptide
  MOD_RES (2)..(2): Xaa is C or S

SEQ ID NO: 50815 - protein, 33 aa, Artificial Sequence; identical to SEQ ID NO: 37851
  GFR-binding peptide
  MOD_RES (1)..(32)..(33): Xaa is C or S

SEQ ID NO: 50816 - protein, 36 aa, Artificial Sequence; identical to SEQ ID NO: 18312
  GFR-binding peptide
  MOD_RES (13)..(14)..(15)..(16)..(17): Xaa is A or G
  MOD_RES (18)..(19)..(20)..(21): Xaa is A or G or is absent

SEQ ID NO: 50817 - protein, 45 aa, Artificial Sequence
  GFR-binding peptide
  MOD_RES (2)..(4)..(41): Xaa is C or S
  MOD_RES (17)..(18)..(19)..(20)..(21): Xaa is A or G
  MOD_RES (22)..(23)..(24)..(25): Xaa is A or G or is absent
AXAXELHEELRNSLQEXXXXXXXXXYYLVTLPEHHVRSPQXKVSS

SEQ ID NO: 50818 - protein, 41 aa, Artificial Sequence
  GFR-binding peptide
  MOD_RES (2)..(4)..(36)..(37): Xaa is C or S
HXGXSRVVMNVTAKKIVNSSDDIKRVQVPRLKTPAXXPKPV

SEQ ID NO: 50819 - protein, 36 aa, Artificial Sequence; identical to SEQ ID NO: 18313
  GFR-binding peptide
  MOD_RES (1)..(35): Xaa is C or S
  MOD_RES (13)..(14)..(15)..(16)..(17): Xaa is A or G
  MOD_RES (18)..(19)..(20)..(21): Xaa is A or G or is absent

SEQ ID NO: 50820 - protein, 42 aa, Artificial Sequence; identical to SEQ ID NO: 13171
  GFR-binding peptide
  MOD_RES (2)..(4)..(38)..(39): Xaa is C or S
  MOD_RES (16)..(17)..(18)..(19)..(20): Xaa is A or G
  MOD_RES (21)..(22)..(23)..(24): Xaa is A or G or is absent

SEQ ID NO: 50821 - protein, 36 aa, Artificial Sequence; identical to SEQ ID NO: 13173
  GFR-binding peptide
  MOD_RES (2)..(4): Xaa is C or S
  MOD_RES (15)..(16)..(17)..(18)..(19): Xaa is A or G
  MOD_RES (20)..(21)..(22)..(23): Xaa is A or G or is absent

SEQ ID NO: 50822 - protein, 33 aa, Artificial Sequence; identical to SEQ ID NO: 13175
  GFR-binding peptide
  MOD_RES (1)..(32)..(33): Xaa is C or S

SEQ ID NO: 50823 - protein, 35 aa, Artificial Sequence; identical to SEQ ID NO: 18317
  GFR-binding peptide
  MOD_RES (12)..(13)..(14)..(15)..(16): Xaa is A or G
  MOD_RES (17)..(18)..(19)..(20): Xaa is A or G or is absent

SEQ ID NO: 50824 - protein, 34 aa, Artificial Sequence
  GFR-binding peptide
LHEELRNSLQELKPKKRVYEYYLVTLPEHHVRSP

SEQ ID NO: 50825 - protein, 41 aa, Artificial Sequence; identical to SEQ ID NO: 13177
  GFR-binding peptide
  MOD_RES (2)..(4)..(36)..(37): Xaa is C or S

SEQ ID NO: 50826 - protein, 44 aa, Artificial Sequence; identical to SEQ ID NO: 18319
  GFR-binding peptide
  MOD_RES (2)..(4)..(38): Xaa is C or S

SEQ ID NO: 50827 - protein, 39 aa, Artificial Sequence; identical to SEQ ID NO: 18321
  GFR-binding peptide
  MOD_RES (1)..(3): Xaa is C or S
  MOD_RES (16)..(17)..(18)..(19)..(20): Xaa is A or G
  MOD_RES (21)..(22)..(23)..(24): Xaa is A or G or is absent

SEQ ID NO: 50828 - protein, 39 aa, Artificial Sequence
  GFR-binding peptide
  MOD_RES (2)..(36)..(37): Xaa is C or S
  MOD_RES (14)..(15)..(16)..(17)..(18): Xaa is A or G
  MOD_RES (19)..(20)..(21)..(22): Xaa is A or G or is absent
GXSRVVMNVTAKKXXXXXXXXXIKRVQVPRLKTPAXXPK

SEQ ID NO: 50829 - protein, 37 aa, Artificial Sequence
  GFR-binding peptide
  MOD_RES (34)..(35): Xaa is C or S
  MOD_RES (12)..(13)..(14)..(15)..(16): Xaa is A or G
  MOD_RES (17)..(18)..(19)..(20): Xaa is A or G or is absent
SRVVMNSMEGIXXXXXXXXXMIQVTINSLKTPAXXPK

SEQ ID NO: 50830 - protein, 39 aa, Artificial Sequence
  GFR-binding peptide
  MOD_RES (1)..(3)..(36)..(37): Xaa is C or S
  MOD_RES (14)..(15)..(16)..(17)..(18): Xaa is A or G
  MOD_RES (19)..(20)..(21)..(22): Xaa is A or G or is absent
XKXSKVIMSMEGIXXXXXXXXXMIQITINSLDQSVXXPS

SEQ ID NO: 50831 - protein, 30 aa, Artificial Sequence
  GFR-binding peptide
EVVMEVQVEKVVKDYEDVKAMKVSRLETPV

SEQ ID NO: 50832 - protein, 36 aa, Artificial Sequence
  GFR-binding peptide
  MOD_RES (2)..(2): Xaa is C or S
  MOD_RES (15)..(16)..(17)..(18)..(19): Xaa is A or G
  MOD_RES (20)..(21)..(22)..(23): Xaa is A or G or is absent
KXALHDELTNSLQEXXXXXXXXXYYVVPLPELQVQT

SEQ ID NO: 50833 - protein, 40 aa, Artificial Sequence
  GFR-binding peptide
  MOD_RES (37)..(37): Xaa is C or S
ELHEELRNSLQELKPKKRVYEYYVVPLPEHHVRSPQXKVS

SEQ ID NO: 50834 - protein, 43 aa, Artificial Sequence
  GFR-binding peptide
  MOD_RES (2)..(4)..(41): Xaa is C or S
  MOD_RES (17)..(18)..(19)..(20)..(21): Xaa is A or G
  MOD_RES (22)..(23)..(24)..(25): Xaa is A or G or is absent
AXAXELHEELRNSLQEXXXXXXXXXYYVVPLPEHHVRSPQXKV

SEQ ID NO: 50835 - protein, 39 aa, Artificial Sequence; identical to SEQ ID NO: 18332
  GFR-binding peptide
  MOD_RES (2)..(39): Xaa is C or S
  MOD_RES (15)..(16)..(17)..(18)..(19): Xaa is A or G
  MOD_RES (20)..(21)..(22)..(23): Xaa is A or G or is absent

SEQ ID NO: 50836 - protein, 32 aa, Artificial Sequence
  GFR-binding peptide
  MOD_RES (31)..(32): Xaa is C or S
SRVIMVQVEKVKPKRGVVKAIKVSRLAQPVXX

SEQ ID NO: 50837 - protein, 40 aa, Artificial Sequence; identical to SEQ ID NO: 13186
  GFR-binding peptide
  MOD_RES (2)..(36): Xaa is C or S
  MOD_RES (14)..(15)..(16)..(17)..(18): Xaa is A or G
  MOD_RES (19)..(20)..(21)..(22): Xaa is A or G or is absent

SEQ ID NO: 50838 - protein, 34 aa, Artificial Sequence
  GFR-binding peptide
  MOD_RES (2)..(4): Xaa is C or S
SXKXSRVIMVQVEKVKPKRGVVKAIKVSRLAQPV

SEQ ID NO: 50839 - protein, 42 aa, Artificial Sequence
  GFR-binding peptide
  MOD_RES (1)..(38): Xaa is C or S
  MOD_RES (14)..(15)..(16)..(17)..(18): Xaa is A or G
  MOD_RES (19)..(20)..(21)..(22): Xaa is A or G or is absent
XELHEELRNSLQEXXXXXXXXXYYVVPLPEHHVRSPQXKVSS

SEQ ID NO: 50840 - protein, 36 aa, Artificial Sequence
  GFR-binding peptide
  MOD_RES (1)..(33)..(34): Xaa is C or S
XGEVVMDSMEGIVVKENEDMIQMTINSLETPVXXAK

SEQ ID NO: 50841 - protein, 33 aa, Artificial Sequence; identical to SEQ ID NO: 13191
  GFR-binding peptide
  MOD_RES (31)..(32): Xaa is C or S

SEQ ID NO: 50842 - protein, 40 aa, Artificial Sequence
  GFR-binding peptide
  MOD_RES (2)..(36)..(37): Xaa is C or S
  MOD_RES (14)..(15)..(16)..(17)..(18): Xaa is A or G
  MOD_RES (19)..(20)..(21)..(22): Xaa is A or G or is absent
GXGEVVMESMEGIXXXXXXXXXMIQMTINSLETPVXXAKP

SEQ ID NO: 50843 - protein, 43 aa, Artificial Sequence; identical to SEQ ID NO: 18336
  GFR-binding peptide
  MOD_RES (1)..(3)..(40): Xaa is C or S
  MOD_RES (16)..(17)..(18)..(19)..(20): Xaa is A or G
  MOD_RES (21)..(22)..(23)..(24): Xaa is A or G or is absent

SEQ ID NO: 50844 - protein, 35 aa, Artificial Sequence
  GFR-binding peptide
  MOD_RES (2)..(34)..(35): Xaa is C or S
GXARVVMNVTAKKIVNSSDDIKRVQVPRLQTPAXX

SEQ ID NO: 50845 - protein, 39 aa, Artificial Sequence; identical to SEQ ID NO: 13194
  GFR-binding peptide
  MOD_RES (33)..(34): Xaa is C or S
  MOD_RES (11)..(12)..(13)..(14)..(15): Xaa is A or G
  MOD_RES (16)..(17)..(18)..(19): Xaa is A or G or is absent

SEQ ID NO: 50846 - protein, 41 aa, Artificial Sequence
  GFR-binding peptide
  MOD_RES (2)..(4)..(38)..(39): Xaa is C or S
  MOD_RES (16)..(17)..(18)..(19)..(20): Xaa is A or G
  MOD_RES (21)..(22)..(23)..(24): Xaa is A or G or is absent
HXGXARVVMNVTAKKXXXXXXXXXIKRVQVPRLQTPAXXPK

SEQ ID NO: 50847 - protein, 41 aa, Artificial Sequence
  GFR-binding peptide
  MOD_RES (2)..(36)..(37): Xaa is C or S
  MOD_RES (14)..(15)..(16)..(17)..(18): Xaa is A or G
  MOD_RES (19)..(20)..(21)..(22): Xaa is A or G or is absent
GXSRVVMNVQVEKXXXXXXXXXVKAVKVSRLKTPAXXPKPV

SEQ ID NO: 50848 - protein, 38 aa, Artificial Sequence; identical to SEQ ID NO: 18338
  GFR-binding peptide
  MOD_RES (2)..(36): Xaa is C or S
  MOD_RES (14)..(15)..(16)..(17)..(18): Xaa is A or G
  MOD_RES (19)..(20)..(21)..(22): Xaa is A or G or is absent

SEQ ID NO: 50849 - protein, 32 aa, Artificial Sequence
  GFR-binding peptide
  MOD_RES (11)..(12)..(13)..(14)..(15): Xaa is A or G
  MOD_RES (16)..(17)..(18)..(19): Xaa is A or G or is absent
RVVMNVTAKKXXXXXXXXXIKRVQVPRLQTPA

SEQ ID NO: 50850 - protein, 41 aa, Artificial Sequence
  GFR-binding peptide
  MOD_RES (1)..(35)..(36): Xaa is C or S
  MOD_RES (13)..(14)..(15)..(16)..(17): Xaa is A or G
  MOD_RES (18)..(19)..(20)..(21): Xaa is A or G or is absent
XGEVVMEVQVEKXXXXXXXXXVKAMKVSRLETPVXXAKPIS

SEQ ID NO: 50851 - protein, 37 aa, Artificial Sequence; identical to SEQ ID NO: 13198
  GFR-binding peptide
  MOD_RES (1)..(3)..(35)..(36): Xaa is C or S

SEQ ID NO: 50852 - protein, 36 aa, Artificial Sequence
  GFR-binding peptide
  MOD_RES (33)..(33): Xaa is C or S
  MOD_RES (11)..(12)..(13)..(14)..(15): Xaa is A or G
  MOD_RES (16)..(17)..(18)..(19): Xaa is A or G or is absent
RVVMNVQVEKXXXXXXXXXVKAVKVSRLKTPAXTPK

SEQ ID NO: 50853 - protein, 34 aa, Artificial Sequence
  GFR-binding peptide
  MOD_RES (1)..(32)..(33): Xaa is C or S
XSKVIMSMEGIIKPTKGIMIQITINSLDQSVXXP

SEQ ID NO: 50854 - protein, 36 aa, Artificial Sequence; identical to SEQ ID NO: 18343
  GFR-binding peptide
  MOD_RES (35)..(35): Xaa is C or S
  MOD_RES (11)..(12)..(13)..(14)..(15): Xaa is A or G
  MOD_RES (16)..(17)..(18)..(19): Xaa is A or G or is absent

SEQ ID NO: 50855 - protein, 42 aa, Artificial Sequence; identical to SEQ ID NO: 18345
  GFR-binding peptide
  MOD_RES (1)..(3)..(37): Xaa is C or S
  MOD_RES (15)..(16)..(17)..(18)..(19): Xaa is A or G
  MOD_RES (20)..(21)..(22)..(23): Xaa is A or G or is absent

SEQ ID NO: 50856 - protein, 39 aa, Artificial Sequence; identical to SEQ ID NO: 13201
  GFR-binding peptide
  MOD_RES (1)..(34)..(35): Xaa is C or S
  MOD_RES (12)..(13)..(14)..(15)..(16): Xaa is A or G
  MOD_RES (17)..(18)..(19)..(20): Xaa is A or G or is absent

SEQ ID NO: 50857 - protein, 37 aa, Artificial Sequence; identical to SEQ ID NO: 18348
  GFR-binding peptide
  MOD_RES (1)..(1): Xaa is C or S

SEQ ID NO: 50858 - protein, 40 aa, Artificial Sequence; identical to SEQ ID NO: 18349
  GFR-binding peptide
  MOD_RES (2)..(39): Xaa is C or S
  MOD_RES (15)..(16)..(17)..(18)..(19): Xaa is A or G
  MOD_RES (20)..(21)..(22)..(23): Xaa is A or G or is absent

SEQ ID NO: 50859 - protein, 35 aa, Artificial Sequence; identical to SEQ ID NO: 13204
  GFR-binding peptide
  MOD_RES (32)..(33): Xaa is C or S

SEQ ID NO: 50860 - protein, 42 aa, Artificial Sequence; identical to SEQ ID NO: 18350
  GFR-binding peptide
  MOD_RES (1)..(3)..(40): Xaa is C or S
  MOD_RES (16)..(17)..(18)..(19)..(20): Xaa is A or G
  MOD_RES (21)..(22)..(23)..(24): Xaa is A or G or is absent

SEQ ID NO: 50861 - protein, 39 aa, Artificial Sequence
  GFR-binding peptide
  MOD_RES (1)..(3)..(37): Xaa is C or S
  MOD_RES (15)..(16)..(17)..(18)..(19): Xaa is A or G
  MOD_RES (20)..(21)..(22)..(23): Xaa is A or G or is absent
XEXKNHQLFNSLQEXXXXXXXXXYYLMTLPEEETPVXEL

SEQ ID NO: 50862 - protein, 33 aa, Artificial Sequence; identical to SEQ ID NO: 13206
  GFR-binding peptide
  MOD_RES (2)..(2): Xaa is C or S

SEQ ID NO: 50863 - protein, 33 aa, Artificial Sequence
  GFR-binding peptide
  MOD_RES (2)..(2): Xaa is C or S
GXSRVVMNVTAKKIVNSSDDIKRVQVPRLKTPA

SEQ ID NO: 50864 - protein, 38 aa, Artificial Sequence
  GFR-binding peptide
  MOD_RES (1)..(3)..(37)..(38): Xaa is C or S
  MOD_RES (15)..(16)..(17)..(18)..(19): Xaa is A or G
  MOD_RES (20)..(21)..(22)..(23): Xaa is A or G or is absent
XGXGEVVMDVQVEKXXXXXXXXXVKAMKVSRLETPVXX

SEQ ID NO: 50865 - protein, 38 aa, Artificial Sequence; identical to SEQ ID NO: 13211
  GFR-binding peptide
  MOD_RES (33)..(34): Xaa is C or S
  MOD_RES (11)..(12)..(13)..(14)..(15): Xaa is A or G
  MOD_RES (16)..(17)..(18)..(19): Xaa is A or G or is absent

SEQ ID NO: 50866 - protein, 34 aa, Artificial Sequence
  GFR-binding peptide
  MOD_RES (1)..(3)..(34): Xaa is C or S
XKXSKVIMVTAKKIKPTKGIIKRIQVPRLDQSVX

SEQ ID NO: 50867 - protein, 39 aa, Artificial Sequence
  GFR-binding peptide
  MOD_RES (1)..(3)..(37)..(38): Xaa is C or S
  MOD_RES (15)..(16)..(17)..(18)..(19): Xaa is A or G
  MOD_RES (20)..(21)..(22)..(23): Xaa is A or G or is absent
XGXGEVVMESMEGIXXXXXXXXXMIQMTINSLETPVXXA

SEQ ID NO: 50868 - protein, 37 aa, Artificial Sequence; identical to SEQ ID NO: 18353
  GFR-binding peptide
  MOD_RES (1)..(3): Xaa is C or S
  MOD_RES (16)..(17)..(18)..(19)..(20): Xaa is A or G
  MOD_RES (21)..(22)..(23)..(24): Xaa is A or G or is absent

SEQ ID NO: 50869 - protein, 34 aa, Artificial Sequence
  GFR-binding peptide
  MOD_RES (1)..(34): Xaa is C or S
  MOD_RES (12)..(13)..(14)..(15)..(16): Xaa is A or G
  MOD_RES (17)..(18)..(19)..(20): Xaa is A or G or is absent
XSRVIMVTAKKXXXXXXXXXIKRIQVPRLAQPVX

SEQ ID NO: 50870 - protein, 39 aa, Artificial Sequence; identical to SEQ ID NO: 18360
  GFR-binding peptide
  MOD_RES (37)..(37): Xaa is C or S

SEQ ID NO: 50871 - protein, 35 aa, Artificial Sequence
  GFR-binding peptide
  MOD_RES (34)..(34): Xaa is C or S
KNHQLFNSLQEHQGQHPKIRYYLMTLPEEETPVXE

SEQ ID NO: 50872 - protein, 35 aa, Artificial Sequence
  GFR-binding peptide
  MOD_RES (34)..(34): Xaa is C or S
  MOD_RES (12)..(13)..(14)..(15)..(16): Xaa is A or G
  MOD_RES (17)..(18)..(19)..(20): Xaa is A or G or is absent
SRVVMNVQVEKXXXXXXXXXVKAVKVSRLKTPAXT

SEQ ID NO: 50873 - protein, 37 aa, Artificial Sequence; identical to SEQ ID NO: 18366
  GFR-binding peptide
  MOD_RES (1)..(1): Xaa is C or S

SEQ ID NO: 50874 - protein, 38 aa, Artificial Sequence
  GFR-binding peptide
  MOD_RES (34)..(35): Xaa is C or S
  MOD_RES (12)..(13)..(14)..(15)..(16): Xaa is A or G
  MOD_RES (17)..(18)..(19)..(20): Xaa is A or G or is absent
GEVVMESMEGIXXXXXXXXXMIQMTINSLETPVXXAKP

SEQ ID NO: 50875 - protein, 39 aa, Artificial Sequence; identical to SEQ ID NO: 37927
  GFR-binding peptide
  MOD_RES (33)..(34): Xaa is C or S
  MOD_RES (11)..(12)..(13)..(14)..(15): Xaa is A or G
  MOD_RES (16)..(17)..(18)..(19): Xaa is A or G or is absent

SEQ ID NO: 50876 - protein, 36 aa, Artificial Sequence; identical to SEQ ID NO: 18367
  GFR-binding peptide
  MOD_RES (2)..(36): Xaa is C or S

SEQ ID NO: 50877 - protein, 38 aa, Artificial Sequence
  GFR-binding peptide
  MOD_RES (35)..(35): Xaa is C or S
  MOD_RES (11)..(12)..(13)..(14)..(15): Xaa is A or G
  MOD_RES (16)..(17)..(18)..(19): Xaa is A or G or is absent
HDELTNSLQEXXXXXXXXXYYLVTLPELQVQTPRXQVN

SEQ ID NO: 50878 - protein, 36 aa, Artificial Sequence
  GFR-binding peptide
  MOD_RES (1)..(3)..(35)..(36): Xaa is C or S
XGXARVVMNVTAKKIVNSSDDIKRVQVPRLQTPAXX

SEQ ID NO: 50879 - protein, 43 aa, Artificial Sequence; identical to SEQ ID NO: 13222
  GFR-binding peptide
  MOD_RES (2)..(4)..(38)..(39): Xaa is C or S
  MOD_RES (16)..(17)..(18)..(19)..(20): Xaa is A or G
  MOD_RES (21)..(22)..(23)..(24): Xaa is A or G or is absent

SEQ ID NO: 50880 - protein, 37 aa, Artificial Sequence; identical to SEQ ID NO: 13223
  GFR-binding peptide
  MOD_RES (1)..(3)..(35): Xaa is C or S

SEQ ID NO: 50881 - protein, 33 aa, Artificial Sequence
  GFR-binding peptide
  MOD_RES (1)..(1): Xaa is C or S
  MOD_RES (12)..(13)..(14)..(15)..(16): Xaa is A or G
  MOD_RES (17)..(18)..(19)..(20): Xaa is A or G or is absent
XSKVVMVQVEKXXXXXXXXXVKAIKVSRLDQPV

SEQ ID NO: 50882 - protein, 34 aa, Artificial Sequence; identical to SEQ ID NO: 13224
  GFR-binding peptide
  MOD_RES (1)..(33)..(34): Xaa is C or S

SEQ ID NO: 50883 - protein, 37 aa, Artificial Sequence
  GFR-binding peptide
  MOD_RES (1)..(3)..(35): Xaa is C or S
XGXSRVVMNSMEGIIVNSSDDMIQVTINSLKTPAXTP

SEQ ID NO: 50884 - protein, 35 aa, Artificial Sequence; identical to SEQ ID NO: 18374
  GFR-binding peptide

SEQ ID NO: 50885 - protein, 35 aa, Artificial Sequence
  GFR-binding peptide
  MOD_RES (34)..(35): Xaa is C or S
  MOD_RES (12)..(13)..(14)..(15)..(16): Xaa is A or G
  MOD_RES (17)..(18)..(19)..(20): Xaa is A or G or is absent
SRVVMNVTAKKXXXXXXXXXIKRVQVPRLKTPAXX

SEQ ID NO: 50886 - protein, 37 aa, Artificial Sequence
  GFR-binding peptide
  MOD_RES (35)..(35): Xaa is C or S
HEELRNSLQELKPKKRVYEYYLVTLPEHHVRSPQXKV

SEQ ID NO: 50887 - protein, 33 aa, Artificial Sequence
  GFR-binding peptide
  MOD_RES (1)..(3): Xaa is C or S
XKXSKVVMVTAKKVKPTRGVIKRIQVPRLDQPV

SEQ ID NO: 50888 - protein, 37 aa, Artificial Sequence; identical to SEQ ID NO: 13227
  GFR-binding peptide
  MOD_RES (2)..(36)..(37): Xaa is C or S
  MOD_RES (14)..(15)..(16)..(17)..(18): Xaa is A or G
  MOD_RES (19)..(20)..(21)..(22): Xaa is A or G or is absent

SEQ ID NO: 50889 - protein, 40 aa, Artificial Sequence; identical to SEQ ID NO: 18379
  GFR-binding peptide
  MOD_RES (1)..(3)..(40): Xaa is C or S

SEQ ID NO: 50890 - protein, 44 aa, Artificial Sequence; identical to SEQ ID NO: 18380
  GFR-binding peptide
  MOD_RES (2)..(4)..(38): Xaa is C or S
  MOD_RES (16)..(17)..(18)..(19)..(20): Xaa is A or G
  MOD_RES (21)..(22)..(23)..(24): Xaa is A or G or is absent

SEQ ID NO: 50891 - protein, 41 aa, Artificial Sequence
  GFR-binding peptide
  MOD_RES (1)..(3)..(37): Xaa is C or S
  MOD_RES (15)..(16)..(17)..(18)..(19): Xaa is A or G
  MOD_RES (20)..(21)..(22)..(23): Xaa is A or G or is absent
XEXKNHQLFNSLQEXXXXXXXXXYYLMTLPEEETPVXELGE

SEQ ID NO: 50892 - protein, 37 aa, Artificial Sequence; identical to SEQ ID NO: 18381
  GFR-binding peptide
  MOD_RES (1)..(3)..(37): Xaa is C or S

SEQ ID NO: 50893 - protein, 37 aa, Artificial Sequence; identical to SEQ ID NO: 18382
  GFR-binding peptide
  MOD_RES (37)..(37): Xaa is C or S

SEQ ID NO: 50894 - protein, 33 aa, Artificial Sequence; identical to SEQ ID NO: 18383
  GFR-binding peptide

SEQ ID NO: 50895 - protein, 33 aa, Artificial Sequence
  GFR-binding peptide
  MOD_RES (33)..(33): Xaa is C or S
  MOD_RES (11)..(12)..(13)..(14)..(15): Xaa is A or G
  MOD_RES (16)..(17)..(18)..(19): Xaa is A or G or is absent
RVVMNSMEGIXXXXXXXXXMIQVTINSLKTPAX

SEQ ID NO: 50896 - protein, 36 aa, Artificial Sequence; identical to SEQ ID NO: 18385
  GFR-binding peptide
  MOD_RES (36)..(36): Xaa is C or S

SEQ ID NO: 50897 - protein, 31 aa, Artificial Sequence; identical to SEQ ID NO: 13232
  GFR-binding peptide

SEQ ID NO: 50898 - protein, 37 aa, Artificial Sequence; identical to SEQ ID NO: 18386
  GFR-binding peptide
  MOD_RES (2)..(36): Xaa is C or S

SEQ ID NO: 50899 - protein, 38 aa, Artificial Sequence; identical to SEQ ID NO: 13233
  GFR-binding peptide
  MOD_RES (32)..(33): Xaa is C or S

SEQ ID NO: 50900 - protein, 39 aa, Artificial Sequence; identical to SEQ ID NO: 13234
  GFR-binding peptide
  MOD_RES (1)..(35)..(36): Xaa is C or S
  MOD_RES (13)..(14)..(15)..(16)..(17): Xaa is A or G
  MOD_RES (18)..(19)..(20)..(21): Xaa is A or G or is absent

SEQ ID NO: 50901 - protein, 38 aa, Artificial Sequence; identical to SEQ ID NO: 13237
  GFR-binding peptide
  MOD_RES (2)..(35)..(36): Xaa is C or S
  MOD_RES (13)..(14)..(15)..(16)..(17): Xaa is A or G
  MOD_RES (18)..(19)..(20)..(21): Xaa is A or G or is absent

SEQ ID NO: 50902 - protein, 34 aa, Artificial Sequence
  GFR-binding peptide
  MOD_RES (1)..(33)..(34): Xaa is C or S
XGEVVMESMEGIVVKDYEDMIQMTINSLETPVXX

SEQ ID NO: 50903 - protein, 34 aa, Artificial Sequence
  GFR-binding peptide
  MOD_RES (1)..(3): Xaa is C or S
XGXSRVVMNVQVEKIVNSSDDVKAVKVSRLKTPA

SEQ ID NO: 50904 - protein, 37 aa, Artificial Sequence
  GFR-binding peptide
  MOD_RES (1)..(33)..(34): Xaa is C or S
XGEVVMDVTAKKVVKENEDIKRMQVPRLETPVXXAKP

SEQ ID NO: 50905 - protein, 40 aa, Artificial Sequence; identical to SEQ ID NO: 18391
  GFR-binding peptide
  MOD_RES (37)..(37): Xaa is C or S

SEQ ID NO: 50906 - protein, 36 aa, Artificial Sequence
  GFR-binding peptide
  MOD_RES (1)..(3)..(35): Xaa is C or S
XGXSRVVMNVQVEKIVNSSDDVKAVKVSRLKTPAXT

SEQ ID NO: 50907 - protein, 35 aa, Artificial Sequence; identical to SEQ ID NO: 18392
  GFR-binding peptide
  MOD_RES (13)..(14)..(15)..(16)..(17): Xaa is A or G
  MOD_RES (18)..(19)..(20)..(21): Xaa is A or G or is absent

SEQ ID NO: 50908 - protein, 39 aa, Artificial Sequence
  GFR-binding peptide
  MOD_RES (1)..(3)..(34)..(35): Xaa is C or S
XKXSKVIMSMEGIIKPTKGIMIQITINSLDQSVXXPSAS

SEQ ID NO: 50909 - protein, 43 aa, Artificial Sequence; identical to SEQ ID NO: 18394
  GFR-binding peptide
  MOD_RES (1)..(3)..(40): Xaa is C or S
  MOD_RES (16)..(17)..(18)..(19)..(20): Xaa is A or G
  MOD_RES (21)..(22)..(23)..(24): Xaa is A or G or is absent

SEQ ID NO: 50910 - protein, 36 aa, Artificial Sequence; identical to SEQ ID NO: 13244
  GFR-binding peptide
  MOD_RES (2)..(33)..(34): Xaa is C or S

SEQ ID NO: 50911 - protein, 40 aa, Artificial Sequence
  GFR-binding peptide
  MOD_RES (1)..(3)..(34)..(35): Xaa is C or S
XKXSKVVMSMEGIVKPTRGVMIQITINSLDQPVXXPSASA

SEQ ID NO: 50912 - protein, 41 aa, Artificial Sequence; identical to SEQ ID NO: 18395
  GFR-binding peptide
  MOD_RES (1)..(3)..(37): Xaa is C or S
  MOD_RES (15)..(16)..(17)..(18)..(19): Xaa is A or G
  MOD_RES (20)..(21)..(22)..(23): Xaa is A or G or is absent

SEQ ID NO: 50913 - protein, 38 aa, Artificial Sequence
  GFR-binding peptide
  MOD_RES (35)..(35): Xaa is C or S
HDELTNSLQEFIPKKRVIEYYVVPLPELQVQTPRXQVN

SEQ ID NO: 50914 - protein, 36 aa, Artificial Sequence; identical to SEQ ID NO: 18397
  GFR-binding peptide
  MOD_RES (35)..(35): Xaa is C or S

SEQ ID NO: 50915 - protein, 37 aa, Artificial Sequence; identical to SEQ ID NO: 18398
  GFR-binding peptide
  MOD_RES (2)..(4): Xaa is C or S

SEQ ID NO: 50916 - protein, 42 aa, Artificial Sequence
  GFR-binding peptide
  MOD_RES (2)..(36): Xaa is C or S
  MOD_RES (14)..(15)..(16)..(17)..(18): Xaa is A or G
  MOD_RES (19)..(20)..(21)..(22): Xaa is A or G or is absent
GXSRVVMNVTAKKXXXXXXXXXIKRVQVPRLKTPAXTPKTVH

SEQ ID NO: 50917 - protein, 31 aa, Artificial Sequence; identical to SEQ ID NO: 13255
  GFR-binding peptide
  MOD_RES (31)..(31): Xaa is C or S

SEQ ID NO: 50918 - protein, 42 aa, Artificial Sequence; identical to SEQ ID NO: 18402
  GFR-binding peptide
  MOD_RES (1)..(3)..(40): Xaa is C or S

SEQ ID NO: 50919 - protein, 42 aa, Artificial Sequence; identical to SEQ ID NO: 13256
  GFR-binding peptide
  MOD_RES (1)..(3)..(37)..(38): Xaa is C or S
  MOD_RES (15)..(16)..(17)..(18)..(19): Xaa is A or G
  MOD_RES (20)..(21)..(22)..(23): Xaa is A or G or is absent

SEQ ID NO: 50920 - protein, 36 aa, Artificial Sequence
  GFR-binding peptide
  MOD_RES (32)..(32): Xaa is C or S
SRVVMNVTAKKIVNSSDDIKRVQVPRLKTPAXTPKT

SEQ ID NO: 50921 - protein, 39 aa, Artificial Sequence
  GFR-binding peptide
  MOD_RES (34)..(34): Xaa is C or S
KNHQLFNSLQEHQGQHPKIRYYVMPLPEEETPVXELGED

SEQ ID NO: 50922 - protein, 35 aa, Artificial Sequence; identical to SEQ ID NO: 18408
  GFR-binding peptide
  MOD_RES (33)..(33): Xaa is C or S
  MOD_RES (11)..(12)..(13)..(14)..(15): Xaa is A or G
  MOD_RES (16)..(17)..(18)..(19): Xaa is A or G or is absent

SEQ ID NO: 50923 - protein, 38 aa, Artificial Sequence; identical to SEQ ID NO: 13258
  GFR-binding peptide
  MOD_RES (2)..(4)..(35)..(36): Xaa is C or S

SEQ ID NO: 50924 - protein, 34 aa, Artificial Sequence; identical to SEQ ID NO: 18410
  GFR-binding peptide
  MOD_RES (13)..(14)..(15)..(16)..(17): Xaa is A or G
  MOD_RES (18)..(19)..(20)..(21): Xaa is A or G or is absent

SEQ ID NO: 50925 - protein, 41 aa, Artificial Sequence; identical to SEQ ID NO: 13262
  GFR-binding peptide
  MOD_RES (2)..(4)..(36)..(37): Xaa is C or S

SEQ ID NO: 50926 - protein, 37 aa, Artificial Sequence
  GFR-binding peptide
  MOD_RES (1)..(35): Xaa is C or S
  MOD_RES (13)..(14)..(15)..(16)..(17): Xaa is A or G
  MOD_RES (18)..(19)..(20)..(21): Xaa is A or G or is absent
XSRVVMNVTAKKXXXXXXXXXIKRVQVPRLKTPAXTP

SEQ ID NO: 50927 - protein, 38 aa, Artificial Sequence
  GFR-binding peptide
  MOD_RES (2)..(4)..(37)..(38): Xaa is C or S
  MOD_RES (15)..(16)..(17)..(18)..(19): Xaa is A or G
  MOD_RES (20)..(21)..(22)..(23): Xaa is A or G or is absent
SXKXSRVIMVQVEKXXXXXXXXXVKAIKVSRLAQPVXX

SEQ ID NO: 50928 - protein, 40 aa, Artificial Sequence
  GFR-binding peptide
  MOD_RES (1)..(34)..(35): Xaa is C or S
  MOD_RES (12)..(13)..(14)..(15)..(16): Xaa is A or G
  MOD_RES (17)..(18)..(19)..(20): Xaa is A or G or is absent
XSKVIMVTAKKXXXXXXXXXIKRIQVPRLDQSVXXPSASA

SEQ ID NO: 50929 - protein, 44 aa, Artificial Sequence; identical to SEQ ID NO: 18414
  GFR-binding peptide
  MOD_RES (1)..(3)..(40): Xaa is C or S
  MOD_RES (16)..(17)..(18)..(19)..(20): Xaa is A or G
  MOD_RES (21)..(22)..(23)..(24): Xaa is A or G or is absent

SEQ ID NO: 50930 - protein, 35 aa, Artificial Sequence; identical to SEQ ID NO: 13267
  GFR-binding peptide
  MOD_RES (1)..(34)..(35): Xaa is C or S
  MOD_RES (12)..(13)..(14)..(15)..(16): Xaa is A or G
  MOD_RES (17)..(18)..(19)..(20): Xaa is A or G or is absent

SEQ ID NO: 50931 - protein, 34 aa, Artificial Sequence
  GFR-binding peptide
  MOD_RES (1)..(1): Xaa is C or S
  MOD_RES (13)..(14)..(15)..(16)..(17): Xaa is A or G
  MOD_RES (18)..(19)..(20)..(21): Xaa is A or G or is absent
XARVVMNVQVEKXXXXXXXXXVKAVKVSRLQTPA

SEQ ID NO: 50932 - protein, 38 aa, Artificial Sequence
  GFR-binding peptide
  MOD_RES (33)..(34): Xaa is C or S
  MOD_RES (11)..(12)..(13)..(14)..(15): Xaa is A or G
  MOD_RES (16)..(17)..(18)..(19): Xaa is A or G or is absent
EVVMEVQVEKXXXXXXXXXVKAMKVSRLETPVXXAKPI

SEQ ID NO: 50933 - protein, 38 aa, Artificial Sequence
  GFR-binding peptide
  MOD_RES (1)..(33)..(34): Xaa is C or S
XGEVVMDVTAKKVVKENEDIKRMQVPRLETPVXXAKPI

SEQ ID NO: 50934 - protein, 34 aa, Artificial Sequence; identical to SEQ ID NO: 13269
  GFR-binding peptide
  MOD_RES (31)..(32): Xaa is C or S

SEQ ID NO: 50935 - protein, 35 aa, Artificial Sequence
  GFR-binding peptide
  MOD_RES (12)..(13)..(14)..(15)..(16): Xaa is A or G
  MOD_RES (17)..(18)..(19)..(20): Xaa is A or G or is absent
LHDELTNSLQEXXXXXXXXXYYVVPLPELQVQTPR

SEQ ID NO: 50936 - protein, 34 aa, Artificial Sequence
  GFR-binding peptide
  MOD_RES (33)..(34): Xaa is C or S
  MOD_RES (11)..(12)..(13)..(14)..(15): Xaa is A or G
  MOD_RES (16)..(17)..(18)..(19): Xaa is A or G or is absent
SKVVMVTAKKXXXXXXXXXIKRIQVPRLDQPVXX

SEQ ID NO: 50937 - protein, 34 aa, Artificial Sequence
  GFR-binding peptide
  MOD_RES (2)..(34): Xaa is C or S
GXGEVVMEVQVEKVVKDYEDVKAMKVSRLETPVX

SEQ ID NO: 50938 - protein, 37 aa, Artificial Sequence
  GFR-binding peptide
  MOD_RES (32)..(33): Xaa is C or S
ARVVMNSMEGIIVNSSDDMIQVTINSLQTPAXXPKPV

SEQ ID NO: 50939 - protein, 39 aa, Artificial Sequence
  GFR-binding peptide
  MOD_RES (34)..(35): Xaa is C or S
  MOD_RES (12)..(13)..(14)..(15)..(16): Xaa is A or G
  MOD_RES (17)..(18)..(19)..(20): Xaa is A or G or is absent
SRVVMNVQVEKXXXXXXXXXVKAVKVSRLKTPAXXPKPV

SEQ ID NO: 50940 - protein, 40 aa, Artificial Sequence
  GFR-binding peptide
  MOD_RES (1)..(35)..(36): Xaa is C or S
  MOD_RES (13)..(14)..(15)..(16)..(17): Xaa is A or G
  MOD_RES (18)..(19)..(20)..(21): Xaa is A or G or is absent
XGEVVMEVQVEKXXXXXXXXXVKAMKVSRLETPVXXAKPI

SEQ ID NO: 50941 - protein, 40 aa, Artificial Sequence
  GFR-binding peptide
  MOD_RES (2)..(36)..(37): Xaa is C or S
  MOD_RES (14)..(15)..(16)..(17)..(18): Xaa is A or G
  MOD_RES (19)..(20)..(21)..(22): Xaa is A or G or is absent
GXSRVVMNVTAKKXXXXXXXXXIKRVQVPRLKTPAXXPKP

SEQ ID NO: 50942 - protein, 34 aa, Artificial Sequence
  GFR-binding peptide
  MOD_RES (2)..(34): Xaa is C or S
GXGEVVMDVTAKKVVKENEDIKRMQVPRLETPVX

SEQ ID NO: 50943 - protein, 44 aa, Artificial Sequence
  GFR-binding peptide
  MOD_RES (2)..(4)..(38)..(39): Xaa is C or S
  MOD_RES (16)..(17)..(18)..(19)..(20): Xaa is A or G
  MOD_RES (21)..(22)..(23)..(24): Xaa is A or G or is absent
RXGXGEVVMDVQVEKXXXXXXXXXVKAMKVSRLETPVXXAKPIK

SEQ ID NO: 50944 - protein, 39 aa, Artificial Sequence
  GFR-binding peptide
  MOD_RES (37)..(37): Xaa is C or S
ALHDELTNSLQEFIPKKRVIEYYLVTLPELQVQTPRXQV

SEQ ID NO: 50945 - protein, 43 aa, Artificial Sequence; identical to SEQ ID NO: 18422
  GFR-binding peptide
  MOD_RES (2)..(4)..(41): Xaa is C or S

SEQ ID NO: 50946 - protein, 33 aa, Artificial Sequence
  GFR-binding peptide
  MOD_RES (33)..(33): Xaa is C or S
  MOD_RES (11)..(12)..(13)..(14)..(15): Xaa is A or G
  MOD_RES (16)..(17)..(18)..(19): Xaa is A or G or is absent
SKVIMSMEGIXXXXXXXXXMIQITINSLDQSVX

SEQ ID NO: 50947 - protein, 35 aa, Artificial Sequence; identical to SEQ ID NO: 13276
  GFR-binding peptide
  MOD_RES (33)..(34): Xaa is C or S
  MOD_RES (11)..(12)..(13)..(14)..(15): Xaa is A or G
  MOD_RES (16)..(17)..(18)..(19): Xaa is A or G or is absent

SEQ ID NO: 50948 - protein, 40 aa, Artificial Sequence; identical to SEQ ID NO: 13277
  GFR-binding peptide
  MOD_RES (1)..(3)..(35): Xaa is C or S

SEQ ID NO: 50949 - protein, 32 aa, Artificial Sequence
  GFR-binding peptide
  MOD_RES (1)..(1): Xaa is C or S
XGEVVMEVTAKKVVKDYEDIKRMQVPRLETPV

SEQ ID NO: 50950 - protein, 35 aa, Artificial Sequence
  GFR-binding peptide
  MOD_RES (1)..(32)..(33): Xaa is C or S
XSKVIMVQVEKIKPTKGIVKAIKVSRLDQSVXXPS

SEQ ID NO: 50951 - protein, 37 aa, Artificial Sequence
  GFR-binding peptide
  MOD_RES (1)..(3)..(34)..(35): Xaa is C or S
XKXSKVVMVTAKKVKPTRGVIKRIQVPRLDQPVXXPS

SEQ ID NO: 50952 - protein, 38 aa, Artificial Sequence; identical to SEQ ID NO: 18423
  GFR-binding peptide
  MOD_RES (33)..(33): Xaa is C or S
  MOD_RES (11)..(12)..(13)..(14)..(15): Xaa is A or G
  MOD_RES (16)..(17)..(18)..(19): Xaa is A or G or is absent

SEQ ID NO: 50953 - protein, 34 aa, Artificial Sequence; identical to SEQ ID NO: 13281
  GFR-binding peptide
  MOD_RES (2)..(34): Xaa is C or S

SEQ ID NO: 50954 - protein, 37 aa, Artificial Sequence; identical to SEQ ID NO: 13282
  GFR-binding peptide
  MOD_RES (1)..(34)..(35): Xaa is C or S
  MOD_RES (12)..(13)..(14)..(15)..(16): Xaa is A or G
  MOD_RES (17)..(18)..(19)..(20): Xaa is A or G or is absent

SEQ ID NO: 50955 - protein, 37 aa, Artificial Sequence
  GFR-binding peptide
  MOD_RES (1)..(3)..(35)..(36): Xaa is C or S
XGXGEVVMEVTAKKVVKDYEDIKRMQVPRLETPVXXA

SEQ ID NO: 50956 - protein, 38 aa, Artificial Sequence
  GFR-binding peptide
  MOD_RES (33)..(34): Xaa is C or S
  MOD_RES (11)..(12)..(13)..(14)..(15): Xaa is A or G
  MOD_RES (16)..(17)..(18)..(19): Xaa is A or G or is absent
EVVMEVTAKKXXXXXXXXXIKRMQVPRLETPVXXAKPI

SEQ ID NO: 50957 - protein, 41 aa, Artificial Sequence; identical to SEQ ID NO: 18427
  GFR-binding peptide
  MOD_RES (2)..(4)..(38): Xaa is C or S

SEQ ID NO: 50958 - protein, 42 aa, Artificial Sequence
  GFR-binding peptide
  MOD_RES (1)..(3)..(36)..(37): Xaa is C or S
  MOD_RES (14)..(15)..(16)..(17)..(18): Xaa is A or G
  MOD_RES (19)..(20)..(21)..(22): Xaa is A or G or is absent
XKXSKVIMSMEGIXXXXXXXXXMIQITINSLDQSVXXPSASA

SEQ ID NO: 50959 - protein, 42 aa, Artificial Sequence
  GFR-binding peptide
  MOD_RES (2)..(4)..(36): Xaa is C or S
HXGXSRVVMNSMEGIIVNSSDDMIQVTINSLKTPAXTPKTVH

SEQ ID NO: 50960 - protein, 42 aa, Artificial Sequence; identical to SEQ ID NO: 13283
  GFR-binding peptide
  MOD_RES (1)..(3)..(37)..(38): Xaa is C or S
  MOD_RES (15)..(16)..(17)..(18)..(19): Xaa is A or G
  MOD_RES (20)..(21)..(22)..(23): Xaa is A or G or is absent

SEQ ID NO: 50961 - protein, 36 aa, Artificial Sequence
  GFR-binding peptide
  MOD_RES (1)..(3)..(34)..(35): Xaa is C or S
XKXSRVIMSMEGIVKPKRGVMIQITINSLAQPVXXP

SEQ ID NO: 50962 - protein, 37 aa, Artificial Sequence; identical to SEQ ID NO: 18430
  GFR-binding peptide
  MOD_RES (2)..(2): Xaa is C or S
  MOD_RES (15)..(16)..(17)..(18)..(19): Xaa is A or G
  MOD_RES (20)..(21)..(22)..(23): Xaa is A or G or is absent

SEQ ID NO: 50963 - protein, 34 aa, Artificial Sequence
  GFR-binding peptide
  MOD_RES (33)..(34): Xaa is C or S
  MOD_RES (11)..(12)..(13)..(14)..(15): Xaa is A or G
  MOD_RES (16)..(17)..(18)..(19): Xaa is A or G or is absent
SKVVMVQVEKXXXXXXXXXVKAIKVSRLDQPVXX

SEQ ID NO: 50964 - protein, 36 aa, Artificial Sequence
  GFR-binding peptide
  MOD_RES (1)..(3)..(35)..(36): Xaa is C or S
XGXGEVVMEVTAKKVVKDYEDIKRMQVPRLETPVXX

SEQ ID NO: 50965 - protein, 39 aa, Artificial Sequence; identical to SEQ ID NO: 18433
  GFR-binding peptide
  MOD_RES (2)..(36): Xaa is C or S

SEQ ID NO: 50966 - protein, 35 aa, Artificial Sequence
  GFR-binding peptide
  MOD_RES (2)..(2): Xaa is C or S
  MOD_RES (14)..(15)..(16)..(17)..(18): Xaa is A or G
  MOD_RES (19)..(20)..(21)..(22): Xaa is A or G or is absent
EXKNHQLFNSLQEXXXXXXXXXYYVMPLPEEETPV

SEQ ID NO: 50967 - protein, 41 aa, Artificial Sequence
  GFR-binding peptide
  MOD_RES (1)..(3)..(37)..(38): Xaa is C or S
  MOD_RES (15)..(16)..(17)..(18)..(19): Xaa is A or G
  MOD_RES (20)..(21)..(22)..(23): Xaa is A or G or is absent
XGXSRVVMNVTAKKXXXXXXXXXIKRVQVPRLKTPAXXPKP

SEQ ID NO: 50968 - protein, 35 aa, Artificial Sequence
  GFR-binding peptide
  MOD_RES (2)..(33)..(34): Xaa is C or S
KXSKVVMSMEGIVKPTRGVMIQITINSLDQPVXXP

SEQ ID NO: 50969 - protein, 35 aa, Artificial Sequence; identical to SEQ ID NO: 18435
  GFR-binding peptide
  MOD_RES (33)..(33): Xaa is C or S
  MOD_RES (11)..(12)..(13)..(14)..(15): Xaa is A or G
  MOD_RES (16)..(17)..(18)..(19): Xaa is A or G or is absent

SEQ ID NO: 50970 - protein, 37 aa, Artificial Sequence; identical to SEQ ID NO: 13287
  GFR-binding peptide
  MOD_RES (33)..(34): Xaa is C or S
  MOD_RES (11)..(12)..(13)..(14)..(15): Xaa is A or G
  MOD_RES (16)..(17)..(18)..(19): Xaa is A or G or is absent

SEQ ID NO: 50971 - protein, 30 aa, Artificial Sequence
  GFR-binding peptide
SKVIMSMEGIIKPTKGIMIQITINSLDQSV

SEQ ID NO: 50972 - protein, 39 aa, Artificial Sequence
  GFR-binding peptide
  MOD_RES (2)..(33)..(34): Xaa is C or S
KXSKVVMSMEGIVKPTRGVMIQITINSLDQPVXXPSASA

SEQ ID NO: 50973 - protein, 39 aa, Artificial Sequence
  GFR-binding peptide
  MOD_RES (2)..(36)..(37): Xaa is C or S
  MOD_RES (14)..(15)..(16)..(17)..(18): Xaa is A or G
  MOD_RES (19)..(20)..(21)..(22): Xaa is A or G or is absent
GXGEVVMESMEGIXXXXXXXXXMIQMTINSLETPVXXAK

SEQ ID NO: 50974 - protein, 36 aa, Artificial Sequence; identical to SEQ ID NO: 13292
  GFR-binding peptide
  MOD_RES (1)..(35)..(36): Xaa is C or S
  MOD_RES (13)..(14)..(15)..(16)..(17): Xaa is A or G
  MOD_RES (18)..(19)..(20)..(21): Xaa is A or G or is absent

SEQ ID NO: 50975 - protein, 39 aa, Artificial Sequence; identical to SEQ ID NO: 13296
  GFR-binding peptide
  MOD_RES (1)..(3)..(37): Xaa is C or S
  MOD_RES (15)..(16)..(17)..(18)..(19): Xaa is A or G
  MOD_RES (20)..(21)..(22)..(23): Xaa is A or G or is absent

SEQ ID NO: 50976 - protein, 39 aa, Artificial Sequence
  GFR-binding peptide
  MOD_RES (1)..(35)..(36): Xaa is C or S
  MOD_RES (13)..(14)..(15)..(16)..(17): Xaa is A or G
  MOD_RES (18)..(19)..(20)..(21): Xaa is A or G or is absent
XGEVVMESMEGIXXXXXXXXXMIQMTINSLETPVXXAKP

SEQ ID NO: 50977 - protein, 40 aa, Artificial Sequence
  GFR-binding peptide
  MOD_RES (1)..(38): Xaa is C or S
  MOD_RES (14)..(15)..(16)..(17)..(18): Xaa is A or G
  MOD_RES (19)..(20)..(21)..(22): Xaa is A or G or is absent
XALHDELTNSLQEXXXXXXXXXYYVVPLPELQVQTPRXQV

SEQ ID NO: 50978 - protein, 37 aa, Artificial Sequence; identical to SEQ ID NO: 13297
  GFR-binding peptide
  MOD_RES (34)..(35): Xaa is C or S
  MOD_RES (12)..(13)..(14)..(15)..(16): Xaa is A or G
  MOD_RES (17)..(18)..(19)..(20): Xaa is A or G or is absent

SEQ ID NO: 50979 - protein, 42 aa, Artificial Sequence
  GFR-binding peptide
  MOD_RES (1)..(3)..(36)..(37): Xaa is C or S
  MOD_RES (14)..(15)..(16)..(17)..(18): Xaa is A or G
  MOD_RES (19)..(20)..(21)..(22): Xaa is A or G or is absent
XKXSRVIMSMEGIXXXXXXXXXMIQITINSLAQPVXXPAASA

SEQ ID NO: 50980 - protein, 33 aa, Artificial Sequence
  GFR-binding peptide
  MOD_RES (31)..(32): Xaa is C or S
SKVIMVTAKKIKPTKGIIKRIQVPRLDQSVXXP

SEQ ID NO: 50981 - protein, 37 aa, Artificial Sequence
  GFR-binding peptide
  MOD_RES (35)..(35): Xaa is C or S
HEELRNSLQELKPKKRVYEYYVVPLPEHHVRSPQXKV

SEQ ID NO: 50982 - protein, 36 aa, Artificial Sequence
  GFR-binding peptide
  MOD_RES (34)..(34): Xaa is C or S
  MOD_RES (12)..(13)..(14)..(15)..(16): Xaa is A or G
  MOD_RES (17)..(18)..(19)..(20): Xaa is A or G or is absent
SRVVMNVTAKKXXXXXXXXXIKRVQVPRLKTPAXTP

SEQ ID NO: 50983 - protein, 34 aa, Artificial Sequence
  GFR-binding peptide
HDELTNSLQEFIPKKRVIEYYVVPLPELQVQTPR

SEQ ID NO: 50984 - protein, 38 aa, Artificial Sequence; identical to SEQ ID NO: 18444
  GFR-binding peptide
  MOD_RES (1)..(38): Xaa is C or S
  MOD_RES (14)..(15)..(16)..(17)..(18): Xaa is A or G
  MOD_RES (19)..(20)..(21)..(22): Xaa is A or G or is absent

SEQ ID NO: 50985 - protein, 34 aa, Artificial Sequence
  GFR-binding peptide
  MOD_RES (31)..(32): Xaa is C or S
SKVVMSMEGIVKPTRGVMIQITINSLDQPVXXPS

SEQ ID NO: 50986 - protein, 43 aa, Artificial Sequence
  GFR-binding peptide
  MOD_RES (2)..(4)..(38)..(39): Xaa is C or S
  MOD_RES (16)..(17)..(18)..(19)..(20): Xaa is A or G
  MOD_RES (21)..(22)..(23)..(24): Xaa is A or G or is absent
RXGXGEVVMDSMEGIXXXXXXXXXMIQMTINSLETPVXXAKPI

SEQ ID NO: 50987 - protein, 41 aa, Artificial Sequence
  GFR-binding peptide
  MOD_RES (1)..(3)..(37)..(38): Xaa is C or S
  MOD_RES (15)..(16)..(17)..(18)..(19): Xaa is A or G
  MOD_RES (20)..(21)..(22)..(23): Xaa is A or G or is absent
XGXSRVVMNSMEGIXXXXXXXXXMIQVTINSLKTPAXXPKP

SEQ ID NO: 50988 - protein, 36 aa, Artificial Sequence; identical to SEQ ID NO: 18445
  GFR-binding peptide
  MOD_RES (1)..(35): Xaa is C or S

SEQ ID NO: 50989 - protein, 33 aa, Artificial Sequence
  GFR-binding peptide
  MOD_RES (2)..(33): Xaa is C or S
KXSKVVMVQVEKVKPTRGVVKAIKVSRLDQPVX

SEQ ID NO: 50990 - protein, 39 aa, Artificial Sequence
  GFR-binding peptide
  MOD_RES (2)..(4)..(36): Xaa is C or S
HXGXSRVVMNSMEGIIVNSSDDMIQVTINSLKTPAXTPK

SEQ ID NO: 50991 - protein, 35 aa, Artificial Sequence; identical to SEQ ID NO: 18446
  GFR-binding peptide
  MOD_RES (13)..(14)..(15)..(16)..(17): Xaa is A or G
  MOD_RES (18)..(19)..(20)..(21): Xaa is A or G or is absent

SEQ ID NO: 50992 - protein, 37 aa, Artificial Sequence; identical to SEQ ID NO: 18447
  GFR-binding peptide
  MOD_RES (37)..(37): Xaa is C or S
  MOD_RES (13)..(14)..(15)..(16)..(17): Xaa is A or G
  MOD_RES (18)..(19)..(20)..(21): Xaa is A or G or is absent

SEQ ID NO: 50993 - protein, 36 aa, Artificial Sequence
  GFR-binding peptide
  MOD_RES (1)..(33)..(34): Xaa is C or S
XSRVVMNVTAKKIVNSSDDIKRVQVPRLKTPAXXPK

SEQ ID NO: 50994 - protein, 40 aa, Artificial Sequence; identical to SEQ ID NO: 18448
  GFR-binding peptide
  MOD_RES (1)..(3)..(40): Xaa is C or S

SEQ ID NO: 50995 - protein, 36 aa, Artificial Sequence; identical to SEQ ID NO: 13303
  GFR-binding peptide
  MOD_RES (1)..(32)..(33): Xaa is C or S

SEQ ID NO: 50996 - protein, 34 aa, Artificial Sequence
  GFR-binding peptide
  MOD_RES (1)..(32)..(33): Xaa is C or S
XSKVVMSMEGIVKPTRGVMIQITINSLDQPVXXP

SEQ ID NO: 50997 - protein, 40 aa, Artificial Sequence; identical to SEQ ID NO: 18449
  GFR-binding peptide
  MOD_RES (36)..(36): Xaa is C or S

SEQ ID NO: 50998 - protein, 36 aa, Artificial Sequence
  GFR-binding peptide
  MOD_RES (1)..(33)..(34): Xaa is C or S
XARVVMNVQVEKIVNSSDDVKAVKVSRLQTPAXXPK

SEQ ID NO: 50999 - protein, 35 aa, Artificial Sequence; identical to SEQ ID NO: 13307
  GFR-binding peptide
  MOD_RES (33)..(34): Xaa is C or S
  MOD_RES (11)..(12)..(13)..(14)..(15): Xaa is A or G
  MOD_RES (16)..(17)..(18)..(19): Xaa is A or G or is absent

SEQ ID NO: 51000 - protein, 39 aa, Artificial Sequence
  GFR-binding peptide
  MOD_RES (2)..(4)..(37)..(38): Xaa is C or S
  MOD_RES (15)..(16)..(17)..(18)..(19): Xaa is A or G
  MOD_RES (20)..(21)..(22)..(23): Xaa is A or G or is absent
SXKXSRVIMVQVEKXXXXXXXXXVKAIKVSRLAQPVXXP

SEQ ID NO: 51001 - protein, 41 aa, Artificial Sequence; identical to SEQ ID NO: 13310
  GFR-binding peptide
  MOD_RES (1)..(3)..(35): Xaa is C or S

SEQ ID NO: 51002 - protein, 37 aa, Artificial Sequence; identical to SEQ ID NO: 13311
  GFR-binding peptide
  MOD_RES (1)..(3)..(37): Xaa is C or S
  MOD_RES (15)..(16)..(17)..(18)..(19): Xaa is A or G
  MOD_RES (20)..(21)..(22)..(23): Xaa is A or G or is absent

SEQ ID NO: 51003 - protein, 38 aa, Artificial Sequence; identical to SEQ ID NO: 13312
  GFR-binding peptide
  MOD_RES (1)..(35)..(36): Xaa is C or S
  MOD_RES (13)..(14)..(15)..(16)..(17): Xaa is A or G
  MOD_RES (18)..(19)..(20)..(21): Xaa is A or G or is absent

SEQ ID NO: 51004 - protein, 39 aa, Artificial Sequence
  GFR-binding peptide
  MOD_RES (1)..(34)..(35): Xaa is C or S
  MOD_RES (12)..(13)..(14)..(15)..(16): Xaa is A or G
  MOD_RES (17)..(18)..(19)..(20): Xaa is A or G or is absent
XSKVIMSMEGIXXXXXXXXXMIQITINSLDQSVXXPSAS

SEQ ID NO: 51005 - protein, 35 aa, Artificial Sequence
  GFR-binding peptide
  MOD_RES (31)..(31): Xaa is C or S
RVVMNVQVEKIVNSSDDVKAVKVSRLKTPAXTPKT

SEQ ID NO: 51006 - protein, 37 aa, Artificial Sequence; identical to SEQ ID NO: 18452
  GFR-binding peptide
  MOD_RES (1)..(3)..(37): Xaa is C or S

SEQ ID NO: 51007 - protein, 41 aa, Artificial Sequence
  GFR-binding peptide
  MOD_RES (2)..(36): Xaa is C or S
  MOD_RES (14)..(15)..(16)..(17)..(18): Xaa is A or G
  MOD_RES (19)..(20)..(21)..(22): Xaa is A or G or is absent
GXSRVVMNSMEGIXXXXXXXXXMIQVTINSLKTPAXTPKTV

SEQ ID NO: 51008 - protein, 37 aa, Artificial Sequence
  GFR-binding peptide
  MOD_RES (1)..(3)..(35)..(36): Xaa is C or S
XGXGEVVMDVTAKKVVKENEDIKRMQVPRLETPVXXA

SEQ ID NO: 51009 - protein, 43 aa, Artificial Sequence
  GFR-binding peptide
  MOD_RES (2)..(4)..(38)..(39): Xaa is C or S
  MOD_RES (16)..(17)..(18)..(19)..(20): Xaa is A or G
  MOD_RES (21)..(22)..(23)..(24): Xaa is A or G or is absent
HXGXSRVVMNVTAKKXXXXXXXXXIKRVQVPRLKTPAXXPKPV

SEQ ID NO: 51010 - protein, 34 aa, Artificial Sequence; identical to SEQ ID NO: 13315
  GFR-binding peptide
  MOD_RES (2)..(2): Xaa is C or S
  MOD_RES (13)..(14)..(15)..(16)..(17): Xaa is A or G
  MOD_RES (18)..(19)..(20)..(21): Xaa is A or G or is absent

SEQ ID NO: 51011 - protein, 34 aa, Artificial Sequence; identical to SEQ ID NO: 18454
  GFR-binding peptide
  MOD_RES (33)..(33): Xaa is C or S

SEQ ID NO: 51012 - protein, 36 aa, Artificial Sequence
  GFR-binding peptide
  MOD_RES (33)..(34): Xaa is C or S
  MOD_RES (11)..(12)..(13)..(14)..(15): Xaa is A or G
  MOD_RES (16)..(17)..(18)..(19): Xaa is A or G or is absent
RVVMNVTAKKXXXXXXXXXIKRVQVPRLQTPAXXPK

SEQ ID NO: 51013 - protein, 36 aa, Artificial Sequence
  GFR-binding peptide
  MOD_RES (31)..(32): Xaa is C or S
SKVIMVQVEKIKPTKGIVKAIKVSRLDQSVXXPSAS

SEQ ID NO: 51014 - protein, 38 aa, Artificial Sequence
  GFR-binding peptide
  MOD_RES (1)..(3)..(34)..(35): Xaa is C or S
XKXSKVVMSMEGIVKPTRGVMIQITINSLDQPVXXPSA

SEQ ID NO: 51015 - protein, 38 aa, Artificial Sequence
  GFR-binding peptide
  MOD_RES (1)..(3)..(34)..(35): Xaa is C or S
XKXSKVVMVQVEKVKPTRGVVKAIKVSRLDQPVXXPSA

SEQ ID NO: 51016 - protein, 42 aa, Artificial Sequence; identical to SEQ ID NO: 18457
  GFR-binding peptide
  MOD_RES (2)..(4)..(41): Xaa is C or S

SEQ ID NO: 51017 - protein, 38 aa, Artificial Sequence
  GFR-binding peptide
  MOD_RES (2)..(36): Xaa is C or S
  MOD_RES (14)..(15)..(16)..(17)..(18): Xaa is A or G
  MOD_RES (19)..(20)..(21)..(22): Xaa is A or G or is absent
GXSRVVMNSMEGIXXXXXXXXXMIQVTINSLKTPAXTP

SEQ ID NO: 51018 - protein, 41 aa, Artificial Sequence; identical to SEQ ID NO: 18459
  GFR-binding peptide
  MOD_RES (2)..(4)..(41): Xaa is C or S

SEQ ID NO: 51019 - protein, 36 aa, Artificial Sequence
  GFR-binding peptide
  MOD_RES (1)..(3)..(35)..(36): Xaa is C or S
XGXGEVVMDVTAKKVVKENEDIKRMQVPRLETPVXX

SEQ ID NO: 51020 - protein, 40 aa, Artificial Sequence; identical to SEQ ID NO: 13320
  GFR-binding peptide
  MOD_RES (1)..(3)..(35)..(36): Xaa is C or S

SEQ ID NO: 51021 - protein, 33 aa, Artificial Sequence
  GFR-binding peptide
  MOD_RES (1)..(33): Xaa is C or S
XGEVVMEVQVEKVVKDYEDVKAMKVSRLETPVX

SEQ ID NO: 51022 - protein, 38 aa, Artificial Sequence; identical to SEQ ID NO: 13322
  GFR-binding peptide
  MOD_RES (34)..(35): Xaa is C or S
  MOD_RES (12)..(13)..(14)..(15)..(16): Xaa is A or G
  MOD_RES (17)..(18)..(19)..(20): Xaa is A or G or is absent

SEQ ID NO: 51023 - protein, 34 aa, Artificial Sequence
  GFR-binding peptide
  MOD_RES (12)..(13)..(14)..(15)..(16): Xaa is A or G
  MOD_RES (17)..(18)..(19)..(20): Xaa is A or G or is absent
LHEELRNSLQEXXXXXXXXXYYLVTLPEHHVRSP

SEQ ID NO: 51024 - protein, 35 aa, Artificial Sequence; identical to SEQ ID NO: 13323
  GFR-binding peptide
  MOD_RES (2)..(4): Xaa is C or S

SEQ ID NO: 51025 - protein, 33 aa, Artificial Sequence
  GFR-binding peptide
  MOD_RES (2)..(33): Xaa is C or S
KXSKVIMVQVEKIKPTKGIVKAIKVSRLDQSVX

SEQ ID NO: 51026 - protein, 33 aa, Artificial Sequence; identical to SEQ ID NO: 13326
  GFR-binding peptide
  MOD_RES (1)..(33): Xaa is C or S

SEQ ID NO: 51027 - protein, 34 aa, Artificial Sequence; identical to SEQ ID NO: 13328
  GFR-binding peptide
  MOD_RES (32)..(33): Xaa is C or S

SEQ ID NO: 51028 - protein, 36 aa, Artificial Sequence; identical to SEQ ID NO: 13329
  GFR-binding peptide
  MOD_RES (1)..(3): Xaa is C or S
  MOD_RES (15)..(16)..(17)..(18)..(19): Xaa is A or G
  MOD_RES (20)..(21)..(22)..(23): Xaa is A or G or is absent

SEQ ID NO: 51029 - protein, 38 aa, Artificial Sequence; identical to SEQ ID NO: 18468
  GFR-binding peptide
  MOD_RES (2)..(4): Xaa is C or S
  MOD_RES (17)..(18)..(19)..(20)..(21): Xaa is A or G
  MOD_RES (22)..(23)..(24)..(25): Xaa is A or G or is absent

SEQ ID NO: 51030 - protein, 37 aa, Artificial Sequence
  GFR-binding peptide
  MOD_RES (2)..(4)..(37): Xaa is C or S
  MOD_RES (15)..(16)..(17)..(18)..(19): Xaa is A or G
  MOD_RES (20)..(21)..(22)..(23): Xaa is A or G or is absent
SXKXSKVIMVQVEKXXXXXXXXXVKAIKVSRLDQSVX

SEQ ID NO: 51031 - protein, 35 aa, Artificial Sequence; identical to SEQ ID NO: 13335
  GFR-binding peptide
  MOD_RES (32)..(33): Xaa is C or S

SEQ ID NO: 51032 - protein, 35 aa, Artificial Sequence
  GFR-binding peptide
  MOD_RES (2)..(4): Xaa is C or S
RXGXGEVVMDVTAKKVVKENEDIKRMQVPRLETPV

SEQ ID NO: 51033 - protein, 39 aa, Artificial Sequence
  GFR-binding peptide
  MOD_RES (2)..(33)..(34): Xaa is C or S
KXSKVIMSMEGIIKPTKGIMIQITINSLDQSVXXPSASA

SEQ ID NO: 51034 - protein, 36 aa, Artificial Sequence
  GFR-binding peptide
  MOD_RES (1)..(3)..(35)..(36): Xaa is C or S
XGXSRVVMNVTAKKIVNSSDDIKRVQVPRLKTPAXX

SEQ ID NO: 51035 - protein, 38 aa, Artificial Sequence
  GFR-binding peptide
  MOD_RES (1)..(3)..(36)..(37): Xaa is C or S
  MOD_RES (14)..(15)..(16)..(17)..(18): Xaa is A or G
  MOD_RES (19)..(20)..(21)..(22): Xaa is A or G or is absent
XKXSRVIMVQVEKXXXXXXXXXVKAIKVSRLAQPVXXP

SEQ ID NO: 51036 - protein, 33 aa, Artificial Sequence; identical to SEQ ID NO: 13344
  GFR-binding peptide
  MOD_RES (32)..(33): Xaa is C or S

SEQ ID NO: 51037 - protein, 34 aa, Artificial Sequence
  GFR-binding peptide
  MOD_RES (11)..(12)..(13)..(14)..(15): Xaa is A or G
  MOD_RES (16)..(17)..(18)..(19): Xaa is A or G or is absent
HDELTNSLQEXXXXXXXXXYYLVTLPELQVQTPR

SEQ ID NO: 51038 - protein, 37 aa, Artificial Sequence
  GFR-binding peptide
  MOD_RES (1)..(33)..(34): Xaa is C or S
XARVVMNSMEGIIVNSSDDMIQVTINSLQTPAXXPKP

SEQ ID NO: 51039 - protein, 40 aa, Artificial Sequence
  GFR-binding peptide
  MOD_RES (1)..(3)..(37): Xaa is C or S
  MOD_RES (15)..(16)..(17)..(18)..(19): Xaa is A or G
  MOD_RES (20)..(21)..(22)..(23): Xaa is A or G or is absent
XGXSRVVMNVQVEKXXXXXXXXXVKAVKVSRLKTPAXTPK

SEQ ID NO: 51040 - protein, 34 aa, Artificial Sequence
  GFR-binding peptide
  MOD_RES (11)..(12)..(13)..(14)..(15): Xaa is A or G
  MOD_RES (16)..(17)..(18)..(19): Xaa is A or G or is absent
HDELTNSLQEXXXXXXXXXYYVVPLPELQVQTPR

SEQ ID NO: 51041 - protein, 38 aa, Artificial Sequence
  GFR-binding peptide
  MOD_RES (2)..(34): Xaa is C or S
GXSRVVMNVQVEKIVNSSDDVKAVKVSRLKTPAXTPKT

SEQ ID NO: 51042 - protein, 39 aa, Artificial Sequence; identical to SEQ ID NO: 18480
  GFR-binding peptide
  MOD_RES (2)..(39): Xaa is C or S

SEQ ID NO: 51043 - protein, 40 aa, Artificial Sequence
  GFR-binding peptide
  MOD_RES (1)..(35)..(36): Xaa is C or S
  MOD_RES (13)..(14)..(15)..(16)..(17): Xaa is A or G
  MOD_RES (18)..(19)..(20)..(21): Xaa is A or G or is absent
XGEVVMDSMEGIXXXXXXXXXMIQMTINSLETPVXXAKPI

SEQ ID NO: 51044 - protein, 41 aa, Artificial Sequence
  GFR-binding peptide
  MOD_RES (2)..(4)..(41): Xaa is C or S
AXAXELHEELRNSLQELKPKKRVYEYYLVTLPEHHVRSPQX

SEQ ID NO: 51045 - protein, 36 aa, Artificial Sequence
  GFR-binding peptide
  MOD_RES (2)..(4)..(36): Xaa is C or S
RXGXGEVVMDSMEGIVVKENEDMIQMTINSLETPVX

SEQ ID NO: 51046 - protein, 41 aa, Artificial Sequence; identical to SEQ ID NO: 13350
  GFR-binding peptide
  MOD_RES (2)..(4)..(38)..(39): Xaa is C or S
  MOD_RES (16)..(17)..(18)..(19)..(20): Xaa is A or G
  MOD_RES (21)..(22)..(23)..(24): Xaa is A or G or is absent

SEQ ID NO: 51047 - protein, 36 aa, Artificial Sequence; identical to SEQ ID NO: 13352
  GFR-binding peptide
  MOD_RES (33)..(33): Xaa is C or S
  MOD_RES (11)..(12)..(13)..(14)..(15): Xaa is A or G
  MOD_RES (16)..(17)..(18)..(19): Xaa is A or G or is absent

SEQ ID NO: 51048 - protein, 37 aa, Artificial Sequence
  GFR-binding peptide
  MOD_RES (37)..(37): Xaa is C or S
  MOD_RES (13)..(14)..(15)..(16)..(17): Xaa is A or G
  MOD_RES (18)..(19)..(20)..(21): Xaa is A or G or is absent
ELHEELRNSLQEXXXXXXXXXYYVVPLPEHHVRSPQX

SEQ ID NO: 51049 - protein, 37 aa, Artificial Sequence
  GFR-binding peptide
  MOD_RES (2)..(36)..(37): Xaa is C or S
  MOD_RES (14)..(15)..(16)..(17)..(18): Xaa is A or G
  MOD_RES (19)..(20)..(21)..(22): Xaa is A or G or is absent
GXARVVMNSMEGIXXXXXXXXXMIQVTINSLQTPAXX

SEQ ID NO: 51050 - protein, 36 aa, Artificial Sequence; identical to SEQ ID NO: 18485
  GFR-binding peptide
  MOD_RES (1)..(1): Xaa is C or S

SEQ ID NO: 51051 - protein, 39 aa, Artificial Sequence
  GFR-binding peptide
  MOD_RES (34)..(35): Xaa is C or S
  MOD_RES (12)..(13)..(14)..(15)..(16): Xaa is A or G
  MOD_RES (17)..(18)..(19)..(20): Xaa is A or G or is absent
GEVVMESMEGIXXXXXXXXXMIQMTINSLETPVXXAKPI

SEQ ID NO: 51052 - protein, 37 aa, Artificial Sequence
  GFR-binding peptide
  MOD_RES (1)..(35)..(36): Xaa is C or S
  MOD_RES (13)..(14)..(15)..(16)..(17): Xaa is A or G
  MOD_RES (18)..(19)..(20)..(21): Xaa is A or G or is absent
XGEVVMEVTAKKXXXXXXXXXIKRMQVPRLETPVXXA

SEQ ID NO: 51053 - protein, 35 aa, Artificial Sequence; identical to SEQ ID NO: 13355
  GFR-binding peptide
  MOD_RES (31)..(31): Xaa is C or S

SEQ ID NO: 51054 - protein, 39 aa, Artificial Sequence
  GFR-binding peptide
  MOD_RES (1)..(35)..(36): Xaa is C or S
  MOD_RES (13)..(14)..(15)..(16)..(17): Xaa is A or G
  MOD_RES (18)..(19)..(20)..(21): Xaa is A or G or is absent
XSRVVMNVTAKKXXXXXXXXXIKRVQVPRLKTPAXXPKP

SEQ ID NO: 51055 - protein, 38 aa, Artificial Sequence; identical to SEQ ID NO: 13358
  GFR-binding peptide
  MOD_RES (2)..(4)..(38): Xaa is C or S
  MOD_RES (16)..(17)..(18)..(19)..(20): Xaa is A or G
  MOD_RES (21)..(22)..(23)..(24): Xaa is A or G or is absent

SEQ ID NO: 51056 - protein, 37 aa, Artificial Sequence; identical to SEQ ID NO: 18490
  GFR-binding peptide
  MOD_RES (2)..(2): Xaa is C or S

SEQ ID NO: 51057 - protein, 38 aa, Artificial Sequence; identical to SEQ ID NO: 18491
  GFR-binding peptide
  MOD_RES (35)..(35): Xaa is C or S
  MOD_RES (11)..(12)..(13)..(14)..(15): Xaa is A or G
  MOD_RES (16)..(17)..(18)..(19): Xaa is A or G or is absent

SEQ ID NO: 51058 - protein, 37 aa, Artificial Sequence; identical to SEQ ID NO: 18492
  GFR-binding peptide
  MOD_RES (34)..(34): Xaa is C or S
  MOD_RES (12)..(13)..(14)..(15)..(16): Xaa is A or G
  MOD_RES (17)..(18)..(19)..(20): Xaa is A or G or is absent

SEQ ID NO: 51059 - protein, 36 aa, Artificial Sequence
  GFR-binding peptide
  MOD_RES (33)..(34): Xaa is C or S
  MOD_RES (11)..(12)..(13)..(14)..(15): Xaa is A or G
  MOD_RES (16)..(17)..(18)..(19): Xaa is A or G or is absent
SKVIMVTAKKXXXXXXXXXIKRIQVPRLDQSVXXPS

SEQ ID NO: 51060 - protein, 35 aa, Artificial Sequence
  GFR-binding peptide
  MOD_RES (2)..(34)..(35): Xaa is C or S
GXGEVVMESMEGIVVKDYEDMIQMTINSLETPVXX

SEQ ID NO: 51061 - protein, 37 aa, Artificial Sequence; identical to SEQ ID NO: 18494
  GFR-binding peptide
  MOD_RES (1)..(3): Xaa is C or S
  MOD_RES (16)..(17)..(18)..(19)..(20): Xaa is A or G
  MOD_RES (21)..(22)..(23)..(24): Xaa is A or G or is absent

SEQ ID NO: 51062 - protein, 34 aa, Artificial Sequence; identical to SEQ ID NO: 13363
  GFR-binding peptide
  MOD_RES (1)..(1): Xaa is C or S
  MOD_RES (13)..(14)..(15)..(16)..(17): Xaa is A or G
  MOD_RES (18)..(19)..(20)..(21): Xaa is A or G or is absent

SEQ ID NO: 51063 - protein, 36 aa, Artificial Sequence; identical to SEQ ID NO: 38147
  GFR-binding peptide
  MOD_RES (31)..(32): Xaa is C or S

SEQ ID NO: 51064 - protein, 36 aa, Artificial Sequence; identical to SEQ ID NO: 13366
  GFR-binding peptide
  MOD_RES (1)..(3): Xaa is C or S
  MOD_RES (15)..(16)..(17)..(18)..(19): Xaa is A or G
  MOD_RES (20)..(21)..(22)..(23): Xaa is A or G or is absent

SEQ ID NO: 51065 - protein, 37 aa, Artificial Sequence; identical to SEQ ID NO: 13368
  GFR-binding peptide
  MOD_RES (31)..(32): Xaa is C or S

SEQ ID NO: 51066 - protein, 32 aa, Artificial Sequence; identical to SEQ ID NO: 18496
  GFR-binding peptide
  MOD_RES (11)..(12)..(13)..(14)..(15): Xaa is A or G
  MOD_RES (16)..(17)..(18)..(19): Xaa is A or G or is absent

SEQ ID NO: 51067 - protein, 33 aa, Artificial Sequence; identical to SEQ ID NO: 13371
  GFR-binding peptide
  MOD_RES (1)..(32)..(33): Xaa is C or S

SEQ ID NO: 51068 - protein, 41 aa, Artificial Sequence; identical to SEQ ID NO: 13373
  GFR-binding peptide
  MOD_RES (1)..(3)..(35)..(36): Xaa is C or S

SEQ ID NO: 51069 - protein, 33 aa, Artificial Sequence
  GFR-binding peptide
  MOD_RES (33)..(33): Xaa is C or S
  MOD_RES (11)..(12)..(13)..(14)..(15): Xaa is A or G
  MOD_RES (16)..(17)..(18)..(19): Xaa is A or G or is absent
RVVMNVTAKKXXXXXXXXXIKRVQVPRLQTPAX

SEQ ID NO: 51070 - protein, 39 aa, Artificial Sequence
  GFR-binding peptide
  MOD_RES (2)..(4)..(38)..(39): Xaa is C or S
  MOD_RES (16)..(17)..(18)..(19)..(20): Xaa is A or G
  MOD_RES (21)..(22)..(23)..(24): Xaa is A or G or is absent
HXGXARVVMNVTAKKXXXXXXXXXIKRVQVPRLQTPAXX

SEQ ID NO: 51071 - protein, 40 aa, Artificial Sequence; identical to SEQ ID NO: 13374
  GFR-binding peptide
  MOD_RES (2)..(4)..(37)..(38): Xaa is C or S
  MOD_RES (15)..(16)..(17)..(18)..(19): Xaa is A or G
  MOD_RES (20)..(21)..(22)..(23): Xaa is A or G or is absent

SEQ ID NO: 51072 - protein, 34 aa, Artificial Sequence; identical to SEQ ID NO: 13375
  GFR-binding peptide
  MOD_RES (1)..(3)..(34): Xaa is C or S

SEQ ID NO: 51073 - protein, 37 aa, Artificial Sequence; identical to SEQ ID NO: 18498
  GFR-binding peptide
  MOD_RES (1)..(3): Xaa is C or S
  MOD_RES (16)..(17)..(18)..(19)..(20): Xaa is A or G
  MOD_RES (21)..(22)..(23)..(24): Xaa is A or G or is absent

SEQ ID NO: 51074 - protein, 40 aa, Artificial Sequence
  GFR-binding peptide
  MOD_RES (1)..(3)..(40): Xaa is C or S
XKXALHDELTNSLQEFIPKKRVIEYYVVPLPELQVQTPRX

SEQ ID NO: 51075 - protein, 41 aa, Artificial Sequence
  GFR-binding peptide
  MOD_RES (1)..(3)..(37)..(38): Xaa is C or S
  MOD_RES (15)..(16)..(17)..(18)..(19): Xaa is A or G
  MOD_RES (20)..(21)..(22)..(23): Xaa is A or G or is absent
XGXSRVVMNVQVEKXXXXXXXXXVKAVKVSRLKTPAXXPKP

SEQ ID NO: 51076 - protein, 35 aa, Artificial Sequence
  GFR-binding peptide
  MOD_RES (2)..(4): Xaa is C or S
HXGXSRVVMNVTAKKIVNSSDDIKRVQVPRLKTPA

SEQ ID NO: 51077 - protein, 36 aa, Artificial Sequence
  GFR-binding peptide
  MOD_RES (34)..(35): Xaa is C or S
  MOD_RES (12)..(13)..(14)..(15)..(16): Xaa is A or G
  MOD_RES (17)..(18)..(19)..(20): Xaa is A or G or is absent
GEVVMEVQVEKXXXXXXXXXVKAMKVSRLETPVXXA

SEQ ID NO: 51078 - protein, 36 aa, Artificial Sequence; identical to SEQ ID NO: 13376
  GFR-binding peptide
  MOD_RES (1)..(3)..(35)..(36): Xaa is C or S

SEQ ID NO: 51079 - protein, 32 aa, Artificial Sequence
  GFR-binding peptide
  MOD_RES (2)..(2): Xaa is C or S
KXSKVVMSMEGIVKPTRGVMIQITINSLDQPV

SEQ ID NO: 51080 - protein, 33 aa, Artificial Sequence
  GFR-binding peptide
  MOD_RES (2)..(2): Xaa is C or S
GXARVVMNVTAKKIVNSSDDIKRVQVPRLQTPA

SEQ ID NO: 51081 - protein, 38 aa, Artificial Sequence; identical to SEQ ID NO: 18500
  GFR-binding peptide
  MOD_RES (36)..(36): Xaa is C or S

SEQ ID NO: 51082 - protein, 41 aa, Artificial Sequence
  GFR-binding peptide
  MOD_RES (1)..(3)..(35)..(36): Xaa is C or S
XGXSRVVMNVTAKKIVNSSDDIKRVQVPRLKTPAXXPKPVY

SEQ ID NO: 51083 - protein, 35 aa, Artificial Sequence; identical to SEQ ID NO: 13380
  GFR-binding peptide
  MOD_RES (1)..(34)..(35): Xaa is C or S
  MOD_RES (12)..(13)..(14)..(15)..(16): Xaa is A or G
  MOD_RES (17)..(18)..(19)..(20): Xaa is A or G or is absent

SEQ ID NO: 51084 - protein, 34 aa, Artificial Sequence; identical to SEQ ID NO: 18508
  GFR-binding peptide
  MOD_RES (12)..(13)..(14)..(15)..(16): Xaa is A or G
  MOD_RES (17)..(18)..(19)..(20): Xaa is A or G or is absent

SEQ ID NO: 51085 - protein, 42 aa, Artificial Sequence
  GFR-binding peptide
  MOD_RES (2)..(4)..(38): Xaa is C or S
  MOD_RES (16)..(17)..(18)..(19)..(20): Xaa is A or G
  MOD_RES (21)..(22)..(23)..(24): Xaa is A or G or is absent
RXEXKNHQLFNSLQEXXXXXXXXXYYLMTLPEEETPVXELGE

SEQ ID NO: 51086 - protein, 38 aa, Artificial Sequence; identical to SEQ ID NO: 13384
  GFR-binding peptide
  MOD_RES (1)..(33): Xaa is C or S

SEQ ID NO: 51087 - protein, 34 aa, Artificial Sequence; identical to SEQ ID NO: 13385
  GFR-binding peptide
  MOD_RES (1)..(1): Xaa is C or S
  MOD_RES (13)..(14)..(15)..(16)..(17): Xaa is A or G
  MOD_RES (18)..(19)..(20)..(21): Xaa is A or G or is absent

SEQ ID NO: 51088 - protein, 36 aa, Artificial Sequence; identical to SEQ ID NO: 13386
  GFR-binding peptide
  MOD_RES (33)..(34): Xaa is C or S
  MOD_RES (11)..(12)..(13)..(14)..(15): Xaa is A or G
  MOD_RES (16)..(17)..(18)..(19): Xaa is A or G or is absent

SEQ ID NO: 51089 - protein, 37 aa, Artificial Sequence
  GFR-binding peptide
  MOD_RES (2)..(4)..(36): Xaa is C or S
HXGXSRVVMNSMEGIIVNSSDDMIQVTINSLKTPAXT

SEQ ID NO: 51090 - protein, 35 aa, Artificial Sequence; identical to SEQ ID NO: 18509
  GFR-binding peptide
  MOD_RES (12)..(13)..(14)..(15)..(16): Xaa is A or G
  MOD_RES (17)..(18)..(19)..(20): Xaa is A or G or is absent

SEQ ID NO: 51091 - protein, 40 aa, Artificial Sequence; identical to SEQ ID NO: 13387
  GFR-binding peptide
  MOD_RES (1)..(3)..(37)..(38): Xaa is C or S
  MOD_RES (15)..(16)..(17)..(18)..(19): Xaa is A or G
  MOD_RES (20)..(21)..(22)..(23): Xaa is A or G or is absent

SEQ ID NO: 51092 - protein, 37 aa, Artificial Sequence
  GFR-binding peptide
  MOD_RES (2)..(36)..(37): Xaa is C or S
  MOD_RES (14)..(15)..(16)..(17)..(18): Xaa is A or G
  MOD_RES (19)..(20)..(21)..(22): Xaa is A or G or is absent
GXGEVVMDSMEGIXXXXXXXXXMIQMTINSLETPVXX

SEQ ID NO: 51093 - protein, 37 aa, Artificial Sequence; identical to SEQ ID NO: 13390
  GFR-binding peptide
  MOD_RES (32)..(33): Xaa is C or S

SEQ ID NO: 51094 - protein, 35 aa, Artificial Sequence; identical to SEQ ID NO: 18512
  GFR-binding peptide
  MOD_RES (1)..(1): Xaa is C or S

SEQ ID NO: 51095 - protein, 32 aa, Artificial Sequence; identical to SEQ ID NO: 13393
  GFR-binding peptide
  MOD_RES (11)..(12)..(13)..(14)..(15): Xaa is A or G
  MOD_RES (16)..(17)..(18)..(19): Xaa is A or G or is absent

SEQ ID NO: 51096 - protein, 39 aa, Artificial Sequence
  GFR-binding peptide
  MOD_RES (1)..(3)..(37): Xaa is C or S
  MOD_RES (15)..(16)..(17)..(18)..(19): Xaa is A or G
  MOD_RES (20)..(21)..(22)..(23): Xaa is A or G or is absent
XGXSRVVMNVQVEKXXXXXXXXXVKAVKVSRLKTPAXTP

SEQ ID NO: 51097 - protein, 37 aa, Artificial Sequence
  GFR-binding peptide
  MOD_RES (33)..(34): Xaa is C or S
  MOD_RES (11)..(12)..(13)..(14)..(15): Xaa is A or G
  MOD_RES (16)..(17)..(18)..(19): Xaa is A or G or is absent
EVVMDVQVEKXXXXXXXXXVKAMKVSRLETPVXXAKP

SEQ ID NO: 51098 - protein, 35 aa, Artificial Sequence
  GFR-binding peptide
  MOD_RES (34)..(35): Xaa is C or S
  MOD_RES (12)..(13)..(14)..(15)..(16): Xaa is A or G
  MOD_RES (17)..(18)..(19)..(20): Xaa is A or G or is absent
SRVVMNVQVEKXXXXXXXXXVKAVKVSRLKTPAXX

SEQ ID NO: 51099 - protein, 34 aa, Artificial Sequence; identical to SEQ ID NO: 18514
  GFR-binding peptide
  MOD_RES (33)..(33): Xaa is C or S
  MOD_RES (11)..(12)..(13)..(14)..(15): Xaa is A or G
  MOD_RES (16)..(17)..(18)..(19): Xaa is A or G or is absent

SEQ ID NO: 51100 - protein, 42 aa, Artificial Sequence; identical to SEQ ID NO: 38199
  GFR-binding peptide
  MOD_RES (2)..(4)..(37)..(38): Xaa is C or S
  MOD_RES (15)..(16)..(17)..(18)..(19): Xaa is A or G
  MOD_RES (20)..(21)..(22)..(23): Xaa is A or G or is absent

SEQ ID NO: 51101 - protein, 42 aa, Artificial Sequence; identical to SEQ ID NO: 18516
  GFR-binding peptide
  MOD_RES (1)..(3)..(37): Xaa is C or S
  MOD_RES (15)..(16)..(17)..(18)..(19): Xaa is A or G
  MOD_RES (20)..(21)..(22)..(23): Xaa is A or G or is absent

SEQ ID NO: 51102 - protein, 41 aa, Artificial Sequence
  GFR-binding peptide
  MOD_RES (2)..(35)..(36): Xaa is C or S
  MOD_RES (13)..(14)..(15)..(16)..(17): Xaa is A or G
  MOD_RES (18)..(19)..(20)..(21): Xaa is A or G or is absent
KXSKVVMVTAKKXXXXXXXXXIKRIQVPRLDQPVXXPSASA

SEQ ID NO: 51103 - protein, 43 aa, Artificial Sequence; identical to SEQ ID NO: 13396
  GFR-binding peptide
  MOD_RES (1)..(3)..(37)..(38): Xaa is C or S
  MOD_RES (15)..(16)..(17)..(18)..(19): Xaa is A or G
  MOD_RES (20)..(21)..(22)..(23): Xaa is A or G or is absent

SEQ ID NO: 51104 - protein, 33 aa, Artificial Sequence
  GFR-binding peptide
  MOD_RES (2)..(33): Xaa is C or S
KXSKVIMSMEGIIKPTKGIMIQITINSLDQSVX

SEQ ID NO: 51105 - protein, 39 aa, Artificial Sequence; identical to SEQ ID NO: 13399
  GFR-binding peptide
  MOD_RES (1)..(35)..(36): Xaa is C or S
  MOD_RES (13)..(14)..(15)..(16)..(17): Xaa is A or G
  MOD_RES (18)..(19)..(20)..(21): Xaa is A or G or is absent

SEQ ID NO: 51106 - protein, 38 aa, Artificial Sequence; identical to SEQ ID NO: 13400
  GFR-binding peptide
  MOD_RES (2)..(4)..(35)..(36): Xaa is C or S

SEQ ID NO: 51107 - protein, 36 aa, Artificial Sequence; identical to SEQ ID NO: 18520
  GFR-binding peptide
  MOD_RES (1)..(1): Xaa is C or S

SEQ ID NO: 51108 - protein, 39 aa, Artificial Sequence
  GFR-binding peptide
  MOD_RES (37)..(37): Xaa is C or S
  MOD_RES (13)..(14)..(15)..(16)..(17): Xaa is A or G
  MOD_RES (18)..(19)..(20)..(21): Xaa is A or G or is absent
ELHEELRNSLQEXXXXXXXXXYYVVPLPEHHVRSPQXKV

SEQ ID NO: 51109 - protein, 38 aa, Artificial Sequence
  GFR-binding peptide
  MOD_RES (34)..(34): Xaa is C or S
KNHQLFNSLQEHQGQHPKIRYYVMPLPEEETPVXELGE

SEQ ID NO: 51110 - protein, 39 aa, Artificial Sequence
  GFR-binding peptide
  MOD_RES (2)..(4)..(38): Xaa is C or S
  MOD_RES (16)..(17)..(18)..(19)..(20): Xaa is A or G
  MOD_RES (21)..(22)..(23)..(24): Xaa is A or G or is absent
RXEXKNHQLFNSLQEXXXXXXXXXYYVMPLPEEETPVXE

SEQ ID NO: 51111 - protein, 33 aa, Artificial Sequence; identical to SEQ ID NO: 18526
  GFR-binding peptide

SEQ ID NO: 51112 - protein, 36 aa, Artificial Sequence
  GFR-binding peptide
  MOD_RES (35)..(35): Xaa is C or S
HDELTNSLQEFIPKKRVIEYYLVTLPELQVQTPRXQ

SEQ ID NO: 51113 - protein, 40 aa, Artificial Sequence
  GFR-binding peptide
  MOD_RES (2)..(34)..(35): Xaa is C or S
GXGEVVMDSMEGIVVKENEDMIQMTINSLETPVXXAKPIK

SEQ ID NO: 51114 - protein, 33 aa, Artificial Sequence; identical to SEQ ID NO: 38213
  GFR-binding peptide
  MOD_RES (1)..(3): Xaa is C or S

SEQ ID NO: 51115 - protein, 33 aa, Artificial Sequence; identical to SEQ ID NO: 13406
  GFR-binding peptide
  MOD_RES (33)..(33): Xaa is C or S
  MOD_RES (11)..(12)..(13)..(14)..(15): Xaa is A or G
  MOD_RES (16)..(17)..(18)..(19): Xaa is A or G or is absent

SEQ ID NO: 51116 - protein, 37 aa, Artificial Sequence; identical to SEQ ID NO: 18528
  GFR-binding peptide
  MOD_RES (1)..(35): Xaa is C or S

SEQ ID NO: 51117 - protein, 37 aa, Artificial Sequence
  GFR-binding peptide
  MOD_RES (2)..(33)..(34): Xaa is C or S
KXSRVIMSMEGIVKPKRGVMIQITINSLAQPVXXPAA

SEQ ID NO: 51118 - protein, 34 aa, Artificial Sequence
  GFR-binding peptide
  MOD_RES (1)..(3): Xaa is C or S
XGXGEVVMDVQVEKVVKENEDVKAMKVSRLETPV

SEQ ID NO: 51119 - protein, 37 aa, Artificial Sequence; identical to SEQ ID NO: 18530
  GFR-binding peptide
  MOD_RES (1)..(35): Xaa is C or S
  MOD_RES (13)..(14)..(15)..(16)..(17): Xaa is A or G
  MOD_RES (18)..(19)..(20)..(21): Xaa is A or G or is absent

SEQ ID NO: 51120 - protein, 37 aa, Artificial Sequence; identical to SEQ ID NO: 13409
  GFR-binding peptide
  MOD_RES (1)..(3)..(35)..(36): Xaa is C or S

SEQ ID NO: 51121 - protein, 35 aa, Artificial Sequence; identical to SEQ ID NO: 18531
  GFR-binding peptide
  MOD_RES (35)..(35): Xaa is C or S

SEQ ID NO: 51122 - protein, 36 aa, Artificial Sequence
  GFR-binding peptide
  MOD_RES (2)..(2): Xaa is C or S
KXALHDELTNSLQEFIPKKRVIEYYVVPLPELQVQT

SEQ ID NO: 51123 - protein, 37 aa, Artificial Sequence
  GFR-binding peptide
  MOD_RES (2)..(4): Xaa is C or S
  MOD_RES (16)..(17)..(18)..(19)..(20): Xaa is A or G
  MOD_RES (21)..(22)..(23)..(24): Xaa is A or G or is absent
RXGXGEVVMDVQVEKXXXXXXXXXVKAMKVSRLETPV

SEQ ID NO: 51124 - protein, 33 aa, Artificial Sequence; identical to SEQ ID NO: 13410
  GFR-binding peptide
  MOD_RES (2)..(2): Xaa is C or S

SEQ ID NO: 51125 - protein, 35 aa, Artificial Sequence
  GFR-binding peptide
  MOD_RES (31)..(32): Xaa is C or S
EVVMDVQVEKVVKENEDVKAMKVSRLETPVXXAKP

SEQ ID NO: 51126 - protein, 30 aa, Artificial Sequence
  GFR-binding peptide
EVVMEVTAKKVVKDYEDIKRMQVPRLETPV

SEQ ID NO: 51127 - protein, 32 aa, Artificial Sequence; identical to SEQ ID NO: 13412
  GFR-binding peptide
  MOD_RES (11)..(12)..(13)..(14)..(15): Xaa is A or G
  MOD_RES (16)..(17)..(18)..(19): Xaa is A or G or is absent

SEQ ID NO: 51128 - protein, 32 aa, Artificial Sequence
  GFR-binding peptide
  MOD_RES (11)..(12)..(13)..(14)..(15): Xaa is A or G
  MOD_RES (16)..(17)..(18)..(19): Xaa is A or G or is absent
SKVIMSMEGIXXXXXXXXXMIQITINSLDQSV

SEQ ID NO: 51129 - protein, 36 aa, Artificial Sequence; identical to SEQ ID NO: 18535
  GFR-binding peptide
  MOD_RES (36)..(36): Xaa is C or S
  MOD_RES (12)..(13)..(14)..(15)..(16): Xaa is A or G
  MOD_RES (17)..(18)..(19)..(20): Xaa is A or G or is absent

SEQ ID NO: 51130 - protein, 37 aa, Artificial Sequence
  GFR-binding peptide
  MOD_RES (33)..(34): Xaa is C or S
  MOD_RES (11)..(12)..(13)..(14)..(15): Xaa is A or G
  MOD_RES (16)..(17)..(18)..(19): Xaa is A or G or is absent
RVVMNVTAKKXXXXXXXXXIKRVQVPRLKTPAXXPKP

SEQ ID NO: 51131 - protein, 42 aa, Artificial Sequence
  GFR-binding peptide
  MOD_RES (2)..(4)..(36)..(37): Xaa is C or S
RXGXGEVVMEVTAKKVVKDYEDIKRMQVPRLETPVXXAKPIS

SEQ ID NO: 51132 - protein, 38 aa, Artificial Sequence
  GFR-binding peptide
  MOD_RES (2)..(4)..(37)..(38): Xaa is C or S
  MOD_RES (15)..(16)..(17)..(18)..(19): Xaa is A or G
  MOD_RES (20)..(21)..(22)..(23): Xaa is A or G or is absent
SXKXSRVIMSMEGIXXXXXXXXXMIQITINSLAQPVXX

SEQ ID NO: 51133 - protein, 40 aa, Artificial Sequence; identical to SEQ ID NO: 18536
  GFR-binding peptide
  MOD_RES (1)..(35): Xaa is C or S

SEQ ID NO: 51134 - protein, 37 aa, Artificial Sequence; identical to SEQ ID NO: 13415
  GFR-binding peptide
  MOD_RES (2)..(34): Xaa is C or S

SEQ ID NO: 51135 - protein, 37 aa, Artificial Sequence; identical to SEQ ID NO: 18540
  GFR-binding peptide
  MOD_RES (35)..(35): Xaa is C or S

SEQ ID NO: 51136 - protein, 36 aa, Artificial Sequence; identical to SEQ ID NO: 18541
  GFR-binding peptide
  MOD_RES (35)..(35): Xaa is C or S
  MOD_RES (11)..(12)..(13)..(14)..(15): Xaa is A or G
  MOD_RES (16)..(17)..(18)..(19): Xaa is A or G or is absent

SEQ ID NO: 51137 - protein, 35 aa, Artificial Sequence
  GFR-binding peptide
  MOD_RES (1)..(35): Xaa is C or S
  MOD_RES (13)..(14)..(15)..(16)..(17): Xaa is A or G
  MOD_RES (18)..(19)..(20)..(21): Xaa is A or G or is absent
XGEVVMDSMEGIXXXXXXXXXMIQMTINSLETPVX

SEQ ID NO: 51138 - protein, 34 aa, Artificial Sequence; identical to SEQ ID NO: 18545
  GFR-binding peptide
  MOD_RES (11)..(12)..(13)..(14)..(15): Xaa is A or G
  MOD_RES (16)..(17)..(18)..(19): Xaa is A or G or is absent

SEQ ID NO: 51139 - protein, 35 aa, Artificial Sequence
  GFR-binding peptide
  MOD_RES (1)..(35): Xaa is C or S
  MOD_RES (13)..(14)..(15)..(16)..(17): Xaa is A or G
  MOD_RES (18)..(19)..(20)..(21): Xaa is A or G or is absent
XARVVMNVQVEKXXXXXXXXXVKAVKVSRLQTPAX

SEQ ID NO: 51140 - protein, 39 aa, Artificial Sequence
  GFR-binding peptide
  MOD_RES (2)..(33)..(34): Xaa is C or S
KXSKVVMVQVEKVKPTRGVVKAIKVSRLDQPVXXPSASA

SEQ ID NO: 51141 - protein, 38 aa, Artificial Sequence
  GFR-binding peptide
  MOD_RES (2)..(34)..(35): Xaa is C or S
GXARVVMNSMEGIIVNSSDDMIQVTINSLQTPAXXPKP

SEQ ID NO: 51142 - protein, 39 aa, Artificial Sequence
  GFR-binding peptide
  MOD_RES (1)..(35)..(36): Xaa is C or S
  MOD_RES (13)..(14)..(15)..(16)..(17): Xaa is A or G
  MOD_RES (18)..(19)..(20)..(21): Xaa is A or G or is absent
XGEVVMDVTAKKXXXXXXXXXIKRMQVPRLETPVXXAKP

SEQ ID NO: 51143 - protein, 42 aa, Artificial Sequence; identical to SEQ ID NO: 13421
  GFR-binding peptide
  MOD_RES (2)..(4)..(36): Xaa is C or S

SEQ ID NO: 51144 - protein, 39 aa, Artificial Sequence; identical to SEQ ID NO: 13422
  GFR-binding peptide
  MOD_RES (2)..(4)..(38)..(39): Xaa is C or S
  MOD_RES (16)..(17)..(18)..(19)..(20): Xaa is A or G
  MOD_RES (21)..(22)..(23)..(24): Xaa is A or G or is absent

SEQ ID NO: 51145 - protein, 41 aa, Artificial Sequence; identical to SEQ ID NO: 13423
  GFR-binding peptide
  MOD_RES (1)..(35)..(36): Xaa is C or S
  MOD_RES (13)..(14)..(15)..(16)..(17): Xaa is A or G
  MOD_RES (18)..(19)..(20)..(21): Xaa is A or G or is absent

SEQ ID NO: 51146 - protein, 33 aa, Artificial Sequence
  GFR-binding peptide
  MOD_RES (11)..(12)..(13)..(14)..(15): Xaa is A or G
  MOD_RES (16)..(17)..(18)..(19): Xaa is A or G or is absent
HEELRNSLQEXXXXXXXXXYYVVPLPEHHVRSP

SEQ ID NO: 51147 - protein, 40 aa, Artificial Sequence
  GFR-binding peptide
  MOD_RES (2)..(36)..(37): Xaa is C or S
  MOD_RES (14)..(15)..(16)..(17)..(18): Xaa is A or G
  MOD_RES (19)..(20)..(21)..(22): Xaa is A or G or is absent
GXARVVMNSMEGIXXXXXXXXXMIQVTINSLQTPAXXPKP

SEQ ID NO: 51148 - protein, 36 aa, Artificial Sequence; identical to SEQ ID NO: 18548
  GFR-binding peptide
  MOD_RES (2)..(2): Xaa is C or S

SEQ ID NO: 51149 - protein, 34 aa, Artificial Sequence; identical to SEQ ID NO: 18552
  GFR-binding peptide

SEQ ID NO: 51150 - protein, 38 aa, Artificial Sequence
  GFR-binding peptide
  MOD_RES (1)..(34)..(35): Xaa is C or S
  MOD_RES (12)..(13)..(14)..(15)..(16): Xaa is A or G
  MOD_RES (17)..(18)..(19)..(20): Xaa is A or G or is absent
XSRVIMVQVEKXXXXXXXXXVKAIKVSRLAQPVXXPAA

SEQ ID NO: 51151 - protein, 36 aa, Artificial Sequence
  GFR-binding peptide
  MOD_RES (2)..(4)..(35)..(36): Xaa is C or S
SXKXSRVIMVTAKKVKPKRGVIKRIQVPRLAQPVXX

SEQ ID NO: 51152 - protein, 40 aa, Artificial Sequence
  GFR-binding peptide
  MOD_RES (2)..(4)..(36): Xaa is C or S
HXGXSRVVMNVTAKKIVNSSDDIKRVQVPRLKTPAXTPKT

SEQ ID NO: 51153 - protein, 45 aa, Artificial Sequence; identical to SEQ ID NO: 18554
  GFR-binding peptide
  MOD_RES (2)..(4)..(41): Xaa is C or S

SEQ ID NO: 51154 - protein, 38 aa, Artificial Sequence; identical to SEQ ID NO: 13429
  GFR-binding peptide
  MOD_RES (1)..(3)..(35)..(36): Xaa is C or S

SEQ ID NO: 51155 - protein, 36 aa, Artificial Sequence; identical to SEQ ID NO: 18556
  GFR-binding peptide
  MOD_RES (1)..(1): Xaa is C or S
  MOD_RES (14)..(15)..(16)..(17)..(18): Xaa is A or G
  MOD_RES (19)..(20)..(21)..(22): Xaa is A or G or is absent

SEQ ID NO: 51156 - protein, 32 aa, Artificial Sequence
  GFR-binding peptide
  MOD_RES (11)..(12)..(13)..(14)..(15): Xaa is A or G
  MOD_RES (16)..(17)..(18)..(19): Xaa is A or G or is absent
RVVMNVQVEKXXXXXXXXXVKAVKVSRLQTPA

SEQ ID NO: 51157 - protein, 38 aa, Artificial Sequence
  GFR-binding peptide
  MOD_RES (33)..(34): Xaa is C or S
  MOD_RES (11)..(12)..(13)..(14)..(15): Xaa is A or G
  MOD_RES (16)..(17)..(18)..(19): Xaa is A or G or is absent
RVVMNVQVEKXXXXXXXXXVKAVKVSRLQTPAXXPKPV

SEQ ID NO: 51158 - protein, 40 aa, Artificial Sequence
  GFR-binding peptide
  MOD_RES (2)..(35)..(36): Xaa is C or S
  MOD_RES (13)..(14)..(15)..(16)..(17): Xaa is A or G
  MOD_RES (18)..(19)..(20)..(21): Xaa is A or G or is absent
KXSKVVMVTAKKXXXXXXXXXIKRIQVPRLDQPVXXPSAS

SEQ ID NO: 51159 - protein, 40 aa, Artificial Sequence
  GFR-binding peptide
  MOD_RES (1)..(35): Xaa is C or S
XKNHQLFNSLQEHQGQHPKIRYYLMTLPEEETPVXELGED

SEQ ID NO: 51160 - protein, 33 aa, Artificial Sequence; identical to SEQ ID NO: 13431
  GFR-binding peptide
  MOD_RES (33)..(33): Xaa is C or S
  MOD_RES (11)..(12)..(13)..(14)..(15): Xaa is A or G
  MOD_RES (16)..(17)..(18)..(19): Xaa is A or G or is absent

SEQ ID NO: 51161 - protein, 41 aa, Artificial Sequence; identical to SEQ ID NO: 13433
  GFR-binding peptide
  MOD_RES (2)..(4)..(38): Xaa is C or S
  MOD_RES (16)..(17)..(18)..(19)..(20): Xaa is A or G
  MOD_RES (21)..(22)..(23)..(24): Xaa is A or G or is absent

SEQ ID NO: 51162 - protein, 37 aa, Artificial Sequence
  GFR-binding peptide
  MOD_RES (1)..(3)..(36)..(37): Xaa is C or S
  MOD_RES (14)..(15)..(16)..(17)..(18): Xaa is A or G
  MOD_RES (19)..(20)..(21)..(22): Xaa is A or G or is absent
XKXSKVVMSMEGIXXXXXXXXXMIQITINSLDQPVXX

SEQ ID NO: 51163 - protein, 42 aa, Artificial Sequence; identical to SEQ ID NO: 18563
  GFR-binding peptide
  MOD_RES (1)..(3)..(37): Xaa is C or S
  MOD_RES (15)..(16)..(17)..(18)..(19): Xaa is A or G
  MOD_RES (20)..(21)..(22)..(23): Xaa is A or G or is absent

SEQ ID NO: 51164 - protein, 36 aa, Artificial Sequence; identical to SEQ ID NO: 38270
  GFR-binding peptide
  MOD_RES (2)..(33)..(34): Xaa is C or S

SEQ ID NO: 51165 - protein, 32 aa, Artificial Sequence
  GFR-binding peptide
  MOD_RES (11)..(12)..(13)..(14)..(15): Xaa is A or G
  MOD_RES (16)..(17)..(18)..(19): Xaa is A or G or is absent
SRVIMSMEGIXXXXXXXXXMIQITINSLAQPV

SEQ ID NO: 51166 - protein, 34 aa, Artificial Sequence
  GFR-binding peptide
  MOD_RES (34)..(34): Xaa is C or S
  MOD_RES (12)..(13)..(14)..(15)..(16): Xaa is A or G
  MOD_RES (17)..(18)..(19)..(20): Xaa is A or G or is absent
SRVVMNVTAKKXXXXXXXXXIKRVQVPRLKTPAX

SEQ ID NO: 51167 - protein, 40 aa, Artificial Sequence
  GFR-binding peptide
  MOD_RES (34)..(35): Xaa is C or S
  MOD_RES (12)..(13)..(14)..(15)..(16): Xaa is A or G
  MOD_RES (17)..(18)..(19)..(20): Xaa is A or G or is absent
GEVVMESMEGIXXXXXXXXXMIQMTINSLETPVXXAKPIS

SEQ ID NO: 51168 - protein, 40 aa, Artificial Sequence; identical to SEQ ID NO: 18567
  GFR-binding peptide
  MOD_RES (1)..(38): Xaa is C or S

SEQ ID NO: 51169 - protein, 39 aa, Artificial Sequence
  GFR-binding peptide
  MOD_RES (37)..(37): Xaa is C or S
  MOD_RES (13)..(14)..(15)..(16)..(17): Xaa is A or G
  MOD_RES (18)..(19)..(20)..(21): Xaa is A or G or is absent
ALHDELTNSLQEXXXXXXXXXYYLVTLPELQVQTPRXQV

SEQ ID NO: 51170 - protein, 37 aa, Artificial Sequence
  GFR-binding peptide
  MOD_RES (2)..(33)..(34): Xaa is C or S
KXSKVVMVTAKKVKPTRGVIKRIQVPRLDQPVXXPSA

SEQ ID NO: 51171 - protein, 36 aa, Artificial Sequence; identical to SEQ ID NO: 13437
  GFR-binding peptide
  MOD_RES (1)..(33): Xaa is C or S

SEQ ID NO: 51172 - protein, 42 aa, Artificial Sequence
  GFR-binding peptide
  MOD_RES (2)..(4)..(36)..(37): Xaa is C or S
RXGXGEVVMDVQVEKVVKENEDVKAMKVSRLETPVXXAKPIK

SEQ ID NO: 51173 - protein, 36 aa, Artificial Sequence; identical to SEQ ID NO: 13441
  GFR-binding peptide
  MOD_RES (2)..(36): Xaa is C or S
  MOD_RES (14)..(15)..(16)..(17)..(18): Xaa is A or G
  MOD_RES (19)..(20)..(21)..(22): Xaa is A or G or is absent

SEQ ID NO: 51174 - protein, 35 aa, Artificial Sequence
  GFR-binding peptide
  MOD_RES (1)..(33)..(34): Xaa is C or S
XGEVVMEVTAKKVVKDYEDIKRMQVPRLETPVXXA

SEQ ID NO: 51175 - protein, 37 aa, Artificial Sequence
  GFR-binding peptide
  MOD_RES (1)..(3)..(35): Xaa is C or S
XGXSRVVMNVQVEKIVNSSDDVKAVKVSRLKTPAXTP

SEQ ID NO: 51176 - protein, 35 aa, Artificial Sequence
  GFR-binding peptide
  MOD_RES (31)..(32): Xaa is C or S
SRVIMSMEGIVKPKRGVMIQITINSLAQPVXXPAA

SEQ ID NO: 51177 - protein, 34 aa, Artificial Sequence
  GFR-binding peptide
  MOD_RES (2)..(4): Xaa is C or S
SXKXSKVIMSMEGIIKPTKGIMIQITINSLDQSV

SEQ ID NO: 51178 - protein, 42 aa, Artificial Sequence; identical to SEQ ID NO: 18569
  GFR-binding peptide
  MOD_RES (2)..(36): Xaa is C or S
  MOD_RES (14)..(15)..(16)..(17)..(18): Xaa is A or G
  MOD_RES (19)..(20)..(21)..(22): Xaa is A or G or is absent

SEQ ID NO: 51179 - protein, 37 aa, Artificial Sequence; identical to SEQ ID NO: 13442
  GFR-binding peptide
  MOD_RES (31)..(32): Xaa is C or S

SEQ ID NO: 51180 - protein, 39 aa, Artificial Sequence
  GFR-binding peptide
  MOD_RES (2)..(4)..(37)..(38): Xaa is C or S
  MOD_RES (15)..(16)..(17)..(18)..(19): Xaa is A or G
  MOD_RES (20)..(21)..(22)..(23): Xaa is A or G or is absent
SXKXSRVIMVTAKKXXXXXXXXXIKRIQVPRLAQPVXXP

SEQ ID NO: 51181 - protein, 37 aa, Artificial Sequence
  GFR-binding peptide
  MOD_RES (1)..(1): Xaa is C or S
XALHDELTNSLQEFIPKKRVIEYYLVTLPELQVQTPR

SEQ ID NO: 51182 - protein, 40 aa, Artificial Sequence
  GFR-binding peptide
  MOD_RES (1)..(35): Xaa is C or S
  MOD_RES (13)..(14)..(15)..(16)..(17): Xaa is A or G
  MOD_RES (18)..(19)..(20)..(21): Xaa is A or G or is absent
XKNHQLFNSLQEXXXXXXXXXYYLMTLPEEETPVXELGED

SEQ ID NO: 51183 - protein, 41 aa, Artificial Sequence
  GFR-binding peptide
  MOD_RES (2)..(4)..(36)..(37): Xaa is C or S
RXGXGEVVMESMEGIVVKDYEDMIQMTINSLETPVXXAKPI

SEQ ID NO: 51184 - protein, 33 aa, Artificial Sequence
  GFR-binding peptide
  MOD_RES (32)..(33): Xaa is C or S
GEVVMDVTAKKVVKENEDIKRMQVPRLETPVXX

SEQ ID NO: 51185 - protein, 36 aa, Artificial Sequence; identical to SEQ ID NO: 13444
  GFR-binding peptide
  MOD_RES (31)..(32): Xaa is C or S

SEQ ID NO: 51186 - protein, 35 aa, Artificial Sequence
  GFR-binding peptide
  MOD_RES (2)..(34)..(35): Xaa is C or S
GXARVVMNVQVEKIVNSSDDVKAVKVSRLQTPAXX

SEQ ID NO: 51187 - protein, 33 aa, Artificial Sequence
  GFR-binding peptide
  MOD_RES (1)..(32)..(33): Xaa is C or S
XSKVVMSMEGIVKPTRGVMIQITINSLDQPVXX

SEQ ID NO: 51188 - protein, 38 aa, Artificial Sequence
  GFR-binding peptide
  MOD_RES (34)..(34): Xaa is C or S
KNHQLFNSLQEHQGQHPKIRYYLMTLPEEETPVXELGE

SEQ ID NO: 51189 - protein, 41 aa, Artificial Sequence; identical to SEQ ID NO: 13449
  GFR-binding peptide
  MOD_RES (2)..(4)..(37)..(38): Xaa is C or S
  MOD_RES (15)..(16)..(17)..(18)..(19): Xaa is A or G
  MOD_RES (20)..(21)..(22)..(23): Xaa is A or G or is absent

SEQ ID NO: 51190 - protein, 37 aa, Artificial Sequence; identical to SEQ ID NO: 13450
  GFR-binding peptide
  MOD_RES (1)..(3)..(34)..(35): Xaa is C or S

SEQ ID NO: 51191 - protein, 34 aa, Artificial Sequence; identical to SEQ ID NO: 13451
  GFR-binding peptide
  MOD_RES (2)..(4): Xaa is C or S

SEQ ID NO: 51192 - protein, 44 aa, Artificial Sequence
  GFR-binding peptide
  MOD_RES (2)..(4)..(38): Xaa is C or S
  MOD_RES (16)..(17)..(18)..(19)..(20): Xaa is A or G
  MOD_RES (21)..(22)..(23)..(24): Xaa is A or G or is absent
HXGXSRVVMNVQVEKXXXXXXXXXVKAVKVSRLKTPAXTPKTVH

SEQ ID NO: 51193 - protein, 37 aa, Artificial Sequence; identical to SEQ ID NO: 13455
  GFR-binding peptide
  MOD_RES (1)..(3)..(37): Xaa is C or S
  MOD_RES (15)..(16)..(17)..(18)..(19): Xaa is A or G
  MOD_RES (20)..(21)..(22)..(23): Xaa is A or G or is absent

SEQ ID NO: 51194 - protein, 37 aa, Artificial Sequence
  GFR-binding peptide
  MOD_RES (1)..(1): Xaa is C or S
XELHEELRNSLQELKPKKRVYEYYLVTLPEHHVRSPQ

SEQ ID NO: 51195 - protein, 39 aa, Artificial Sequence
  GFR-binding peptide
  MOD_RES (1)..(3)..(35)..(36): Xaa is C or S
XGXARVVMNVTAKKIVNSSDDIKRVQVPRLQTPAXXPKP

SEQ ID NO: 51196 - protein, 33 aa, Artificial Sequence; identical to SEQ ID NO: 13456
  GFR-binding peptide
  MOD_RES (1)..(1): Xaa is C or S
  MOD_RES (12)..(13)..(14)..(15)..(16): Xaa is A or G
  MOD_RES (17)..(18)..(19)..(20): Xaa is A or G or is absent

SEQ ID NO: 51197 - protein, 41 aa, Artificial Sequence
  GFR-binding peptide
  MOD_RES (2)..(4)..(41): Xaa is C or S
  MOD_RES (17)..(18)..(19)..(20)..(21): Xaa is A or G
  MOD_RES (22)..(23)..(24)..(25): Xaa is A or G or is absent
EXKXALHDELTNSLQEXXXXXXXXXYYVVPLPELQVQTPRX

SEQ ID NO: 51198 - protein, 33 aa, Artificial Sequence
  GFR-binding peptide
  MOD_RES (11)..(12)..(13)..(14)..(15): Xaa is A or G
  MOD_RES (16)..(17)..(18)..(19): Xaa is A or G or is absent
HEELRNSLQEXXXXXXXXXYYLVTLPEHHVRSP

SEQ ID NO: 51199 - protein, 41 aa, Artificial Sequence; identical to SEQ ID NO: 18575
  GFR-binding peptide
  MOD_RES (2)..(39): Xaa is C or S

SEQ ID NO: 51200 - protein, 35 aa, Artificial Sequence; identical to SEQ ID NO: 13459
  GFR-binding peptide
  MOD_RES (1)..(35): Xaa is C or S
  MOD_RES (13)..(14)..(15)..(16)..(17): Xaa is A or G
  MOD_RES (18)..(19)..(20)..(21): Xaa is A or G or is absent

SEQ ID NO: 51201 - protein, 37 aa, Artificial Sequence
  GFR-binding peptide
  MOD_RES (2)..(34): Xaa is C or S
GXSRVVMNVQVEKIVNSSDDVKAVKVSRLKTPAXTPK

SEQ ID NO: 51202 - protein, 34 aa, Artificial Sequence
  GFR-binding peptide
  MOD_RES (2)..(33)..(34): Xaa is C or S
KXSKVIMSMEGIIKPTKGIMIQITINSLDQSVXX

SEQ ID NO: 51203 - protein, 35 aa, Artificial Sequence
  GFR-binding peptide
ALHDELTNSLQEFIPKKRVIEYYVVPLPELQVQTP

SEQ ID NO: 51204 - protein, 38 aa, Artificial Sequence
  GFR-binding peptide
  MOD_RES (1)..(3)..(35)..(36): Xaa is C or S
XGXSRVVMNVTAKKIVNSSDDIKRVQVPRLKTPAXXPK

SEQ ID NO: 51205 - protein, 42 aa, Artificial Sequence
  GFR-binding peptide
  MOD_RES (2)..(4)..(41): Xaa is C or S
  MOD_RES (17)..(18)..(19)..(20)..(21): Xaa is A or G
  MOD_RES (22)..(23)..(24)..(25): Xaa is A or G or is absent
AXAXELHEELRNSLQEXXXXXXXXXYYVVPLPEHHVRSPQXK

SEQ ID NO: 51206 - protein, 35 aa, Artificial Sequence; identical to SEQ ID NO: 13461
  GFR-binding peptide
  MOD_RES (2)..(34)..(35): Xaa is C or S

SEQ ID NO: 51207 - protein, 35 aa, Artificial Sequence; identical to SEQ ID NO: 13462
  GFR-binding peptide
  MOD_RES (2)..(35): Xaa is C or S
  MOD_RES (13)..(14)..(15)..(16)..(17): Xaa is A or G
  MOD_RES (18)..(19)..(20)..(21): Xaa is A or G or is absent

SEQ ID NO: 51208 - protein, 35 aa, Artificial Sequence; identical to SEQ ID NO: 13463
  GFR-binding peptide
  MOD_RES (1)..(35): Xaa is C or S
  MOD_RES (13)..(14)..(15)..(16)..(17): Xaa is A or G
  MOD_RES (18)..(19)..(20)..(21): Xaa is A or G or is absent

SEQ ID NO: 51209 - protein, 36 aa, Artificial Sequence
  GFR-binding peptide
  MOD_RES (2)..(36): Xaa is C or S
  MOD_RES (14)..(15)..(16)..(17)..(18): Xaa is A or G
  MOD_RES (19)..(20)..(21)..(22): Xaa is A or G or is absent
GXGEVVMEVQVEKXXXXXXXXXVKAMKVSRLETPVX

SEQ ID NO: 51210 - protein, 35 aa, Artificial Sequence
  GFR-binding peptide
  MOD_RES (1)..(35): Xaa is C or S
  MOD_RES (13)..(14)..(15)..(16)..(17): Xaa is A or G
  MOD_RES (18)..(19)..(20)..(21): Xaa is A or G or is absent
XGEVVMEVQVEKXXXXXXXXXVKAMKVSRLETPVX

SEQ ID NO: 51211 - protein, 40 aa, Artificial Sequence; identical to SEQ ID NO: 18587
  GFR-binding peptide
  MOD_RES (1)..(3)..(37): Xaa is C or S

SEQ ID NO: 51212 - protein, 34 aa, Artificial Sequence; identical to SEQ ID NO: 18588
  GFR-binding peptide

SEQ ID NO: 51213 - protein, 34 aa, Artificial Sequence
  GFR-binding peptide
  MOD_RES (1)..(3): Xaa is C or S
XGXGEVVMEVQVEKVVKDYEDVKAMKVSRLETPV

SEQ ID NO: 51214 - protein, 34 aa, Artificial Sequence; identical to SEQ ID NO: 13466
  GFR-binding peptide
  MOD_RES (32)..(33): Xaa is C or S

SEQ ID NO: 51215 - protein, 41 aa, Artificial Sequence; identical to SEQ ID NO: 18595
  GFR-binding peptide
  MOD_RES (1)..(35): Xaa is C or S

SEQ ID NO: 51216 - protein, 39 aa, Artificial Sequence; identical to SEQ ID NO: 18597
  GFR-binding peptide
  MOD_RES (36)..(36): Xaa is C or S
  MOD_RES (12)..(13)..(14)..(15)..(16): Xaa is A or G
  MOD_RES (17)..(18)..(19)..(20): Xaa is A or G or is absent

SEQ ID NO: 51217 - protein, 38 aa, Artificial Sequence
  GFR-binding peptide
  MOD_RES (1)..(3)..(35)..(36): Xaa is C or S
XGXARVVMNVTAKKIVNSSDDIKRVQVPRLQTPAXXPK

SEQ ID NO: 51218 - protein, 41 aa, Artificial Sequence
  GFR-binding peptide
  MOD_RES (2)..(36)..(37): Xaa is C or S
  MOD_RES (14)..(15)..(16)..(17)..(18): Xaa is A or G
  MOD_RES (19)..(20)..(21)..(22): Xaa is A or G or is absent
GXGEVVMESMEGIXXXXXXXXXMIQMTINSLETPVXXAKPI

SEQ ID NO: 51219 - protein, 38 aa, Artificial Sequence; identical to SEQ ID NO: 13472
  GFR-binding peptide
  MOD_RES (1)..(3)..(36)..(37): Xaa is C or S
  MOD_RES (14)..(15)..(16)..(17)..(18): Xaa is A or G
  MOD_RES (19)..(20)..(21)..(22): Xaa is A or G or is absent

SEQ ID NO: 51220 - protein, 37 aa, Artificial Sequence
  GFR-binding peptide
  MOD_RES (33)..(34): Xaa is C or S
  MOD_RES (11)..(12)..(13)..(14)..(15): Xaa is A or G
  MOD_RES (16)..(17)..(18)..(19): Xaa is A or G or is absent
SKVVMVQVEKXXXXXXXXXVKAIKVSRLDQPVXXPSA

SEQ ID NO: 51221 - protein, 38 aa, Artificial Sequence
  GFR-binding peptide
  MOD_RES (2)..(34)..(35): Xaa is C or S
GXSRVVMNSMEGIIVNSSDDMIQVTINSLKTPAXXPKP

SEQ ID NO: 51222 - protein, 38 aa, Artificial Sequence
  GFR-binding peptide
  MOD_RES (2)..(36)..(37): Xaa is C or S
  MOD_RES (14)..(15)..(16)..(17)..(18): Xaa is A or G
  MOD_RES (19)..(20)..(21)..(22): Xaa is A or G or is absent
GXSRVVMNVQVEKXXXXXXXXXVKAVKVSRLKTPAXXP

SEQ ID NO: 51223 - protein, 32 aa, Artificial Sequence
  GFR-binding peptide
  MOD_RES (2)..(2): Xaa is C or S
KXSKVVMVQVEKVKPTRGVVKAIKVSRLDQPV

SEQ ID NO: 51224 - protein, 32 aa, Artificial Sequence
  GFR-binding peptide
  MOD_RES (11)..(12)..(13)..(14)..(15): Xaa is A or G
  MOD_RES (16)..(17)..(18)..(19): Xaa is A or G or is absent
EVVMESMEGIXXXXXXXXXMIQMTINSLETPV

SEQ ID NO: 51225 - protein, 33 aa, Artificial Sequence; identical to SEQ ID NO: 13477
  GFR-binding peptide
  MOD_RES (1)..(3): Xaa is C or S

SEQ ID NO: 51226 - protein, 38 aa, Artificial Sequence; identical to SEQ ID NO: 13479
  GFR-binding peptide
  MOD_RES (32)..(32): Xaa is C or S

SEQ ID NO: 51227 - protein, 35 aa, Artificial Sequence; identical to SEQ ID NO: 18603
  GFR-binding peptide
  MOD_RES (12)..(13)..(14)..(15)..(16): Xaa is A or G
  MOD_RES (17)..(18)..(19)..(20): Xaa is A or G or is absent

SEQ ID NO: 51228 - protein, 43 aa, Artificial Sequence; identical to SEQ ID NO: 18604
  GFR-binding peptide
  MOD_RES (2)..(4)..(41): Xaa is C or S
  MOD_RES (17)..(18)..(19)..(20)..(21): Xaa is A or G
  MOD_RES (22)..(23)..(24)..(25): Xaa is A or G or is absent

SEQ ID NO: 51229 - protein, 35 aa, Artificial Sequence; identical to SEQ ID NO: 13480
  GFR-binding peptide
  MOD_RES (2)..(34)..(35): Xaa is C or S

SEQ ID NO: 51230 - protein, 37 aa, Artificial Sequence
  GFR-binding peptide
  MOD_RES (1)..(32)..(33): Xaa is C or S
XSKVVMVTAKKVKPTRGVIKRIQVPRLDQPVXXPSAS

SEQ ID NO: 51231 - protein, 32 aa, Artificial Sequence; identical to SEQ ID NO: 13481
  GFR-binding peptide
  MOD_RES (32)..(32): Xaa is C or S

SEQ ID NO: 51232 - protein, 36 aa, Artificial Sequence; identical to SEQ ID NO: 13482
  GFR-binding peptide
  MOD_RES (1)..(3)..(36): Xaa is C or S
  MOD_RES (14)..(15)..(16)..(17)..(18): Xaa is A or G
  MOD_RES (19)..(20)..(21)..(22): Xaa is A or G or is absent

SEQ ID NO: 51233 - protein, 39 aa, Artificial Sequence; identical to SEQ ID NO: 13483
  GFR-binding peptide
  MOD_RES (2)..(35)..(36): Xaa is C or S
  MOD_RES (13)..(14)..(15)..(16)..(17): Xaa is A or G
  MOD_RES (18)..(19)..(20)..(21): Xaa is A or G or is absent

SEQ ID NO: 51234 - protein, 39 aa, Artificial Sequence; identical to SEQ ID NO: 13485
  GFR-binding peptide
  MOD_RES (33)..(34): Xaa is C or S
  MOD_RES (11)..(12)..(13)..(14)..(15): Xaa is A or G
  MOD_RES (16)..(17)..(18)..(19): Xaa is A or G or is absent

SEQ ID NO: 51235 - protein, 37 aa, Artificial Sequence; identical to SEQ ID NO: 18610
  GFR-binding peptide
  MOD_RES (2)..(4): Xaa is C or S

SEQ ID NO: 51236 - protein, 39 aa, Artificial Sequence; identical to SEQ ID NO: 13489
  GFR-binding peptide
  MOD_RES (1)..(33)..(34): Xaa is C or S

SEQ ID NO: 51237 - protein, 31 aa, Artificial Sequence
  GFR-binding peptide
  MOD_RES (31)..(31): Xaa is C or S
SRVIMVQVEKVKPKRGVVKAIKVSRLAQPVX

SEQ ID NO: 51238 - protein, 42 aa, Artificial Sequence; identical to SEQ ID NO: 13492
  GFR-binding peptide
  MOD_RES (2)..(36)..(37): Xaa is C or S
  MOD_RES (14)..(15)..(16)..(17)..(18): Xaa is A or G
  MOD_RES (19)..(20)..(21)..(22): Xaa is A or G or is absent

SEQ ID NO: 51239 - protein, 40 aa, Artificial Sequence; identical to SEQ ID NO: 18613
  GFR-binding peptide
  MOD_RES (1)..(3)..(40): Xaa is C or S

SEQ ID NO: 51240 - protein, 40 aa, Artificial Sequence; identical to SEQ ID NO: 13493
  GFR-binding peptide
  MOD_RES (1)..(34)..(35): Xaa is C or S
  MOD_RES (12)..(13)..(14)..(15)..(16): Xaa is A or G
  MOD_RES (17)..(18)..(19)..(20): Xaa is A or G or is absent

SEQ ID NO: 51241 - protein, 34 aa, Artificial Sequence; identical to SEQ ID NO: 38365
  GFR-binding peptide
  MOD_RES (1)..(3)..(34): Xaa is C or S

SEQ ID NO: 51242 - protein, 35 aa, Artificial Sequence
  GFR-binding peptide
  MOD_RES (2)..(34)..(35): Xaa is C or S
GXSRVVMNVQVEKIVNSSDDVKAVKVSRLKTPAXX

SEQ ID NO: 51243 - protein, 42 aa, Artificial Sequence
  GFR-binding peptide
  MOD_RES (2)..(39): Xaa is C or S
AXELHEELRNSLQELKPKKRVYEYYVVPLPEHHVRSPQXKVS

SEQ ID NO: 51244 - protein, 39 aa, Artificial Sequence
  GFR-binding peptide
  MOD_RES (1)..(3): Xaa is C or S
  MOD_RES (16)..(17)..(18)..(19)..(20): Xaa is A or G
  MOD_RES (21)..(22)..(23)..(24): Xaa is A or G or is absent
XAXELHEELRNSLQEXXXXXXXXXYYLVTLPEHHVRSPQ

SEQ ID NO: 51245 - protein, 43 aa, Artificial Sequence
  GFR-binding peptide
  MOD_RES (1)..(3)..(40): Xaa is C or S
XKXALHDELTNSLQEFIPKKRVIEYYLVTLPELQVQTPRXQVN

SEQ ID NO: 51246 - protein, 40 aa, Artificial Sequence
  GFR-binding peptide
  MOD_RES (1)..(3)..(37): Xaa is C or S
  MOD_RES (15)..(16)..(17)..(18)..(19): Xaa is A or G
  MOD_RES (20)..(21)..(22)..(23): Xaa is A or G or is absent
XGXSRVVMNVTAKKXXXXXXXXXIKRVQVPRLKTPAXTPK

SEQ ID NO: 51247 - protein, 37 aa, Artificial Sequence; identical to SEQ ID NO: 13500
  GFR-binding peptide
  MOD_RES (1)..(3)..(36)..(37): Xaa is C or S
  MOD_RES (14)..(15)..(16)..(17)..(18): Xaa is A or G
  MOD_RES (19)..(20)..(21)..(22): Xaa is A or G or is absent

SEQ ID NO: 51248 - protein, 36 aa, Artificial Sequence
  GFR-binding peptide
  MOD_RES (34)..(34): Xaa is C or S
  MOD_RES (12)..(13)..(14)..(15)..(16): Xaa is A or G
  MOD_RES (17)..(18)..(19)..(20): Xaa is A or G or is absent
SRVVMNVQVEKXXXXXXXXXVKAVKVSRLKTPAXTP

SEQ ID NO: 51249 - protein, 36 aa, Artificial Sequence; identical to SEQ ID NO: 13502
  GFR-binding peptide
  MOD_RES (1)..(3)..(35)..(36): Xaa is C or S

SEQ ID NO: 51250 - protein, 36 aa, Artificial Sequence; identical to SEQ ID NO: 13503
  GFR-binding peptide
  MOD_RES (33)..(34): Xaa is C or S
  MOD_RES (11)..(12)..(13)..(14)..(15): Xaa is A or G
  MOD_RES (16)..(17)..(18)..(19): Xaa is A or G or is absent

SEQ ID NO: 51251 - protein, 35 aa, Artificial Sequence
  GFR-binding peptide
  MOD_RES (35)..(35): Xaa is C or S
  MOD_RES (11)..(12)..(13)..(14)..(15): Xaa is A or G
  MOD_RES (16)..(17)..(18)..(19): Xaa is A or G or is absent
HEELRNSLQEXXXXXXXXXYYVVPLPEHHVRSPQX

SEQ ID NO: 51252 - protein, 39 aa, Artificial Sequence
  GFR-binding peptide
  MOD_RES (2)..(4)..(36)..(37): Xaa is C or S
HXGXSRVVMNVTAKKIVNSSDDIKRVQVPRLKTPAXXPK

SEQ ID NO: 51253 - protein, 39 aa, Artificial Sequence
  GFR-binding peptide
  MOD_RES (2)..(39): Xaa is C or S
  MOD_RES (15)..(16)..(17)..(18)..(19): Xaa is A or G
  MOD_RES (20)..(21)..(22)..(23): Xaa is A or G or is absent
AXELHEELRNSLQEXXXXXXXXXYYVVPLPEHHVRSPQX

SEQ ID NO: 51254 - protein, 34 aa, Artificial Sequence
  GFR-binding peptide
  MOD_RES (31)..(32): Xaa is C or S
EVVMDVTAKKVVKENEDIKRMQVPRLETPVXXAK

SEQ ID NO: 51255 - protein, 37 aa, Artificial Sequence
  GFR-binding peptide
  MOD_RES (1)..(34)..(35): Xaa is C or S
  MOD_RES (12)..(13)..(14)..(15)..(16): Xaa is A or G
  MOD_RES (17)..(18)..(19)..(20): Xaa is A or G or is absent
XSRVIMVQVEKXXXXXXXXXVKAIKVSRLAQPVXXPA

SEQ ID NO: 51256 - protein, 40 aa, Artificial Sequence; identical to SEQ ID NO: 18624
  GFR-binding peptide
  MOD_RES (1)..(3)..(37): Xaa is C or S

SEQ ID NO: 51257 - protein, 35 aa, Artificial Sequence
  GFR-binding peptide
  MOD_RES (35)..(35): Xaa is C or S
  MOD_RES (11)..(12)..(13)..(14)..(15): Xaa is A or G
  MOD_RES (16)..(17)..(18)..(19): Xaa is A or G or is absent
HEELRNSLQEXXXXXXXXXYYLVTLPEHHVRSPQX

SEQ ID NO: 51258 - protein, 34 aa, Artificial Sequence; identical to SEQ ID NO: 13510
  GFR-binding peptide
  MOD_RES (1)..(3): Xaa is C or S

SEQ ID NO: 51259 - protein, 41 aa, Artificial Sequence
  GFR-binding peptide
  MOD_RES (1)..(3)..(35)..(36): Xaa is C or S
XGXGEVVMESMEGIVVKDYEDMIQMTINSLETPVXXAKPIS

SEQ ID NO: 51260 - protein, 37 aa, Artificial Sequence; identical to SEQ ID NO: 13512
  GFR-binding peptide
  MOD_RES (2)..(4)..(36): Xaa is C or S

SEQ ID NO: 51261 - protein, 33 aa, Artificial Sequence; identical to SEQ ID NO: 13514
  GFR-binding peptide
  MOD_RES (1)..(32)..(33): Xaa is C or S

SEQ ID NO: 51262 - protein, 37 aa, Artificial Sequence
  GFR-binding peptide
  MOD_RES (33)..(34): Xaa is C or S
  MOD_RES (11)..(12)..(13)..(14)..(15): Xaa is A or G
  MOD_RES (16)..(17)..(18)..(19): Xaa is A or G or is absent
SKVVMVTAKKXXXXXXXXXIKRIQVPRLDQPVXXPSA

SEQ ID NO: 51263 - protein, 39 aa, Artificial Sequence; identical to SEQ ID NO: 18629
  GFR-binding peptide
  MOD_RES (1)..(3): Xaa is C or S

SEQ ID NO: 51264 - protein, 39 aa, Artificial Sequence; identical to SEQ ID NO: 18631
  GFR-binding peptide
  MOD_RES (37)..(37): Xaa is C or S

SEQ ID NO: 51265 - protein, 33 aa, Artificial Sequence
  GFR-binding peptide
  MOD_RES (12)..(13)..(14)..(15)..(16): Xaa is A or G
  MOD_RES (17)..(18)..(19)..(20): Xaa is A or G or is absent
LHDELTNSLQEXXXXXXXXXYYVVPLPELQVQT

SEQ ID NO: 51266 - protein, 34 aa, Artificial Sequence; identical to SEQ ID NO: 18633
  GFR-binding peptide

SEQ ID NO: 51267 - protein, 41 aa, Artificial Sequence; identical to SEQ ID NO: 18639
  GFR-binding peptide
  MOD_RES (2)..(39): Xaa is C or S
  MOD_RES (15)..(16)..(17)..(18)..(19): Xaa is A or G
  MOD_RES (20)..(21)..(22)..(23): Xaa is A or G or is absent

SEQ ID NO: 51268 - protein, 39 aa, Artificial Sequence; identical to SEQ ID NO: 18641
  GFR-binding peptide
  MOD_RES (2)..(4): Xaa is C or S
  MOD_RES (17)..(18)..(19)..(20)..(21): Xaa is A or G
  MOD_RES (22)..(23)..(24)..(25): Xaa is A or G or is absent

SEQ ID NO: 51269 - protein, 35 aa, Artificial Sequence; identical to SEQ ID NO: 13524
  GFR-binding peptide
  MOD_RES (31)..(32): Xaa is C or S

SEQ ID NO: 51270 - protein, 31 aa, Artificial Sequence
  GFR-binding peptide
  MOD_RES (1)..(1): Xaa is C or S
XSRVIMVTAKKVKPKRGVIKRIQVPRLAQPV

SEQ ID NO: 51271 - protein, 35 aa, Artificial Sequence; identical to SEQ ID NO: 18642
  GFR-binding peptide

SEQ ID NO: 51272 - protein, 40 aa, Artificial Sequence; identical to SEQ ID NO: 18643
  GFR-binding peptide
  MOD_RES (36)..(36): Xaa is C or S
  MOD_RES (12)..(13)..(14)..(15)..(16): Xaa is A or G
  MOD_RES (17)..(18)..(19)..(20): Xaa is A or G or is absent

SEQ ID NO: 51273 - protein, 35 aa, Artificial Sequence
  GFR-binding peptide
  MOD_RES (1)..(3)..(34)..(35): Xaa is C or S
XKXSRVIMSMEGIVKPKRGVMIQITINSLAQPVXX

SEQ ID NO: 51274 - protein, 37 aa, Artificial Sequence; identical to SEQ ID NO: 13526
  GFR-binding peptide
  MOD_RES (2)..(4)..(36)..(37): Xaa is C or S

SEQ ID NO: 51275 - protein, 39 aa, Artificial Sequence
  GFR-binding peptide
  MOD_RES (34)..(35): Xaa is C or S
  MOD_RES (12)..(13)..(14)..(15)..(16): Xaa is A or G
  MOD_RES (17)..(18)..(19)..(20): Xaa is A or G or is absent
SRVVMNVTAKKXXXXXXXXXIKRVQVPRLKTPAXXPKPV

SEQ ID NO: 51276 - protein, 41 aa, Artificial Sequence; identical to SEQ ID NO: 18646
  GFR-binding peptide
  MOD_RES (1)..(38): Xaa is C or S
  MOD_RES (14)..(15)..(16)..(17)..(18): Xaa is A or G
  MOD_RES (19)..(20)..(21)..(22): Xaa is A or G or is absent

SEQ ID NO: 51277 - protein, 36 aa, Artificial Sequence
  GFR-binding peptide
  MOD_RES (34)..(35): Xaa is C or S
  MOD_RES (12)..(13)..(14)..(15)..(16): Xaa is A or G
  MOD_RES (17)..(18)..(19)..(20): Xaa is A or G or is absent
GEVVMEVTAKKXXXXXXXXXIKRMQVPRLETPVXXA

SEQ ID NO: 51278 - protein, 40 aa, Artificial Sequence
  GFR-binding peptide
  MOD_RES (34)..(35): Xaa is C or S
  MOD_RES (12)..(13)..(14)..(15)..(16): Xaa is A or G
  MOD_RES (17)..(18)..(19)..(20): Xaa is A or G or is absent
GEVVMDSMEGIXXXXXXXXXMIQMTINSLETPVXXAKPIK

SEQ ID NO: 51279 - protein, 35 aa, Artificial Sequence; identical to SEQ ID NO: 13529
  GFR-binding peptide
  MOD_RES (2)..(34)..(35): Xaa is C or S

SEQ ID NO: 51280 - protein, 41 aa, Artificial Sequence; identical to SEQ ID NO: 18647
  GFR-binding peptide
  MOD_RES (2)..(4)..(41): Xaa is C or S
  MOD_RES (17)..(18)..(19)..(20)..(21): Xaa is A or G
  MOD_RES (22)..(23)..(24)..(25): Xaa is A or G or is absent

SEQ ID NO: 51281 - protein, 36 aa, Artificial Sequence; identical to SEQ ID NO: 13532
  GFR-binding peptide
  MOD_RES (33)..(33): Xaa is C or S
  MOD_RES (11)..(12)..(13)..(14)..(15): Xaa is A or G
  MOD_RES (16)..(17)..(18)..(19): Xaa is A or G or is absent

SEQ ID NO: 51282 - protein, 33 aa, Artificial Sequence
  GFR-binding peptide
  MOD_RES (31)..(32): Xaa is C or S
SKVIMVQVEKIKPTKGIVKAIKVSRLDQSVXXP

SEQ ID NO: 51283 - protein, 38 aa, Artificial Sequence
  GFR-binding peptide
  MOD_RES (2)..(33)..(34): Xaa is C or S
KXSKVIMSMEGIIKPTKGIMIQITINSLDQSVXXPSAS

SEQ ID NO: 51284 - protein, 39 aa, Artificial Sequence
  GFR-binding peptide
  MOD_RES (1)..(3)..(37)..(38): Xaa is C or S
  MOD_RES (15)..(16)..(17)..(18)..(19): Xaa is A or G
  MOD_RES (20)..(21)..(22)..(23): Xaa is A or G or is absent
XGXGEVVMEVTAKKXXXXXXXXXIKRMQVPRLETPVXXA

SEQ ID NO: 51285 - protein, 33 aa, Artificial Sequence
  GFR-binding peptide
  MOD_RES (1)..(1): Xaa is C or S
  MOD_RES (12)..(13)..(14)..(15)..(16): Xaa is A or G
  MOD_RES (17)..(18)..(19)..(20): Xaa is A or G or is absent
XSRVIMVQVEKXXXXXXXXXVKAIKVSRLAQPV

SEQ ID NO: 51286 - protein, 31 aa, Artificial Sequence
  GFR-binding peptide
  MOD_RES (31)..(31): Xaa is C or S
EVVMDVTAKKVVKENEDIKRMQVPRLETPVX

SEQ ID NO: 51287 - protein, 39 aa, Artificial Sequence
  GFR-binding peptide
  MOD_RES (36)..(36): Xaa is C or S
  MOD_RES (12)..(13)..(14)..(15)..(16): Xaa is A or G
  MOD_RES (17)..(18)..(19)..(20): Xaa is A or G or is absent
LHDELTNSLQEXXXXXXXXXYYVVPLPELQVQTPRXQVN

SEQ ID NO: 51288 - protein, 36 aa, Artificial Sequence
  GFR-binding peptide
  MOD_RES (1)..(3)..(36): Xaa is C or S
  MOD_RES (14)..(15)..(16)..(17)..(18): Xaa is A or G
  MOD_RES (19)..(20)..(21)..(22): Xaa is A or G or is absent
XKXSKVIMVTAKKXXXXXXXXXIKRIQVPRLDQSVX

SEQ ID NO: 51289 - protein, 39 aa, Artificial Sequence; identical to SEQ ID NO: 18653
  GFR-binding peptide
  MOD_RES (36)..(36): Xaa is C or S

SEQ ID NO: 51290 - protein, 34 aa, Artificial Sequence
  GFR-binding peptide
  MOD_RES (32)..(32): Xaa is C or S
SRVVMNVQVEKIVNSSDDVKAVKVSRLKTPAXTP

SEQ ID NO: 51291 - protein, 37 aa, Artificial Sequence
  GFR-binding peptide
  MOD_RES (2)..(4)..(36)..(37): Xaa is C or S
RXGXGEVVMESMEGIVVKDYEDMIQMTINSLETPVXX

SEQ ID NO: 51292 - protein, 40 aa, Artificial Sequence; identical to SEQ ID NO: 18655
  GFR-binding peptide
  MOD_RES (36)..(36): Xaa is C or S

SEQ ID NO: 51293 - protein, 36 aa, Artificial Sequence; identical to SEQ ID NO: 13538
  GFR-binding peptide
  MOD_RES (34)..(35): Xaa is C or S
  MOD_RES (12)..(13)..(14)..(15)..(16): Xaa is A or G
  MOD_RES (17)..(18)..(19)..(20): Xaa is A or G or is absent

SEQ ID NO: 51294 - protein, 38 aa, Artificial Sequence
  GFR-binding peptide
  MOD_RES (2)..(4)..(38): Xaa is C or S
  MOD_RES (16)..(17)..(18)..(19)..(20): Xaa is A or G
  MOD_RES (21)..(22)..(23)..(24): Xaa is A or G or is absent
HXGXSRVVMNVTAKKXXXXXXXXXIKRVQVPRLKTPAX

SEQ ID NO: 51295 - protein, 37 aa, Artificial Sequence; identical to SEQ ID NO: 13541
  GFR-binding peptide
  MOD_RES (1)..(35): Xaa is C or S
  MOD_RES (13)..(14)..(15)..(16)..(17): Xaa is A or G
  MOD_RES (18)..(19)..(20)..(21): Xaa is A or G or is absent

SEQ ID NO: 51296 - protein, 36 aa, Artificial Sequence
  GFR-binding peptide
  MOD_RES (1)..(3): Xaa is C or S
  MOD_RES (15)..(16)..(17)..(18)..(19): Xaa is A or G
  MOD_RES (20)..(21)..(22)..(23): Xaa is A or G or is absent
XEXKNHQLFNSLQEXXXXXXXXXYYVMPLPEEETPV

SEQ ID NO: 51297 - protein, 41 aa, Artificial Sequence; identical to SEQ ID NO: 13542
  GFR-binding peptide
  MOD_RES (2)..(4)..(37)..(38): Xaa is C or S
  MOD_RES (15)..(16)..(17)..(18)..(19): Xaa is A or G
  MOD_RES (20)..(21)..(22)..(23): Xaa is A or G or is absent

SEQ ID NO: 51298 - protein, 40 aa, Artificial Sequence
  GFR-binding peptide
  MOD_RES (1)..(3)..(36)..(37): Xaa is C or S
  MOD_RES (14)..(15)..(16)..(17)..(18): Xaa is A or G
  MOD_RES (19)..(20)..(21)..(22): Xaa is A or G or is absent
XKXSKVIMSMEGIXXXXXXXXXMIQITINSLDQSVXXPSA

SEQ ID NO: 51299 - protein, 34 aa, Artificial Sequence
  GFR-binding peptide
ELHEELRNSLQELKPKKRVYEYYLVTLPEHHVRS

SEQ ID NO: 51300 - protein, 36 aa, Artificial Sequence
  GFR-binding peptide
  MOD_RES (32)..(33): Xaa is C or S
ARVVMNVQVEKIVNSSDDVKAVKVSRLQTPAXXPKP

SEQ ID NO: 51301 - protein, 39 aa, Artificial Sequence
  GFR-binding peptide
  MOD_RES (2)..(4)..(37)..(38): Xaa is C or S
  MOD_RES (15)..(16)..(17)..(18)..(19): Xaa is A or G
  MOD_RES (20)..(21)..(22)..(23): Xaa is A or G or is absent
SXKXSRVIMSMEGIXXXXXXXXXMIQITINSLAQPVXXP

SEQ ID NO: 51302 - protein, 35 aa, Artificial Sequence
  GFR-binding peptide
  MOD_RES (32)..(33): Xaa is C or S
SRVVMNSMEGIIVNSSDDMIQVTINSLKTPAXXPK

SEQ ID NO: 51303 - protein, 37 aa, Artificial Sequence
  GFR-binding peptide
  MOD_RES (1)..(32)..(33): Xaa is C or S
XSKVIMVTAKKIKPTKGIIKRIQVPRLDQSVXXPSAS

SEQ ID NO: 51304 - protein, 36 aa, Artificial Sequence; identical to SEQ ID NO: 13546
  GFR-binding peptide
  MOD_RES (33)..(34): Xaa is C or S
  MOD_RES (11)..(12)..(13)..(14)..(15): Xaa is A or G
  MOD_RES (16)..(17)..(18)..(19): Xaa is A or G or is absent

SEQ ID NO: 51305 - protein, 37 aa, Artificial Sequence; identical to SEQ ID NO: 18660
  GFR-binding peptide
  MOD_RES (37)..(37): Xaa is C or S
  MOD_RES (13)..(14)..(15)..(16)..(17): Xaa is A or G
  MOD_RES (18)..(19)..(20)..(21): Xaa is A or G or is absent

SEQ ID NO: 51306 - protein, 39 aa, Artificial Sequence
  GFR-binding peptide
  MOD_RES (1)..(3)..(35)..(36): Xaa is C or S
XGXSRVVMNVTAKKIVNSSDDIKRVQVPRLKTPAXXPKP

SEQ ID NO: 51307 - protein, 40 aa, Artificial Sequence; identical to SEQ ID NO: 18665
  GFR-binding peptide
  MOD_RES (1)..(3)..(40): Xaa is C or S
  MOD_RES (16)..(17)..(18)..(19)..(20): Xaa is A or G
  MOD_RES (21)..(22)..(23)..(24): Xaa is A or G or is absent

SEQ ID NO: 51308 - protein, 39 aa, Artificial Sequence; identical to SEQ ID NO: 13550
  GFR-binding peptide
  MOD_RES (1)..(33)..(34): Xaa is C or S

SEQ ID NO: 51309 - protein, 33 aa, Artificial Sequence
  GFR-binding peptide
  MOD_RES (32)..(33): Xaa is C or S
SRVVMNVTAKKIVNSSDDIKRVQVPRLKTPAXX

SEQ ID NO: 51310 - protein, 37 aa, Artificial Sequence; identical to SEQ ID NO: 18667
  GFR-binding peptide
  MOD_RES (2)..(4): Xaa is C or S
  MOD_RES (16)..(17)..(18)..(19)..(20): Xaa is A or G
  MOD_RES (21)..(22)..(23)..(24): Xaa is A or G or is absent

SEQ ID NO: 51311 - protein, 38 aa, Artificial Sequence
  GFR-binding peptide
  MOD_RES (2)..(33)..(34): Xaa is C or S
KXSKVIMVQVEKIKPTKGIVKAIKVSRLDQSVXXPSAS

SEQ ID NO: 51312 - protein, 34 aa, Artificial Sequence
  GFR-binding peptide
  MOD_RES (1)..(32)..(33): Xaa is C or S
XSRVIMVQVEKVKPKRGVVKAIKVSRLAQPVXXP

SEQ ID NO: 51313 - protein, 37 aa, Artificial Sequence; identical to SEQ ID NO: 18670
  GFR-binding peptide
  MOD_RES (1)..(3): Xaa is C or S
  MOD_RES (16)..(17)..(18)..(19)..(20): Xaa is A or G
  MOD_RES (21)..(22)..(23)..(24): Xaa is A or G or is absent

SEQ ID NO: 51314 - protein, 37 aa, Artificial Sequence
  GFR-binding peptide
  MOD_RES (32)..(33): Xaa is C or S
GEVVMESMEGIVVKDYEDMIQMTINSLETPVXXAKPI

SEQ ID NO: 51315 - protein, 37 aa, Artificial Sequence
  GFR-binding peptide
  MOD_RES (1)..(3)..(34)..(35): Xaa is C or S
XKXSKVVMVQVEKVKPTRGVVKAIKVSRLDQPVXXPS

SEQ ID NO: 51316 - protein, 39 aa, Artificial Sequence; identical to SEQ ID NO: 18672
  GFR-binding peptide
  MOD_RES (35)..(35): Xaa is C or S
  MOD_RES (11)..(12)..(13)..(14)..(15): Xaa is A or G
  MOD_RES (16)..(17)..(18)..(19): Xaa is A or G or is absent

SEQ ID NO: 51317 - protein, 38 aa, Artificial Sequence; identical to SEQ ID NO: 13555
  GFR-binding peptide
  MOD_RES (2)..(36)..(37): Xaa is C or S
  MOD_RES (14)..(15)..(16)..(17)..(18): Xaa is A or G
  MOD_RES (19)..(20)..(21)..(22): Xaa is A or G or is absent

SEQ ID NO: 51318 - protein, 37 aa, Artificial Sequence
  GFR-binding peptide
  MOD_RES (2)..(34)..(35): Xaa is C or S
GXGEVVMDSMEGIVVKENEDMIQMTINSLETPVXXAK

SEQ ID NO: 51319 - protein, 39 aa, Artificial Sequence
  GFR-binding peptide
  MOD_RES (2)..(34): Xaa is C or S
GXSRVVMNSMEGIIVNSSDDMIQVTINSLKTPAXTPKTV

SEQ ID NO: 51320 - protein, 37 aa, Artificial Sequence
  GFR-binding peptide
  MOD_RES (1)..(3)..(34)..(35): Xaa is C or S
XKXSKVIMVQVEKIKPTKGIVKAIKVSRLDQSVXXPS

SEQ ID NO: 51321 - protein, 39 aa, Artificial Sequence; identical to SEQ ID NO: 18679
  GFR-binding peptide
  MOD_RES (1)..(35): Xaa is C or S

SEQ ID NO: 51322 - protein, 32 aa, Artificial Sequence; identical to SEQ ID NO: 13558
  GFR-binding peptide
  MOD_RES (32)..(32): Xaa is C or S

SEQ ID NO: 51323 - protein, 35 aa, Artificial Sequence
  GFR-binding peptide
  MOD_RES (2)..(2): Xaa is C or S
EXKNHQLFNSLQEHQGQHPKIRYYVMPLPEEETPV

SEQ ID NO: 51324 - protein, 39 aa, Artificial Sequence; identical to SEQ ID NO: 18681
  GFR-binding peptide
  MOD_RES (2)..(36): Xaa is C or S
  MOD_RES (14)..(15)..(16)..(17)..(18): Xaa is A or G
  MOD_RES (19)..(20)..(21)..(22): Xaa is A or G or is absent

SEQ ID NO: 51325 - protein, 35 aa, Artificial Sequence
  GFR-binding peptide
  MOD_RES (2)..(33)..(34): Xaa is C or S
KXSKVIMVTAKKIKPTKGIIKRIQVPRLDQSVXXP

SEQ ID NO: 51326 - protein, 41 aa, Artificial Sequence
  GFR-binding peptide
  MOD_RES (1)..(35)..(36): Xaa is C or S
  MOD_RES (13)..(14)..(15)..(16)..(17): Xaa is A or G
  MOD_RES (18)..(19)..(20)..(21): Xaa is A or G or is absent
XSRVVMNVTAKKXXXXXXXXXIKRVQVPRLKTPAXXPKPVY

SEQ ID NO: 51327 - protein, 34 aa, Artificial Sequence
  GFR-binding peptide
  MOD_RES (31)..(32): Xaa is C or S
SKVIMSMEGIIKPTKGIMIQITINSLDQSVXXPS

SEQ ID NO: 51328 - protein, 38 aa, Artificial Sequence
  GFR-binding peptide
  MOD_RES (1)..(32)..(33): Xaa is C or S
XSKVIMVTAKKIKPTKGIIKRIQVPRLDQSVXXPSASA

SEQ ID NO: 51329 - protein, 43 aa, Artificial Sequence
  GFR-binding peptide
  MOD_RES (2)..(4)..(37)..(38): Xaa is C or S
  MOD_RES (15)..(16)..(17)..(18)..(19): Xaa is A or G
  MOD_RES (20)..(21)..(22)..(23): Xaa is A or G or is absent
SXKXSKVVMVQVEKXXXXXXXXXVKAIKVSRLDQPVXXPSASA

SEQ ID NO: 51330 - protein, 41 aa, Artificial Sequence; identical to SEQ ID NO: 18684
  GFR-binding peptide
  MOD_RES (2)..(36): Xaa is C or S
  MOD_RES (14)..(15)..(16)..(17)..(18): Xaa is A or G
  MOD_RES (19)..(20)..(21)..(22): Xaa is A or G or is absent

SEQ ID NO: 51331 - protein, 34 aa, Artificial Sequence; identical to SEQ ID NO: 13562
  GFR-binding peptide
  MOD_RES (31)..(32): Xaa is C or S

SEQ ID NO: 51332 - protein, 38 aa, Artificial Sequence
  GFR-binding peptide
  MOD_RES (2)..(4)..(36)..(37): Xaa is C or S
RXGXGEVVMEVQVEKVVKDYEDVKAMKVSRLETPVXXA

SEQ ID NO: 51333 - protein, 36 aa, Artificial Sequence; identical to SEQ ID NO: 18687
  GFR-binding peptide
  MOD_RES (36)..(36): Xaa is C or S
  MOD_RES (12)..(13)..(14)..(15)..(16): Xaa is A or G
  MOD_RES (17)..(18)..(19)..(20): Xaa is A or G or is absent

SEQ ID NO: 51334 - protein, 39 aa, Artificial Sequence
  GFR-binding peptide
  MOD_RES (2)..(4)..(36): Xaa is C or S
HXGXSRVVMNVQVEKIVNSSDDVKAVKVSRLKTPAXTPK

SEQ ID NO: 51335 - protein, 39 aa, Artificial Sequence
  GFR-binding peptide
  MOD_RES (1)..(3)..(36)..(37): Xaa is C or S
  MOD_RES (14)..(15)..(16)..(17)..(18): Xaa is A or G
  MOD_RES (19)..(20)..(21)..(22): Xaa is A or G or is absent
XKXSRVIMSMEGIXXXXXXXXXMIQITINSLAQPVXXPA

SEQ ID NO: 51336 - protein, 37 aa, Artificial Sequence; identical to SEQ ID NO: 13563
  GFR-binding peptide
  MOD_RES (2)..(4)..(36)..(37): Xaa is C or S

SEQ ID NO: 51337 - protein, 37 aa, Artificial Sequence
  GFR-binding peptide
  MOD_RES (2)..(33)..(34): Xaa is C or S
KXSRVIMVQVEKVKPKRGVVKAIKVSRLAQPVXXPAA

SEQ ID NO: 51338 - protein, 31 aa, Artificial Sequence
  GFR-binding peptide
GEVVMEVTAKKVVKDYEDIKRMQVPRLETPV

SEQ ID NO: 51339 - protein, 38 aa, Artificial Sequence
  GFR-binding peptide
  MOD_RES (2)..(34): Xaa is C or S
GXSRVVMNVTAKKIVNSSDDIKRVQVPRLKTPAXTPKT

SEQ ID NO: 51340 - protein, 36 aa, Artificial Sequence
  GFR-binding peptide
  MOD_RES (31)..(32): Xaa is C or S
RVVMNSMEGIIVNSSDDMIQVTINSLQTPAXXPKPV

SEQ ID NO: 51341 - protein, 38 aa, Artificial Sequence
  GFR-binding peptide
  MOD_RES (2)..(4)..(37)..(38): Xaa is C or S
  MOD_RES (15)..(16)..(17)..(18)..(19): Xaa is A or G
  MOD_RES (20)..(21)..(22)..(23): Xaa is A or G or is absent
SXKXSRVIMVTAKKXXXXXXXXXIKRIQVPRLAQPVXX

SEQ ID NO: 51342 - protein, 39 aa, Artificial Sequence
  GFR-binding peptide
  MOD_RES (2)..(35)..(36): Xaa is C or S
  MOD_RES (13)..(14)..(15)..(16)..(17): Xaa is A or G
  MOD_RES (18)..(19)..(20)..(21): Xaa is A or G or is absent
KXSKVIMSMEGIXXXXXXXXXMIQITINSLDQSVXXPSA

SEQ ID NO: 51343 - protein, 39 aa, Artificial Sequence
  GFR-binding peptide
  MOD_RES (34)..(34): Xaa is C or S
KNHQLFNSLQEHQGQHPKIRYYLMTLPEEETPVXELGED

SEQ ID NO: 51344 - protein, 40 aa, Artificial Sequence
  GFR-binding peptide
  MOD_RES (1)..(3)..(37): Xaa is C or S
  MOD_RES (15)..(16)..(17)..(18)..(19): Xaa is A or G
  MOD_RES (20)..(21)..(22)..(23): Xaa is A or G or is absent
XGXSRVVMNSMEGIXXXXXXXXXMIQVTINSLKTPAXTPK

SEQ ID NO: 51345 - protein, 38 aa, Artificial Sequence; identical to SEQ ID NO: 13569
  GFR-binding peptide
  MOD_RES (34)..(34): Xaa is C or S
  MOD_RES (12)..(13)..(14)..(15)..(16): Xaa is A or G
  MOD_RES (17)..(18)..(19)..(20): Xaa is A or G or is absent

SEQ ID NO: 51346 - protein, 41 aa, Artificial Sequence; identical to SEQ ID NO: 18695
  GFR-binding peptide
  MOD_RES (1)..(35): Xaa is C or S
  MOD_RES (13)..(14)..(15)..(16)..(17): Xaa is A or G
  MOD_RES (18)..(19)..(20)..(21): Xaa is A or G or is absent

SEQ ID NO: 51347 - protein, 32 aa, Artificial Sequence
  GFR-binding peptide
  MOD_RES (31)..(32): Xaa is C or S
EVVMDVTAKKVVKENEDIKRMQVPRLETPVXX

SEQ ID NO: 51348 - protein, 43 aa, Artificial Sequence; identical to SEQ ID NO: 18696
  GFR-binding peptide
  MOD_RES (2)..(39): Xaa is C or S

SEQ ID NO: 51349 - protein, 40 aa, Artificial Sequence
  GFR-binding peptide
  MOD_RES (2)..(4)..(37)..(38): Xaa is C or S
  MOD_RES (15)..(16)..(17)..(18)..(19): Xaa is A or G
  MOD_RES (20)..(21)..(22)..(23): Xaa is A or G or is absent
SXKXSRVIMVTAKKXXXXXXXXXIKRIQVPRLAQPVXXPA

SEQ ID NO: 51350 - protein, 38 aa, Artificial Sequence; identical to SEQ ID NO: 13570
  GFR-binding peptide
  MOD_RES (1)..(3)..(35)..(36): Xaa is C or S

SEQ ID NO: 51351 - protein, 39 aa, Artificial Sequence; identical to SEQ ID NO: 18699
  GFR-binding peptide
  MOD_RES (1)..(35): Xaa is C or S
  MOD_RES (13)..(14)..(15)..(16)..(17): Xaa is A or G
  MOD_RES (18)..(19)..(20)..(21): Xaa is A or G or is absent

SEQ ID NO: 51352 - protein, 38 aa, Artificial Sequence; identical to SEQ ID NO: 18700
  GFR-binding peptide
  MOD_RES (35)..(35): Xaa is C or S
  MOD_RES (11)..(12)..(13)..(14)..(15): Xaa is A or G
  MOD_RES (16)..(17)..(18)..(19): Xaa is A or G or is absent

SEQ ID NO: 51353 - protein, 38 aa, Artificial Sequence; identical to SEQ ID NO: 18702
  GFR-binding peptide
  MOD_RES (2)..(2): Xaa is C or S
  MOD_RES (15)..(16)..(17)..(18)..(19): Xaa is A or G
  MOD_RES (20)..(21)..(22)..(23): Xaa is A or G or is absent

SEQ ID NO: 51354 - protein, 41 aa, Artificial Sequence
  GFR-binding peptide
  MOD_RES (3)..(40): Xaa is C or S
VKXQPSRVHHEPLTVLYYEYVRKKPKLEQLSNRLEEHLEXA

SEQ ID NO: 51355 - protein, 34 aa, Artificial Sequence
  GFR-binding peptide
  MOD_RES (1)..(2)..(34): Xaa is C or S
XXVPTELRSVKMAKVDEYDKVVKEVQVEMVVEGX

SEQ ID NO: 51356 - protein, 36 aa, Artificial Sequence; identical to SEQ ID NO: 13576
  GFR-binding peptide
  MOD_RES (1)..(33)..(35): Xaa is C or S

SEQ ID NO: 51357 - protein, 35 aa, Artificial Sequence
  GFR-binding peptide
  MOD_RES (1)..(2)..(34): Xaa is C or S
XXVPTELRSVKMAKVDEYDKVVKEVQVEMVVEGXG

SEQ ID NO: 51358 - protein, 36 aa, Artificial Sequence
  GFR-binding peptide
  MOD_RES (2)..(2): Xaa is C or S
  MOD_RES (18)..(19)..(20)..(21)..(22): Xaa is A or G
  MOD_RES (23)..(24)..(25)..(26): Xaa is A or G or is absent
QXRPTQVQLEPLTVLYYXXXXXXXXXEQLSNTLEDH

SEQ ID NO: 51359 - protein, 39 aa, Artificial Sequence
  GFR-binding peptide
  MOD_RES (4)..(5)..(37)..(39): Xaa is C or S
PKPXXAPTKLRSVKVAKVDDSSNVIKEVQVNMVVRSXGX

SEQ ID NO: 51360 - protein, 34 aa, Artificial Sequence
  GFR-binding peptide
  MOD_RES (1)..(32)..(34): Xaa is C or S
XVPQALRSVKIAKVVGRKPKVKEVQVMIVRSXKX

SEQ ID NO: 51361 - protein, 35 aa, Artificial Sequence; identical to SEQ ID NO: 13580
  GFR-binding peptide
  MOD_RES (2)..(3)..(35): Xaa is C or S

SEQ ID NO: 51362 - protein, 34 aa, Artificial Sequence; identical to SEQ ID NO: 13581
  GFR-binding peptide
  MOD_RES (1)..(33): Xaa is C or S

SEQ ID NO: 51363 - protein, 38 aa, Artificial Sequence
  GFR-binding peptide
  MOD_RES (1)..(35)..(37): Xaa is C or S
  MOD_RES (15)..(16)..(17)..(18)..(19): Xaa is A or G
  MOD_RES (20)..(21)..(22)..(23): Xaa is A or G or is absent
XVPTEEEPLTMLYYXXXXXXXXXEQLSNFLQHNKXEXR

SEQ ID NO: 51364 - protein, 38 aa, Artificial Sequence
  GFR-binding peptide
  MOD_RES (3)..(35)..(37): Xaa is C or S
PTXAPTKLSNITVQIMDDSSNVIIGEMSNMVVRSXGXH

SEQ ID NO: 51365 - protein, 40 aa, Artificial Sequence; identical to SEQ ID NO: 13582
  GFR-binding peptide
  MOD_RES (6)..(7)..(39): Xaa is C or S

SEQ ID NO: 51366 - protein, 38 aa, Artificial Sequence; identical to SEQ ID NO: 18710
  GFR-binding peptide
  MOD_RES (36)..(38): Xaa is C or S
  MOD_RES (15)..(16)..(17)..(18)..(19): Xaa is A or G
  MOD_RES (20)..(21)..(22)..(23): Xaa is A or G or is absent

SEQ ID NO: 51367 - protein, 41 aa, Artificial Sequence
  GFR-binding peptide
  MOD_RES (4)..(38)..(40): Xaa is C or S
GLEXVPTEEEPLPMVYYRIKPHQGQHEQLSNFLQHNKXEXR

SEQ ID NO: 51368 - protein, 42 aa, Artificial Sequence
  GFR-binding peptide
  MOD_RES (5)..(6)..(40)..(42): Xaa is C or S
  MOD_RES (20)..(21)..(22)..(23)..(24): Xaa is A or G
  MOD_RES (25)..(26)..(27)..(28): Xaa is A or G or is absent
VPKPXXAPTQLRSVKVAKVXXXXXXXXXKEVQVNMVVRAXGX

SEQ ID NO: 51369 - protein, 36 aa, Artificial Sequence; identical to SEQ ID NO: 13586
  GFR-binding peptide
  MOD_RES (1)..(2)..(36): Xaa is C or S
  MOD_RES (16)..(17)..(18)..(19)..(20): Xaa is A or G
  MOD_RES (21)..(22)..(23)..(24): Xaa is A or G or is absent

SEQ ID NO: 51370 - protein, 36 aa, Artificial Sequence
  GFR-binding peptide
  MOD_RES (33)..(35): Xaa is C or S
  MOD_RES (14)..(15)..(16)..(17)..(18): Xaa is A or G
  MOD_RES (19)..(20)..(21)..(22): Xaa is A or G or is absent
VSQDLRPVQIRKIXXXXXXXXXKKATVMIVKSXKXS

SEQ ID NO: 51371 - protein, 39 aa, Artificial Sequence; identical to SEQ ID NO: 18712
  GFR-binding peptide
  MOD_RES (4)..(38): Xaa is C or S
  MOD_RES (18)..(19)..(20)..(21)..(22): Xaa is A or G
  MOD_RES (23)..(24)..(25)..(26): Xaa is A or G or is absent

SEQ ID NO: 51372 - protein, 38 aa, Artificial Sequence
  GFR-binding peptide
  MOD_RES (2)..(36)..(38): Xaa is C or S
EXVPTEEEPLPMVYYRIKPHQGQHEQLSNFLQHNKXEX

SEQ ID NO: 51373 - protein, 41 aa, Artificial Sequence; identical to SEQ ID NO: 13587
  GFR-binding peptide
  MOD_RES (4)..(5)..(39)..(41): Xaa is C or S
  MOD_RES (19)..(20)..(21)..(22)..(23): Xaa is A or G
  MOD_RES (24)..(25)..(26)..(27): Xaa is A or G or is absent

SEQ ID NO: 51374 - protein, 39 aa, Artificial Sequence
  GFR-binding peptide
  MOD_RES (5)..(39): Xaa is C or S
  MOD_RES (19)..(20)..(21)..(22)..(23): Xaa is A or G
  MOD_RES (24)..(25)..(26)..(27): Xaa is A or G or is absent
TKPTXAPTKLSNITVQIMXXXXXXXXXIGEMSNMVVRSX

SEQ ID NO: 51375 - protein, 40 aa, Artificial Sequence
  GFR-binding peptide
  MOD_RES (6)..(7)..(39): Xaa is C or S
SIPKAXXVPTELRPVQMRKIDEYDKVVKKATVEMVVEGXG

SEQ ID NO: 51376 - protein, 33 aa, Artificial Sequence
  GFR-binding peptide
  MOD_RES (1)..(1): Xaa is C or S
  MOD_RES (15)..(16)..(17)..(18)..(19): Xaa is A or G
  MOD_RES (20)..(21)..(22)..(23): Xaa is A or G or is absent
XAPTQLSNITVQIMXXXXXXXXXIGEMSNMVVR

SEQ ID NO: 51377 - protein, 36 aa, Artificial Sequence
  GFR-binding peptide
  MOD_RES (3)..(4)..(35): Xaa is C or S
SPXXVSQDLRSVKIAKVIGKTPKIKEVQVMIVKSXK
